United States Patent Application Publication US 2018/0126003 A1 - sequence listing, part 40

SEQ ID NO: 66631 - DNA, 732 bp, Artificial Sequence
  derived and/or modified sequence
atggaccagtactgcatcctgggcagaatcggcgagggcgcccacggcatcgtgttcaaggccaagcacgtggagaccggcgagatcgtggccctgaagaaggtggccctgagaagactggaggacggcttccccaaccaggccctgagagagatcaaggccctgcaggagatggaggacaaccagtacgtggtgcagctgaaggccgtgttcccccacggcggcggcttcgtgctggccttcgagttcatgctgagcgacctggccgaggtggtgagacacgcccagagacccctggcccaggcccaggtgaagagctacctgcagatgctgctgaagggcgtggccttctgccacgccaacaacatcgtgcacagagacctgaagcccgccaacctgctgatcagcgccagcggccagctgaagatcgccgacttcggcctggccagagtgttcagccccgacggcagcagactgtacacccaccaggtggccaccagaagcagcctgagctgcagaaccaccaccagaagccccctgagaagcagatgcccctgcccctggagaagatgctgcctgaccagcctgcccagacactggatctgctgggtgaacagcttcagcaccctgctgaccagcgccagccagctgcccagactgagcagcatcagcaccagcagccagctgccctgcctgcccatccacctgagctgcagattcctgagcgtgtag

SEQ ID NO: 66632 - DNA, 732 bp, Artificial Sequence
  derived and/or modified sequence
atggatcagtactgcattcttgggagaattggcgagggtgctcacggtatcgtgttcaaagctaagcacgtcgaaacgggggaaatagtcgcacttaaaaaggtcgccctccgccgattagaagacggattcccaaatcaggctcttcgcgaaatcaaagccctgcaggagatggaggataatcagtacgtcgtgcagctgaaagcggtgttcccccatggggggggatttgtccttgctttcgagtttatgcttagcgatctggccgaggttgtccggcatgctcagcgacctttggcccaggcacaagtaaagtcttatcttcagatgttgctgaagggtgtggctttttgtcacgccaacaacatagttcacagggacttgaagccagcaaaccttcttataagtgcgtcaggacagctcaaaattgcagatttcggacttgcgcgagttttcagccccgacgggagtcggttgtatacccaccaagtcgccacccgctcgtctctctcttgtcggacgaccacacgcagtcctctccgaagccgatgtccttgtccttggcggcggtgttgcctgacttcactcccacggcactggatatgttgggtgaactcattcagcaccctcctcactagcgcgtctcaacttcctcggctgagctcgatcagtacaagctctcagctaccctgtctgccaatacacctctcttgtcgctttctctccgtttag

SEQ ID NO: 66633 - DNA, 732 bp, Artificial Sequence
  derived and/or modified sequence
atggaccagtactgcatcctgggccgcatcggggagggcgcccatggaattgtgttcaaggccaagcacgtggagaccggggagatcgtggccctgaagaaggtggccctgcggcggctggaggatggcttccccaaccaggccctgcgggagatcaaggccctgcaggagatggaggacaaccagtatgtggtgcagctgaaggctgtgttcccccatggaggcggctttgtgctggcctttgagttcatgctgagtgacctggccgaggtggtgagacatgcccagaggcccctggcccaggcccaggtgaagagctacctgcagatgctgctgaagggcgtggccttctgccacgccaacaacatcgtgcaccgggacctgaagccagccaacctgctgatcagcgccagcggccagctgaagattgctgactttggcctggcccgggtcttctccccagatggcagccggctgtacacccaccaggtggccaccaggagcagcctgagctgcaggaccaccaccaggagccccctgcggagccgctgcccctgcccctggaggcgctgctgcctgaccagcctgcccaggcactggatctgctgggtgaacagcttcagcaccctgctgaccagcgccagccagctgccccggctgagcagcatcagcaccagcagccagctgccctgcctgcccatccacctgagctgccgcttcctgtctgtgtag

SEQ ID NO: 66634 - DNA, 732 bp, Artificial Sequence
  derived and/or modified sequence
atggaccagtactgcatcctgggccggatcggcgagggcgcccacggaatagtctttaaagccaaacacgtggagaccggggagatcgtcgcattaaaaaaggttgccttaaggaggctggaagatggcttcccgaaccaggcccttcgcgagatcaaggctttgcaggaaatggaagacaaccagtacgtggtccagttgaaggccgtcttcccacacggtggaggcttcgtgctggccttcgaattcatgctctctgacctcgccgaagtggtgaggcacgctcagcggcccctggcgcaagctcaggtgaagagttatctccagatgttgttgaagggggtcgctttttgtcatgcaaataatatcgtgcacagagatttaaagcctgccaatctgttgatttccgcgtctggacagttgaagattgctgacttcggcctggcgagggtcttttcccccgacggaagccggctgtacacccatcaggtggcaacgcggtccagcttgtcatgtcgtaccactactcgcagccctctcagaagtcggtgcccttgtccttggcggcgttgctgtctgacctcattgcctcgccactggatttgttgggtgaatagcttctctacgctcttgacaagtgctagccagctcccccgcctgtcctccatatcaacctctagccaacttccatgcctcccaattcatctgtcatgcagattcctgtctgtgtag

SEQ ID NO: 66635 - DNA, 732 bp, Artificial Sequence
  derived and/or modified sequence
atggaccagtactgcattcttggaaggatcggagagggtgcccacggaattgtcttcaaggctaagcacgtagagacaggggaaatcgttgccctcaagaaagtggcccttagaaggctcgaggacgggtttcctaaccaagctctgcgcgaaattaaagctctgcaggaaatggaagacaatcagtacgtcgtgcagctgaaggcggtgttcccgcatgggggtggttttgtactggcattcgaatttatgctgtctgacctcgcagaggtggtgcgtcatgcccagagaccactggcgcaggcgcaggtcaaatcgtacctgcagatgcttctgaagggcgtggcgttttgtcacgctaataatatcgtgcatcgggacctcaagcctgcaaacctccttatttcagcaagcggacaactaaagattgccgacttcggattggcccgagttttttcccctgacgggtctagactgtacacacatcaggtggctaccagaagctccctgtcctgcaggaccactaccagatcccctcttcgtagcaggtgcccctgcccctggagaaggtgctgtttgacttccctgccacggcactggatttgttgggtgaactcattctccactctgctcacttcagccagccagctgccccgtctgtctagtatttcgacatctagtcagcttccttgtcttccgattcatttgagctgcagattcttgtccgtttag

SEQ ID NO: 66636 - protein, 717 aa, Artificial Sequence
  derived and/or modified sequence
MSWESGAGPGLGSQGMDLVWSAWYGKCVKGKGSLPLSAHGIVVAWLSRAEWDQVTVYLFCDDHKLQRYALNRITVWRSRSGNELPLAVASTADLIRCKLLDVTGGLGTDELRLLYGMALVRFVNLISERKTKFAKVPLKCLAQEVNIPDWIVDLRHELTHKKMPHINDCRRGCYFVLDWLQKTYWCRQLENSLRETWELEEFREGIEEEDQEEDKNIVVDDITEQKPEPQDDGKSTESDVKADGDSKGSEEVDSHCKKALSHKELYERARELLVSYEEEQFTVLEKFRYLPKAIKAWNNPSPRVECVLAELKGVTCENREAVLDAFLDDGFLVPTFEQLAALQIEYEENVDLNDVLVPKPFSQFWQPLLRGLHSQNFTQALLERMLSELPALGISGIRPTYILRWTVELIVANTKTGRNARRFSAGQWEARRGWRLFNCSASLDWPRMVESCLGSPCWASPQLLRIIFKAMGQGLPDEEQEKLLRICSIYTQSGENSLVQEGSEASPIGKSPYTLDSLYWSVKPASSSFGSEAKAQQQEEQGSVNDVKEEEKEEKEVLPDQVEEEEENDDQEEEEEDEDDEDDEEEDRMEVGPFSTGQESPTAENARLLAQKRGALQGSAWQVSSEDVRWDTFPLGRMPGQTEDPAELMLENYDTMYLLDQPVLEQRLEPSTCKTDTLGLSCGVGSGNCSNSSSSNFEGLLWSQGQLHGLKTGLQLF

SEQ ID NO: 66637 - DNA, 2386 bp, Artificial Sequence
  derived and/or modified sequence
gcggagcggcgcggcacagagcctgttgttgagctcagtatgtcgtgggaatccggggccgggccaggtctaggttcccaggggatggatctcgtgtggagtgcgtggtacggaaagtgcgttaaagggaaagggtcgttgccactctcggcccacggcatcgtggtcgcctggctcagcagggccgagtgggaccaggtgacggtttatctgttctgtgacgaccataagttgcagcggtacgcgcttaaccgcatcacggtgtggaggagcaggtcaggcaacgaactccctctggcagtggcttctactgctgacctgatacgctgtaagctcttggatgtaactggtggcttgggcactgatgaacttagactgctctatggcatggcattggtcaggtttgtgaatcttatctcagagaggaagacaaagtttgccaaggtccccctcaagtgtctggctcaagaggtaaatattccggattggattgttgaccttcgccatgagttgacccacaagaaaatgccccatataaatgactgccgcagaggctgctactttgtcctggattggctccagaagacctattggtgccgccaactggagaacagcctgagagagacctgggagttggaggagttcagggaagggatagaggaagaggatcaagaggaagataagaacattgttgttgatgacatcacagaacagaaaccagagcctcaggatgatgggaaaagtacggagtcagatgtaaaggccgatggagacagcaaaggcagcgaagaggtggattctcattgcaaaaaggccctgagtcataaagagctatatgaaagagcccgagaactgctggtatcatacgaagaggagcagtttacggtgctggagaaatttaggtatttacctaaggccattaaggcgtggaataacccgtccccacgtgtagaatgtgtcctggcagagctcaagggcgttacatgcgagaacagggaggctgtgctggatgcttttctggatgatggcttccttgtccccacatttgaacagttggcagctttgcagatagaatatgaagaaaacgtggacttgaatgacgtcctggtgccaaagccgttctctcagttctggcagcccctgctcaggggcctgcactcccagaacttcacgcaggccctattggagaggatgctctctgaactgccagccttggggatcagcgggatccggcctacctacatcctcagatggaccgttgaactgatcgtggccaacaccaagactggacggaatgctcgccgattttctgcaggccagtgggaagcaagaaggggctggaggctgttcaactgctccgcctcccttgactggccccggatggttgagtcctgcttgggctcaccttgctgggccagcccccaactccttcggatcatcttcaaagccatggggcagggcctgccagacgaggagcaggagaagctgctgcgcatctgttccatttatacccagagtggagaaaacagcctggtgcaggagggctctgaggcctcccccattgggaagtctccatatacactagacagcctgtattggagcgtcaagccagccagctccagcttcgggtctgaagcaaaggcccagcaacaggaggagcagggcagtgttaatgatgtcaaggaagaggagaaggaggagaaagaggtcttgccagaccaggtagaggaggaggaagaaaatgatgaccaagaggaggaagaggaggatgaagatgatgaagatgatgaagaggaagacagaatggaggtggggcctttctctacagggcaagagtcccccactgccgagaatgctaggcttctggcccagaaaagaggagctttgcagggctctgcatggcaggttagctcagaagacgtgcgatgggacacatttcccctaggccgaatgccaggtcagaccgaggacccagcagagctcatgctggagaattatgacaccatgtatcttttggaccagcctgtgctagagcagcggctggaaccctcaacatgcaagactgacaccttgggcctgagctgtggtgtcggcagtggcaactgcagcaacagcagcagcagcaacttcgagggccttctctggagccaggggcagctgcatgggctcaaaactggcctgcagctcttctgatggccatccctggtgcaagtgttcatccagccgtgccagggcaacagcccaccccctagtacaactgatgctccctgagacaacctgggagacagcctggatcagccacatcaactcagttgtccaccacaggggaattttgaatgtcttttgtttttgttttgttttgaaaaataataaacaggcaactgta

SEQ ID NO: 66638 - DNA, 2154 bp, Artificial Sequence
  derived and/or modified sequence
atgagttgggagtcgggcgcagggcccggactcggctcacagggcatggatctcgtctggtccgcatggtatggtaagtgcgttaagggaaagggtagtctgcctcttagcgcacacggcattgtcgtcgcctggcttagccgggccgagtgggatcaggtaaccgtgtatctattttgcgatgaccataagctgcagagatacgctttgaatcgaataacagtgtggcggtctcggtccgggaacgaactgccattggctgtcgctagtacagccgacctgatccgttgcaagcttcttgacgtaacgggcggactcgggacagatgaacttcgtttgttgtacggaatggcactggtgagatttgttaacctgatttccgaaagaaagacaaaatttgccaaagtgccacttaagtgtctggctcaggaagtgaacatcccagattggatagtggatttaagacatgaattgacccacaagaagatgccccacattaacgactgtagaagaggttgttactttgtgctggactggctacagaaaacctattggtgccgccagctggagaacagcctgcgcgaaacatgggaactcgaagagtttagggaggggatcgaggaggaggatcaggaagaggataagaatattgtggttgatgatattactgagcagaaaccagagccacaggacgatggcaaatctaccgaaagcgatgtgaaagctgatggcgacagcaagggaagtgaggaagtagactctcactgcaaaaaggcattgtcacataaggaattgtacgagcgggctagggagctgcttgtcagttatgaagaggagcagtttacagtgctagagaagtttagatacctgcctaaggcaatcaaggcttggaacaaccctagcccacgtgtggaatgcgtgcttgccgagcttaaaggagttacttgcgagaaccgcgaggccgtcttagacgcctttctcgatgacggtttcttggtgccgacttttgagcaactcgccgctctgcagattgagtacgaagagaatgtagacctcaatgacgtattagtaccgaaacccttctcacagttctggcaaccgctcctgagaggtttgcattcccagaattttactcaggccctgttggagcggatgttgtccgagctgccagccctcggaattagtggaattaggcccacatacatcttacgctggacggttgaattgatcgtcgccaacacgaaaactggcagaaatgcacgcagatttagcgccggccagtgggaggctcgaaggggctggcggctctttaattgctcagcttctctcgactggcctcggatggttgagtcatgcctggggtctccctgctgggctagcccccagctgttacgcatcattttcaaggctatggggcagggcctgccagatgaggaacaggagaagcttctgcgcatttgtagtatctatacccagagtggcgagaactcgctggtccaggagggatctgaggcatcgcccatcgggaagagtccctataccttagattccctgtactggtctgtcaagcctgccagttcaagtttcggctctgaggctaaggcccaacagcaggaggaacaaggcagtgtcaacgacgtgaaggaggaggagaaagaagagaaagaagtcctgcccgaccaagttgaggaggaggaggagaacgatgaccaggaagaggaggaggaagacgaggatgatgaagatgacgaggaggaagaccgcatggaagtaggtccgttcagcactgggcaggaatcccctaccgccgaaaatgccagattgctggcccagaagaggggcgcgctccaggggtcagcgtggcaggtttcatctgaagatgtacgctgggacacttttcctctcgggcgcatgccggggcagacggaggatccagccgaactcatgctggagaactacgacacgatgtacctgctggaccagccagtgcttgagcagcgcctagagccctctacttgcaagacagacacgctcggtctgagctgtggagtggggtccggaaactgctcaaactcctcttcctccaatttcgaaggcctactgtggtcacaggggcagctacacggcctgaagacgggattacaactgttctag

SEQ ID NO: 66639 - DNA, 2154 bp, Artificial Sequence
  derived and/or modified sequence
atgtcctgggagagcggggccggccctggcctgggcagccagggcatggacctggtgtggagcgcctggtacggcaaatgtgtgaagggcaagggcagcctgcccctgagcgcccatggaattgtggtggcctggctgagcagagctgagtgggaccaggtgacagtgtacctgttctgtgatgaccacaagctgcagagatatgccctgaaccgcatcaccgtgtggaggagccgctctggaaatgagctgcccctggccgtggccagcacagctgacctgatccgctgcaagctgctggatgtgactggaggcctgggcacagatgagctgcggctgctgtatggcatggccctggtgcgctttgtgaacctgatcagcgagaggaagaccaagtttgccaaggtgcccctgaagtgcctggcccaggaggtgaacatcccagactggatcgtggacctgcggcatgagctgacccacaagaagatgccccacatcaatgactgccggcggggctgctactttgtgctggactggctgcagaagacctactggtgccggcagctggagaacagcctgcgggagacctgggagctggaggagttccgggagggcatcgaggaggaggaccaggaggaggacaagaacatcgtggtggatgacatcacagagcagaagccagagccccaggatgatggcaagagcacagaaagtgatgtgaaggcagatggagacagcaaaggaagtgaggaggtggacagccactgcaagaaggccctgagccacaaggagctgtatgaaagagcccgggagctgctggtgtcctatgaggaggagcagttcaccgtgctggagaagttccgctacctgcccaaggccatcaaggcctggaacaaccccagcccccgggtggagtgtgtgctggccgagctgaagggcgtgacctgtgaaaatcgggaggccgtgctggatgccttcctggatgatggcttcctggtgcccacctttgagcagctggccgccctgcagatcgagtatgaggagaatgtggacctgaatgatgtgctggtgcccaagcccttcagccagttctggcagcccctgctgcggggcctgcacagccagaacttcacccaggccctgctggagaggatgctgtctgagctgcctgccctgggcatcagcggcatccggcccacctacatcctgcgctggacagtggagctgattgtggccaacaccaagacaggaagaaatgcccggcgcttctctgctggccagtgggaggcccggcggggctggaggctcttcaactgcagcgccagcctggactggcccaggatggtggagagctgcctgggcagcccctgctgggccagcccccagctgctgcgcatcatcttcaaggccatgggccagggcctgcctgatgaggagcaggagaagctgctgcgcatctgcagcatctacacccagagcggggagaacagcctggtgcaggagggcagcgaggccagccccatcggcaagagcccctacaccctggacagcctgtactggagcgtgaagccagccagcagcagctttggaagtgaggccaaggcccagcagcaggaggagcagggctctgtgaatgatgtgaaggaggaggagaaggaggagaaggaggtgctgcctgaccaggtggaggaggaggaggagaatgatgaccaggaggaggaggaggaggatgaagatgatgaagatgatgaggaggaggacaggatggaggtgggccccttcagcacaggccaggagagccccacagcagaaaatgcccggctgctggcccagaagagaggagccctgcagggcagcgcctggcaggtgtccagtgaagatgtgcgctgggacaccttccccctgggccgcatgcctggccagacagaagatcctgctgagctgatgctggagaactatgacaccatgtacctgctggaccagcctgtgctggagcagaggctggagcccagcacctgcaagacagacaccctgggcctgagctgtggggtgggcagcggcaactgcagcaacagcagcagcagcaactttgagggcctgctgtggagccagggccagctgcacggcctgaagacaggcctgcagctgttctag

SEQ ID NO: 66640 - DNA, 2154 bp, Artificial Sequence
  derived and/or modified sequence
atgagctgggagagcggcgccggccccggcctgggcagccagggcatggatctggtctggagtgcatggtacggtaagtgcgttaagggaaagggcagcttacccctcagcgcccacggtatcgtggtcgcctggctgagccgggccgaatgggaccaggtgaccgtttatttattttgtgacgatcataagttgcagcggtatgctctgaaccgcattacagtgtggcgtagtagatctggcaatgagctcccgctggccgtcgcgtctacagctgacctcattaggtgtaaactccttgatgtcacaggcggactgggcacagacgaactccgcttgctgtatgggatggccctggtgcggttcgttaatcttatcagcgaacgaaagaccaagtttgctaaagtgccccttaaatgcctcgctcaagaggtcaatatccctgactggattgtagacttacgccatgagctgacccacaagaagatgccacatatcaatgactgccgacggggctgttacttcgtgctcgattggttgcagaaaacatactggtgccggcagctcgagaatagtctcagagagacctgggaattggaggaattccgagaggggatagaagaggaggaccaggaagaggacaagaatatcgttgtcgatgatattactgagcaaaaacctgagccccaggacgatggcaaaagtacagagtcagacgtgaaggccgatggagactccaaaggcagcgaggaggtggattcccactgtaaaaaggcactgtcccacaaagaactgtacgaacgcgcccgggaactcttggtctcttacgaggaggaacagttcacagtgctggaaaaattccgctacctgccaaaggccattaaggcatggaacaatccatcgccgagggtggagtgcgtgctagcagaactgaagggagttacctgcgagaacagggaggcagtgctcgacgcattcctggatgacggattcttagtgcctacttttgagcagctagctgctcttcagattgaatatgaggaaaatgtggacctcaacgatgtgttggtgcctaagccattttcccaattctggcaaccactgctcagaggactgcactcacagaatttcacacaagccctactggaaagaatgctctcagaacttcctgcgctggggatctccggaatcaggcctacgtacatactccgatggacggtcgagctgatcgtcgccaatacaaagaccggcaggaacgcccgccgcttcagcgccggtcagtgggaagccagaaggggatggcggctctttaattgttccgcttccctggactggccgcgcatggttgaatcatgcctcggatccccctgttgggcctctcctcaactcctgcggattatctttaaggcaatgggccagggtctgccagacgaggaacaggaaaagctgctgcgcatctgctcaatctacactcagagtggggagaacagcctggttcaggaaggctcggaggcctccccaatcgggaaatccccttatacactggatagcctgtattggagtgtcaaacccgcaagcagcagctttggatccgaagccaaggcccaacagcaggaggaacagggctccgtgaacgacgtaaaggaagaggagaaggaggagaaagaggtgttgcctgaccaggtagaggaagaggaggaaaacgatgatcaggaggaggaggaagaagatgaagacgatgaagacgatgaagaagaggatcggatggaggtaggccctttctctaccggccaggaaagtcccacggctgaaaacgcccgcctgctggcgcagaaaaggggagcgctccagggctctgcctggcaagtgagctcagaggacgtgaggtgggacactttccccctcggccgtatgcccggccagaccgaggaccccgccgaactgatgcttgagaattacgacactatgtatttactggaccagccggttctggagcagcggctggagccttctacttgcaagacagatactctcgggttgtcgtgtggggtgggatcggggaactgtagtaattcatccagttccaacttcgaggggctgctgtggtctcagggtcaattacatggtctgaaaacagggctgcagttgttttag

SEQ ID NO: 66641 - DNA, 2154 bp, Artificial Sequence
  derived and/or modified sequence
atgtcttgggaaagcggagcaggcccaggcctcgggtcccaaggcatggacctggtgtggagtgcctggtacggcaaatgtgtcaagggcaaaggatccttacccctctcagcccacggcattgtcgtggcgtggctcagtcgagccgaatgggaccaggtaactgtatatttgttctgcgacgaccataaactccagagatacgcacttaatcggattactgtatggcgcagccgcagcggaaacgagctgcctctggccgtcgcgtccactgcagaccttataaggtgcaaactcctggacgtcacaggcggactcggcacagacgaacttaggttgctatatggaatggccttggtacgttttgtcaatctcattagcgagcggaagactaagttcgccaaagttcccttaaagtgcctcgcgcaggaggtgaatatccccgactggatagtggatctccgtcacgagctgacacataagaaaatgcctcacattaatgattgtcgacggggttgctacttcgtgctcgactggttgcagaagacatattggtgtcggcaactggaaaatagcttacgcgaaacatgggaactcgaggagtttcgcgagggcatagaggaggaggaccaggaggaagataaaaatattgtagtggacgacatcactgaacagaaacctgaaccacaagatgatgggaagtctactgaatccgacgtgaaggccgatggtgactccaaaggctctgaagaggtcgattcccactgtaagaaggccttgtcacacaaggaactctatgagcgggcacgggaactgctagttagctacgaggaggaacagtttactgttctcgagaagttcagataccttcctaaagcaattaaggcatggaataatccgagcccacgggtagaatgtgttctggcggaactcaagggcgttacatgcgaaaatcgagaggcagtgctggacgctttcctggacgacggtttccttgtacccacattcgagcagctggcagcccttcagatcgagtatgaggagaacgtcgacctcaacgatgtgttagtcccaaagccgttcagccagttttggcagcccctcttaagaggcctccattctcagaactttacccaagcactgctcgagcggatgctgtctgaacttcccgctctgggcatttccggtatccggcctacgtacattctccgctggaccgtcgaactgatcgtcgcaaatacaaagaccggccgaaatgcccgtagattctctgctggccaatgggaggccagacggggatggcgcttgtttaactgcagtgccagcctggactggccgaggatggtagagagttgtctgggctctccgtgctgggcatcacctcaactcctgcgcattattttcaaggccatggggcaggggctcccggacgaagaacaggagaagctgctgcgcatatgttccatatacacccagtcaggcgagaactcacttgtacaggagggctccgaagctagcccgatcggaaaatccccatacacccttgattccctgtattggagtgtaaagcccgcatcctcttcttttggatccgaggctaaggcccagcagcaggaagagcaaggttctgtgaacgatgttaaagaggaggaaaaggaagagaaagaggtactaccagaccaggtggaggaggaggaggagaacgatgatcaggaggaagaagaagaggacgaggatgacgaggatgatgaggaggaggacagaatggaagttggacccttttcaactggccaggagagtcctactgccgagaacgcacgcctgttggcgcagaagaggggagcactacagggaagtgcgtggcaagtatcctccgaagatgtgagatgggacacctttccactgggcaggatgcctgggcagaccgaagatccagcagaattgatgctcgaaaactatgataccatgtatctgctggaccagccagtgttagaacaacgcctggaaccaagcacctgtaaaactgacacactgggcctaagctgtggcgtcggtagcggcaattgcagtaatagttctagctctaattttgagggactcctttggtctcagggacagctgcacggcttgaaaaccggcctgcagctgttttag

SEQ ID NO: 66642 - DNA, 2154 bp, Artificial Sequence
  derived and/or modified sequence
atgagctgggagagcggcgccggccccggcctgggcagccagggcatggacctggtgtggagcgcctggtacggcaagtgcgtgaagggcaagggcagcctgcccctgagcgcccacggcatcgtggtggcctggctgagcagagccgagtgggaccaggtgaccgtgtacctgttctgcgacgaccacaagctgcagagatacgccctgaacagaatcaccgtgtggagaagcagaagcggcaacgagctgcccctggccgtggccagcaccgccgacctgatcagatgcaagctgctggacgtgaccggcggcctgggcaccgacgagctgagactgctgtacggcatggccctggtgagattcgtgaacctgatcagcgagagaaagaccaagttcgccaaggtgcccctgaagtgcctggcccaggaggtgaacatccccgactggatcgtggacctgagacacgagctgacccacaagaagatgccccacatcaacgactgcagaagaggctgctacttcgtgctggactggctgcagaagacctactggtgcagacagctggagaacagcctgagagagacctgggagctggaggagttcagagagggcatcgaggaggaggaccaggaggaggacaagaacatcgtggtggacgacatcaccgagcagaagcccgagccccaggacgacggcaagagcaccgagagcgacgtgaaggccgacggcgacagcaagggcagcgaggaggtggacagccactgcaagaaggccctgagccacaaggagctgtacgagagagccagagagctgctggtgagctacgaggaggagcagttcaccgtgctggagaagttcagatacctgcccaaggccatcaaggcctggaacaaccccagccccagagtggagtgcgtgctggccgagctgaagggcgtgacctgcgagaacagagaggccgtgctggacgccttcctggacgacggcttcctggtgcccaccttcgagcagctggccgccctgcagatcgagtacgaggagaacgtggacctgaacgacgtgctggtgcccaagcccttcagccagttctggcagcccctgctgagaggcctgcacagccagaacttcacccaggccctgctggagagaatgctgagcgagctgcccgccctgggcatcagcggcatcagacccacctacatcctgagatggaccgtggagctgatcgtggccaacaccaagaccggcagaaacgccagaagattcagcgccggccagtgggaggccagaagaggctggagactgttcaactgcagcgccagcctggactggcccagaatggtggagagctgcctgggcagcccctgctgggccagcccccagctgctgagaatcatcttcaaggccatgggccagggcctgcccgacgaggagcaggagaagctgctgagaatctgcagcatctacacccagagcggcgagaacagcctggtgcaggagggcagcgaggccagccccatcggcaagagcccctacaccctggacagcctgtactggagcgtgaagcccgccagcagcagcttcggcagcgaggccaaggcccagcagcaggaggagcagggcagcgtgaacgacgtgaaggaggaggagaaggaggagaaggaggtgctgcccgaccaggtggaggaggaggaggagaacgacgaccaggaggaggaggaggaggacgaggacgacgaggacgacgaggaggaggacagaatggaggtgggccccttcagcaccggccaggagagccccaccgccgagaacgccagactgctggcccagaagagaggcgccctgcagggcagcgcctggcaggtgagcagcgaggacgtgagatgggacaccttccccctgggcagaatgcccggccagaccgaggaccccgccgagctgatgctggagaactacgacaccatgtacctgctggaccagcccgtgctggagcagagactggagcccagcacctgcaagaccgacaccctgggcctgagctgcggcgtgggcagcggcaactgcagcaacagcagcagcagcaacttcgagggcctgctgtggagccagggccagctgcacggcctgaagaccggcctgcagctgttctag

SEQ ID NO: 66643 - protein, 675 aa, Artificial Sequence
  derived and/or modified sequence
MSWESGAGPGLGSQGMDLVWSAWYGKCVKGKGSLPLSAHGIVVAWLSRAEWDQVTVYLFCDDHKLQRYALNRITVWRSRFVNLISERKTKFAKVPLKCLAQEVNIPDWIVDLRHELTHKKMPHINDCRRGCYFVLDWLQKTYWCRQLENSLRETWELEEFREGIEEEDQEEDKNIVVDDITEQKPEPQDDGKSTESDVKADGDSKGSEEVDSHCKKALSHKELYERARELLVSYEEEQFTVLEKFRYLPKAIKAWNNPSPRVECVLAELKGVTCENREAVLDAFLDDGFLVPTFEQLAALQIEYEENVDLNDVLVPKPFSQFWQPLLRGLHSQNFTQALLERMLSELPALGISGIRPTYILRWTVELIVANTKTGRNARRFSAGQWEARRGWRLFNCSASLDWPRMVESCLGSPCWASPQLLRIIFKAMGQGLPDEEQEKLLRICSIYTQSGENSLVQEGSEASPIGKSPYTLDSLYWSVKPASSSFGSEAKAQQQEEQGSVNDVKEEEKEEKEVLPDQVEEEEENDDQEEEEEDEDDEDDEEEDRMEVGPFSTGQESPTAENARLLAQKRGALQGSAWQVSSEDVRWDTFPLGRMPGQTEDPAELMLENYDTMYLLDQPVLEQRLEPSTCKTDTLGLSCGVGSGNCSNSSSSNFEGLLWSQGQLHGLKTGLQLF

SEQ ID NO: 66644 - DNA, 2261 bp, Artificial Sequence
  derived and/or modified sequence
gtgcggagcggcgcggcacagagcctgttgttgagctcagtatgtcgtgggaatccggggccgggccaggtctaggttcccaggggatggatctcgtgtggagtgcgtggtacggaaagtgcgttaaagggaaagggtcgttgccactctcggcccacggcatcgtggtcgcctggctcagcagggccgagtgggaccaggtgacggtttatctgttctgtgacgaccataagttgcagcggtacgcgcttaaccgcatcacggtgtggaggagcaggtttgtgaatcttatctcagagaggaagacaaagtttgccaaggtccccctcaagtgtctggctcaagaggtaaatattccggattggattgttgaccttcgccatgagttgacccacaagaaaatgccccatataaatgactgccgcagaggctgctactttgtcctggattggctccagaagacctattggtgccgccaactggagaacagcctgagagagacctgggagttggaggagttcagggaagggatagaggaagaggatcaagaggaagataagaacattgttgttgatgacatcacagaacagaaaccagagcctcaggatgatgggaaaagtacggagtcagatgtaaaggccgatggagacagcaaaggcagcgaagaggtggattctcattgcaaaaaggccctgagtcataaagagctatatgaaagagcccgagaactgctggtatcatacgaagaggagcagtttacggtgctggagaaatttaggtatttacctaaggccattaaggcgtggaataacccgtccccacgtgtagaatgtgtcctggcagagctcaagggcgttacatgcgagaacagggaggctgtgctggatgcttttctggatgatggcttccttgtccccacatttgaacagttggcagctttgcagatagaatatgaagaaaacgtggacttgaatgacgtcctggtgccaaagccgttctctcagttctggcagcccctgctcaggggcctgcactcccagaacttcacgcaggccctattggagaggatgctctctgaactgccagccttggggatcagcgggatccggcctacctacatcctcagatggaccgttgaactgatcgtggccaacaccaagactggacggaatgctcgccgattttctgcaggccagtgggaagcaagaaggggctggaggctgttcaactgctccgcctcccttgactggccccggatggttgagtcctgcttgggctcaccttgctgggccagcccccaactccttcggatcatcttcaaagccatggggcagggcctgccagacgaggagcaggagaagctgctgcgcatctgttccatttatacccagagtggagaaaacagcctggtgcaggagggctctgaggcctcccccattgggaagtctccatatacactagacagcctgtattggagcgtcaagccagccagctccagcttcgggtctgaagcaaaggcccagcaacaggaggagcagggcagtgttaatgatgtcaaggaagaggagaaggaggagaaagaggtcttgccagaccaggtagaggaggaggaagaaaatgatgaccaagaggaggaagaggaggatgaagatgatgaagatgatgaagaggaagacagaatggaggtggggcctttctctacagggcaagagtcccccactgccgagaatgctaggcttctggcccagaaaagaggagctttgcagggctctgcatggcaggttagctcagaagacgtgcgatgggacacatttcccctaggccgaatgccaggtcagaccgaggacccagcagagctcatgctggagaattatgacaccatgtatcttttggaccagcctgtgctagagcagcggctggaaccctcaacatgcaagactgacaccttgggcctgagctgtggtgtcggcagtggcaactgcagcaacagcagcagcagcaacttcgagggccttctctggagccaggggcagctgcatgggctcaaaactggcctgcagctcttctgatggccatccctggtgcaagtgttcatccagccgtgccagggcaacagcccaccccctagtacaactgatgctccctgagacaacctgggagacagcctggatcagccacatcaactcagttgtccaccacaggggaattttgaatgtcttttgtttttgttttgttttgaaaaataataaacaggcaactgt

SEQ ID NO: 66645 - DNA, 2028 bp, Artificial Sequence
  derived and/or modified sequence
atgagctgggagagcggcgcagggcctgggctagggagccagggaatggacctggtctggtcggcttggtatggaaaatgcgtgaagggaaagggatcgcttcccctgagcgcacacggtattgtcgtggcctggctgtcgcgcgctgaatgggaccaggtgactgtctatctcttctgcgacgatcacaaactgcagagatacgccctaaataggatcacagtgtggcgctcacgcttcgttaatctcatctcagagcggaagacgaagttcgcaaaggttccactcaagtgcctggcacaagaggtcaacatcccagactggatcgtagatctgcggcatgagttaacccacaagaaaatgccccacattaatgattgtcggagggggtgttacttcgtgttggattggctacaaaaaacttattggtgtcggcaattggagaattctcttagagaaacttgggaattggaggaatttcgagagggaattgaagaggaggatcaggaggaggacaagaatatcgttgtggacgacatcacagagcagaagcccgagccacaagacgatgggaaaagcaccgagtccgacgtgaaagccgacggggatagcaaggggtcagaggaggttgattcacactgcaaaaaggccctgagccacaaggagctgtatgaaagggccagagaactcctagtctcatacgaggaggagcagttcacagtgctggaaaagttccgctatctgcctaaggccattaaggcatggaacaatccgtctccacgggtagagtgcgtgctggcagaactgaaaggcgtgacctgtgaaaatcgggaggcggtgctggatgcctttctcgacgacggattccttgtgccgacttttgagcagttagccgccctccagatcgaatacgaagagaatgtggatctgaatgatgtccttgtaccaaagccattcagtcagttctggcagcccctgctgcgaggcctccactcacagaactttacgcaagccctgttggagcggatgttatccgagctccccgcattgggcatctcagggattaggcctacttacatcttgcgctggacagttgaactaatcgtggcaaacacaaagacagggcgcaacgctagacgcttctctgccggtcagtgggaagctaggcgcggctggcggctgttcaactgcagcgcttccctagactggccacgcatggtcgaatcttgcttaggctcaccctgctgggccagcccacagctgttgaggattatctttaaggcgatggggcaaggtctcccagatgaagagcaggaaaagttgctaagaatctgttcaatttacacacaatcgggtgaaaatagcctggtccaggaaggtagtgaggcatcgcctatcggtaagtctccatatacactggactccctctactggtctgtgaagccagccagctcctctttcggttcagaagctaaagcccagcaacaggaggaacaggggtcagtaaacgacgttaaggaagaggaaaaggaggagaaagaagtactgcctgatcaagtagaggaagaagaagaaaacgacgatcaggaagaagaggaagaagatgaggacgatgaagacgacgaagaagaagatagaatggaagtgggccctttctctacagggcaagagtctccaacagccgagaacgcccgccttctcgcacagaagcgtggggcattacaggggtctgcctggcaggtgtcctctgaagatgtgcgatgggacacttttcctctagggcgcatgcctggccaaacagaggatcctgccgagctcatgctggagaattatgacaccatgtatctgctggatcaaccagtactcgagcaacggctagaaccgtccacttgcaaaaccgatactctgggactttcttgtggagtcggttcaggcaattgctctaattcgagttcctctaacttcgagggacttctatggtctcaggggcagcttcatggtctgaagaccggtctccagctgttttag

SEQ ID NO: 66646 - DNA, 2028 bp, Artificial Sequence
  derived and/or modified sequence
atgtcctgggagagcggggccggccctggcctgggcagccagggcatggacctggtgtggagcgcctggtacggcaaatgtgtgaagggcaagggcagcctgcccctgagcgcccatggaattgtggtggcctggctgagcagagctgagtgggaccaggtgacagtgtacctgttctgtgatgaccacaagctgcagagatatgccctgaaccgcatcaccgtgtggaggagcagatttgtgaacctgatcagcgagaggaagaccaagtttgccaaggtgcccctgaagtgcctggcccaggaggtgaacatcccagactggatcgtggacctgcggcatgagctgacccacaagaagatgccccacatcaatgactgccggcggggctgctactttgtgctggactggctgcagaagacctactggtgccggcagctggagaacagcctgcgggagacctgggagctggaggagttccgggagggcatcgaggaggaggaccaggaggaggacaagaacatcgtggtggatgacatcacagagcagaagccagagccccaggatgatggcaagagcacagaaagtgatgtgaaggcagatggagacagcaaaggaagtgaggaggtggacagccactgcaagaaggccctgagccacaaggagctgtatgaaagagcccgggagctgctggtgtcctatgaggaggagcagttcaccgtgctggagaagttccgctacctgcccaaggccatcaaggcctggaacaaccccagcccccgggtggagtgtgtgctggccgagctgaagggcgtgacctgtgaaaatcgggaggccgtgctggatgccttcctggatgatggcttcctggtgcccacctttgagcagctggccgccctgcagatcgagtatgaggagaatgtggacctgaatgatgtgctggtgcccaagcccttcagccagttctggcagcccctgctgcggggcctgcacagccagaacttcacccaggccctgctggagaggatgctgtctgagctgcctgccctgggcatcagcggcatccggcccacctacatcctgcgctggacagtggagctgattgtggccaacaccaagacaggaagaaatgcccggcgcttctctgctggccagtgggaggcccggcggggctggaggctcttcaactgcagcgccagcctggactggcccaggatggtggagagctgcctgggcagcccctgctgggccagcccccagctgctgcgcatcatcttcaaggccatgggccagggcctgcctgatgaggagcaggagaagctgctgcgcatctgcagcatctacacccagagcggggagaacagcctggtgcaggagggcagcgaggccagccccatcggcaagagcccctacaccctggacagcctgtactggagcgtgaagccagccagcagcagctttggaagtgaggccaaggcccagcagcaggaggagcagggctctgtgaatgatgtgaaggaggaggagaaggaggagaaggaggtgctgcctgaccaggtggaggaggaggaggagaatgatgaccaggaggaggaggaggaggatgaagatgatgaagatgatgaggaggaggacaggatggaggtgggccccttcagcacaggccaggagagccccacagcagaaaatgcccggctgctggcccagaagagaggagccctgcagggcagcgcctggcaggtgtccagtgaagatgtgcgctgggacaccttccccctgggccgcatgcctggccagacagaagatcctgctgagctgatgctggagaactatgacaccatgtacctgctggaccagcctgtgctggagcagaggctggagcccagcacctgcaagacagacaccctgggcctgagctgtggggtgggcagcggcaactgcagcaacagcagcagcagcaactttgagggcctgctgtggagccagggccagctgcacggcctgaagacaggcctgcagctgttctag

SEQ ID NO: 66647 - DNA, 2028 bp, Artificial Sequence
  derived and/or modified sequence
atgagctgggagagcggcgccggccccggcctgggcagccagggcatggacctggtgtggagcgcttggtacggaaagtgtgtcaagggtaagggcagcctgcctctgagtgcacacggaattgtagttgcatggctatcaagagctgagtgggaccaggtgaccgtatatttgttctgcgacgatcataaactgcagcgatatgctctgaataggatcaccgtttggaggagccgctttgtgaaccttatctccgagcgcaagaccaagttcgcgaaggtccctctgaagtgtttagcgcaggaagtcaacattccggattggatcgtcgacttgcgacacgagcttacccataagaaaatgccccatataaacgactgcaggcgcgggtgttacttcgtgctcgactggctccagaagacgtattggtgtagacagctcgaaaatagcctccgcgaaacatgggaactggaagaatttcgggaagggattgaggaggaagaccaagaggaagataagaacattgtggtcgatgatataacagaacagaaaccggaaccccaggatgatggcaagagtacagagagcgatgtcaaggctgatggagactccaaggggagtgaggaagtcgacagccactgcaagaaagcactgagccacaaagagttgtacgagcgggcaagagagctgcttgtatcctacgaagaagaacaattcaccgtgctagagaagttccgctacttgccaaaggccattaaagcttggaacaacccaagccctcgcgttgagtgcgtgttagccgaactgaaaggagtcacatgcgagaaccgggaggccgttctggatgcatttctggatgatggcttcttggtgcctaccttcgagcagctggcagctctccaaatagagtatgaagagaatgtggatcttaacgacgtccttgtgcctaaaccattctcccagttttggcagcctcttctgagaggtctgcacagccagaactttacgcaggccctgctagagaggatgctaagcgagttgccggccctgggaatttcaggcatcaggccgacctacattttaagatggacggttgagctcattgtggcaaacaccaagactgggcgcaatgcccggcgcttcagcgccggacagtgggaggccaggcgcggctggagactctttaactgctctgcctcactggactggccgagaatggtggagtcctgtctagggagtccatgctgggccagcccccagctcctcaggattattttcaaagctatggggcagggcctccctgacgaggagcaggagaagctccttaggatttgtagcatttacacccaaagcggggagaattctttagttcaggaagggagcgaagctagcccaattggaaagagcccttatacacttgactctctctattggagtgtaaagcccgcctctagttcttttggctctgaagcaaaagcccagcagcaggaagaacagggcagtgtgaatgacgtcaaggaggaggagaaagaggaaaaagaagtactgccggaccaagtggaagaagaagaggagaacgacgaccaagaggaggaagaagaggacgaggatgatgaggacgacgaagaggaagataggatggaagttggaccattcagtaccggacaggagagccccaccgctgaaaatgctagattgctcgcacagaaacggggcgctttgcagggctccgcatggcaggtttcctcagaagatgtgcgatgggacacgtttccgctcgggcgcatgccaggtcagacggaagaccctgcagaactgatgttggagaattatgacacaatgtacctgctggatcagccagtgctggagcagaggctggagccttcaacttgcaaaaccgatacgttaggcctctcctgtggcgtaggcagcggcaactgctccaacagctcttcgagcaatttcgaaggcctgctttggagccaaggccaactccacggcttaaagacaggccttcaactgttctag

SEQ ID NO: 66648 - DNA, 2028 bp, Artificial Sequence
  derived and/or modified sequence
atgtcttgggaatccggcgcaggacctgggctggggtctcaaggcatggatctggtctggtctgcctggtacggaaagtgcgtaaagggaaaggggtccctgccactgtccgcccacgggatcgttgtggcctggctgtccagagctgagtgggaccaagtgaccgtttacctgttttgtgacgatcacaagctgcaacgatacgcgctcaatcgcatcaccgtatggcggtccaggttcgtgaatctgatctcagaacggaagaccaagttcgcgaaagtgcccctgaaatgcctggcacaggaagtgaatattcctgattggatcgtggatctgcgccacgaactgacacataaaaagatgcctcacatcaatgactgcagacgaggctgctatttcgtgcttgactggcttcagaagacatattggtgccgacagctggagaactcactgagggagacttgggaactcgaagaattcagagaaggaattgaagaggaggatcaagaagaggataagaatatagtcgtggacgacattacagagcagaaacctgagcctcaggatgacggaaaaagcactgagtccgacgtgaaagcagacggagactctaaaggttcggaagaagttgattctcactgcaaaaaagcactctcgcacaaggagctatatgaacgagccagggaactactggtaagctacgaagaggagcagttcacggtgttggagaagtttaggtacctacccaaagctatcaaagcttggaataacccctctccaagggtggaatgcgtacttgccgagctgaagggtgtgacatgcgagaaccgcgaggctgttttagatgcctttcttgatgacggattcctagtacctacattcgagcagcttgcggcacttcagatcgagtacgaggaaaatgtggatctgaacgacgtcctcgtgcccaagccgttcagtcagttctggcagcctcttttgcggggattgcacagtcaaaacttcactcaggcactcctcgaaaggatgctgtctgagctgcctgcactgggcatttcggggatccggccaacatatatactgaggtggaccgtcgaactcatcgtcgctaacacaaaaaccggtcgcaacgctagacgattcagtgcgggtcagtgggaggcgcgtcgcggatggaggctatttaattgctcagccagtctggattggccgaggatggtcgagtcctgcctcggctctccttgctgggcctccccacagctgctacgcattatattcaaagctatgggacaaggcctgccagacgaggagcaagagaaattgttaagaatttgcagtatttatacacagtctggggaaaattcattggttcaggagggtagtgaggcttcacccatcggaaagtccccgtatactctggatagcctctactggtctgtgaagccagcttcctccagcttcggcagcgaagcaaaagcacagcagcaggaagaacaggggagtgttaacgatgtaaaggaggaagaaaaagaagaaaaggaggtgcttcctgaccaggttgaagaggaggaagagaatgacgatcaggaggaagaagaagaagacgaagacgatgaagatgatgaggaggaagacagaatggaggtgggcccattcagcaccggacaggagtctcccactgctgagaacgcaaggctacttgctcagaagaggggggctctgcaggggtctgcatggcaagtttcgtccgaagatgtgcgctgggataccttccccctcgggagaatgcccggtcaaacagaggaccccgctgaactgatgttggagaactatgacaccatgtacctgttggaccagcccgtgctggagcaacgcctagaaccctctacatgcaaaactgacaccctcggtctttcttgtggggtagggagcgggaattgttcaaactcaagttcgagcaattttgagggactgctttggagccagggccagctgcacgggctgaagaccggactgcaactattctag

SEQ ID NO: 66649 - DNA, 2028 bp, Artificial Sequence
  derived and/or modified sequence
atgagctgggagagcggcgccggccccggcctgggcagccagggcatggacctggtgtggagcgcctggtacggcaagtgcgtgaagggcaagggcagcctgcccctgagcgcccacggcatcgtggtggcctggctgagcagagccgagtgggaccaggtgaccgtgtacctgttctgcgacgaccacaagctgcagagatacgccctgaacagaatcaccgtgtggagaagcagattcgtgaacctgatcagcgagagaaagaccaagttcgccaaggtgcccctgaagtgcctggcccaggaggtgaacatccccgactggatcgtggacctgagacacgagctgacccacaagaagatgccccacatcaacgactgcagaagaggctgctacttcgtgctggactggctgcagaagacctactggtgcagacagctggagaacagcctgagagagacctgggagctggaggagttcagagagggcatcgaggaggaggaccaggaggaggacaagaacatcgtggtggacgacatcaccgagcagaagcccgagccccaggacgacggcaagagcaccgagagcgacgtgaaggccgacggcgacagcaagggcagcgaggaggtggacagccactgcaagaaggccctgagccacaaggagctgtacgagagagccagagagctgctggtgagctacgaggaggagcagttcaccgtgctggagaagttcagatacctgcccaaggccatcaaggcctggaacaaccccagccccagagtggagtgcgtgctggccgagctgaagggcgtgacctgcgagaacagagaggccgtgctggacgccttcctggacgacggcttcctggtgcccaccttcgagcagctggccgccctgcagatcgagtacgaggagaacgtggacctgaacgacgtgctggtgcccaagcccttcagccagttctggcagcccctgctgagaggcctgcacagccagaacttcacccaggccctgctggagagaatgctgagcgagctgcccgccctgggcatcagcggcatcagacccacctacatcctgagatggaccgtggagctgatcgtggccaacaccaagaccggcagaaacgccagaagattcagcgccggccagtgggaggccagaagaggctggagactgttcaactgcagcgccagcctggactggcccagaatggtggagagctgcctgggcagcccctgctgggccagcccccagctgctgagaatcatcttcaaggccatgggccagggcctgcccgacgaggagcaggagaagctgctgagaatctgcagcatctacacccagagcggcgagaacagcctggtgcaggagggcagcgaggccagccccatcggcaagagcccctacaccctggacagcctgtactggagcgtgaagcccgccagcagcagcttcggcagcgaggccaaggcccagcagcaggaggagcagggcagcgtgaacgacgtgaaggaggaggagaaggaggagaaggaggtgctgcccgaccaggtggaggaggaggaggagaacgacgaccaggaggaggaggaggaggacgaggacgacgaggacgacgaggaggaggacagaatggaggtgggccccttcagcaccggccaggagagccccaccgccgagaacgccagactgctggcccagaagagaggcgccctgcagggcagcgcctggcaggtgagcagcgaggacgtgagatgggacaccttccccctgggcagaatgcccggccagaccgaggaccccgccgagctgatgctggagaactacgacaccatgtacctgctggaccagcccgtgctggagcagagactggagcccagcacctgcaagaccgacaccctgggcctgagctgcggcgtgggcagcggcaactgcagcaacagcagcagcagcaacttcgagggcctgctgtggagccagggccagctgcacggcctgaagaccggcctgcagctgttctag

SEQ ID NO: 66650 - protein, 807 aa, Artificial Sequence
  derived and/or modified sequence
MGVAGRNRPGAAWAVLLLLLLLPPLLLLAGAVPPGRGRAAGPQEDVDECAQGLDDCHADALCQNTPTSYKCSCKPGYQGEGRQCEDIDECGNELNGGCVHDCLNIPGNYRCTCFDGFMLAHDGHNCLDVDECLENNGGCQHTCVNVMGSYECCCKEGFFLSDNQHTCIHRSEEGLSCMNKDHGCSHICKEAPRGSVACECRPGFELAKNQRDCILTCNHGNGGCQHSCDDTADGPECSCHPQYKMHTDGRSCLEREDTVLEVTESNTTSVVDGDKRVKRRLLMETCAVNNGGCDRTCKDTSTGVHCSCPVGFTLQLDGKTCKDIDECQTRNGGCDHFCKNIVGSFDCGCKKGFKLLTDEKSCQDVDECSLDRTCDHSCINHPGTFACACNRGYTLYGFTHCGDTNECSINNGGCQQVCVNTVGSYECQCHPGYKLHWNKKDCVASCDLSCIVKRTEKRLRKAIRTLRKAVHREQFHLQLSGMNLDVAKKPPRTSERQAESCGVGQGHAENQCVSCRAGTYYDGARERCILCPNGTFQNEEGQMTCEPCPRPGNSGALKTPEAWNMSECGGLCQPGEYSADGFAPCHLCALGTFQPEAGRTSCFPCGGGLATKHQGATSFQDCETRVQCSPGHFYNTTTHRCIRCPVGTYQPEFGKNNCVSCPGNTTTDFDGSTNITQCKTSSNSVTTYETCQTYERPIAFTSRSKKLWIQFKSNEGNSARGFQVPYVTYDEDYQELIEDIVRDGRLYASENHQEILKDKKLIKALFDVLAHPQNYFKYTAQESREMFPRSFIRLLRSKVSRFLRPYK

SEQ ID NO: 66651 - DNA, 2424 bp, Artificial Sequence
  derived and/or modified sequence
atgggcgtggcagggcggaataggcctggcgccgcttgggctgtcctgctgttgttgttgctgctgccgcctttactgctgctagcgggagcagtacctccaggcaggggacgggcagctggcccccaggaggacgtagacgagtgcgcccagggtctggatgattgccacgctgacgccctttgccagaatacccccacgagttacaagtgctcctgtaaacctgggtatcagggggagggtcgtcagtgtgaggacatagacgaatgtggaaacgaacttaatgggggttgtgtccacgattgcctgaatattccagggaattatcggtgcacctgctttgacggcttcatgctggctcatgacggccacaattgtcttgatgtggacgaatgtctggagaacaatggtgggtgtcagcacacctgtgttaatgtgatgggcagctacgaatgctgttgcaaagaaggtttttttctgtccgacaaccagcacacctgtattcacagatctgaagaaggactgtcttgtatgaataaagatcacggctgtagccatatctgcaaagaggccccccgcgggagtgtggcatgcgagtgtcgccctggatttgagcttgcaaaaaaccagcgcgactgtatcctgacatgcaaccatgggaatggtggctgccagcatagctgcgatgacaccgctgacggaccagagtgcagttgccacccacagtataaaatgcacacagacggacgaagttgcctggagcgggaagacaccgtgcttgaggtcactgagtctaacaccacatccgtggtggatggagacaagagagtcaaacgacgtctcctgatggagacctgtgctgtcaacaatggtggttgtgataggacctgcaaggacacaagtactggggtccactgctcctgtcctgtaggatttacactgcagctagacggcaagacttgtaaagacattgacgaatgtcaaaccaggaatggcggctgtgaccacttttgcaagaatatagtgggttcctttgattgcggctgcaaaaaggggttcaaacttttaactgatgagaagtcttgtcaagacgtcgatgagtgttccctagaccggacctgcgatcactcttgcattaaccaccccgggacattcgcatgcgcatgcaaccggggatatactttatatggttttacgcattgtggcgacacaaatgaatgcagcattaataacggagggtgtcagcaggtatgcgtcaatactgtcgggtcctacgaatgccaatgccatcctggatataaactgcactggaacaaaaaggattgtgtggcctcttgcgatctctcctgtattgtcaagaggacggaaaagcgcctgagaaaggctatccggacgctgcgcaaagcagtccatcgcgagcagttccaccttcaacttagcggaatgaacctggacgttgcaaagaaaccaccaagaacgtctgaacgccaggctgagtcctgcggagttgggcagggacatgcagaaaaccagtgcgtaagctgtagagcgggcacatactacgacggcgcaagagagcggtgtatcctttgccctaacggcactttccagaacgaagaagggcagatgacatgcgaaccttgcccccgccccggcaacagcggtgcactgaagacgccggaagcctggaacatgtctgaatgcggaggattgtgccaacccggagagtattcagcagacggtttcgctccgtgccacctttgcgcacttggtacattccagcctgaggccggaaggacttcttgcttcccctgtggtggtggattagcaactaaacaccagggggccacaagttttcaggactgcgaaactagggttcagtgttctcccgggcacttttacaatacaaccacacatcgctgcattcgttgtcctgtgggtacataccagcctgagttcggtaaaaacaactgcgtctcatgccctgggaatactactacggacttcgacgggtctacaaatatcacgcagtgcaaaacaagtagcaactcagtaaccacttacgaaacttgtcaaacatacgaacgtcctatcgcattcacatctcgcagtaaaaagttgtggatccaattcaagagcaacgagggtaattctgcacgcggattccaggtgccatatgtgacatatgatgaggactatcaggagctgatcgaggacattgtgcgagatggacggttgtatgcgtctgagaatcatcaggaaattcttaaagataagaagttgattaaagccctgttcgatgttctcgcccacccgcagaattattttaagtataccgcccaggagtcaagagagatgtttccacgatccttcatcagattacttcggagcaaggtgtcaagattccttcgtccatataagtag

SEQ ID NO: 66652 - DNA, 2424 bp, Artificial Sequence
  derived and/or modified sequence
atgggcgtggccggcaggaacagacctggagctgcctgggccgtgctgctgctgctgctgctgctgccccccctgctgctgctggccggggctgtgcccccaggccggggccgggccgccggcccccaggaggatgtggatgaatgtgcccagggcctggatgactgccacgcagatgccctgtgccagaacacccccaccagctacaagtgcagctgcaagccaggctaccagggcgagggccggcagtgtgaagatattgatgaatgtggaaatgagctgaatggaggctgtgtgcatgactgcctgaacatccctggcaactaccgctgcacctgctttgatggcttcatgctggcccatgatggccacaactgcctggatgtggatgaatgtctggagaacaacggcggctgccagcacacctgtgtgaatgtgatgggcagctatgagtgctgctgcaaggagggcttcttcctgagtgacaaccagcacacctgcatccacaggtctgaggagggcctgagctgcatgaacaaggaccacggctgcagccacatctgcaaggaggccccccggggctctgtggcctgtgaatgtcggcccggctttgagctggccaagaaccagagggactgcatcctgacctgcaaccacggcaatggaggctgccagcacagctgtgatgacacagcagatggccctgagtgcagctgccacccccagtacaagatgcacacagatggccgcagctgcctggagcgggaggacacagtgctggaggtgacagagagcaacaccacctctgtggtggatggagacaagagggtgaagaggcggctgctgatggagacctgtgctgtgaacaacggcggctgtgacaggacctgcaaggacaccagcactggagtgcactgcagctgccctgtgggcttcaccctgcagctggatggcaagacctgcaaggacattgatgagtgccagaccagaaatggaggctgtgaccacttctgcaagaacatcgtgggcagctttgactgtggctgcaagaagggcttcaagctgctgacagatgagaagagctgccaggatgtggatgaatgttccctggacaggacctgtgaccacagctgcatcaaccaccctggcacctttgcctgtgcctgcaacagaggctacaccctgtatggcttcacccactgtggggacaccaatgaatgttccatcaacaatggaggctgccagcaggtgtgtgtgaacacagtgggcagctatgagtgccagtgccaccctggctacaagctgcactggaacaagaaggactgtgtggccagctgtgacctgagctgcatcgtgaagaggacagagaagaggctgaggaaggccatccgcaccctgaggaaggctgtgcaccgggagcagttccacctgcagctgagcggcatgaacctggatgtggccaagaagccacccaggaccagcgagcggcaggccgagagctgtggggtgggccagggccacgccgagaaccagtgtgtgtcctgcagagctggcacctactatgatggagcccgggagcgctgcatcctgtgccccaacggcaccttccagaatgaggagggccagatgacctgtgagccctgccccaggcctggcaacagcggggccctgaagaccccagaggcctggaacatgtctgaatgtggcggcctgtgccagcccggggagtacagcgcagatggctttgccccctgccacctgtgtgccctgggcaccttccagcctgaggccggccgcaccagctgcttcccctgtggcggcggcctggccaccaagcaccagggcgccaccagcttccaggactgtgagaccagggtgcagtgcagccctggccacttctacaacaccaccacccaccgctgcatccgctgccctgtgggcacctaccagcctgagtttgggaagaacaactgtgtgtcctgccccggcaacaccaccacagactttgatggcagcaccaacatcacccagtgcaagaccagcagcaacagcgtgaccacctatgagacctgccagacctatgaaagacccatcgccttcaccagccgcagcaagaagctgtggatccagttcaagagcaatgaaggcaacagcgcccggggcttccaggtgccctacgtgacctatgatgaggactaccaggagctgattgaggacatcgtgagagatggccgcctgtatgccagcgagaaccaccaggagatcctgaaggacaagaagctgatcaaggccctgtttgatgtgctggcccacccccagaactacttcaagtacacagcccaggagagccgggagatgttccccaggagcttcatccggctgctgcggagcaaggtgagccgcttcctgcggccctacaagtag

SEQ ID NO: 66653 - DNA, 2424 bp, Artificial Sequence
  derived and/or modified sequence
atgggcgtggccggccggaaccggcccggcgccgcctgggccgtgttgctcttgctgctcttactccctcctctactgctcctggcaggcgccgtaccacctggaagaggtcgggccgctggaccccaagaagacgtggatgaatgcgcacagggtttggacgattgccacgcggacgcattgtgtcaaaacactcctacttcctacaaatgttcctgtaagccgggatatcagggcgagggtaggcagtgtgaggatatagatgagtgtggaaatgagctcaacgggggctgcgtgcatgactgtctgaatatccccggcaattataggtgtacctgtttcgacggctttatgctggcgcatgatggccataactgtcttgacgtagacgagtgtttagaaaataatggcggctgccagcatacatgcgtaaacgtcatgggcagctatgagtgttgctgtaaggagggatttttcctgtccgataatcagcacacgtgtatacatcgctctgaagagggtcttagttgcatgaacaaagatcatgggtgttcacatatctgcaaggaggcacctaggggtagcgtggcctgcgagtgtaggcctgggtttgagctagcaaagaatcagcgcgactgcatcctgacctgcaatcatgggaacggcggatgccagcatagctgtgacgataccgcagacggccctgaatgctcctgtcacccacaatataagatgcacactgatggacgatcctgtctggagcgggaagacaccgtcttagaggtgactgagtcaaatactacatctgtcgtggacggtgacaagcgtgtcaaacgtcgccttctgatggaaacctgcgccgtgaacaacggcgggtgtgaccgcacatgcaaagatacatccaccggggttcattgctcatgtcctgttggcttcacactgcagctagatggcaaaacttgtaaagacattgacgagtgccagacaaggaatggtggatgcgaccatttctgcaagaatattgtggggagctttgactgcggctgcaagaaggggttcaagttactgacagacgaaaaaagttgtcaagatgtagatgagtgctcccttgacagaacttgtgaccatagctgcatcaatcatccaggaacctttgcctgcgcatgcaaccgggggtatacactgtacggtttcacccattgtggggacactaatgaatgtagtattaataacggcggatgccagcaggtatgcgtgaataccgtagggagctatgagtgccagtgccatccaggatacaagttacattggaacaaaaaagattgtgtggcctcatgcgatctgagttgcattgttaaaaggacggaaaagcgactgaggaaagcaataaggactctgcggaaggccgttcaccgggagcagtttcacctgcagctctcaggcatgaatttagacgtcgccaagaagccaccaaggacatccgagcgccaggccgagtcctgtggggtgggccagggacacgccgagaatcagtgtgtaagctgtagagctggcacctattatgacggagcgagggagcgctgtatactgtgccccaacggcacatttcagaatgaggagggtcagatgacttgtgagccatgcccaaggccggggaactcaggtgccctcaaaactcctgaagcctggaacatgtccgaatgcggggggctatgccagcctggtgaatacagcgccgacggattcgctccctgccatctgtgtgccctgggcacttttcagccagaggctggcagaaccagctgttttccctgcggcggtggactcgctaccaaacatcagggggctactagcttccaggattgtgaaaccagggtgcaatgttcgcctggccacttctacaatacaaccactcaccgttgtattagatgtccagtgggtacataccagccagaatttggcaagaacaattgtgtatcttgccccggaaacactactacagacttcgacggatcaaccaatatcacgcaatgcaaaacatccagcaatagcgtaacgacatacgaaacctgtcagacctacgagaggccgatagcttttacgtctcggagcaaaaagctgtggatccagttcaagtcaaacgaaggaaatagtgcaagaggatttcaggtcccatacgtgacttacgatgaagactatcaagaattaatcgaggatattgtcagagacggaagactttacgcttctgagaatcaccaggagattctaaaggataagaaattgatcaaagcactcttcgatgttctcgcccacccccagaattatttcaaatacaccgcccaggagtcccgtgagatgtttcctaggagctttattaggttgctgaggagcaaggtctctcgattcctcagaccttacaagtag

SEQ ID NO: 66654 - DNA, 2424 bp, Artificial Sequence
  derived and/or modified sequence
atgggagtggccggacgaaaccggccaggcgctgcttgggcagtcctcctcctgctgctactcctcccccctctgctcctgttggcaggagcagtgcccccagggagaggaagagctgccggtccacaggaggatgtcgacgaatgcgcgcaaggacttgatgattgccatgcggacgccctctgccaaaatacaccgactagctacaaatgctcctgcaaaccaggctatcagggagagggaagacaatgtgaagacatcgacgaatgtggtaacgaactgaatggaggctgtgttcatgactgcctaaatattccaggaaactaccggtgcacctgcttcgacggatttatgctggcccacgacgggcacaactgcctggacgtggacgagtgcctagagaacaatgggggatgtcaacacacgtgtgtgaacgtgatgggttcctatgaatgttgttgcaaggaaggctttttcctgagcgataatcagcacacttgcatccaccggtctgaagagggactgagctgcatgaataaggatcacggttgctcacacatctgtaaggaggcccctaggggatcggttgcctgtgaatgtagacccggttttgaactggctaaaaaccagcgtgactgcattttgacctgtaatcatgggaacggcggatgccagcacagttgtgacgacactgctgatggccctgagtgttcatgccaccctcagtacaagatgcataccgacggccgtagttgcttggaaagggaggacacagtgctagaagttaccgagagcaacaccactagtgtggtggatggcgataaacgggtcaaaagacggctgttgatggagacatgtgctgtcaacaacggcggatgtgaccggacgtgtaaggatacatccactggcgttcattgcagctgtcctgtgggttttaccttgcagctcgacgggaaaacgtgcaaggatatagatgaatgccagactaggaacggcggatgcgaccatttctgcaaaaacattgtgggatccttcgactgtggatgcaaaaaagggttcaaactgttgaccgacgaaaaatcctgtcaagatgtagacgagtgcagtttagacagaacttgtgatcattcttgtatcaaccatccaggcaccttcgcgtgcgcatgcaatcgaggttacaccttgtacggtttcacgcactgtggcgacaccaacgagtgctctattaacaatgggggttgccaacaagtttgtgtgaataccgtcggcagttacgaatgccaatgtcacccaggctacaagctccattggaataaaaaagactgcgtagccagctgtgacctgtcttgcattgttaaacggaccgagaaaagactccgaaaggccatacgcacactacggaaagcagtgcaccgggagcagttccacctccaactctccggcatgaacctggatgtggcaaaaaagccgccaagaacctccgagcgccaggctgagtcttgcggcgtcggacagggtcacgcagagaatcagtgcgtttcatgcagggccggtacatactatgacggcgcacgagaacgatgcattctgtgtcctaatggaacctttcaaaacgaggagggtcaaatgacttgtgagccatgcccccgtcctgggaacagcggagccttaaaaacccccgaggcatggaacatgtcagagtgtggaggattgtgtcagcctggtgagtactccgccgacgggttcgccccttgccacctgtgcgcgctgggtaccttccagcctgaggctgggcgaacctcttgctttccatgcgggggaggcctagcaaccaagcaccagggcgctaccagtttccaggattgtgagacaagagttcaatgttcacccggacacttttacaacacgaccacccatagatgcatccggtgcccggtcggaacctaccaacccgagttcggaaagaacaattgtgtttcgtgtcctggtaatacaactactgacttcgatggtagtactaacatcactcaatgtaagacgtcaagtaactccgttaccacatacgagacttgtcaaacctatgagcgcccaattgcattcacgagccgcagcaagaagctgtggatccaattcaagagcaacgaaggaaatagtgccaggggatttcaggtaccctatgtaacgtatgatgaggactatcaggaacttattgaagatatcgtaagagatggcagactctacgcctccgagaaccatcaggaaatattaaaagataagaaactgatcaaggcattattcgacgtgttagcccacccacagaattactttaagtacacagctcaggagagccgtgagatgttcccaagatctttcatcaggttgctgaggtccaaggtgtctcgttttctgcgaccttacaagtag

SEQ ID NO: 66655 - DNA, 2912 bp, Artificial Sequence
  derived and/or modified sequence
gcaaccgctgagccatccatgggggtcgcgggccgcaaccgtcccggggcggcctgggcggtgctgctgctgctgctgctgctgccgccactgctgctgctggcgggggccgtcccgccgggtcggggccgtgccgcggggccgcaggaggatgtagatgagtgtgcccaagggctagatgactgccatgccgacgccctgtgtcagaacacacccacctcctacaagtgctcctgcaagcctggctaccaaggggaaggcaggcagtgtgaggacatcgatgaatgtggaaatgagctcaatggaggctgtgtccatgactgtttgaatattccaggcaattatcgttgcacttgttttgatggcttcatgttggctcatgacggtcataattgtcttgatgtggacgagtgcctggagaacaatggcggctgccagcatacctgtgtcaacgtcatggggagctatgagtgctgctgcaaggaggggtttttcctgagtgacaatcagcacacctgcattcaccgctcggaagagggcctgagctgcatgaataaggatcacggctgtagtcacatctgcaaggaggccccaaggggcagcgtcgcctgtgagtgcaggcctggttttgagctggccaagaaccagagagactgcatcttgacctgtaaccatgggaacggtgggtgccagcactcctgtgacgatacagccgatggcccagagtgcagctgccatccacagtacaagatgcacacagatgggaggagctgccttgagcgagaggacactgtcctggaggtgacagagagcaacaccacatcagtggtggatggggataaacgggtgaaacggcggctgctcatggaaacgtgtgctgtcaacaatggaggctgtgaccgcacctgtaaggatacttcgacaggtgtccactgcagttgtcctgttggattcactctccagttggatgggaagacatgtaaagatattgatgagtgccagacccgcaatggaggttgtgatcatttctgcaaaaacatcgtgggcagttttgactgcggctgcaagaaaggatttaaattattaacagatgagaagtcttgccaagatgtggatgagtgctctttggataggacctgtgaccacagctgcatcaaccaccctggcacatttgcttgtgcttgcaaccgagggtacaccctgtatggcttcacccactgtggagacaccaatgagtgcagcatcaacaacggaggctgtcagcaggtctgtgtgaacacagtgggcagctatgaatgccagtgccaccctgggtacaagctccactggaataaaaaagactgtgtggcttcttgtgacctgagctgcatcgtaaagcgaaccgagaagcggctccgtaaagccatccgcacgctcagaaaggccgtccacagggagcagtttcacctccagctctcaggcatgaacctcgacgtggctaaaaagcctcccagaacatctgaacgccaggcagagtcctgtggagtgggccagggtcatgcagaaaaccaatgtgtcagttgcagggctgggacctattatgatggagcacgagaacgctgcattttatgtccaaatggaaccttccaaaatgaggaaggacaaatgacttgtgaaccatgcccaagaccaggaaattctggggccctgaagaccccagaagcttggaatatgtctgaatgtggaggtctgtgtcaacctggtgaatattctgcagatggctttgcaccttgccatctctgtgccctgggcacgttccagcctgaagctggtcgaacttcctgcttcccctgtggaggaggccttgccaccaaacatcagggagctacttcctttcaggactgtgaaaccagagttcaatgttcacctggacatttctacaacaccaccactcaccgatgtattcgttgcccagtgggaacataccagcctgaatttggaaaaaataattgtgtttcttgcccaggaaatactacgactgactttgatggctccacaaacataacccagtgtaaaacttcatccaattctgtgacaacatatgaaacctgccagacctacgaacgccccatcgccttcacctccaggtcaaagaagctgtggattcagttcaagtccaatgaagggaacagcgctagagggttccaggtcccatacgtgacatatgatgaggactaccaggaactcattgaagacatagttcgagatggcaggctctatgcatctgagaaccatcaggaaatacttaaggataagaaacttatcaaggctctgtttgatgtcctggcccatccccagaactatttcaagtacacagcccaggagtcccgagagatgtttccaagatcgttcatccgattgctacgttccaaagtgtccaggtttttgagaccttacaaatgactcagcccacgtgccactcaatacaaatgttctgctatagggttggtgggacagagctgtcttccttctgcatgtcagcacagtcgggtattgctgcctcccgtatcagtgactcattagagttcaatttttatagataatacagatattttggtaaattgaacttggtttttctttcccagcatcgtggatgtagactgagaatggctttgagtggcatcagcttctcactgctgtgggcggatgtcttggatagatcacgggctggctgagctggactttggtcagcctaggtgagactcacctgtccttctggggtcttactcctcctcaaggagtctgtagtggaaaggaggccacagaataagctgcttattctgaaacttcagcttcctctagcccggccctctctaagggagccctctgcactcgtgtgcaggctctgaccaggcagaacaggcaagagggga

SEQ ID NO: 66656 - DNA, 2424 bp, Artificial Sequence
  derived and/or modified sequence
atgggcgtggccggcagaaacagacccggcgccgcctgggccgtgctgctgctgctgctgctgctgccccccctgctgctgctggccggcgccgtgccccccggcagaggcagagccgccggcccccaggaggacgtggacgagtgcgcccagggcctggacgactgccacgccgacgccctgtgccagaacacccccaccagctacaagtgcagctgcaagcccggctaccagggcgagggcagacagtgcgaggacatcgacgagtgcggcaacgagctgaacggcggctgcgtgcacgactgcctgaacatccccggcaactacagatgcacctgcttcgacggcttcatgctggcccacgacggccacaactgcctggacgtggacgagtgcctggagaacaacggcggctgccagcacacctgcgtgaacgtgatgggcagctacgagtgctgctgcaaggagggcttcttcctgagcgacaaccagcacacctgcatccacagaagcgaggagggcctgagctgcatgaacaaggaccacggctgcagccacatctgcaaggaggcccccagaggcagcgtggcctgcgagtgcagacccggcttcgagctggccaagaaccagagagactgcatcctgacctgcaaccacggcaacggcggctgccagcacagctgcgacgacaccgccgacggccccgagtgcagctgccacccccagtacaagatgcacaccgacggcagaagctgcctggagagagaggacaccgtgctggaggtgaccgagagcaacaccaccagcgtggtggacggcgacaagagagtgaagagaagactgctgatggagacctgcgccgtgaacaacggcggctgcgacagaacctgcaaggacaccagcaccggcgtgcactgcagctgccccgtgggcttcaccctgcagctggacggcaagacctgcaaggacatcgacgagtgccagaccagaaacggcggctgcgaccacttctgcaagaacatcgtgggcagcttcgactgcggctgcaagaagggcttcaagctgctgaccgacgagaagagctgccaggacgtggacgagtgcagcctggacagaacctgcgaccacagctgcatcaaccaccccggcaccttcgcctgcgcctgcaacagaggctacaccctgtacggcttcacccactgcggcgacaccaacgagtgcagcatcaacaacggcggctgccagcaggtgtgcgtgaacaccgtgggcagctacgagtgccagtgccaccccggctacaagctgcactggaacaagaaggactgcgtggccagctgcgacctgagctgcatcgtgaagagaaccgagaagagactgagaaaggccatcagaaccctgagaaaggccgtgcacagagagcagttccacctgcagctgagcggcatgaacctggacgtggccaagaagccccccagaaccagcgagagacaggccgagagctgcggcgtgggccagggccacgccgagaaccagtgcgtgagctgcagagccggcacctactacgacggcgccagagagagatgcatcctgtgccccaacggcaccttccagaacgaggagggccagatgacctgcgagccctgccccagacccggcaacagcggcgccctgaagacccccgaggcctggaacatgagcgagtgcggcggcctgtgccagcccggcgagtacagcgccgacggcttcgccccctgccacctgtgcgccctgggcaccttccagcccgaggccggcagaaccagctgcttcccctgcggcggcggcctggccaccaagcaccagggcgccaccagcttccaggactgcgagaccagagtgcagtgcagccccggccacttctacaacaccaccacccacagatgcatcagatgccccgtgggcacctaccagcccgagttcggcaagaacaactgcgtgagctgccccggcaacaccaccaccgacttcgacggcagcaccaacatcacccagtgcaagaccagcagcaacagcgtgaccacctacgagacctgccagacctacgagagacccatcgccttcaccagcagaagcaagaagctgtggatccagttcaagagcaacgagggcaacagcgccagaggcttccaggtgccctacgtgacctacgacgaggactaccaggagctgatcgaggacatcgtgagagacggcagactgtacgccagcgagaaccaccaggagatcctgaaggacaagaagctgatcaaggccctgttcgacgtgctggcccacccccagaactacttcaagtacaccgcccaggagagcagagagatgttccccagaagcttcatcagactgctgagaagcaaggtgagcagattcctgagaccctacaagtag

SEQ ID NO: 66657 - protein, 777 aa, Artificial Sequence
  derived and/or modified sequence
MNKDYQKFWSSPSDPVHFEVDTSHEKVESMSESDTMNVSNLSQGVMLSHSPICMETTGTTCDLPQNEIKNFERENEYESTLCEDAYGTLDNLLNDNNIENYSTNALIQPVDTISISSLRQFETVCKFHWVEAFDDEMTEKPEFQSQVYNYAKDNNIKQDSFKEENPMETSVSANTDQLGNEYFRQPPPRSPPLIHCSGEMLKFTEKSLAKSIAKESALNPSQPPSFLCKTAVPSKEIQNYGEIPEMSVSYEKEVTAEGVERPEIVSTWSSAGISWRSEACRENCEMPDWEQSAESLQPVQEDMALNEVLQKLKHTNRKQEVRIQELQCSNLYLEKRVKELQMKITKQQVFIDVINKLKENVEELIEDKYKIILEKNDTKKTLQNLEEVLANTQKHLQESRNDKEMLQLQFKKIKANYVCLQERYMTEMQQKNKSVSQYLEMDKTLSKKEEEVERLQQLKKELEKATASALDLLKREKEAQEQEFLSLQEEFQKLEKENLEERQKLKSRLEKLLTQVRNLQFMSENERTKNIKLQQQINEVKNENAKLKQQVARSEEQNYVPKFETAQLKDQLEEVLKSDITKDTKTTHSNLLPDCSPCEERLNPADIKRASQLASKMHSLLALMVGLLTCQDIINSDAEHFKESEKVSDIMLQKLKSLHLKKKTLDKEVIDCDSDEAKSIRDVPTLLGAKLDKYHSLNEELDFLVTSYEEIIECADQRLAISHSQIAHLEERNKHLEDLIRKPREKARKPRSKSLENHPKSMTMMPALFKENRNDLD

SEQ ID NO: 66658 - protein, 839 aa, Artificial Sequence
  derived and/or modified sequence
MNKDYQKFWSSPSDPVHFEVDTSHEKVESMSESDTMNVSNLSQGVMLSHSPICMETTGTTCDLPQNEIKNFERENEYESTLCEDAYGTLDNLLNDNNIENYSTNALIQPVDTISISSLRQFETVCKFHWVEAFDDEMTEKPEFQSQVYNYAKDNNIKQDSFKEENPMETSVSANTDQLGNEYFRQPPPRSPPLIHCSGEMLKFTEKSLAKSIAKESALNPSQPPSFLCKTAVPSKEIQNYGEIPEMSVSYEKEVTAEGVERPEIVSTWSSAGISWRSEACRENCEMPDWEQSAESLQPVQEDMALNEVLQKLKHTNRKQEVRIQELQCSNLYLEKRVKELQMKITKQQVFIDVINKLKENVEELIEDKYKIILEKNDTKKTLQNLEEVLANTQKHLQESRNDKEMLQLQFKKIKANYVCLQERYMTEMQQKNKSVSQYLEMDKTLSKKEEEVERLQQLKKELEKATASALDLLKREKEAQEQEFLSLQEEFQKLEKENLEERQKLKSRLEKLLTQVRNLQFMSENERTKNIKLQQQINEVKNENAKLKQQVARSEEQNYVPKFETAQLKDQLEEVLKSDITKDTKTTHSNLLPDCSPCEERLNPADIKRASQLASKMHSLLALMVGLLTCQDIINSDAEHFKESEKVSDIMLQKLKSLHLKKKTLDKELLKHKDRITTFRELIAKEKAFQDHAIKVIDCDSDEAKSIRDVPTLLGAKLDKYHSLNEELDFLITKLGHLLESKENHCNRLIEENDKYQRHLGNLIKKVTSYEEIIECADQRLAISHSQIAHLEERNKHLEDLIRKPREKARKPRSKSLENHPKSMTMMPALFKENRNDLD

SEQ ID NO: 66659 - DNA, 2334 bp, Artificial Sequence
  derived and/or modified sequence
atgaataaggattaccagaagttctggtcttctcccagcgatcccgtgcatttcgaggtggatacaagccatgaaaaagtggagtctatgagcgaaagcgacaccatgaatgtttctaacctctcacagggcgtcatgctgtcccacagccccatctgcatggagacaacagggaccacatgcgaccttccccagaacgagattaaaaacttcgagcgtgaaaatgagtatgagtccaccctctgcgaagacgcttacggaacgctggataatctgctgaacgacaacaatattgagaattatagcaccaatgcactgattcagcccgtggatacaatcagcatctcttccctgaggcagtttgagacagtctgtaagtttcattgggtcgaagcatttgacgacgagatgaccgaaaaaccggaattccagtcccaggtgtataattacgccaaagataataatataaagcaggactcattcaaggaagagaaccccatggagactagcgtgtccgccaacacagaccagctcggcaatgagtattttcggcaacctccccctcgttcaccacctctgattcattgtagtggggagatgctcaagttcacagagaagagcctcgccaagtccatcgccaaagagtccgcactaaacccaagccaaccaccttcctttctgtgcaagaccgccgttcctagtaaggaaatccagaattacggggaaattccagagatgagcgtctcctacgagaaggaagtaaccgccgagggggtggaaagacctgaaattgtctcaacttggagctcggctggaatcagctggagatcagaggcttgtagagagaattgtgagatgcctgactgggagcagagcgctgagtctctgcaaccagttcaggaagacatggccctcaatgaagttttacaaaaactcaagcatacaaatcggaagcaggaggtgcggatccaagaactccaatgttccaatttgtatttagagaagagggtcaaggaactgcagatgaagattaccaaacagcaggtgtttatcgacgtgatcaacaaactcaaggagaacgttgaagaactcatcgaggataaatacaaaataatcctggaaaagaacgacaccaaaaaaaccctccagaatctcgaagaggttctggccaatacacagaaacatttgcaggagtctagaaacgacaaagagatgctacaattacagttcaagaagatcaaggccaactatgtgtgtctacaggagcggtacatgaccgaaatgcagcagaaaaataaaagcgtaagccagtatctggagatggataagactctgtctaagaaagaggaggaagtcgagcgactacagcagttgaagaaggagctggagaaagccaccgcatctgccctggatctgctaaagcgggagaaagaggcccaggagcaggaattcctgtcactccaggaggagttccaaaagcttgaaaaggagaacctcgaagagcggcagaagctgaagagccgcctggaaaaacttctgactcaagtccggaacctgcagtttatgtccgagaatgagcggaccaaaaacataaagctacagcagcagataaatgaggtcaaaaatgaaaacgcaaagctgaagcaacaagtcgcacgcagcgaggaacaaaactatgtgccaaagtttgaaacggcccagcttaaagaccagcttgaagaggttctgaaaagtgacattactaaggatacaaagactacccactctaatctgttacccgactgctctccctgcgaagagagactgaaccccgccgatatcaaaagggccagtcagctagccagtaaaatgcattccctcctggctcttatggttgggttgctaacttgccaggatatcattaactccgatgccgagcattttaaagaaagcgagaaggtgagcgacatcatgctgcagaagttaaagtcactccatctcaaaaaaaaaaccctagacaaggaggtcatcgactgcgattcagacgaagctaaatccataagagatgtaccaactttgctcggggccaagttagacaaataccacagcctgaacgaggaactcgatttcctcgtaaccagctacgaggaaatcatagagtgcgccgaccagcgactggccattagtcacagccagattgcccatttggaggagagaaataagcacctggaggacctgatccggaagccccgcgaaaaggccagaaagccaaggtcaaagagcctggaaaatcaccccaagagcatgacaatgatgcccgcactgttcaaagagaaccgcaatgatctcgactag

SEQ ID NO: 66660 - DNA, 2103 bp, Artificial Sequence
  derived and/or modified sequence
atgaataaggactaccagaagttttggtcaagcccgagtgatccagtgcacttcgaagtggacaccagccacgaaaaggttgagtctatgtcagagtcagataccatgaatgtaagcaatttatcacagggagtgatgctttcgcacagtcctatttgtatggaaacaactggcacaacttgtgatctgccacagaacgagatcaagaattttgaacgcgaaaatgaatacgaaagtacactttgtgaagacgcttatggcacgctggataacctcctgaacgacaacaatattgagaattactctacaaacgccctaatacagccagtcgacactatctcaatttcttcattgcgccaattcgagactgtgtgcaaattccactgggtggaagcctttgacgatgaaatgactgaaaagcccgaatttcagtcgcaggtgtataattacgctaaagacaacaacatcaagcaggactctttcaaggaggagaaccctatggaaacttccgtctctgccaataccgatcagctgggcaacgagtactttaggcagccccccccgcgcagtcctccactgattcactgctcaggcgagatgctcaagtttacagaaaagtctctggcaaagtctattgccaaggagagcgctttaaaccctagccagcccccgtcgttcctgtgtaaaacggctgtgcctagtaaagaaattcaaaattacggagagataccagaaatgtccgtgtcctatgagaaggaagtgaccgcggaaggcgtcgagaggcccgagatcgttagcacttggagcagcgccggcataagttggcgttccgaagcttgtcgagaaaactgtgaaatgccagattgggagcaatccgccgagtccctgcagccagtccaagaggacatggccttaaatgaggtgctgcaaaagctcaaacacaccaacagaaaacaagaagtcaggatacaggaactgcaatgctccaacctctatttggaaaaaagggtgaaagagcttcagatgaaaatcactaaacaacaggtcttcattgacgtgataaacaagctgaaggagaatgtggaagagctgattgaggacaaatacaagatcatcttggagaaaaatgatactaagaagacattacagaatctggaagaagtgctggcaaacacccaaaagcacctgcaggaaagccggaacgacaaggaaatgcttcagctgcagtttaaaaagatcaaggcgaactacgtttgcctccaggaaaggtacatgacggaaatgcagcagaaaaacaagtcggtgtcacagtacttggagatggacaaaacactcagcaaaaaggaggaggaggtggagcggctccagcagctgaaaaaggaactggaaaaggcaaccgcaagtgcattggacctgctgaaacgggagaaagaagcccaagagcaagagtttctatctctccaagaggaatttcagaagctagagaaagagaatctggaggaacggcagaagctgaagagccgcttagaaaagcttctgacccaagttcggaacttacagtttatgtctgagaatgaacgtacaaagaatattaaattgcagcagcagatcaacgaggtcaaaaatgaaaatgctaaactgaagcagcaggtggcaaggtcggaagagcagaattacgtgcccaaattcgagacggctcagctcaaggatcaactcgaagaggtcctgaagagcgacatcaccaaggatacaaaaaccacacatagcaatctgctgccagactgttccccttgcgaggagcgactaaatcctgccgacatcaaaagagcctcgcaactagcctcaaagatgcactctctgctggcgctgatggtggggctcctgacttgccaggacattattaactccgacgctgagcatttcaaagaatccgagaaggtgagcgacataatgttgcagaagttaaagagcttgcacctgaagaaaaagaccttggataaagaattgctcaaacacaaagatcggattacaacgtttagggaactgatcgcaaaggaaaaggcgtttcaggaccatgcaattaaggtctttcagggagtttag

SEQ ID NO: 66661 - DNA, 2520 bp, Artificial Sequence
  derived and/or modified sequence
atgaacaaggactatcagaagttctggtcgtcgccatcagacccagtgcatttcgaggtcgacacctctcatgaaaaggtcgaaagcatgtccgagagtgatactatgaacgtgtctaatttgagccaaggagtgatgctctcccatagtcccatttgtatggagaccaccggcaccacatgtgacttgccccagaatgagatcaagaatttcgaaagagagaacgaatatgaatccaccttatgcgaggacgcgtacggtacgctggacaacttgctgaacgacaataacatcgagaactactctaccaatgcactaatccagcctgttgatactatttcaatctcgagcctgcgccaatttgaaactgtatgcaagtttcattgggtggaagcatttgatgacgagatgactgaaaagccggaatttcaaagccaagtctacaactacgccaaggacaacaatataaagcaggactcttttaaagaggaaaacccaatggaaacatcggtttcggctaataccgatcagctgggcaatgaatactttcgtcagcctcccccccggtctcctcccttgattcattgttctggagagatgctgaagttcacagaaaaatccctagctaagtcaatcgcaaaagagagcgcattgaacccgtctcagcccccatctttcttgtgcaagacggccgtgccctcaaaggaaatccagaattatggggagattccagaaatgagcgtgagctatgagaaggaagttacggccgaaggcgtggagcgtcccgagatcgttagtacctggtcctctgccggaatctcatggcgaagcgaagcatgtcgggaaaattgcgagatgcccgactgggagcaatctgcggagtctttgcagccagtccaggaagacatggccctgaatgaagtgctgcaaaagcttaagcatacaaaccgaaaacaggaggtccgcatacaggagttgcagtgtagcaatctttatctggaaaagcgcgtaaaggaactccaaatgaagatcaccaaacagcaagtgttcattgatgtgatcaacaaactgaaggagaatgtggaagaattgatcgaggataagtacaaaatcatcttggaaaaaaatgacaccaagaaaaccctgcagaatctcgaagaggtgctggccaacacacagaagcaccttcaggaatctagaaacgacaaagagatgctgcagttgcaatttaaaaaaattaaagctaattacgtttgtctgcaggagcgatatatgactgagatgcagcagaagaataagtccgtctcacaatacctcgaaatggacaaaacgctgagcaagaaagaggaggaggtggagcgcctacagcagctcaaaaaggagctcgaaaaggctacagcgtcagccctggacctgctaaagcgggagaaagaagcacaggaacaagaattcctctcattacaggaagagttccagaagctcgagaaggagaacctggaagagcgccagaagctgaaaagtaggttggaaaaactgttaacacaagtgcggaacttgcagttcatgtcagagaatgaacgaaccaaaaacatcaagctgcagcagcagattaatgaggtgaaaaacgaaaatgccaaactgaaacagcaagtcgccagatctgaggaacaaaactacgtccctaaatttgaaactgcacagcttaaagaccagctcgaggaagtcctgaagtccgatattaccaaagacaccaagacgactcacagcaaccttctgccagactgctcgccctgtgaggagcgactgaaccccgccgacattaaacgagcgtcccagctggcatcgaagatgcatagcctgctggccctgatggttggcttacttacttgccaggacataataaacagtgacgcggagcatttcaaagaatccgaaaaggtgagtgatatcatgctccaaaaactcaagtctcttcacctgaagaaaaagacgctagataaagagctgctgaagcacaaggatagaatcactaccttccgagagctgatagccaaagaaaaggccttccaagaccacgcaatcaaggtgatcgactgcgacagcgatgaggccaagtcaatacgagatgttccgactttgctcggggctaagctagacaagtaccactctcttaacgaagagttggacttcttgataacaaagctcggacaccttctagagtcaaaagagaaccactgcaacagactgatcgaagaaaacgataaatatcagagacacctcgggaatctgattaaaaaagtcacctcctacgaggagatcatcgaatgtgccgaccagcgactggccatctcccatagtcaaatcgcacatttggaggaacgaaataagcacctggaagacttgatcaggaagccaagggagaaagcaaggaagcctcgatcaaagtccctggagaaccacccaaagagtatgacaatgatgcctgctctgtttaaagagaataggaatgatttggactag

SEQ ID NO: 66662 - DNA, 2334 bp, Artificial Sequence
  derived and/or modified sequence
atgaacaaggactaccagaagttctggagcagccccagcgaccctgtgcactttgaggtggacaccagccatgagaaggtggagagcatgtctgagagtgacaccatgaatgtgagcaacctgagccagggcgtgatgctgagccacagccccatctgcatggagaccaccggcaccacctgtgacctgccccagaatgagatcaagaactttgagcgggagaatgaatatgagagcaccctgtgtgaagatgcctacggcaccctggacaacctgctgaatgacaacaacatcgagaactacagcaccaatgccctgatccagcctgtggacaccatcagcatcagcagcctgcggcagtttgaaacagtgtgcaagttccactgggtggaggcctttgatgatgagatgacagagaagccagagttccagagccaggtgtacaactatgccaaggacaacaacatcaagcaggacagcttcaaggaggagaaccccatggagacctctgtgtctgccaacacagaccagctgggcaatgagtacttccggcagcccccacccaggagccccccactcatccactgcagcggggagatgctgaagttcacagagaagagcctggccaagagcatcgccaaggagagcgccctgaaccccagccagcccccatccttcctgtgcaagacagctgtgcccagcaaggagatccagaactacggggagatccctgagatgtctgtgtcctatgagaaggaggtgacagctgagggcgtggagaggcctgagatcgtgtccacctggagcagcgctggcatctcctggaggtctgaggcctgccgggagaactgtgagatgccagactgggagcagagcgctgagagcctgcagcctgtgcaggaggacatggccctgaatgaggtgctgcagaagctgaagcacaccaacaggaagcaggaggtgcgcatccaggagctgcagtgcagcaacctgtacctggagaagagggtgaaggagctgcagatgaagatcaccaagcagcaggtgttcattgatgtgatcaacaagctgaaggaaaatgtggaggagctgattgaggacaagtacaagatcatcctggagaagaatgacaccaagaagaccctgcagaacctggaggaggtgctggccaacacccagaagcacctgcaggagagcagaaatgacaaggagatgctgcagctgcagttcaagaagatcaaggccaactacgtgtgcctgcaggagcgctacatgacagagatgcagcagaagaacaagtctgtgtcccagtacctggagatggacaagaccctgagcaagaaggaggaggaggtggagcggctgcagcagctgaagaaggagctggagaaggccacagccagcgccctggacctgctgaagcgggagaaggaggcccaggagcaggagttcctgagcctgcaggaggagttccagaagctggagaaggagaacctggaggagcggcagaagctgaagagccggctggagaagctgctgacccaggtgaggaacctgcagttcatgtctgaaaatgaaagaaccaagaacatcaagctgcagcagcagatcaatgaggtgaagaatgaaaatgccaagctgaagcagcaggtggcccggtctgaggagcagaactacgtgcccaagtttgaaacagcccagctgaaggaccagctggaggaggtgctgaagagtgacatcaccaaggacaccaagaccacccacagcaacctgctgcctgactgcagcccctgtgaggagcggctgaacccagctgacatcaagagggccagccagctggccagcaagatgcacagcctgctggccctgatggtgggcctgctgacctgccaggacatcatcaacagtgatgctgagcacttcaaggagagcgagaaggtgtctgacatcatgctgcagaagctgaagagcctgcacctgaagaagaagaccctggacaaggaggtgattgactgtgacagtgatgaggccaagagcatcagagatgtgcccaccctgctgggcgccaagctggacaagtaccacagcctgaatgaggagctggacttcctggtgaccagctatgaggagatcattgaatgtgccgaccagaggctggccatcagccacagccagatcgcccacctggaggagaggaacaagcacctggaggacctgatcaggaagccccgggagaaggccaggaagcccaggagcaagagcctggagaaccaccccaagtccatgaccatgatgcctgccctcttcaaggaaaatagaaatgacctggactag

SEQ ID NO: 66663 - DNA, 2103 bp, Artificial Sequence
  derived and/or modified sequence
atgaacaaggactaccagaagttctggagcagccccagcgaccctgtgcactttgaggtggacaccagccatgagaaggtggagagcatgtctgagagtgacaccatgaatgtgagcaacctgagccagggcgtgatgctgagccacagccccatctgcatggagaccaccggcaccacctgtgacctgccccagaatgagatcaagaactttgagcgggagaatgaatatgagagcaccctgtgtgaagatgcctacggcaccctggacaacctgctgaatgacaacaacatcgagaactacagcaccaatgccctgatccagcctgtggacaccatcagcatcagcagcctgcggcagtttgaaacagtgtgcaagttccactgggtggaggcctttgatgatgagatgacagagaagccagagttccagagccaggtgtacaactatgccaaggacaacaacatcaagcaggacagcttcaaggaggagaaccccatggagacctctgtgtctgccaacacagaccagctgggcaatgagtacttccggcagcccccacccaggagccccccactcatccactgcagcggggagatgctgaagttcacagagaagagcctggccaagagcatcgccaaggagagcgccctgaaccccagccagcccccatccttcctgtgcaagacagctgtgcccagcaaggagatccagaactacggggagatccctgagatgtctgtgtcctatgagaaggaggtgacagctgagggcgtggagaggcctgagatcgtgtccacctggagcagcgctggcatctcctggaggtctgaggcctgccgggagaactgtgagatgccagactgggagcagagcgctgagagcctgcagcctgtgcaggaggacatggccctgaatgaggtgctgcagaagctgaagcacaccaacaggaagcaggaggtgcgcatccaggagctgcagtgcagcaacctgtacctggagaagagggtgaaggagctgcagatgaagatcaccaagcagcaggtgttcattgatgtgatcaacaagctgaaggaaaatgtggaggagctgattgaggacaagtacaagatcatcctggagaagaatgacaccaagaagaccctgcagaacctggaggaggtgctggccaacacccagaagcacctgcaggagagcagaaatgacaaggagatgctgcagctgcagttcaagaagatcaaggccaactacgtgtgcctgcaggagcgctacatgacagagatgcagcagaagaacaagtctgtgtcccagtacctggagatggacaagaccctgagcaagaaggaggaggaggtggagcggctgcagcagctgaagaaggagctggagaaggccacagccagcgccctggacctgctgaagcgggagaaggaggcccaggagcaggagttcctgagcctgcaggaggagttccagaagctggagaaggagaacctggaggagcggcagaagctgaagagccggctggagaagctgctgacccaggtgaggaacctgcagttcatgtctgaaaatgaaagaaccaagaacatcaagctgcagcagcagatcaatgaggtgaagaatgaaaatgccaagctgaagcagcaggtggcccggtctgaggagcagaactacgtgcccaagtttgaaacagcccagctgaaggaccagctggaggaggtgctgaagagtgacatcaccaaggacaccaagaccacccacagcaacctgctgcctgactgcagcccctgtgaggagcggctgaacccagctgacatcaagagggccagccagctggccagcaagatgcacagcctgctggccctgatggtgggcctgctgacctgccaggacatcatcaacagtgatgctgagcacttcaaggagagcgagaaggtgtctgacatcatgctgcagaagctgaagagcctgcacctgaagaagaagaccctggacaaggagctgctgaagcacaaggaccgcatcaccaccttccgggagctgattgccaaggagaaggccttccaggaccacgccatcaaggtgttccagggcgtgtag

SEQ ID NO: 66664 - DNA, 2520 bp, Artificial Sequence
  derived and/or modified sequence
atgaacaaggactaccagaagttctggagcagccccagcgaccctgtgcactttgaggtggacaccagccatgagaaggtggagagcatgtctgagagtgacaccatgaatgtgagcaacctgagccagggcgtgatgctgagccacagccccatctgcatggagaccaccggcaccacctgtgacctgccccagaatgagatcaagaactttgagcgggagaatgaatatgagagcaccctgtgtgaagatgcctacggcaccctggacaacctgctgaatgacaacaacatcgagaactacagcaccaatgccctgatccagcctgtggacaccatcagcatcagcagcctgcggcagtttgaaacagtgtgcaagttccactgggtggaggcctttgatgatgagatgacagagaagccagagttccagagccaggtgtacaactatgccaaggacaacaacatcaagcaggacagcttcaaggaggagaaccccatggagacctctgtgtctgccaacacagaccagctgggcaatgagtacttccggcagcccccacccaggagccccccactcatccactgcagcggggagatgctgaagttcacagagaagagcctggccaagagcatcgccaaggagagcgccctgaaccccagccagcccccatccttcctgtgcaagacagctgtgcccagcaaggagatccagaactacggggagatccctgagatgtctgtgtcctatgagaaggaggtgacagctgagggcgtggagaggcctgagatcgtgtccacctggagcagcgctggcatctcctggaggtctgaggcctgccgggagaactgtgagatgccagactgggagcagagcgctgagagcctgcagcctgtgcaggaggacatggccctgaatgaggtgctgcagaagctgaagcacaccaacaggaagcaggaggtgcgcatccaggagctgcagtgcagcaacctgtacctggagaagagggtgaaggagctgcagatgaagatcaccaagcagcaggtgttcattgatgtgatcaacaagctgaaggaaaatgtggaggagctgattgaggacaagtacaagatcatcctggagaagaatgacaccaagaagaccctgcagaacctggaggaggtgctggccaacacccagaagcacctgcaggagagcagaaatgacaaggagatgctgcagctgcagttcaagaagatcaaggccaactacgtgtgcctgcaggagcgctacatgacagagatgcagcagaagaacaagtctgtgtcccagtacctggagatggacaagaccctgagcaagaaggaggaggaggtggagcggctgcagcagctgaagaaggagctggagaaggccacagccagcgccctggacctgctgaagcgggagaaggaggcccaggagcaggagttcctgagcctgcaggaggagttccagaagctggagaaggagaacctggaggagcggcagaagctgaagagccggctggagaagctgctgacccaggtgaggaacctgcagttcatgtctgaaaatgaaagaaccaagaacatcaagctgcagcagcagatcaatgaggtgaagaatgaaaatgccaagctgaagcagcaggtggcccggtctgaggagcagaactacgtgcccaagtttgaaacagcccagctgaaggaccagctggaggaggtgctgaagagtgacatcaccaaggacaccaagaccacccacagcaacctgctgcctgactgcagcccctgtgaggagcggctgaacccagctgacatcaagagggccagccagctggccagcaagatgcacagcctgctggccctgatggtgggcctgctgacctgccaggacatcatcaacagtgatgctgagcacttcaaggagagcgagaaggtgtctgacatcatgctgcagaagctgaagagcctgcacctgaagaagaagaccctggacaaggagctgctgaagcacaaggaccgcatcaccaccttccgggagctgattgccaaggagaaggccttccaggaccacgccatcaaggtgattgactgtgacagtgatgaggccaagagcatcagagatgtgcccaccctgctgggcgccaagctggacaagtaccacagcctgaatgaggagctggacttcctgatcaccaagctgggccacctgctggagagcaaagaaaaccactgcaacagactcatcgaggagaatgacaagtaccagaggcacctgggcaacctgatcaagaaggtgaccagctatgaggagatcattgaatgtgccgaccagaggctggccatcagccacagccagatcgcccacctggaggagaggaacaagcacctggaggacctgatcaggaagccccgggagaaggccaggaagcccaggagcaagagcctggagaaccaccccaagtccatgaccatgatgcctgccctcttcaaggaaaatagaaatgacctggactag

SEQ ID NO: 66665 - DNA, 2334 bp, Artificial Sequence
  derived and/or modified sequence
atgaacaaggactaccagaagttctggagcagccccagcgaccccgtccacttcgaggtggatacatctcacgagaaggtcgaaagtatgagtgagtccgatacaatgaacgtgagcaacctgagccaaggcgttatgttgagtcactcccctatctgcatggaaaccactgggacaacctgcgatctgcctcaaaacgagatcaagaattttgaaagggaaaacgagtacgaaagcacgctttgtgaagacgcctatggcacactcgacaacctgctgaacgataacaacatcgagaactacagcaccaatgccctgatccagccggtggataccataagcatcagctccctgagacagtttgagacggtgtgtaaatttcattgggtagaggccttcgatgacgagatgacagaaaaacccgaatttcagagtcaggtctataattacgctaaagacaataacatcaaacaggactcctttaaagaagaaaacccaatggaaacctcggtctccgctaatactgatcagcttgggaatgagtacttcaggcaacctccaccacggagcccccctcttatccactgcagtggtgagatgttgaagttcacggagaagagtttggcaaaaagtatcgctaaggagtccgccctgaatccttcccagcccccatcctttctgtgcaagacagcagtgccttctaaagagatccagaactacggcgagatcccagagatgtccgttagttatgagaaagaagtgacagccgagggagtggagaggccggagattgtctccacgtggagctctgctggtatctcctggaggtctgaagcgtgtcgggagaattgcgagatgcctgattgggaacagtctgccgaatccctgcagccagtgcaggaagacatggcgttgaacgaggtattgcaaaagctgaagcatacgaataggaaacaggaggtgcgcatccaggaattgcagtgcagtaatctctacctggagaaacgcgtcaaggaactacagatgaagattaccaagcagcaggtattcattgatgtcattaataaactgaaagagaacgttgaagaattgatagaggataaatataagattatattggagaaaaatgatactaagaagacattgcagaacctcgaagaagtgctggccaacactcagaaacatttacaggagtctaggaacgataaagagatgctgcagctccagtttaaaaaaataaaggcaaactacgtgtgcttgcaagagcgctacatgaccgagatgcagcagaaaaataaaagcgtcagccaatacttggagatggacaagaccctgtcgaaaaaagaggaagaagtcgagaggctgcagcaactgaagaaagaactagaaaaggctacagctagcgctctcgatctgctcaaaagggagaaggaagcccaggaacaagagttcttgtcattacaggaggaatttcagaaactggagaaagaaaacctggaggagcgccagaagctgaaatcacggctggaaaagctgctcacccaggtgcgtaacttgcagtttatgtccgagaacgaacgcacaaaaaacatcaaactacagcagcagatcaacgaggtcaaaaacgagaacgccaaactcaaacagcaggttgccagatccgaggagcaaaattacgtccccaagtttgagaccgctcaattaaaggatcagctcgaggaagtcctgaaaagcgacattaccaaggacaccaaaacaactcacagcaatctactaccagactgcagcccatgcgaagaaagactaaatccagcagacattaagcgtgcgtcccaactggcctccaagatgcattcactcctggccctcatggtgggcctgctgacttgtcaagatattattaatagcgacgctgagcatttcaaagagtccgagaaggtgtcagacattatgctgcagaaactgaagtccctgcacctcaagaaaaagacgctggataaggaagtcatagactgcgactccgatgaggccaagagcattcgtgacgtgccgaccctgctgggggccaagctggacaaataccacagcctgaacgaagaactggattttcttgtgaccagttacgaggagattattgaatgcgccgaccagaggctggccattagccacagccagatcgcccatctcgaggaacgtaacaagcacctggaagacctgattaggaagccacgagaaaaggccaggaagcctcggagcaaaagcctggaaaatcatccgaaatcaatgacgatgatgccagctttatttaaagaaaatagaaacgatcttgactag

SEQ ID NO: 66666 - DNA, 2103 bp, Artificial Sequence
  derived and/or modified sequence
atgaacaaggactaccagaagttctggagcagccccagcgaccccgtccacttcgaggtggacactagccacgagaaggtcgagagcatgtcagagtccgatacaatgaacgttagtaacctgtcacagggagtgatgctttctcactctcccatctgtatggagactaccggcactacatgcgatttgccccaaaacgagatcaagaacttcgaaagagagaatgaatacgagtccactctttgtgaagacgcttacgggaccttagacaatttactgaacgacaataacattgaaaactattccactaacgctttgattcaacccgtagataccataagcattagtagcctgagacaatttgagaccgtgtgcaagtttcactgggttgaagctttcgacgacgagatgaccgaaaagccagagtttcaatcacaggtatataactatgcaaaggataacaatatcaagcaggattccttcaaagaggagaacccgatggaaacaagtgtcagtgctaatactgatcagctgggaaacgaatactttagacagccacccccgcgcagcccgcctctcatccactgttccggtgagatgcttaaatttaccgagaaatccctggccaagtcaatcgctaaggagtctgcccttaatcctagtcaacccccatctttcctatgtaaaaccgccgtgccttctaaggagatacagaattatggcgagataccggagatgtcagtgtcttacgagaaagaagtgaccgccgaaggcgtcgagcgtccagagatcgtgtctacctggtcgtcggccggtatcagttggaggtctgaggcctgcagggagaactgcgagatgccagattgggagcagagtgccgagtcattacagcccgtgcaagaggacatggctctgaacgaagtactgcagaagctgaaacacactaatcgaaaacaggaagtgaggatccaggaactccagtgttccaacctgtacctcgagaaacgagtgaaggagctgcagatgaaaatcaccaaacagcaggtgttcattgatgtaatcaacaagcttaaggagaacgttgaagaactgatcgaggacaagtacaaaatcattctggagaaaaacgacactaaaaagacattgcagaatctcgaggaggtgcttgctaacactcagaaacacctgcaggaaagccgcaacgataaagagatgctacaattgcaatttaagaaaattaaggccaactacgtctgtctccaggagaggtacatgactgaaatgcagcagaagaataaatccgtgtcccaatatctggagatggacaaaactttgagcaagaaggaggaggaggtggagcggctacagcagttaaagaaagagctcgaaaaggccacagcttccgcgctggatttactgaagcgagagaaagaagctcaggaacaggagtttctgtcgttgcaggaagaattccagaagttagagaaggagaacctggaagagcgacagaaactgaagtctagactggagaagctgctcacacaggtccgaaacctacaatttatgagcgagaacgaacgcactaaaaatattaagttgcagcagcagatcaatgaggtcaagaatgagaatgccaaactcaagcagcaggtggcccgcagcgaggagcagaactacgtgcccaaattcgagaccgcccagctgaaggaccagcttgaggaggtgctgaaatctgacataactaaggacacgaagactacccacagcaacctgctccccgattgttctccatgcgaggagcggctaaaccccgcagatatcaaacgagcgtcccaactcgcaagcaaaatgcacagtctgctggctctcatggttggactgctgacttgccaggacattatcaactcggatgccgagcatttcaaagagtctgaaaaggtttccgatattatgctgcagaagctcaagtcccttcatctgaagaagaagacccttgacaaagaactcttaaagcataaggaccgcataacaacattcagagagctgatcgccaaagaaaaggctttccaggaccatgctatcaaggttttccagggcgtgtag

SEQ ID NO: 66667 - DNA, 2520 bp, Artificial Sequence
  derived and/or modified sequence
atgaacaaggactaccagaagttctggagcagccccagcgaccccgtgcatttcgaggtggatactagccacgaaaaggtggagagtatgtcagagtccgatacaatgaatgtgagtaacctgtcccaaggtgtgatgttaagtcactcgccaatctgcatggagacaactggaacaacctgtgatcttccccagaatgagataaaaaatttcgaacgcgagaatgagtatgagagcactctttgcgaggatgcatacggaacactggataacctgctcaacgataataatattgagaattattccacaaatgcgttgatccagcccgtggataccattagcatctcctccttacgccaatttgaaactgtgtgcaagtttcactgggtcgaggccttcgacgacgagatgacggagaagcccgaattccagtcccaggtatataactacgccaaggacaacaacataaaacaggattcatttaaggaggagaacccaatggagaccagcgtctcggcaaataccgatcagctaggtaacgagtatttccgacagccccccccacgaagcccccccctgattcactgttctggggagatgcttaagtttacagaaaagtccctggctaagtcaatagccaaagagagcgcgctgaacccaagccaacctccctctttcctatgcaaaaccgccgtgccttctaaggagatacaaaattatggcgaaatcccagagatgagtgtcagctatgagaaagaggtaaccgctgagggagttgagcgccctgagatcgtgtcaacctggtctagcgccgggatcagctggcgaagcgaggcatgccgagaaaactgtgagatgcctgactgggagcagagcgctgaatcattacaacctgtgcaggaggatatggccctgaacgaggttctccagaagctgaagcataccaataggaaacaagaagtgaggattcaggagctgcaatgtagtaatctgtatcttgagaagagagtcaaagagctgcagatgaaaataaccaaacagcaggtttttatcgacgtcatcaacaagctgaaagaaaatgtggaggagctaatagaggacaaatataaaatcatactggagaaaaatgacaccaagaaaaccctccagaatttggaagaagtcctggcaaacacacaaaagcacctgcaggaatctcggaatgataaagagatgctgcaactacagtttaaaaagatcaaagcgaattacgtgtgcctgcaggaacggtatatgacagagatgcagcagaagaacaaaagcgtgagccagtatctcgaaatggacaagaccctcagcaaaaaagaggaagaggtcgagcgacttcaacagcttaaaaaagagctggagaaagccactgcgtctgcattggacctcctgaagcgtgagaaggaggcacaggagcaagaattcctttccctacaagaggaatttcagaagctcgagaaagagaatttggaggagaggcagaaattgaagagcagactcgagaagctcctgacgcaggtgcgcaacctacaattcatgtcagaaaacgagcgcacaaagaatattaagttgcagcagcagataaatgaggtcaagaacgagaatgcaaagctgaagcagcaggttgcaaggagcgaggagcagaactatgttccaaaatttgagaccgcccagctgaaggaccagttggaggaagtgttaaaatcagacataacaaaggataccaaaaccacacacagtaatctcctgcccgattgttcaccgtgcgaagagaggctgaatcccgccgacatcaagcgcgcgtcgcaactggcatccaagatgcatagccttctcgccctgatggtgggactgctgacgtgccaagatattattaacagcgatgcagaacatttcaaggagagcgagaaggtgagcgatataatgcttcaaaaactcaaatccctgcatctcaagaaaaaaactctggataaggaactattaaaacacaaggatcgcataacgacatttcgggagttaatcgctaaggaaaaagcctttcaggatcatgctatcaaggtgatcgattgtgacagtgacgaggcgaagagtattcgcgatgtacccactctattgggcgccaaactcgacaaataccacagtctgaacgaggagttagacttcttgatcactaagttaggccacctcctggagtcaaaagagaaccattgcaacaggctcattgaagaaaacgacaaataccaaagacatctgggcaacctaattaaaaaggtcacaagctatgaagaaatcatcgaatgcgccgatcagcgtctggctatttcccattctcagatcgcccatctggaggagaggaacaagcacttagaggatctgatccgcaagccacgggagaaggcccgtaaacctcgatccaaatctctggaaaaccacccgaaatcgatgactatgatgcccgcccttttcaaggaaaaccgaaacgacttagattag

SEQ ID NO: 66668 - DNA, 2334 bp, Artificial Sequence
  derived and/or modified sequence
atgaacaaggattatcagaaattctggagcagtccatccgaccctgtgcacttcgaggtagatacatcacatgaaaaggtcgaaagtatgagtgaatccgataccatgaacgttagcaacctgtcccagggtgtgatgctcagccactcgcccatttgcatggaaacaaccgggaccacatgcgatttacctcagaacgaaataaagaacttcgagcgggagaacgaatatgagtccacactgtgcgaagatgcctacggtacacttgataatcttcttaacgacaacaatatcgagaactattccaccaatgccctgattcaacctgtggatacaatcagtatcagcagccttcgccagtttgagaccgtatgtaaattccattgggtggaagctttcgacgatgagatgacagaaaaacctgaattccagtcacaggtgtataactatgctaaggacaataacatcaaacaggactccttcaaagaagagaacccaatggagaccagtgtctctgcaaataccgaccaactcgggaatgaatatttcaggcagcccccaccccgaagcccgcctctgatccactgctcaggggaaatgctcaaatttaccgagaaaagtctggccaagagcatagcaaaggagagcgctcttaacccctcccagcccccttctttcctctgcaaaacagcagtcccgagcaaagagatacaaaactacggtgaaatacctgagatgtcagtgagttacgaaaaggaagtaacggcagagggcgtggaacgccctgaaattgtcagcacctggtcatctgcgggtatctcctggaggtcagaggcctgccgggagaactgcgagatgcccgattgggagcagagcgctgagtcattgcagccagtgcaggaagacatggcactcaacgaggtcctgcagaagcttaaacataccaaccggaagcaagaggtaagaatccaggaattgcagtgtagtaatctctacctcgagaagcgtgtgaaggaattgcagatgaagattacaaagcagcaggtttttattgatgttattaataagctgaaggagaacgttgaagagttgatcgaagacaagtataagattatcttagaaaagaacgatactaaaaagaccctgcaaaatcttgaggaggtattggctaatacacaaaaacacctacaggagtcaagaaacgacaaagagatgttacaacttcagttcaagaaaattaaagccaattatgtgtgcctacaggagaggtatatgacagaaatgcagcagaaaaataagagcgtgtcccagtacttggagatggacaaaacactttcgaaaaaggaagaggaggtagagagactacagcagctgaaaaaagagttggaaaaggccaccgcgagcgcgctggacctcctgaaaagggagaaggaggctcaagaacaggagtttctctctctgcaggaagagttccagaagctggagaaggagaatctggaggaaagacaaaaactcaaatcccgattagaaaagttactgactcaagtccggaacctgcaatttatgagcgaaaacgaacggaccaaaaacataaaattgcagcaacagattaatgaggtgaagaacgaaaatgcgaagcttaagcaacaggttgcacggtctgaggagcagaattacgtcccaaaattcgagaccgcccagctgaaggatcaacttgaagaagtgctgaaatcagatatcacaaaggatacaaagactacccacagcaacctactgcctgactgctctccgtgtgaagaacgtttaaacccagctgatatcaagcgcgcaagccagctcgcatcaaaaatgcattcgttgctggccctcatggttgggctgctcacatgtcaggatattataaattctgatgctgaacactttaaggagtccgagaaggtgtcagatatcatgcttcagaaactgaagtctctgcatctgaagaagaagacactcgacaaggaggtgattgactgtgatagcgatgaggcaaagtctattagggatgttcctacactgctcggcgctaaactggataaatatcattcccttaacgaggagctggatttcctggtgacctcctacgaggaaattattgagtgcgccgatcagaggcttgcaataagtcactcccagatagctcatctcgaagagcgaaataagcatttagaggatttgattagaaaacctagagagaaggctcgcaagcccaggtctaaaagcctcgaaaatcatcccaagagcatgacaatgatgcccgcactgtttaaggagaataggaacgacctcgactag

SEQ ID NO: 66669 - DNA, 2103 bp, Artificial Sequence
  derived and/or modified sequence
atgaacaaggattaccagaagttctggtcctctcccagcgatcctgtccactttgaggtggacacctcccacgagaaggtggaatccatgtccgagagcgacacaatgaatgtatctaacctgagccagggggtgatgttaagtcactcaccgatctgcatggagaccacgggcaccacatgtgatttgcctcagaacgagatcaaaaactttgaacgggaaaacgaatacgaatccactctttgtgaagacgcatacggcacactggataatttgttaaatgacaataatattgagaactacagcaccaatgccctgatacagcctgtcgacactatctccattagcagtctccgacaattcgagaccgtctgcaagtttcactgggtcgaggctttcgacgacgagatgacagagaagccagaattccaaagccaggtgtataactacgccaaggataacaatatcaagcaggactctttcaaagaagagaatcctatggagacctcagtgagcgcaaataccgaccaacttgggaatgaatactttcgacagcctcctccacgctcacccccactcatacactgcagtggggagatgctaaaatttaccgagaagtcactggccaagagtatcgccaaggaaagtgcccttaacccgagccagccacctagttttttatgtaaaactgctgttccctccaaagagatccaaaactacggggagatccctgagatgagcgtgtcttacgagaaagaggttacagccgagggagttgaaaggcccgaaatcgtgtccacatggtccagtgctgggatatcctggagaagtgaggcctgccgggagaactgcgagatgccagactgggagcagtctgcagagtcactccaacctgtccaagaagatatggcgctgaacgaagtactccaaaaattgaaacacacaaataggaagcaggaggtgcggatacaggaactccagtgttcaaatctgtacctcgaaaaacgggtcaaggagctccagatgaaaatcactaaacagcaggtgttcatcgacgtaatcaataaattgaaagagaacgtggaggagttgattgaggataaatacaagatcattctggaaaaaaatgacactaagaaaaccctccagaacctcgaagaagttctcgccaatacacagaaacacttacaggaatccagaaacgacaaggagatgctacagctccaattcaaaaagatcaaggcaaactacgtgtgcctccaagagaggtacatgacagaaatgcaacaaaagaacaagagcgtgtcacagtacttggaaatggataaaaccttgagcaagaaggaagaagaggtagagagactccaacaactgaagaaggagctggagaaagcaacagcctctgccttggacctgctgaagagggaaaaggaagctcaagaacaggagttcctgtccctgcaagaggagttccagaagttagagaaagagaacctcgaggagcggcaaaagctcaagtctcgcctcgagaagctcctaacccaggtgcgcaatctgcagttcatgagtgagaacgagagaaccaaaaacatcaagctgcagcagcagataaacgaagtgaaaaacgagaatgctaagctaaaacagcaagttgctagaagcgaggagcagaactatgtgcccaagttcgagacagcacagctcaaggatcagctggaagaagtactcaagtctgacataaccaaggacacaaaaactactcacagcaacctcctgcctgactgctccccatgcgaggaacgcctgaatcctgccgacattaagagagcttcccagttagcatccaagatgcactccttgctggccctaatggttgggctgctgacctgtcaagacattataaatagcgacgcagaacatttcaaagagtccgagaaggtatctgacatcatgctccagaaactgaaatcactgcacctaaagaagaagacactggacaaggagctgctgaagcataaggacagaattaccactttcagggaactgatcgctaaggaaaaggccttccaagatcatgccatcaaggtgtttcagggtgtctag

SEQ ID NO: 66670 - DNA, 2520 bp, Artificial Sequence
  derived and/or modified sequence
atgaataaagactaccagaagttttggagttctcccagtgatcccgtgcatttcgaggtggacacatcacatgaaaaagtcgaatccatgagtgagtcggacactatgaatgtcagcaaccttagtcagggagtgatgctcagtcactctccaatctgtatggagaccacaggcacgacctgcgatctgccccaaaacgagatcaagaatttcgaacgagaaaacgaatatgagtcaacgttatgtgaagacgcctacggaacactggacaacctgttgaatgataataatatcgagaattacagtactaacgccttgatacaaccagtggataccatctctatcagctcactcagacagttcgagaccgtctgtaagttccactgggtggaagccttcgatgacgagatgacagaaaaaccagaattccaaagccaggtgtataattatgcgaaagacaataacatcaaacaggattcttttaaggaggagaacccaatggaaacctccgtaagtgccaatactgatcagttggggaatgagtactttaggcagccacccccacgcagccctccactaatccactgctccggggagatgctgaagttcaccgaaaagtcacttgctaaatcgatcgcaaaggagagcgccctgaatccctcgcagcctccgtcattcctgtgtaagactgccgtccccagcaaagagattcagaactacggtgagatacccgaaatgagcgtgtcatacgagaaggaggttacagcggagggagtggagaggcctgagatcgtgagcacctggtcatcggccggaatatcctggaggtccgaggcttgcagagagaattgcgagatgccagattgggagcagtccgccgagtccctacaacctgtgcaggaagatatggcactaaatgaggtcctacagaaactcaaacataccaaccggaagcaagaggttcggattcaagagcttcagtgttctaatctctatctggaaaaacgtgtgaaggaactccagatgaaaataaccaaacagcaggtcttcatcgacgtcattaacaaactcaaagaaaacgtcgaggaattaatcgaagacaagtataaaatcatcctggaaaaaaatgacaccaagaagacgcttcagaacctggaggaggtgctggcaaatactcaaaagcatttacaagaatctaggaacgacaaggagatgctgcagttacagttcaaaaagatcaaggcaaattacgtctgtctccaggagagatatatgacagagatgcagcagaaaaataaatccgtaagtcagtacttagagatggacaaaaccttgagtaagaaggaggaggaggtagagcggttacagcagctcaaaaaagagctggagaaggcgactgctagtgcccttgacttgctcaagagagaaaaagaggcccaggaacaggagtttctttcattacaagaggaatttcagaaactcgagaaggagaacctggaagagagacagaaattgaagtctcgtcttgaaaagcttctaactcaagttaggaatctgcagtttatgtcagagaacgaaaggacaaagaatataaagctccagcagcagatcaacgaggtcaagaatgaaaacgccaagctgaaacagcaggtagccagatcagaagagcagaactacgtgccgaaattcgaaaccgcccagctgaaggatcaactggaggaagtgttaaaaagtgatattaccaaggacactaaaaccacccactccaatttgctgccggattgttccccctgtgaggagcgtctcaaccctgcggatatcaagcgagctagtcagctggccagcaagatgcacagcttgcttgccttgatggtgggccttctcacatgccaggacattatcaatagtgacgctgaacactttaaggagtctgaaaaagtatccgacattatgctgcagaaactgaaatccctccaccttaagaaaaagaccttagacaaggagttgctaaaacacaaagatcggataactactttccgggagttaatcgccaaggagaaagcttttcaggatcacgctatcaaagtgatagattgtgacagtgatgaagcgaagtcaattagggacgtccctacgcttttgggcgcaaaactggacaagtaccattccctgaatgaagagctcgactttcttatcactaaactgggacacttgctggagtcaaaagaaaatcattgcaaccgcctgatcgaggagaatgacaagtaccagcgccacctgggtaacctaataaagaaagttaccagttacgaggagattattgaatgtgctgaccagcgcctggcgatttctcacagccagattgcacacctggaagaaaggaacaaacatcttgaagatttgattcggaagccaagagagaaggccagaaagccccgaagcaaatcccttgaaaatcatcccaagagcatgactatgatgccagcgttatttaaggagaataggaacgacctggactag

SEQ ID NO: 66671 - DNA, 2821 bp, Artificial Sequence
  derived and/or modified sequence
tggatgttctgtgctctcaggaaggcgtgttgagtagccggcacggcgaggcccgtgctggccgtttcttcccggagttttcgtttctgtaccccactttgtgtttactgcggcaggaggcgccagctagcccacaggctgttcggcctagggggtcgtaccttcctaacttcaccactctctgggaagacaccgcacccacagtagggtcgctcgggcctcgcgggctgcacctgtctctgcggagttcccccggcgcgggcggacgtcacacaggggcgttccagcactccgggagcccgattgcgagtttgtgagagtccttggtggaggaggttggaaagcgttctccctcccacaaaacccggtgcagagggagggagagccaggtccgtagcgtgggtccaagaaactatggatcctggaagtgagcacacttttgtgtcttaaaaagtttggtgtctcgttttgaggtgaaaaatgaatgagataagtgctttttaaaaagaacgaaataaagaattttgaaagggaaaatgagtatgaatccacactttgtgaagatgcttatggcacactagacaatttgttaaatgataacaacattgaaaattactcaacgaatgcactaattcagccagttgacaccatcagcatatcttccttgagacaatttgaaaccgtttgcaaatttcactgggtagaagcatttgatgatgaaatgacagagaagccagaatttcaaagtcaagtgtataattatgcaaaagacaacaatataaagcaagactcatttaaggaagaaaatccaatggaaactagtgtttctgcaaatacagaccaacttggtaacgagtattttagacagcctcctcctagaagcccgcctctaatccactgcagtggagagatgctgaaatttacagaaaagtcactggctaaaagtattgccaaggaatctgccctcaaccctagccaacctccaagcttcttatgtaagactgcagttccttcaaaagaaatacagaattatggggagattcctgagatgtcagtcagttatgaaaaggaagtcacagcagagggtgtggagaggccagaaattgtctcaacttggtcttcggcaggcatttcctggaggagtgaagcatgtcgggagaactgtgagatgcctgactgggagcaaagtgctgaaagcttacaacctgttcaagaggacatggctttaaatgaagtcttgcagaaattaaaacatactaacagaaagcaggaagtgcgaatccaagaactccagtgtagtaacctgtatttagagaagagggttaaagaactacagatgaagattaccaaacagcaagtgttcattgatgtcatcaataagctaaaggagaatgttgaagaattaattgaagacaaatacaaaataatcctagagaagaatgatactaaaaagacattgcagaatttggaagaggttttagctaacacgcaaaaacatcttcaggaatccaggaatgacaaggaaatgttacagcttcaatttaagaagatcaaggctaattatgtgtgtttacaggaaaggtacatgactgaaatgcaacaaaaaaataaatctgtaagtcagtatttagagatggacaaaaccttaagcaagaaagaagaagaggtagagagactacaacaactcaaaaaagaactggaaaaggccacagcttctgctttggacttgttgaaacgggaaaaagaggcccaagaacaagagttcttgtctttacaggaggaattccagaaacttgaaaaggaaaacctggaagaaagacagaaactgaaatctagacttgagaaattgctcactcaagttagaaatttgcaatttatgtctgaaaatgaaagaacgaagaatataaaacttcagcagcaaatcaacgaagtaaaaaatgagaatgcaaaacttaaacagcaggttgcaaggagtgaagagcaaaattatgtccctaaatttgagacagctcagttaaaggatcaattagaggaagtcttgaagtcagatattaccaaggatacaaaaacgacacattctaatctgctcccggattgctcaccttgtgaagagaggctgaatcctgcagatataaaaagagcttctcagctggcctccaaaatgcacagtcttctggctctgatggtgggacttctcacatgccaggacatcatcaattctgatgctgaacatttcaaagagagtgagaaggttagtgatataatgctgcaaaaactgaagagcctccatcttaaaaagaaaactttagataaagaggtcatagactgtgattcagatgaagccaagagtatcagagatgtacctacccttctgggagccaaactggataagtaccacagtctaaatgaggagcttgatttcttggttacatcatatgaagaaatcattgaatgtgctgaccaaaggcttgcaatatcccactcccagattgcacatttggaagagagaaataaacatttagaggatttaattagaaagcccagagaaaaagccagaaaaccaagatcaaaaagcttagaaaatcatccgaagtccatgaccatgatgccagctctttttaaagaaaatagaaatgatttagattaaacaagcctgaagattaaacagtaatcatttttgtcaaccactccaggaagagtcattactacatatgctagccaaatcaatccatgcagatgatatattaaaatctgtataaagggtaaagtcttacattccaaagatgtgattacttttcttctaatttcttcctgtgaataa

SEQ ID NO: 66672 - DNA, 3069 bp, Artificial Sequence
  derived and/or modified sequence
tggatgttctgtgctctcaggaaggcgtgttgagtagccggcacggcgaggcccgtgctggccgtttcttcccggagttttcgtttctgtaccccactttgtgtttactgcggcaggaggcgccagctagcccacaggctgttcggcctagggggtcgtaccttcctaacttcaccactctctgggaagacaccgcacccacagtagggtcgctcgggcctcgcgggctgcacctgtctctgcggagttcccccggcgcgggcggacgtcacacaggggcgttccagcactccgggagcccgattgcgagtttgtgagagtccttggtggaggaggttggaaagcgttctccctcccacaaaacccggtgcagagggagggagagccaggtccgtagcgtgggtccaagaaactatggatcctggaagtgagcacacttttgtgtcttaaaaagtttggtgtctcgttttgaggtgaaaaatgaatgagataagtgctttttaaaaagaagtcttctattgttcaacagttatgaacaaggactatcaaaaattttggtcatcaccttcagatcctgtacattttgaagtggatacttctcatgaaaaagtagaaagcatgtcagaatcggataccatgaatgtcagcaatctttctcaaggtgtaatgctttcacattctccaatctgtatggaaaccaccggcaccacttgtgacttgcctcagaacgaaataaagaattttgaaagggaaaatgagtatgaatccacactttgtgaagatgcttatggcacactagacaatttgttaaatgataacaacattgaaaattactcaacgaatgcactaattcagccagttgacaccatcagcatatcttccttgagacaatttgaaaccgtttgcaaatttcactgggtagaagcatttgatgatgaaatgacagagaagccagaatttcaaagtcaagtgtataattatgcaaaagacaacaatataaagcaagactcatttaaggaagaaaatccaatggaaactagtgtttctgcaaatacagaccaacttggtaacgagtattttagacagcctcctcctagaagcccgcctctaatccactgcagtggagagatgctgaaatttacagaaaagtcactggctaaaagtattgccaaggaatctgccctcaaccctagccaacctccaagcttcttatgtaagactgcagttccttcaaaagaaatacagaattatggggagattcctgagatgtcagtcagttatgaaaaggaagtcacagcagagggtgtggagaggccagaaattgtctcaacttggtcttcggcaggcatttcctggaggagtgaagcatgtcgggagaactgtgagatgcctgactgggagcaaagtgctgaaagcttacaacctgttcaagaggacatggctttaaatgaagtcttgcagaaattaaaacatactaacagaaagcaggaagtgcgaatccaagaactccagtgtagtaacctgtatttagagaagagggttaaagaactacagatgaagattaccaaacagcaagtgttcattgatgtcatcaataagctaaaggagaatgttgaagaattaattgaagacaaatacaaaataatcctagagaagaatgatactaaaaagacattgcagaatttggaagaggttttagctaacacgcaaaaacatcttcaggaatccaggaatgacaaggaaatgttacagcttcaatttaagaagatcaaggctaattatgtgtgtttacaggaaaggtacatgactgaaatgcaacaaaaaaataaatctgtaagtcagtatttagagatggacaaaaccttaagcaagaaagaagaagaggtagagagactacaacaactcaaaaaagaactggaaaaggccacagcttctgctttggacttgttgaaacgggaaaaagaggcccaagaacaagagttcttgtctttacaggaggaattccagaaacttgaaaaggaaaacctggaagaaagacagaaactgaaatctagacttgagaaattgctcactcaagttagaaatttgcaatttatgtctgaaaatgaaagaacgaagaatataaaacttcagcagcaaatcaacgaagtaaaaaatgagaatgcaaaacttaaacagcaggttgcaaggagtgaagagcaaaattatgtccctaaatttgagacagctcagttaaaggatcaattagaggaagtcttgaagtcagatattaccaaggatacaaaaacgacacattctaatctgctcccggattgctcaccttgtgaagagaggctgaatcctgcagatataaaaagagcttctcagctggcctccaaaatgcacagtcttctggctctgatggtgggacttctcacatgccaggacatcatcaattctgatgctgaacatttcaaagagagtgagaaggttagtgatataatgctgcaaaaactgaagagcctccatcttaaaaagaaaactttagataaagaggtcatagactgtgattcagatgaagccaagagtatcagagatgtacctacccttctgggagccaaactggataagtaccacagtctaaatgaggagcttgatttcttggttacatcatatgaagaaatcattgaatgtgctgaccaaaggcttgcaatatcccactcccagattgcacatttggaagagagaaataaacatttagaggatttaattagaaagcccagagaaaaagccagaaaaccaagatcaaaaagcttagaaaatcatccgaagtccatgaccatgatgccagctctttttaaagaaaatagaaatgatttagattaaacaagcctgaagattaaacagtaatcatttttgtcaaccactccaggaagagtcattactacatatgctagccaaatcaatccatgcagatgatatattaaaatctgtataaagggtaaagtcttacattccaaagatgtgattacttttcttctaatttcttcctgtgaataatcaaatatattctatttaacataaacagaa

SEQ ID NO: 66673 - DNA, 2634 bp, Artificial Sequence
  derived and/or modified sequence
tggatgttctgtgctctcaggaaggcgtgttgagtagccggcacggcgaggcccgtgctggccgtttcttcccggagttttcgtttctgtaccccactttgtgtttactgcggcaggaggcgccagctagcccacaggctgttcggcctagggggtcgtaccttcctaacttcaccactctctgggaagacaccgcacccacagtagggtcgctcgggcctcgcgggctgcacctgtctctgcggagttcccccggcgcgggcggacgtcacacaggggcgttccagcactccgggagcccgattgcgagtttgtgagagtccttggtggaggaggttggaaagcgttctccctcccacaaaacccggtgcagagggagggagagccaggtccgtagcgtgggtccaagaaactatggatcctggaagtgagcacacttttgtgtcttaaaaagtttggtgtctcgttttgaggtgaaaaatgaatgagataagtgctttttaaaaagaagtcttctattgttcaacagttatgaacaaggactatcaaaaattttggtcatcaccttcagatcctgtacattttgaagtggatacttctcatgaaaaagtagaaagcatgtcagaatcggataccatgaatgtcagcaatctttctcaaggtgtaatgctttcacattctccaatctgtatggaaaccaccggcaccacttgtgacttgcctcagaacgaaataaagaattttgaaagggaaaatgagtatgaatccacactttgtgaagatgcttatggcacactagacaatttgttaaatgataacaacattgaaaattactcaacgaatgcactaattcagccagttgacaccatcagcatatcttccttgagacaatttgaaaccgtttgcaaatttcactgggtagaagcatttgatgatgaaatgacagagaagccagaatttcaaagtcaagtgtataattatgcaaaagacaacaatataaagcaagactcatttaaggaagaaaatccaatggaaactagtgtttctgcaaatacagaccaacttggtaacgagtattttagacagcctcctcctagaagcccgcctctaatccactgcagtggagagatgctgaaatttacagaaaagtcactggctaaaagtattgccaaggaatctgccctcaaccctagccaacctccaagcttcttatgtaagactgcagttccttcaaaagaaatacagaattatggggagattcctgagatgtcagtcagttatgaaaaggaagtcacagcagagggtgtggagaggccagaaattgtctcaacttggtcttcggcaggcatttcctggaggagtgaagcatgtcgggagaactgtgagatgcctgactgggagcaaagtgctgaaagcttacaacctgttcaagaggacatggctttaaatgaagtcttgcagaaattaaaacatactaacagaaagcaggaagtgcgaatccaagaactccagtgtagtaacctgtatttagagaagagggttaaagaactacagatgaagattaccaaacagcaagtgttcattgatgtcatcaataagctaaaggagaatgttgaagaattaattgaagacaaatacaaaataatcctagagaagaatgatactaaaaagacattgcagaatttggaagaggttttagctaacacgcaaaaacatcttcaggaatccaggaatgacaaggaaatgttacagcttcaatttaagaagatcaaggctaattatgtgtgtttacaggaaaggtacatgactgaaatgcaacaaaaaaataaatctgtaagtcagtatttagagatggacaaaaccttaagcaagaaagaagaagaggtagagagactacaacaactcaaaaaagaactggaaaaggccacagcttctgctttggacttgttgaaacgggaaaaagaggcccaagaacaagagttcttgtctttacaggaggaattccagaaacttgaaaaggaaaacctggaagaaagacagaaactgaaatctagacttgagaaattgctcactcaagttagaaatttgcaatttatgtctgaaaatgaaagaacgaagaatataaaacttcagcagcaaatcaacgaagtaaaaaatgagaatgcaaaacttaaacagcaggttgcaaggagtgaagagcaaaattatgtccctaaatttgagacagctcagttaaaggatcaattagaggaagtcttgaagtcagatattaccaaggatacaaaaacgacacattctaatctgctcccggattgctcaccttgtgaagagaggctgaatcctgcagatataaaaagagcttctcagctggcctccaaaatgcacagtcttctggctctgatggtgggacttctcacatgccaggacatcatcaattctgatgctgaacatttcaaagagagtgagaaggttagtgatataatgctgcaaaaactgaagagcctccatcttaaaaagaaaactttagataaagagctactgaaacataaagatagaatcacaacctttagagagttaattgctaaggaaaaagcatttcaagatcatgctattaaggtattccaaggagtatga

SEQ ID NO: 66674 - DNA, 3284 bp, Artificial Sequence
  derived and/or modified sequence
cggagctctctggatggcgcgctgtatagggctgtggatgttctgtgctctcaggaaggcgtgttgagtagccggcacggcgaggcccgtgctggccgtttcttcccggagttttcgtttctgtaccccactttgtgtttactgcggcaggaggcgccagctagcccacaggctgttcggcctagggggtcgtaccttcctaacttcaccactctctgggaagacaccgcacccacagtagggtcgctcgggcctcgcgggctgcacctgtctctgcggagttcccccggcgcgggcggacgtcacacaggggcgttccagcactccgggagcccgattgcgagtttgtgagagtccttggtggaggaggttggaaagcgttctccctcccacaaaacccggtgcagagggagggagagccaggtccgtagcgtgggtccaagaaactatggatcctggaagtgagcacacttttgtgtcttaaaaagtttggtgtctcgttttgaggtgaaaaatgaatgagataagtgctttttaaaaagaagtcttctattgttcaacagttatgaacaaggactatcaaaaattttggtcatcaccttcagatcctgtacattttgaagtggatacttctcatgaaaaagtagaaagcatgtcagaatcggataccatgaatgtcagcaatctttctcaaggtgtaatgctttcacattctccaatctgtatggaaaccaccggcaccacttgtgacttgcctcagaacgaaataaagaattttgaaagggaaaatgagtatgaatccacactttgtgaagatgcttatggcacactagacaatttgttaaatgataacaacattgaaaattactcaacgaatgcactaattcagccagttgacaccatcagcatatcttccttgagacaatttgaaaccgtttgcaaatttcactgggtagaagcatttgatgatgaaatgacagagaagccagaatttcaaagtcaagtgtataattatgcaaaagacaacaatataaagcaagactcatttaaggaagaaaatccaatggaaactagtgtttctgcaaatacagaccaacttggtaacgagtattttagacagcctcctcctagaagcccgcctctaatccactgcagtggagagatgctgaaatttacagaaaagtcactggctaaaagtattgccaaggaatctgccctcaaccctagccaacctccaagcttcttatgtaagactgcagttccttcaaaagaaatacagaattatggggagattcctgagatgtcagtcagttatgaaaaggaagtcacagcagagggtgtggagaggccagaaattgtctcaacttggtcttcggcaggcatttcctggaggagtgaagcatgtcgggagaactgtgagatgcctgactgggagcaaagtgctgaaagcttacaacctgttcaagaggacatggctttaaatgaagtcttgcagaaattaaaacatactaacagaaagcaggaagtgcgaatccaagaactccagtgtagtaacctgtatttagagaagagggttaaagaactacagatgaagattaccaaacagcaagtgttcattgatgtcatcaataagctaaaggagaatgttgaagaattaattgaagacaaatacaaaataatcctagagaagaatgatactaaaaagacattgcagaatttggaagaggttttagctaacacgcaaaaacatcttcaggaatccaggaatgacaaggaaatgttacagcttcaatttaagaagatcaaggctaattatgtgtgtttacaggaaaggtacatgactgaaatgcaacaaaaaaataaatctgtaagtcagtatttagagatggacaaaaccttaagcaagaaagaagaagaggtagagagactacaacaactcaaaaaagaactggaaaaggccacagcttctgctttggacttgttgaaacgggaaaaagaggcccaagaacaagagttcttgtctttacaggaggaattccagaaacttgaaaaggaaaacctggaagaaagacagaaactgaaatctagacttgagaaattgctcactcaagttagaaatttgcaatttatgtctgaaaatgaaagaacgaagaatataaaacttcagcagcaaatcaacgaagtaaaaaatgagaatgcaaaacttaaacagcaggttgcaaggagtgaagagcaaaattatgtccctaaatttgagacagctcagttaaaggatcaattagaggaagtcttgaagtcagatattaccaaggatacaaaaacgacacattctaatctgctcccggattgctcaccttgtgaagagaggctgaatcctgcagatataaaaagagcttctcagctggcctccaaaatgcacagtcttctggctctgatggtgggacttctcacatgccaggacatcatcaattctgatgctgaacatttcaaagagagtgagaaggttagtgatataatgctgcaaaaactgaagagcctccatcttaaaaagaaaactttagataaagagctactgaaacataaagatagaatcacaacctttagagagttaattgctaaggaaaaagcatttcaagatcatgctattaaggtcatagactgtgattcagatgaagccaagagtatcagagatgtacctacccttctgggagccaaactggataagtaccacagtctaaatgaggagcttgatttcttgatcacaaaactgggacatctcctagagtcaaaagaaaaccactgcaacagactcattgaagaaaatgacaagtatcaaagacatttaggcaacttaataaagaaggttacatcatatgaagaaatcattgaatgtgctgaccaaaggcttgcaatatcccactcccagattgcacatttggaagagagaaataaacatttagaggatttaattagaaagcccagagaaaaagccagaaaaccaagatcaaaaagcttagaaaatcatccgaagtccatgaccatgatgccagctctttttaaagaaaatagaaatgatttagattaaacaagcctgaagattaaacagtaatcatttttgtcaaccactccaggaagagtcattactacatatgctagccaaatcaatccatgcagatgatatattaaaatctgtataaagggtaaagtcttacattccaaagatgtgattacttttcttctaatttcttcctgtgaataatcaaatatattctatttaacataaa

SEQ ID NO: 66675 - DNA, 2334 bp, Artificial Sequence
  derived and/or modified sequence
atgaacaaggactaccagaagttctggagcagccccagcgaccccgtgcacttcgaggtggacaccagccacgagaaggtggagagcatgagcgagagcgacaccatgaacgtgagcaacctgagccagggcgtgatgctgagccacagccccatctgcatggagaccaccggcaccacctgcgacctgccccagaacgagatcaagaacttcgagagagagaacgagtacgagagcaccctgtgcgaggacgcctacggcaccctggacaacctgctgaacgacaacaacatcgagaactacagcaccaacgccctgatccagcccgtggacaccatcagcatcagcagcctgagacagttcgagaccgtgtgcaagttccactgggtggaggccttcgacgacgagatgaccgagaagcccgagttccagagccaggtgtacaactacgccaaggacaacaacatcaagcaggacagcttcaaggaggagaaccccatggagaccagcgtgagcgccaacaccgaccagctgggcaacgagtacttcagacagcccccccccagaagcccccccctgatccactgcagcggcgagatgctgaagttcaccgagaagagcctggccaagagcatcgccaaggagagcgccctgaaccccagccagccccccagcttcctgtgcaagaccgccgtgcccagcaaggagatccagaactacggcgagatccccgagatgagcgtgagctacgagaaggaggtgaccgccgagggcgtggagagacccgagatcgtgagcacctggagcagcgccggcatcagctggagaagcgaggcctgcagagagaactgcgagatgcccgactgggagcagagcgccgagagcctgcagcccgtgcaggaggacatggccctgaacgaggtgctgcagaagctgaagcacaccaacagaaagcaggaggtgagaatccaggagctgcagtgcagcaacctgtacctggagaagagagtgaaggagctgcagatgaagatcaccaagcagcaggtgttcatcgacgtgatcaacaagctgaaggagaacgtggaggagctgatcgaggacaagtacaagatcatcctggagaagaacgacaccaagaagaccctgcagaacctggaggaggtgctggccaacacccagaagcacctgcaggagagcagaaacgacaaggagatgctgcagctgcagttcaagaagatcaaggccaactacgtgtgcctgcaggagagatacatgaccgagatgcagcagaagaacaagagcgtgagccagtacctggagatggacaagaccctgagcaagaaggaggaggaggtggagagactgcagcagctgaagaaggagctggagaaggccaccgccagcgccctggacctgctgaagagagagaaggaggcccaggagcaggagttcctgagcctgcaggaggagttccagaagctggagaaggagaacctggaggagagacagaagctgaagagcagactggagaagctgctgacccaggtgagaaacctgcagttcatgagcgagaacgagagaaccaagaacatcaagctgcagcagcagatcaacgaggtgaagaacgagaacgccaagctgaagcagcaggtggccagaagcgaggagcagaactacgtgcccaagttcgagaccgcccagctgaaggaccagctggaggaggtgctgaagagcgacatcaccaaggacaccaagaccacccacagcaacctgctgcccgactgcagcccctgcgaggagagactgaaccccgccgacatcaagagagccagccagctggccagcaagatgcacagcctgctggccctgatggtgggcctgctgacctgccaggacatcatcaacagcgacgccgagcacttcaaggagagcgagaaggtgagcgacatcatgctgcagaagctgaagagcctgcacctgaagaagaagaccctggacaaggaggtgatcgactgcgacagcgacgaggccaagagcatcagagacgtgcccaccctgctgggcgccaagctggacaagtaccacagcctgaacgaggagctggacttcctggtgaccagctacgaggagatcatcgagtgcgccgaccagagactggccatcagccacagccagatcgcccacctggaggagagaaacaagcacctggaggacctgatcagaaagcccagagagaaggccagaaagcccagaagcaagagcctggagaaccaccccaagagcatgaccatgatgcccgccctgttcaaggagaacagaaacgacctggactag

SEQ ID NO: 66676 - DNA, 2103 bp, Artificial Sequence
  derived and/or modified sequence
atgaacaaggactaccagaagttctggagcagccccagcgaccccgtgcacttcgaggtggacaccagccacgagaaggtggagagcatgagcgagagcgacaccatgaacgtgagcaacctgagccagggcgtgatgctgagccacagccccatctgcatggagaccaccggcaccacctgcgacctgccccagaacgagatcaagaacttcgagagagagaacgagtacgagagcaccctgtgcgaggacgcctacggcaccctggacaacctgctgaacgacaacaacatcgagaactacagcaccaacgccctgatccagcccgtggacaccatcagcatcagcagcctgagacagttcgagaccgtgtgcaagttccactgggtggaggccttcgacgacgagatgaccgagaagcccgagttccagagccaggtgtacaactacgccaaggacaacaacatcaagcaggacagcttcaaggaggagaaccccatggagaccagcgtgagcgccaacaccgaccagctgggcaacgagtacttcagacagcccccccccagaagcccccccctgatccactgcagcggcgagatgctgaagttcaccgagaagagcctggccaagagcatcgccaaggagagcgccctgaaccccagccagccccccagcttcctgtgcaagaccgccgtgcccagcaaggagatccagaactacggcgagatccccgagatgagcgtgagctacgagaaggaggtgaccgccgagggcgtggagagacccgagatcgtgagcacctggagcagcgccggcatcagctggagaagcgaggcctgcagagagaactgcgagatgcccgactgggagcagagcgccgagagcctgcagcccgtgcaggaggacatggccctgaacgaggtgctgcagaagctgaagcacaccaacagaaagcaggaggtgagaatccaggagctgcagtgcagcaacctgtacctggagaagagagtgaaggagctgcagatgaagatcaccaagcagcaggtgttcatcgacgtgatcaacaagctgaaggagaacgtggaggagctgatcgaggacaagtacaagatcatcctggagaagaacgacaccaagaagaccctgcagaacctggaggaggtgctggccaacacccagaagcacctgcaggagagcagaaacgacaaggagatgctgcagctgcagttcaagaagatcaaggccaactacgtgtgcctgcaggagagatacatgaccgagatgcagcagaagaacaagagcgtgagccagtacctggagatggacaagaccctgagcaagaaggaggaggaggtggagagactgcagcagctgaagaaggagctggagaaggccaccgccagcgccctggacctgctgaagagagagaaggaggcccaggagcaggagttcctgagcctgcaggaggagttccagaagctggagaaggagaacctggaggagagacagaagctgaagagcagactggagaagctgctgacccaggtgagaaacctgcagttcatgagcgagaacgagagaaccaagaacatcaagctgcagcagcagatcaacgaggtgaagaacgagaacgccaagctgaagcagcaggtggccagaagcgaggagcagaactacgtgcccaagttcgagaccgcccagctgaaggaccagctggaggaggtgctgaagagcgacatcaccaaggacaccaagaccacccacagcaacctgctgcccgactgcagcccctgcgaggagagactgaaccccgccgacatcaagagagccagccagctggccagcaagatgcacagcctgctggccctgatggtgggcctgctgacctgccaggacatcatcaacagcgacgccgagcacttcaaggagagcgagaaggtgagcgacatcatgctgcagaagctgaagagcctgcacctgaagaagaagaccctggacaaggagctgctgaagcacaaggacagaatcaccaccttcagagagctgatcgccaaggagaaggccttccaggaccacgccatcaaggtgttccagggcgtgtag

SEQ ID NO: 66677 - DNA, 2520 bp, Artificial Sequence
  derived and/or modified sequence
atgaacaaggactaccagaagttctggagcagccccagcgaccccgtgcacttcgaggtggacaccagccacgagaaggtggagagcatgagcgagagcgacaccatgaacgtgagcaacctgagccagggcgtgatgctgagccacagccccatctgcatggagaccaccggcaccacctgcgacctgccccagaacgagatcaagaacttcgagagagagaacgagtacgagagcaccctgtgcgaggacgcctacggcaccctggacaacctgctgaacgacaacaacatcgagaactacagcaccaacgccctgatccagcccgtggacaccatcagcatcagcagcctgagacagttcgagaccgtgtgcaagttccactgggtggaggccttcgacgacgagatgaccgagaagcccgagttccagagccaggtgtacaactacgccaaggacaacaacatcaagcaggacagcttcaaggaggagaaccccatggagaccagcgtgagcgccaacaccgaccagctgggcaacgagtacttcagacagcccccccccagaagcccccccctgatccactgcagcggcgagatgctgaagttcaccgagaagagcctggccaagagcatcgccaaggagagcgccctgaaccccagccagccccccagcttcctgtgcaagaccgccgtgcccagcaaggagatccagaactacggcgagatccccgagatgagcgtgagctacgagaaggaggtgaccgccgagggcgtggagagacccgagatcgtgagcacctggagcagcgccggcatcagctggagaagcgaggcctgcagagagaactgcgagatgcccgactgggagcagagcgccgagagcctgcagcccgtgcaggaggacatggccctgaacgaggtgctgcagaagctgaagcacaccaacagaaagcaggaggtgagaatccaggagctgcagtgcagcaacctgtacctggagaagagagtgaaggagctgcagatgaagatcaccaagcagcaggtgttcatcgacgtgatcaacaagctgaaggagaacgtggaggagctgatcgaggacaagtacaagatcatcctggagaagaacgacaccaagaagaccctgcagaacctggaggaggtgctggccaacacccagaagcacctgcaggagagcagaaacgacaaggagatgctgcagctgcagttcaagaagatcaaggccaactacgtgtgcctgcaggagagatacatgaccgagatgcagcagaagaacaagagcgtgagccagtacctggagatggacaagaccctgagcaagaaggaggaggaggtggagagactgcagcagctgaagaaggagctggagaaggccaccgccagcgccctggacctgctgaagagagagaaggaggcccaggagcaggagttcctgagcctgcaggaggagttccagaagctggagaaggagaacctggaggagagacagaagctgaagagcagactggagaagctgctgacccaggtgagaaacctgcagttcatgagcgagaacgagagaaccaagaacatcaagctgcagcagcagatcaacgaggtgaagaacgagaacgccaagctgaagcagcaggtggccagaagcgaggagcagaactacgtgcccaagttcgagaccgcccagctgaaggaccagctggaggaggtgctgaagagcgacatcaccaaggacaccaagaccacccacagcaacctgctgcccgactgcagcccctgcgaggagagactgaaccccgccgacatcaagagagccagccagctggccagcaagatgcacagcctgctggccctgatggtgggcctgctgacctgccaggacatcatcaacagcgacgccgagcacttcaaggagagcgagaaggtgagcgacatcatgctgcagaagctgaagagcctgcacctgaagaagaagaccctggacaaggagctgctgaagcacaaggacagaatcaccaccttcagagagctgatcgccaaggagaaggccttccaggaccacgccatcaaggtgatcgactgcgacagcgacgaggccaagagcatcagagacgtgcccaccctgctgggcgccaagctggacaagtaccacagcctgaacgaggagctggacttcctgatcaccaagctgggccacctgctggagagcaaggagaaccactgcaacagactgatcgaggagaacgacaagtaccagagacacctgggcaacctgatcaagaaggtgaccagctacgaggagatcatcgagtgcgccgaccagagactggccatcagccacagccagatcgcccacctggaggagagaaacaagcacctggaggacctgatcagaaagcccagagagaaggccagaaagcccagaagcaagagcctggagaaccaccccaagagcatgaccatgatgcccgccctgttcaaggagaacagaaacgacctggactag

SEQ ID NO: 66678 - protein, 824 aa, Artificial Sequence
  derived and/or modified sequence
MNKDYQKFWSSPSDPVHFEVDTSHEKVESMSESDTMNVSNLSQGVMLSHSPICMETTGTTCDLPQNEIKNFERENEYESTLCEDAYGTLDNLLNDNNIENYSTNALIQPVDTISISSLRQFETVCKFHWVEAFDDEMTEKPEFQSQVYNYAKDNNIKQDSFKEENPMETSVSANTDQLGNEYFRQPPPRSPPLIHCSGEMLKFTEKSLAKSIAKESALNPSQPPSFLCKTAVPSKEIQNYGEIPEMSVSYEKEVTAEGVERPEIVSTWSSAGISWRSEACRENCEMPDWEQSAESLQPVQEDMALNEVLQKLKHTNRKQEVRIQELQCSNLYLEKRVKELQMKITKQQVFIDVINKLKENVEELIEDKYKIILEKNDTKKTLQNLEEVLANTQKHLQESRNDKEMLQLQFKKIKANYVCLQERYMTEMQQKNKSVSQYLEMDKTLSKKEEEVERLQQLKKELEKATASALDLLKREKEAQEQEFLSLQEEFQKLEKENLEERQKLKSRLEKLLTQVRNLQFMSENERTKNIKLQQQINEVKNENAKLKQQVARSEEQNYVPKFETAQLKDQLEEVLKSDITKDTKTTHSNLLPDCSPCEERLNPADIKRASQLASKMHSLLALMVGLLTCQDIINSDAEHFKESEKVSDIMLQKLKSLHLKKKTLDKELLKHKDRITTFRELIAKEKAFQDHAIKVIDCDSDEAKSIRDVPTLLGAKLDKYHSLNEELDFLVTSYEEIIECADQRLAISHSQIAHLEERNKHLEDLIRKPREKARKPRSKSLENHPKSMTMLAYNLYIFIGYRLGAVADACNPSTLGGRGGWIT

SEQ ID NO: 66679 - protein, 700 aa, Artificial Sequence
  derived and/or modified sequence
MNKDYQKFWSSPSDPVHFEVDTSHEKVESMSESDTMNVSNLSQGVMLSHSPICMETTGTTCDLPQNEIKNFERENEYESTLCEDAYGTLDNLLNDNNIENYSTNALIQPVDTISISSLRQFETVCKFHWVEAFDDEMTEKPEFQSQVYNYAKDNNIKQDSFKEENPMETSVSANTDQLGNEYFRQPPPRSPPLIHCSGEMLKFTEKSLAKSIAKESALNPSQPPSFLCKTAVPSKEIQNYGEIPEMSVSYEKEVTAEGVERPEIVSTWSSAGISWRSEACRENCEMPDWEQSAESLQPVQEDMALNEVLQKLKHTNRKQEVRIQELQCSNLYLEKRVKELQMKITKQQVFIDVINKLKENVEELIEDKYKIILEKNDTKKTLQNLEEVLANTQKHLQESRNDKEMLQLQFKKIKANYVCLQERYMTEMQQKNKSVSQYLEMDKTLSKKEEEVERLQQLKKELEKATASALDLLKREKEAQEQEFLSLQEEFQKLEKENLEERQKLKSRLEKLLTQVRNLQFMSENERTKNIKLQQQINEVKNENAKLKQQVARSEEQNYVPKFETAQLKDQLEEVLKSDITKDTKTTHSNLLPDCSPCEERLNPADIKRASQLASKMHSLLALMVGLLTCQDIINSDAEHFKESEKVSDIMLQKLKSLHLKKKTLDKELLKHKDRITTFRELIAKEKAFQDHAIKVFQGV

SEQ ID NO: 66680 - DNA, 2475 bp, Artificial Sequence
  derived and/or modified sequence
atgaataaggattaccagaagttctggtcttctccgtcagacccagtccactttgaagtggacacgagtcacgagaaagtggagagcatgtccgagagcgatacaatgaatgtgtccaatctatctcagggagtgatgctttctcacagtcccatctgcatggaaaccactgggacaacttgtgatctaccgcagaatgagattaaaaacttcgaaagagaaaatgaatacgagagtacattatgtgaagacgcctatggaactctggataatctgctcaacgacaataacatcgaaaactacagcactaacgctctgattcagccagtagataccatctcaatttctagtttgagacagtttgaaactgtgtgtaagtttcattgggtggaagccttcgacgacgaaatgaccgaaaagcccgagtttcaatcccaggtctacaactacgcgaaagacaacaatattaagcaggactcatttaaggaggagaatccaatggagacgtccgtctcagctaacacagaccaattaggaaatgagtacttcagacaaccgcctcctcggtcacctcccctaatccactgctcgggagagatgcttaagtttaccgagaagagcttggctaagagtatcgccaaggaatctgccttaaaccccagccagcccccctccttcctgtgcaagactgcagtgcccagtaaagagattcagaactatggagaaatcccagagatgagtgttagctatgaaaaagaagtcaccgcagaaggtgtggagcgccccgagattgtatccacatggtcgtctgccggaatatcttggcggtcagaagcctgccgtgagaattgcgaaatgcccgactgggagcaaagcgccgagagtctgcagcccgttcaggaggacatggcgctgaatgaggtgctgcagaaacttaagcacaccaatagaaaacaagaggttaggattcaggagttacagtgttcaaatctgtatctggagaagcgagtgaaagaactgcagatgaagattacaaagcaacaggtgtttatcgacgtaattaacaaactgaaagaaaatgtggaggaattaattgaggataagtacaaaatcattctggagaaaaacgatactaagaaaactttacaaaatcttgaggaggtccttgccaacacccagaagcatttacaggaatctaggaacgacaaagagatgcttcagttgcagtttaagaagatcaaagccaactacgtttgtcttcaggagaggtatatgactgagatgcagcaaaagaataaatccgtatcccagtatctggagatggataagacattatcaaagaaagaagaggaagtggaacgacttcagcagctcaagaaagagctggagaaagccaccgcctccgcattggatctcctgaagagggagaaagaagctcaggaacaggaatttttgtccctgcaggaggagttccaaaaacttgaaaaagaaaacctcgaggagagacagaagctgaagtctagactcgaaaagctactgacccaggtgaggaaccttcaatttatgtccgagaacgagcggacaaagaatataaagctgcagcagcagattaatgaggttaagaatgaaaatgccaaactgaaacagcaggtggctcggtctgaggaacagaattatgtgcccaaattcgagactgcccagctgaaggaccaactcgaagaggtgctgaaatcagatataacaaaggacaccaagactacgcacagcaacctcctcccagattgtagtccatgcgaagagcgccttaatccagcagatattaaacgcgcaagccagctagcctccaagatgcattctttacttgctctgatggttggactcctcacatgtcaggacatcatcaactctgatgctgagcatttcaaggagtcagagaaagtttcggatataatgctgcagaaactgaaaagcctgcatttgaagaagaagactctggataaggaactactgaaacacaaagaccggataaccacttttcgggagctgatagccaaagagaaagctttccaggatcatgccattaaggtgatcgattgtgactccgacgaggctaagtctatcagagacgtgccgacactcctcggggctaaactcgataagtatcattccctaaatgaggaactggactttctcgtgacttcctatgaagaaatcattgagtgcgccgaccagagattagcaatcagtcattcccagatagcacatctggaagagaggaacaagcacctggaggatctgatccggaagccccgagagaaggcgcggaaaccgcgtagtaagagccttgagaaccacccaaagtctatgacgatgctcgcctacaatctctatatatttattgggtatagattgggcgccgtggcagacgcatgcaacccaagtaccctcggcgggcgcggtggctggataacctag

SEQ ID NO: 66681 - DNA, 2475 bp, Artificial Sequence
  derived and/or modified sequence
atgaacaaggactaccagaagttctggagcagccccagcgaccctgtgcactttgaggtggacaccagccatgagaaggtggagagcatgtctgagagtgacaccatgaatgtgagcaacctgagccagggcgtgatgctgagccacagccccatctgcatggagaccaccggcaccacctgtgacctgccccagaatgagatcaagaactttgagcgggagaatgaatatgagagcaccctgtgtgaagatgcctacggcaccctggacaacctgctgaatgacaacaacatcgagaactacagcaccaatgccctgatccagcctgtggacaccatcagcatcagcagcctgcggcagtttgaaacagtgtgcaagttccactgggtggaggcctttgatgatgagatgacagagaagccagagttccagagccaggtgtacaactatgccaaggacaacaacatcaagcaggacagcttcaaggaggagaaccccatggagacctctgtgtctgccaacacagaccagctgggcaatgagtacttccggcagcccccacccaggagccccccactcatccactgcagcggggagatgctgaagttcacagagaagagcctggccaagagcatcgccaaggagagcgccctgaaccccagccagcccccatccttcctgtgcaagacagctgtgcccagcaaggagatccagaactacggggagatccctgagatgtctgtgtcctatgagaaggaggtgacagctgagggcgtggagaggcctgagatcgtgtccacctggagcagcgctggcatctcctggaggtctgaggcctgccgggagaactgtgagatgccagactgggagcagagcgctgagagcctgcagcctgtgcaggaggacatggccctgaatgaggtgctgcagaagctgaagcacaccaacaggaagcaggaggtgcgcatccaggagctgcagtgcagcaacctgtacctggagaagagggtgaaggagctgcagatgaagatcaccaagcagcaggtgttcattgatgtgatcaacaagctgaaggaaaatgtggaggagctgattgaggacaagtacaagatcatcctggagaagaatgacaccaagaagaccctgcagaacctggaggaggtgctggccaacacccagaagcacctgcaggagagcagaaatgacaaggagatgctgcagctgcagttcaagaagatcaaggccaactacgtgtgcctgcaggagcgctacatgacagagatgcagcagaagaacaagtctgtgtcccagtacctggagatggacaagaccctgagcaagaaggaggaggaggtggagcggctgcagcagctgaagaaggagctggagaaggccacagccagcgccctggacctgctgaagcgggagaaggaggcccaggagcaggagttcctgagcctgcaggaggagttccagaagctggagaaggagaacctggaggagcggcagaagctgaagagccggctggagaagctgctgacccaggtgaggaacctgcagttcatgtctgaaaatgaaagaaccaagaacatcaagctgcagcagcagatcaatgaggtgaagaatgaaaatgccaagctgaagcagcaggtggcccggtctgaggagcagaactacgtgcccaagtttgaaacagcccagctgaaggaccagctggaggaggtgctgaagagtgacatcaccaaggacaccaagaccacccacagcaacctgctgcctgactgcagcccctgtgaggagcggctgaacccagctgacatcaagagggccagccagctggccagcaagatgcacagcctgctggccctgatggtgggcctgctgacctgccaggacatcatcaacagtgatgctgagcacttcaaggagagcgagaaggtgtctgacatcatgctgcagaagctgaagagcctgcacctgaagaagaagaccctggacaaggagctgctgaagcacaaggaccgcatcaccaccttccgggagctgattgccaaggagaaggccttccaggaccacgccatcaaggtgattgactgtgacagtgatgaggccaagagcatcagagatgtgcccaccctgctgggcgccaagctggacaagtaccacagcctgaatgaggagctggacttcctggtgaccagctatgaggagatcattgaatgtgccgaccagaggctggccatcagccacagccagatcgcccacctggaggagaggaacaagcacctggaggacctgatcaggaagccccgggagaaggccaggaagcccaggagcaagagcctggagaaccaccccaagtccatgaccatgctggcctacaacctgtacatcttcatcggctaccgcctgggcgctgtggctgatgcctgcaaccccagcaccctgggcggccggggcggctggatcacctag

SEQ ID NO: 66682 - DNA, 2475 bp, Artificial Sequence
  derived and/or modified sequence
atgaacaaggactaccagaagttctggagcagccccagcgaccccgtacattttgaggttgacaccagccacgagaaggttgagtcgatgtcggaatctgatacaatgaacgtcagtaatctgtctcagggggtaatgctatcacacagtcctatttgcatggagaccaccggtactacttgtgatctgccccagaacgaaatcaagaactttgagcgggagaacgagtatgaaagcactctgtgcgaagacgcctatggcaccctggacaatctcctgaacgacaataacatcgagaactatagcaccaacgccttgattcaacccgttgacaccattagcataagcagcctgaggcaattcgagacggtgtgcaagttccattgggttgaagcattcgatgacgagatgactgagaagcctgagttccaatcacaagtgtataactacgcaaaggacaataatattaaacaggactcattcaaggaagaaaaccctatggagacatcagtctctgctaacacggaccagctgggcaatgaatattttagacagccccctcctaggagccccccgctcatccattgctccggagagatgctcaagtttactgagaagtctttggccaaatccatcgccaaggagagcgcactcaaccccagtcaaccacctagtttcctttgcaaaacagctgtgccaagcaaagaaatccagaattacggagagatccccgaaatgagtgtgagctacgagaaggaggtcacagccgagggcgtggaaagaccggagattgtgagcacctggagctccgcaggcatatcctggcgcagcgaagcctgtcgagaaaattgtgagatgccggattgggaacagagcgccgagagtctacagcctgttcaggaggacatggcactcaatgaggtactgcagaagctgaaacatacaaatagaaagcaagaagtgaggattcaggagctacagtgcagcaatttgtatttagagaagcgagtcaaggaactgcagatgaaaataacgaagcagcaggtctttatcgatgtaataaataaactcaaggagaacgtggaggaactgattgaagacaagtacaagataatccttgagaagaacgataccaaaaagactctgcaaaatctcgaggaagtcctcgccaacacacagaagcacctgcaggaatccaggaatgataaagagatgctgcagcttcaattcaaaaagatcaaggccaactatgtatgcctgcaggaaaggtatatgacagaaatgcaacaaaagaacaagagcgtcagccaatacctggagatggacaagaccctctccaagaaggaggaggaggtcgagcggctccagcagctaaagaaggagctggagaaggcaacagcctctgccctggatctgctgaaaagggagaaagaagctcaagaacaagagttcctcagcctgcaggaggaatttcagaagcttgaaaaggagaaccttgaggaaagacagaagctcaagagtaggcttgaaaaactcctgacccaggtcaggaatttgcagtttatgtcagagaatgagaggacgaagaatatcaaattacagcagcagataaatgaggttaagaacgagaacgccaagttgaagcagcaagtggctcggagcgaggagcaaaactatgttccaaaatttgagacagcccaactcaaggatcagttagaggaagtgctcaagtccgacatcaccaaggacaccaagactactcactcaaatctcttaccagactgcagtccatgtgaagagaggctaaaccccgctgacatcaaaagagccagtcaacttgcctccaaaatgcatagcttactggccctgatggtgggacttctcacatgccaggacatcatcaactccgatgccgagcactttaaagaaagtgaaaaagtatcggacataatgctacagaagttaaaaagcttgcacctgaagaaaaagaccctcgacaaagaattgctgaaacacaaggatagaattactacgtttcgcgagctcatagccaaagaaaaggctttccaggaccacgcaattaaggtcattgactgcgattcagacgaggcaaagtcaatccgagacgttcctacactactaggggcaaaacttgataagtatcactccctgaatgaggagttagactttctggtgacgtcctacgaggagattatcgagtgtgccgaccagaggttggctattagtcattcacagatcgcccacctcgaggaacggaacaaacatctggaagatctcataagaaaaccaagggaaaaggctaggaagcctcggtccaaaagtttagagaaccatcctaaatctatgaccatgctggcttataatctgtatatctttatcggatatcgactgggtgctgtcgctgacgcttgtaacccatcaactctcggcgggaggggcgggtggattacctag

SEQ ID NO: 66683 - DNA, 2475 bp, Artificial Sequence
  derived and/or modified sequence
atgaataaggactaccagaaattctggagctcccctagtgaccctgtgcacttcgaagttgataccagccacgagaaggtggagtccatgagcgagtctgacactatgaatgtctccaacctgtctcaaggtgtaatgctctctcacagcccgatctgcatggaaaccacagggactacatgcgatctcccgcagaatgaaatcaaaaatttcgagcgggaaaacgagtatgaatcgaccttgtgcgaggatgcctacgggacgctggacaacctcctcaatgacaataatattgagaactatagcactaatgcactcattcagcctgttgacaccattagcattagttccctgagacagttcgagactgtttgcaagttccactgggtcgaggccttcgatgacgaaatgactgaaaaacccgaatttcaaagtcaggtctacaactacgcaaaggacaacaatatcaaacaggacagctttaaggaagagaatcctatggagactagtgtttctgccaacacggaccaattgggtaacgaatattttcggcagccgccaccaaggagtccacccctgatccactgctctggtgaaatgctaaagttcacagaaaagtccctagccaagagcattgcaaaggagtcggccctgaatccatcacaacccccaagtttcctgtgtaagaccgctgtgcctagtaaagagattcagaattacggagagattcctgaaatgtcagtatcttatgaaaaggaggtcacagccgaaggtgtcgaacgacctgagattgtttctacttggagctctgctgggataagttggcgtagcgaagcttgtagggaaaattgcgagatgcctgactgggaacagtctgcggaatcgctacagcccgtgcaggaggatatggccctcaatgaggtactgcagaaacttaaacacaccaaccgcaaacaggaagttaggatccaggaactccagtgttctaacttatacctggagaagagggttaaagagttgcagatgaaaattacaaaacagcaagtgttcatagacgtgatcaacaagctcaaagagaatgtcgaagaactaatcgaggataagtacaagattatcctcgagaagaatgacaccaaaaagaccttacagaatctggaagaggtgcttgccaacacacagaaacatctccaagagtcacgcaatgataaggagatgctgcagttgcagttcaaaaagattaaagctaactatgtgtgtctgcaggagcgatacatgactgagatgcagcagaagaacaagagcgtttctcagtacctagaaatggacaaaaccctatccaaaaaagaagaagaggtggagcggcttcaacaactgaaaaaggaacttgaaaaggcaacggccagcgccctagatttactaaagcgggaaaaggaggcacaggaacaggaattcctgagtctccaggaagagtttcaaaaattggagaaggaaaatttggaggaaaggcagaagctcaagagcagattagaaaagctgctgacccaggtgcgcaacctccagttcatgagcgagaacgagaggacaaaaaacatcaagctccagcaacagatcaacgaggttaagaatgagaacgcgaaactcaagcaacaagtggccagaagcgaggaacagaattatgtacctaagttcgagacggcccagctgaaggaccagcttgaagaagtgctaaaaagtgatattacaaaggatacaaagaccacacattccaacctgctgccggattgctccccttgcgaagaacggctgaaccccgcagatattaaaagggcaagccagttagcatctaagatgcactcccttctggcactcatggtgggactgcttacctgccaggacatcattaacagcgacgccgagcattttaaggaaagtgagaaagtgtctgacataatgctgcagaaactcaagtccctgcacctaaagaaaaaaacacttgataaggaacttttaaagcacaaggatcggattacaacgtttcgcgagctcatcgccaaggaaaaggcctttcaggatcacgccattaaagtgatcgactgcgattccgacgaagcaaaaagtatcagagatgtgcccactctgctgggagcaaaactcgacaaataccactcgttaaacgaggagctagactttctcgttacctcctatgaagaaatcattgaatgtgctgaccaacgcttggctatatctcacagtcaaatcgctcatttggaagagagaaataaacatctcgaggaccttattaggaagcctcgggaaaaggccagaaaaccaaggagcaaatctctggagaaccatcctaaatctatgaccatgttggcttataatctgtacatttttattggatatagactgggggctgttgcagacgcctgcaacccatctactttgggcggtagaggagggtggataacgtag

SEQ ID NO: 66684 - DNA, 2771 bp, Artificial Sequence
  derived and/or modified sequence
ttgcgagtttgtgagagtccttggtggaggaggttggaaagcgttctccctcccacaaaacccggtgcagagggagggagagccaggtccgtagcgtgggtccaagaaactatggatcctggaagtgagcacacttttgtgtcttaaaaagtttggtgtctcgttttgaggtgaaaaatgaatgagataagtgctttttaaaaagaagtcttctattgttcaacagttatgaacaaggactatcaaaaattttggtcatcaccttcagatcctgtacattttgaagtggatacttctcatgaaaaagtagaaagcatgtcagaatcggataccatgaatgtcagcaatctttctcaaggtgtaatgctttcacattctccaatctgtatggaaaccaccggcaccacttgtgacttgcctcagaacgaaataaagaattttgaaagggaaaatgagtatgaatccacactttgtgaagatgcttatggcacactagacaatttgttaaatgataacaacattgaaaattactcaacgaatgcactaattcagccagttgacaccatcagcatatcttccttgagacaatttgaaaccgtttgcaaatttcactgggtagaagcatttgatgatgaaatgacagagaagccagaatttcaaagtcaagtgtataattatgcaaaagacaacaatataaagcaagactcatttaaggaagaaaatccaatggaaactagtgtttctgcaaatacagaccaacttggtaacgagtattttagacagcctcctcctagaagcccgcctctaatccactgcagtggagagatgctgaaatttacagaaaagtcactggctaaaagtattgccaaggaatctgccctcaaccctagccaacctccaagcttcttatgtaagactgcagttccttcaaaagaaatacagaattatggggagattcctgagatgtcagtcagttatgaaaaggaagtcacagcagagggtgtggagaggccagaaattgtctcaacttggtcttcggcaggcatttcctggaggagtgaagcatgtcgggagaactgtgagatgcctgactgggagcaaagtgctgaaagcttacaacctgttcaagaggacatggctttaaatgaagtcttgcagaaattaaaacatactaacagaaagcaggaagtgcgaatccaagaactccagtgtagtaacctgtatttagagaagagggttaaagaactacagatgaagattaccaaacagcaagtgttcattgatgtcatcaataagctaaaggagaatgttgaagaattaattgaagacaaatacaaaataatcctagagaagaatgatactaaaaagacattgcagaatttggaagaggttttagctaacacgcaaaaacatcttcaggaatccaggaatgacaaggaaatgttacagcttcaatttaagaagatcaaggctaattatgtgtgtttacaggaaaggtacatgactgaaatgcaacaaaaaaataaatctgtaagtcagtatttagagatggacaaaaccttaagcaagaaagaagaagaggtagagagactacaacaactcaaaaaagaactggaaaaggccacagcttctgctttggacttgttgaaacgggaaaaagaggcccaagaacaagagttcttgtctttacaggaggaattccagaaacttgaaaaggaaaacctggaagaaagacagaaactgaaatctagacttgagaaattgctcactcaagttagaaatttgcaatttatgtctgaaaatgaaagaacgaagaatataaaacttcagcagcaaatcaacgaagtaaaaaatgagaatgcaaaacttaaacagcaggttgcaaggagtgaagagcaaaattatgtccctaaatttgagacagctcagttaaaggatcaattagaggaagtcttgaagtcagatattaccaaggatacaaaaacgacacattctaatctgctcccggattgctcaccttgtgaagagaggctgaatcctgcagatataaaaagagcttctcagctggcctccaaaatgcacagtcttctggctctgatggtgggacttctcacatgccaggacatcatcaattctgatgctgaacatttcaaagagagtgagaaggttagtgatataatgctgcaaaaactgaagagcctccatcttaaaaagaaaactttagataaagagctactgaaacataaagatagaatcacaacctttagagagttaattgctaaggaaaaagcatttcaagatcatgctattaaggtcatagactgtgattcagatgaagccaagagtatcagagatgtacctacccttctgggagccaaactggataagtaccacagtctaaatgaggagcttgatttcttggttacatcatatgaagaaatcattgaatgtgctgaccaaaggcttgcaatatcccactcccagattgcacatttggaagagagaaataaacatttagaggatttaattagaaagcccagagaaaaagccagaaaaccaagatcaaaaagcttagaaaatcatccgaagtccatgaccatgttggcatataacttgtacatatttataggatacaggctgggcgcggtggctgacgcctgtaatcccagcactttgggaggccgaggcgggtggatcacttgagttcaggagttcaagaccagcctgaccaacatggggaaccctcgtctctattaaaaatacagaaaatt

SEQ ID NO: 66685 - DNA, 2475 bp, Artificial Sequence
  derived and/or modified sequence
atgaacaaggactaccagaagttctggagcagccccagcgaccccgtgcacttcgaggtggacaccagccacgagaaggtggagagcatgagcgagagcgacaccatgaacgtgagcaacctgagccagggcgtgatgctgagccacagccccatctgcatggagaccaccggcaccacctgcgacctgccccagaacgagatcaagaacttcgagagagagaacgagtacgagagcaccctgtgcgaggacgcctacggcaccctggacaacctgctgaacgacaacaacatcgagaactacagcaccaacgccctgatccagcccgtggacaccatcagcatcagcagcctgagacagttcgagaccgtgtgcaagttccactgggtggaggccttcgacgacgagatgaccgagaagcccgagttccagagccaggtgtacaactacgccaaggacaacaacatcaagcaggacagcttcaaggaggagaaccccatggagaccagcgtgagcgccaacaccgaccagctgggcaacgagtacttcagacagcccccccccagaagcccccccctgatccactgcagcggcgagatgctgaagttcaccgagaagagcctggccaagagcatcgccaaggagagcgccctgaaccccagccagccccccagcttcctgtgcaagaccgccgtgcccagcaaggagatccagaactacggcgagatccccgagatgagcgtgagctacgagaaggaggtgaccgccgagggcgtggagagacccgagatcgtgagcacctggagcagcgccggcatcagctggagaagcgaggcctgcagagagaactgcgagatgcccgactgggagcagagcgccgagagcctgcagcccgtgcaggaggacatggccctgaacgaggtgctgcagaagctgaagcacaccaacagaaagcaggaggtgagaatccaggagctgcagtgcagcaacctgtacctggagaagagagtgaaggagctgcagatgaagatcaccaagcagcaggtgttcatcgacgtgatcaacaagctgaaggagaacgtggaggagctgatcgaggacaagtacaagatcatcctggagaagaacgacaccaagaagaccctgcagaacctggaggaggtgctggccaacacccagaagcacctgcaggagagcagaaacgacaaggagatgctgcagctgcagttcaagaagatcaaggccaactacgtgtgcctgcaggagagatacatgaccgagatgcagcagaagaacaagagcgtgagccagtacctggagatggacaagaccctgagcaagaaggaggaggaggtggagagactgcagcagctgaagaaggagctggagaaggccaccgccagcgccctggacctgctgaagagagagaaggaggcccaggagcaggagttcctgagcctgcaggaggagttccagaagctggagaaggagaacctggaggagagacagaagctgaagagcagactggagaagctgctgacccaggtgagaaacctgcagttcatgagcgagaacgagagaaccaagaacatcaagctgcagcagcagatcaacgaggtgaagaacgagaacgccaagctgaagcagcaggtggccagaagcgaggagcagaactacgtgcccaagttcgagaccgcccagctgaaggaccagctggaggaggtgctgaagagcgacatcaccaaggacaccaagaccacccacagcaacctgctgcccgactgcagcccctgcgaggagagactgaaccccgccgacatcaagagagccagccagctggccagcaagatgcacagcctgctggccctgatggtgggcctgctgacctgccaggacatcatcaacagcgacgccgagcacttcaaggagagcgagaaggtgagcgacatcatgctgcagaagctgaagagcctgcacctgaagaagaagaccctggacaaggagctgctgaagcacaaggacagaatcaccaccttcagagagctgatcgccaaggagaaggccttccaggaccacgccatcaaggtgatcgactgcgacagcgacgaggccaagagcatcagagacgtgcccaccctgctgggcgccaagctggacaagtaccacagcctgaacgaggagctggacttcctggtgaccagctacgaggagatcatcgagtgcgccgaccagagactggccatcagccacagccagatcgcccacctggaggagagaaacaagcacctggaggacctgatcagaaagcccagagagaaggccagaaagcccagaagcaagagcctggagaaccaccccaagagcatgaccatgctggcctacaacctgtacatcttcatcggctacagactgggcgccgtggccgacgcctgcaaccccagcaccctgggcggcagaggcggctggatcacctag

SEQ ID NO: 66686 - protein, 363 aa, Artificial Sequence
  derived and/or modified sequence
MKRSLNENSARSTAGCLPVPLFNQKKRNRQPLTSNPLKDDSGISTPSDNYDFPPLPTDWAWEAVNPELAPVMKTVDTGQIPHSVSRPLRSQDSVFNSIQSNTGRSQGGWSYRDGNKNTSLKTWNKNDFKPQCKRTNLVANDGKNSCPVSSGAQQQKQLRIPEPPNLSRNKETELLRQTHSSKISGCTMRGLDKNSALQTLKPNFQQNQYKKQMLDDIPEDNTLKETSLYQLQFKEKASSLRIISAVIESMKYWREHAQKTVLLFEVLAVLDSAVTPGPYYSKTFLMRDGKNTLPCVFYEIDRELPRLIRGRVHRCVGNYDQKKNIFQCVSVRPASVSEQKTFQAFVKIADVEMQYYINVMNET

SEQ ID NO: 66687 - DNA, 1092 bp, Artificial Sequence
  derived and/or modified sequence
atgaagagaagcctgaacgagaacagcgccagaagcaccgccggctgcctgcccgtgcccctgttcaaccagaagaagagaaacagacagcccctgaccagcaaccccctgaaggacgacagcggcatcagcacccccagcgacaactacgacttcccccccctgcccaccgactgggcctgggaggccgtgaaccccgagctggcccccgtgatgaagaccgtggacaccggccagatcccccacagcgtgagcagacccctgagaagccaggacagcgtgttcaacagcatccagagcaacaccggcagaagccagggcggctggagctacagagacggcaacaagaacaccagcctgaagacctggaacaagaacgacttcaagccccagtgcaagagaaccaacctggtggccaacgacggcaagaacagctgccccgtgagcagcggcgcccagcagcagaagcagctgagaatccccgagccccccaacctgagcagaaacaaggagaccgagctgctgagacagacccacagcagcaagatcagcggctgcaccatgagaggcctggacaagaacagcgccctgcagaccctgaagcccaacttccagcagaaccagtacaagaagcagatgctggacgacatccccgaggacaacaccctgaaggagaccagcctgtaccagctgcagttcaaggagaaggccagcagcctgagaatcatcagcgccgtgatcgagagcatgaagtactggagagagcacgcccagaagaccgtgctgctgttcgaggtgctggccgtgctggacagcgccgtgacccccggcccctactacagcaagaccttcctgatgagagacggcaagaacaccctgccctgcgtgttctacgagatcgacagagagctgcccagactgatcagaggcagagtgcacagatgcgtgggcaactacgaccagaagaagaacatcttccagtgcgtgagcgtgagacccgccagcgtgagcgagcagaagaccttccaggccttcgtgaagatcgccgacgtggagatgcagtactacatcaacgtgatgaacgagacctag

SEQ ID NO: 66688 - DNA, 1092 bp, Artificial Sequence
  derived and/or modified sequence
atgaagcggtctcttaacgagaactctgccagaagtacggcaggatgtttgcccgttcccttatttaatcagaagaagagaaaccggcaaccattgaccagcaaccccctcaaagatgactctggaatctccacaccatctgataattatgactttccccctttacctactgactgggcgtgggaggctgtgaatccagagcttgctcctgtcatgaagacggtagacacaggacagattccccactcagtgtcccggccactgaggtctcaggattctgtcttcaattccattcagagcaatactggtcgctcccaaggcggctggtcctatcgggacggaaacaaaaacacatctttgaagacttggaataaaaatgatttcaaaccccagtgtaagaggacaaatctggtcgcaaacgacgggaagaactcctgccctgtctcatcaggagcccagcagcagaaacagctgcgtattcctgaaccgccaaacctgtccagaaataaggagaccgaattactcaggcaaacccatagttctaagatctcgggatgtaccatgagaggtcttgataagaacagcgctctgcagacgctaaagcctaattttcagcagaaccagtataagaagcagatgctcgacgacattccggaggataacacactcaaggaaacatccctctaccaactgcagtttaaagaaaaagccagtagcttaagaataattagtgccgtgatcgaatccatgaagtattggcgggaacacgcgcagaagacggtcttactgttcgaagtcctggctgtgctcgacagcgcagtgacacctgggccatactatagtaaaacgttcctgatgagagacgggaagaatactctgccttgtgttttctatgagatagaccgcgagttgccccggctgatcagaggccgtgtgcacaggtgcgtcgggaactacgaccagaagaagaacatctttcagtgcgtctctgtcagaccagcaagcgtctcagagcagaagacattccaagcatttgtcaagattgcagacgtagagatgcagtactacatcaacgtgatgaatgagacatag

SEQ ID NO: 66689 - DNA, 1092 bp, Artificial Sequence
  derived and/or modified sequence
atgaaacggtctttaaatgagaacagcgccagatccaccgcaggttgcctccccgtccctctcttcaatcaaaaaaaaagaaaccgtcaaccgttaacaagcaacccgttgaaggacgactcaggcatctcaaccccgtctgacaattacgatttccctcctcttccgactgactgggcttgggaagctgtcaaccctgagctggcccccgtgatgaaaaccgtggataccggccaaattccccatagcgtgagccggcccctgcgctctcaggactccgtcttcaactccatccaatctaatacagggaggtcacaagggggctggtcatatcgggacgggaacaaaaacacttccctaaaaacctggaacaaaaatgatttcaagccacaatgcaagcggacaaatcttgttgctaatgacggaaaaaacagctgcccggtaagcagcggagcccaacagcaaaaacagctgaggattccagagccaccaaatttgtctagaaacaaagaaactgagcttctgagacagacacattcgagcaagatctccgggtgtacaatgagagggctggacaagaattccgctttgcagacactaaaacctaatttccagcagaaccagtataagaagcagatgcttgacgatatccccgaggataatacactgaaagagaccagtctttaccaattgcagttcaaagagaaggcgtcaagcctgcgcattatatcggctgtaatcgaatctatgaagtattggagagagcacgcccagaagacagtcctcttgtttgaggtgttagctgtgctggattctgcagttacacctggcccatattacagcaagacatttctgatgcgcgatggaaagaacaccttaccctgcgttttttatgaaattgaccgcgagctcccgaggcttatcagaggccgcgttcatagatgtgtcgggaactacgatcaaaaaaaaaacatctttcagtgtgtgtcggttcggcccgcatcggtttctgaacagaagacgtttcaagccttcgtcaaaatagccgacgtggaaatgcagtactatatcaatgtgatgaacgagacatag

SEQ ID NO: 66690 - DNA, 1092 bp, Artificial Sequence
  derived and/or modified sequence
atgaaacggtctcttaacgagaacagcgccaggtccaccgctgggtgcctgccggtccctctgtttaatcagaagaagcgaaacagacagccactcacttccaacccccttaaggacgactctggcattagcaccccatctgataactacgacttcccccctctcccgactgactgggcctgggaagctgtgaacccggagttggcccccgtcatgaagaccgtggataccggacagattccccattccgtctctcgtcctcttcgttcacaagattctgtattcaactctattcagtctaataccggacgcagccaagggggttggtcttaccgagacggtaacaaaaacacaagtctcaaaacatggaataaaaatgattttaagccccagtgcaagagaaccaatctcgtagctaacgacggaaagaattcgtgcccagtttcaagtggggcccagcagcagaaacagttgcgcattcctgaaccgcctaatctctcaaggaacaaagagaccgagctgctgcgccagactcacagcagcaagatttctgggtgtaccatgaggggacttgataaaaatagtgctctccagacactgaagcccaactttcaacagaaccagtacaaaaaacagatgctggacgacatcccagaggacaacacgttaaaggagacatctctgtaccagctccagttcaaagaaaaggcttccagtctgaggattattagcgcagtaatagagagcatgaaatactggcgagaacatgcccaaaaaaccgttttactgttcgaggtgcttgcagtcttggattcagcagtcactcctggtccatattactcaaagactttcttaatgcgggacggaaagaacaccctcccttgcgtcttttacgagatagatcgagaactgcccaggctcataaggggccgagtgcatcgttgcgtgggcaattacgaccagaagaagaatatcttccaatgcgtgtctgtgcgccccgcaagcgtttctgagcaaaagacattccaagcattcgttaagatagccgacgttgaaatgcagtactacattaacgtgatgaacgagacctag

SEQ ID NO: 66691 - DNA, 1092 bp, Artificial Sequence
  derived and/or modified sequence
atgaagaggagcctgaatgaaaattctgcccggagcacagctggctgcctgcctgtgcccctcttcaaccagaagaagaggaaccggcagcccctgaccagcaaccccctgaaggatgattctggcatcagcacccccagcgacaactatgacttcccccccctgcccacagactgggcctgggaggccgtgaaccctgagctggcccctgtgatgaagacagtggacaccggccagatcccccacagcgtgtcccggcccctgcggagccaggacagcgtcttcaacagcatccagagcaacacaggccgcagccagggcggctggagctacagagatggcaacaagaacaccagcctgaagacctggaacaagaatgacttcaagccccagtgcaagaggaccaacctggtggccaatgatggcaagaacagctgccctgtgagcagcggggcccagcagcagaagcagctgcgcatccctgagccccccaacctgagcaggaacaaggagacagagctgctgcggcagacccacagcagcaagatcagcggctgcaccatgaggggcctggacaagaacagcgccctgcagaccctgaagcccaacttccagcagaaccagtacaagaagcagatgctggatgacatccctgaggacaacaccctgaaggagaccagcctgtaccagctgcagttcaaggagaaggccagcagcctgcgcatcatctctgctgtgattgaatccatgaagtactggagggagcacgcccagaagacagtgctgctgtttgaggtgctggccgtgctggacagcgctgtgaccccaggcccctactacagcaagaccttcctgatgagagatggcaagaacaccctgccctgtgtgttctatgaaattgaccgggagctgcccaggctcatccggggccgggtgcaccgctgtgtgggcaactatgaccagaagaagaacatcttccagtgtgtgtctgtgcggcctgcctctgtgtctgagcagaagaccttccaggcctttgtgaagattgctgatgtggagatgcagtactacatcaacgtgatgaatgagacctag

SEQ ID NO: 66692 - DNA, 1092 bp, Artificial Sequence
  derived and/or modified sequence
atgaagcggagcctgaacgagaacagcgcccggagcaccgccggctgccttcccgtccccttgtttaatcagaagaagcggaatcgccagcctctgacctcaaacccactgaaggacgatagtggaatcagtacgccgtctgacaactacgactttccgcctcttccaacagattgggcctgggaggcagtcaatcccgaactcgcgcccgtcatgaagaccgtggacaccgggcaaatcccacatagcgtgagcagacctctccgcagccaggactccgtattcaacagtattcaatcaaacacaggccgatcacagggggggtggtcctacagggacggcaataaaaatactagtctcaagacctggaacaaaaatgacttcaagcctcagtgcaagcggaccaatctggtagcaaacgatggcaagaacagctgccccgtttcgagtggagcacagcagcaaaaacagctccgaatcccagaaccaccgaacctgtcacgcaacaaagaaactgagctgctcagacaaacccattccagcaaaatctcgggctgcacgatgcgcgggcttgataagaatagcgccctgcagacactgaagccaaacttccagcagaaccaatataagaagcagatgttggatgacatccccgaggataacaccttgaaagagaccagcctgtaccagctgcaatttaaggaaaaagcatcttccctccgaatcatcagtgcggtgattgagagcatgaagtattggcgagagcatgctcaaaagacagtgttgctctttgaagtcctagcagtcttggattccgcggtgactccaggcccttactacagtaaaacttttctgatgcgcgacggcaagaacaccctgccatgcgtgttctacgagattgaccgcgagcttcctagactgattcgaggtcgcgtgcatagatgcgttggtaattatgatcagaagaaaaatatattccagtgcgtgagtgtgaggcctgcctcggtgtccgagcagaagactttccaggctttcgtaaaaatcgccgatgttgagatgcagtactacataaacgtaatgaatgagacttag

SEQ ID NO: 66693 - DNA, 1092 bp, Artificial Sequence
  derived and/or modified sequence
atgaagcggagcctgaacgagaacagcgcccggagcaccgccggctgcttgcccgtgcctctgtttaaccagaaaaagagaaaccgccagccgctgacttctaacccactgaaagatgacagcggcatcagtaccccaagcgacaactacgacttcccgcctcttcccactgattgggcctgggaggcagtgaaccctgagcttgcaccagtcatgaagactgtagacaccggccagatcccccattctgtcagtcgacctctcagatcacaagattcagtgtttaacagcatccagtccaatactggaagaagtcagggtggttggtcctatagggatgggaataagaatacatctctgaaaacatggaataaaaacgactttaagccccaatgcaagcggacgaatctcgttgccaacgatggcaaaaactcgtgtccggtgtcttctggagcgcagcaacagaaacagctgcgcatacccgagcccccaaatctgagtaggaataaagagaccgagttgctcagacagacccattcttcaaagatctcaggatgtacgatgcgcggtctggacaagaactctgcactccagaccctaaaaccaaattttcagcagaaccagtacaagaagcagatgttggacgacatacccgaagacaatacactgaaggaaacctctttataccagcttcagtttaaggagaaagccagctcgctccggattatatcggcagtgattgagtcaatgaaatactggcgggagcacgctcaaaagacagtgctgctgttcgaggtgcttgccgtgctcgactccgccgtcacaccaggtccctactattctaagaccttcctcatgagggacgggaaaaatactttaccttgcgtgttctacgagattgacagggagctgcctcgactgattcggggccgtgtgcacagatgcgtcggaaactatgaccaaaagaaaaatatcttccagtgcgtctcggtcagacccgccagtgtgagcgagcagaaaacatttcaggcctttgtgaagattgcggatgttgagatgcagtactacataaacgtgatgaatgaaacctag

SEQ ID NO: 66694 - DNA, 1092 bp, Artificial Sequence
  derived and/or modified sequence
atgaagcggagcctgaacgagaacagcgcccggagcaccgccggctgtttgcccgtgcctctttttaaccagaagaagcgcaatcgacaaccactcacctccaatcctcttaaggacgacagcggcatttcaaccccttccgataactatgactttccacctctgcctacagattgggcttgggaagcagtgaatcccgagctagctcccgtcatgaaaaccgtggacactggacagataccccactccgtttcccggcctctccgctctcaggacagcgtgtttaatagtatccagagcaacacgggacgcagtcaaggaggttggtcatacagggatggtaacaaaaatacctccctgaagacatggaataaaaacgattttaaaccacaatgcaagcggacaaacctcgtggctaatgacggaaagaattcctgtccagttagcagcggtgcccagcagcaaaagcagcttcgtatccctgaacctcctaaccttagcaggaacaaagagaccgagcttctgagacagacccacagcagcaagattagcggctgcactatgcggggcttagataaaaatagcgccctccaaacactcaaaccgaatttccagcagaatcagtataagaagcagatgctcgatgacatccccgaggataatacactgaaggaaacttccctataccagctgcagtttaaggaaaaggcctcatctctgcgaattatttccgccgtcattgagtctatgaaatactggagggagcacgcccaaaaaacagttttactgttcgaagttctcgcagtgttagatagcgccgtgacgccaggaccctattatagtaaaaccttcctcatgcgtgacggcaagaacactctgccatgcgtcttctatgagatcgatagagagctcccccggttaatacgaggcagggtccaccgctgcgtgggcaattatgaccagaaaaagaacatcttccagtgtgtcagtgttcggcccgcatccgtctctgaacagaagacattccaggccttcgttaaaatagctgacgttgaaatgcagtactatattaatgtaatgaacgagacctag

SEQ ID NO: 66695 - DNA, 1092 bp, Artificial Sequence
  derived and/or modified sequence
atgaaacgcagcctgaatgaaaatagtgcaaggagtacggccggatgcttgcctgtcccactctttaaccagaaaaagcggaatcggcagccgctgacatcaaaccccctgaaggatgactctgggatctctacaccctctgataactatgatttcccgccacttccaacggattgggcctgggaagctgtgaacccggaactggctcccgtgatgaagacagtggatacggggcagataccgcacagcgtgagtagaccccttagatcccaggacagcgtgttcaacagcattcagtccaatacaggtaggagccagggaggctggagctaccgggacggcaataaaaatacctccctaaaaacatggaataagaacgacttcaaacctcagtgtaagagaaccaacctcgttgctaacgatgggaaaaatagttgccctgtgtcctctggggctcagcagcagaagcaattgaggattcctgagcctcctaatctgtctagaaacaaagaaactgaattgctcaggcagacccacagttccaaaatatcaggctgtaccatgagagggcttgataagaacagcgcgctacagaccctgaagcctaacttccagcagaatcagtataaaaaacagatgcttgatgatatccccgaggataacaccctcaaggaaacttcgctgtaccaacttcaattcaaagagaaggcctctagcctccgtataatttcagccgtgatcgagagtatgaagtactggcgggagcatgctcagaaaacagtgcttctcttcgaggtcttagcagtgcttgactccgcggtgactcccggtccatattacagtaagactttcctgatgcgggatggcaagaacacactgccatgcgtcttttacgaaattgacagagagttgccaagattaattcggggaagggtgcataggtgtgtggggaactatgatcagaagaagaacatctttcagtgcgtgagcgtgcggcctgcctccgtgtccgaacagaaaactttccaggccttcgttaagatcgctgacgtggagatgcagtattatattaacgtgatgaatgagacatag

SEQ ID NO: 66696 - DNA, 1092 bp, Artificial Sequence
  derived and/or modified sequence
atgaaacggtcgcttaatgaaaactcggccagaagcactgcaggatgtctgccagtgccactctttaatcagaagaaacggaatagacagccacttacttcgaatcctctgaaggatgatagcgggatctctactccaagtgacaactacgacttcccgcctctgcctacagattgggcttgggaggctgtgaatccagagttggcacccgtgatgaaaaccgtggacacaggacaaattccacactctgtgtctcgcccattgcgctctcaagactccgtgttcaatagcatccagagtaatactggcaggtcacaggggggttggtcctatagggatgggaacaagaatacaagccttaaaacttggaataagaacgacttcaagcctcaatgcaagaggaccaatcttgtggcaaacgatggcaaaaactcctgtcctgtaagcagtggggcacagcagcaaaaacagctgcggattcccgaaccccctaacttgagtaggaataaagagacggagttgctcaggcagacacacagctcgaagatttctggatgcactatgcgtggactggacaagaattcggccttacagaccctgaagcccaattttcagcagaatcagtacaagaaacagatgttggatgacatccctgaagataatacactgaaagaaaccagcctctatcagcttcaattcaaggaaaaagcgagttctttgcgaataatctctgctgtgattgaaagcatgaaatattggagagagcacgcccagaaaaccgtactgctttttgaagtcctcgccgtgcttgacagcgccgtgacccctgggccatattatagcaaaacatttttgatgagagatggaaaaaacacgctgccttgcgtgttttacgagattgaccgggagctcccaagacttatcagaggcagggtacatagatgtgtgggcaattacgaccagaaaaagaacatctttcagtgcgtcagcgttcggcctgcttccgtctccgagcagaagaccttccaggccttcgtgaagatcgccgacgtagaaatgcagtactacatcaatgtgatgaacgaaacctag

SEQ ID NO: 66697 - DNA, 1092 bp, Artificial Sequence
  derived and/or modified sequence
atgaagcgctcgttaaatgagaattccgccaggtccaccgctggatgcctgccagtgcccctgttcaaccagaaaaagagaaacaggcagcccttgacaagcaatccgctcaaagacgatagcggaatctccacgcccagtgacaattacgacttccccccattgccaaccgactgggcctgggaggctgttaatcctgagctggcccctgtgatgaaaaccgtcgataccgggcagatcccccactctgtatctaggcctctgcgatcccaggatagtgtctttaacagtatccagagtaacactggacgaagccagggtggatggagctatcgcgacggaaataagaataccagcctgaaaacgtggaataaaaacgacttcaagcctcagtgtaagaggacaaatctcgtggcaaatgacggaaaaaacagttgccccgtatcctctggcgcacaacaacagaaacagttacggatacccgaaccgccaaacctgtctcgcaacaaagaaacagagctgctacggcagacccacagctccaaaattagtggttgtacgatgagaggattggataagaatagtgcccttcaaaccctcaagcccaactttcagcagaatcaatacaagaagcagatgttggacgatattcctgaggataatacactgaaggaaacatcattgtaccagctgcaattcaaagagaaagctagcagcctccgaatcatatccgccgtcattgagagcatgaaatactggcgggagcacgcccaaaagacagtcctactctttgaagtgctagctgtgcttgacagcgcggtgacgcctggaccatattactccaaaacctttctcatgcgggatgggaaaaatactctcccctgcgtgttttatgagattgaccgggaactaccaaggcttatccgaggccgtgtgcaccgatgtgttgggaattacgaccagaaaaaaaacatttttcagtgcgttagtgttagaccagcgagcgtaagtgagcagaagaccttccaagcatttgtgaaaattgctgacgttgagatgcagtactacattaatgtgatgaatgaaacctag

SEQ ID NO: 66698 - DNA, 1463 bp, Artificial Sequence
  derived and/or modified sequence
aggcgagggaaactgagggcgaaagttgtgtgtcgtgttggcaggagggcctagaagggaaagactgtgcgttgataccaaactgcccccactccgtgggcgggtcaggagaggcctttggaagagcgtctcaactcggactggagcctcttctctcccaccgcggtctagtgggacaatgtcatattataaatttggaatgctgaatagaaaattatagattttgatattgaaggaaatgaagcgaagcctaaatgaaaattcagctcgaagtacagcaggctgtttgcctgttccgttgttcaatcagaaaaagaggaacagacagccattaacttctaatccacttaaagatgattcaggtatcagtaccccttctgacaattatgattttcctcctctacctacagattgggcctgggaagctgtgaatccagagttggctcctgtaatgaaaacagtggacaccgggcaaataccacattcagtttctcgtcctctgagaagtcaagattctgtctttaactctattcaatcaaatactggaagaagccagggtggttggagctacagagatggtaacaaaaataccagcttgaaaacttggaataaaaatgattttaagcctcaatgtaaacgaacaaacttagtggcaaatgatggaaaaaattcttgtccagtgagttcgggagctcaacaacaaaaacaattaagaatacctgaacctcctaacttatctcgcaacaaagaaaccgagctactcagacaaacacattcatcaaaaatatctggctgcacaatgagagggctagacaaaaacagtgcactacagacacttaagcccaattttcaacaaaatcaatataagaaacaaatgttggatgatattccagaagacaacaccctgaaggaaacctcattgtatcagttacagtttaaggaaaaagctagttctttaagaattatttctgcagttattgaaagcatgaagtattggcgtgaacatgcacagaaaactgtacttctttttgaagtattagctgttcttgattcagctgttacacctggcccatattattcgaagacttttcttatgagggatgggaaaaatactctgccttgtgtcttttatgaaatcgatcgtgaacttccgagactgattagaggccgagttcatagatgtgttggcaactatgaccagaaaaagaacattttccaatgtgtttctgtcagaccggcgtctgtttctgaacaaaaaactttccaggcatttgtcaaaattgcagatgttgagatgcagtattatattaatgtgatgaatgaaacttaagtagtgataaaaggaagtttagcataaattatagcagttttctgttattgcttaatttaccatctccatagttttatagctactattgtatttcacttgttgaattaaagtatttgaattcttttaaatgtgg

SEQ ID NO: 66699 - DNA, 1399 bp, Artificial Sequence
  derived and/or modified sequence
cggcggttgctgacggggccgcctggacgacggttgacggaggcgagggaaactgagggcgaaagttgtgtgtcgtgttggcaggagggcctagaagggaaagactgtctagtgggacaatgtcatattataaatttggaatgctgaatagaaaattatagattttgatattgaaggaaatgaagcgaagcctaaatgaaaattcagctcgaagtacagcaggctgtttgcctgttccgttgttcaatcagaaaaagaggaacagacagccattaacttctaatccacttaaagatgattcaggtatcagtaccccttctgacaattatgattttcctcctctacctacagattgggcctgggaagctgtgaatccagagttggctcctgtaatgaaaacagtggacaccgggcaaataccacattcagtttctcgtcctctgagaagtcaagattctgtctttaactctattcaatcaaatactggaagaagccagggtggttggagctacagagatggtaacaaaaataccagcttgaaaacttggaataaaaatgattttaagcctcaatgtaaacgaacaaacttagtggcaaatgatggaaaaaattcttgtccagtgagttcgggagctcaacaacaaaaacaattaagaatacctgaacctcctaacttatctcgcaacaaagaaaccgagctactcagacaaacacattcatcaaaaatatctggctgcacaatgagagggctagacaaaaacagtgcactacagacacttaagcccaattttcaacaaaatcaatataagaaacaaatgttggatgatattccagaagacaacaccctgaaggaaacctcattgtatcagttacagtttaaggaaaaagctagttctttaagaattatttctgcagttattgaaagcatgaagtattggcgtgaacatgcacagaaaactgtacttctttttgaagtattagctgttcttgattcagctgttacacctggcccatattattcgaagacttttcttatgagggatgggaaaaatactctgccttgtgtcttttatgaaatcgatcgtgaacttccgagactgattagaggccgagttcatagatgtgttggcaactatgaccagaaaaagaacattttccaatgtgtttctgtcagaccggcgtctgtttctgaacaaaaaactttccaggcatttgtcaaaattgcagatgttgagatgcagtattatattaatgtgatgaatgaaacttaagtagtgataaaaggaagtttagcataaattatagcagttttctgttattgcttaatttaccatctccatagttttatagctactattgtatttcacttgttgaattaaagtatttgaattcttttaaa

SEQ ID NO: 66700 - DNA, 1704 bp, Artificial Sequence
  derived and/or modified sequence
aacaaacggatgtctggaccctaagggccagggggtgaggggaagtggggcacactttttagacgatggtggggctgaggccggttgggcaggagatctgcctctgtctctccagtcacaggacagtctcctttcctctctgggcaaaactctaaggagctggagccatccctgggtccacagtgtgagaacgccaaggaagagcgttaacgtcatcgcgcccggccaagggcggccaggcaggcagcgaagatgccatcgcgccgaggtggcggccactgcgcctgcgcggtccacggcgcctgcgaacagcctgattcccgcgctttcttcgcgggcgggaagggcggcggttgctgacggggccgcctggacgacggttgacggaggcgagggaaactgagggcgaaagtctagtgggacaatgtcatattataaatttggaatgctgaatagaaaattatagattttgatattgaaggaaatgaagcgaagcctaaatgaaaattcagctcgaagtacagcaggctgtttgcctgttccgttgttcaatcagaaaaagaggaacagacagccattaacttctaatccacttaaagatgattcaggtatcagtaccccttctgacaattatgattttcctcctctacctacagattgggcctgggaagctgtgaatccagagttggctcctgtaatgaaaacagtggacaccgggcaaataccacattcagtttctcgtcctctgagaagtcaagattctgtctttaactctattcaatcaaatactggaagaagccagggtggttggagctacagagatggtaacaaaaataccagcttgaaaacttggaataaaaatgattttaagcctcaatgtaaacgaacaaacttagtggcaaatgatggaaaaaattcttgtccagtgagttcgggagctcaacaacaaaaacaattaagaatacctgaacctcctaacttatctcgcaacaaagaaaccgagctactcagacaaacacattcatcaaaaatatctggctgcacaatgagagggctagacaaaaacagtgcactacagacacttaagcccaattttcaacaaaatcaatataagaaacaaatgttggatgatattccagaagacaacaccctgaaggaaacctcattgtatcagttacagtttaaggaaaaagctagttctttaagaattatttctgcagttattgaaagcatgaagtattggcgtgaacatgcacagaaaactgtacttctttttgaagtattagctgttcttgattcagctgttacacctggcccatattattcgaagacttttcttatgagggatgggaaaaatactctgccttgtgtcttttatgaaatcgatcgtgaacttccgagactgattagaggccgagttcatagatgtgttggcaactatgaccagaaaaagaacattttccaatgtgtttctgtcagaccggcgtctgtttctgaacaaaaaactttccaggcatttgtcaaaattgcagatgttgagatgcagtattatattaatgtgatgaatgaaacttaagtagtgataaaaggaagtttagcataaattatagcagttttctgttattgcttaatttaccatctccatagttttatagctactattgtatttcacttgttgaattaaagtatttgaattcttttaaa

SEQ ID NO: 66701 - protein, 320 aa, Artificial Sequence
  derived and/or modified sequence
MKRSLNENSARSTADWAWEAVNPELAPVMKTVDTGQIPHSVSRPLRSQDSVFNSIQSNTGRSQGGWSYRDGNKNTSLKTWNKNDFKPQCKRTNLVANDGKNSCPVSSGAQQQKQLRIPEPPNLSRNKETELLRQTHSSKISGCTMRGLDKNSALQTLKPNFQQNQYKKQMLDDIPEDNTLKETSLYQLQFKEKASSLRIISAVIESMKYWREHAQKTVLLFEVLAVLDSAVTPGPYYSKTFLMRDGKNTLPCVFYEIDRELPRLIRGRVHRCVGNYDQKKNIFQCVSVRPASVSEQKTFQAFVKIADVEMQYYINVMNET

SEQ ID NO: 66702 - DNA, 963 bp, Artificial Sequence
  derived and/or modified sequence
atgaagagaagcctgaacgagaacagcgccagaagcaccgccgactgggcctgggaggccgtgaaccccgagctggcccccgtgatgaagaccgtggacaccggccagatcccccacagcgtgagcagacccctgagaagccaggacagcgtgttcaacagcatccagagcaacaccggcagaagccagggcggctggagctacagagacggcaacaagaacaccagcctgaagacctggaacaagaacgacttcaagccccagtgcaagagaaccaacctggtggccaacgacggcaagaacagctgccccgtgagcagcggcgcccagcagcagaagcagctgagaatccccgagccccccaacctgagcagaaacaaggagaccgagctgctgagacagacccacagcagcaagatcagcggctgcaccatgagaggcctggacaagaacagcgccctgcagaccctgaagcccaacttccagcagaaccagtacaagaagcagatgctggacgacatccccgaggacaacaccctgaaggagaccagcctgtaccagctgcagttcaaggagaaggccagcagcctgagaatcatcagcgccgtgatcgagagcatgaagtactggagagagcacgcccagaagaccgtgctgctgttcgaggtgctggccgtgctggacagcgccgtgacccccggcccctactacagcaagaccttcctgatgagagacggcaagaacaccctgccctgcgtgttctacgagatcgacagagagctgcccagactgatcagaggcagagtgcacagatgcgtgggcaactacgaccagaagaagaacatcttccagtgcgtgagcgtgagacccgccagcgtgagcgagcagaagaccttccaggccttcgtgaagatcgccgacgtggagatgcagtactacatcaacgtgatgaacgagacctag

SEQ ID NO: 66703 - DNA, 963 bp, Artificial Sequence
  derived and/or modified sequence
atgaagcgttccctaaatgagaactctgccagaagcaccgccgactgggcatgggaggcagtgaaccctgagcttgccccagtcatgaaaaccgttgatactggccaaataccccacagcgtttccaggcctctccgaagccaagacagcgtattcaactccattcaatcaaacactggtcgatcccagggagggtggtcctaccgggacggaaataaaaacactagcttgaaaacctggaataagaacgacttcaaacctcagtgtaaacgcacgaatctggtcgcaaatgatggtaagaactcgtgccccgttagtagcggagctcagcaacagaagcaactcaggatcccagaacctccgaatctgtctcggaataaagagacagagcttttacgtcagacacattcgtcaaagatatccgggtgtacaatgaggggtctagacaagaacagtgcccttcagactttgaagcctaactttcagcagaatcagtataaaaaacagatgctggatgacattccagaggacaatacgctgaaagaaacgtccctctaccagctgcagttcaaggaaaaggctagctccttacgtatcatctcagcagtgattgagtccatgaagtactggagagaacacgctcagaaaacggtactcctgttcgaagttctcgcagtgctggattcggcagttactcccgggccgtattattctaagacctttttgatgagagacggaaaaaatacgttgccctgcgttttttacgaaatcgatcgagaactcccaagacttatacgcggtcgagtgcaccgctgcgtgggtaactacgatcagaaaaagaacatatttcagtgtgtgtctgtccgtcctgccagcgtttccgagcagaaaaccttccaagctttcgtcaaaatcgccgatgtggagatgcagtattatatcaatgtcatgaatgaaacttag

SEQ ID NO: 66704 - DNA, 963 bp, Artificial Sequence
  derived and/or modified sequence
atgaagaggagcctgaatgaaaattctgcccggagcacagctgactgggcctgggaggccgtgaaccctgagctggcccctgtgatgaagacagtggacaccggccagatcccccacagcgtgtcccggcccctgcggagccaggacagcgtcttcaacagcatccagagcaacacaggccgcagccagggcggctggagctacagagatggcaacaagaacaccagcctgaagacctggaacaagaatgacttcaagccccagtgcaagaggaccaacctggtggccaatgatggcaagaacagctgccctgtgtcctctggggcccagcagcagaagcagctgcgcatccctgagccccccaacctgagcaggaacaaggagacagagctgctgcggcagacccacagcagcaagatcagcggctgcaccatgaggggcctggacaagaacagcgccctgcagaccctgaagcccaacttccagcagaaccagtacaagaagcagatgctggatgacatccctgaggacaacaccctgaaggagaccagcctgtaccagctgcagttcaaggagaaggccagcagcctgcgcatcatctctgctgtgattgagagcatgaagtactggagggagcacgcccagaagacagtgctgctgtttgaggtgctggccgtgctggacagcgctgtgaccccaggcccctactacagcaagaccttcctgatgagagatggcaagaacaccctgccctgtgtgttctatgaaattgaccgggagctgcccaggctcatccggggccgggtgcaccgctgtgtgggcaactatgaccagaagaagaacatcttccagtgtgtgtctgtgcggcctgcctctgtgtctgagcagaagaccttccaggcctttgtgaagattgctgatgtggagatgcagtactacatcaacgtgatgaatgagacctag

SEQ ID NO: 66705 - DNA, 963 bp, Artificial Sequence
  derived and/or modified sequence
atgaagcggagcctgaacgagaacagcgcccggagcaccgccgactgggcatgggaggccgtgaaccctgagcttgcccctgttatgaagacagttgatacaggacaaatccctcacagcgtctccaggcccctgcggagccaagatagtgtttttaattctattcagagtaacacaggccgaagccaaggaggctggtcatatcgcgacgggaataagaacacctctctgaaaacctggaacaaaaacgatttcaagcctcagtgtaagcgaaccaacctggtagcgaacgacgggaaaaacagctgccccgtcagcagcggcgcccaacaacagaaacagctgaggatccccgagcctcccaatctgagccgcaataaagaaacagagctgctcaggcagactcactctagcaagatctctggctgtaccatgagagggctcgacaaaaattcagcactgcagacactcaagcccaactttcagcagaatcaatacaaaaagcagatgctggacgatatccccgaggataacaccctaaaggagactagcctctaccaactccagtttaaggagaaggcaagcagtctacggatcatatcagccgttattgaatccatgaagtattggagagaacacgctcagaagacggttctattgttcgaggtcctggccgtgcttgatagtgcggtgactccaggcccctactatagcaaaaccttcctgatgagagacggaaagaacactctgccgtgtgttttttacgaaatcgaccgggaacttcctcgactgattcgaggcagagtgcaccgttgcgtaggcaactacgatcagaagaaaaacatcttccagtgtgtgagcgtaaggcctgcgtctgtctcagagcagaagacctttcaggctttcgtgaaaatcgcagatgtggagatgcagtattacatcaatgtgatgaacgaaacctag

SEQ ID NO: 66706 - DNA, 963 bp, Artificial Sequence
  derived and/or modified sequence
atgaagagatctctcaacgagaacagtgctcggagtactgcagattgggcctgggaagccgttaaccccgagctcgcccctgtgatgaaaacagtcgatacaggccagataccccactctgtctctagacccttgcgtagtcaggatagcgtttttaactcaatccagtcaaatacaggcaggtcccaggggggttggtcttatagggacggcaacaaaaatacaagtttgaaaacctggaacaagaatgacttcaagcctcagtgcaagcgaaccaacctcgtcgcaaacgatggcaagaatagctgcccagtgagcagtggcgcacagcaacagaaacaactcaggatccccgagccgcctaatctctcacggaacaaagaaacagagttactgagacagacacactcttccaagatcagcggctgtactatgaggggcctggacaaaaattctgccctgcagacacttaagccaaacttccaacagaaccagtacaagaaacaaatgctcgatgacatcccagaggacaacactttgaaagaaacttctctctatcagctccagtttaaggagaaggcgtcatctctgagaatcatctccgcagtgattgaatctatgaaatactggcgagagcacgcgcagaaaaccgtgctgcttttcgaagtgttggcagtcctggatagcgccgtgaccccaggtccctattacagcaagaccttcctgatgagagacggcaaaaatacactgccttgtgtgttttatgaaatcgatcgcgaactcccacgtttgatcagaggccgagttcaccgctgcgttggaaattatgaccagaaaaagaatattttccaatgcgtttccgtgaggccggcaagcgttagcgagcagaaaacatttcaggcattcgttaaaatcgcggacgtggagatgcagtactacatcaatgtcatgaacgagacatag

SEQ ID NO: 66707 - DNA, 1272 bp, Artificial Sequence
  derived and/or modified sequence
gcgcggtccacggcgcctgcgaacagcctgattcccgcgctttcttcgcgggcgggaagggcggcggttgctgacggggccgcctggacgacggttgacggaggtctagtgggacaatgtcatattataaatttggaatgctgaatagaaaattatagattttgatattgaaggaaatgaagcgaagcctaaatgaaaattcagctcgaagtacagcagattgggcctgggaagctgtgaatccagagttggctcctgtaatgaaaacagtggacaccgggcaaataccacattcagtttctcgtcctctgagaagtcaagattctgtctttaactctattcaatcaaatactggaagaagccagggtggttggagctacagagatggtaacaaaaataccagcttgaaaacttggaataaaaatgattttaagcctcaatgtaaacgaacaaacttagtggcaaatgatggaaaaaattcttgtccagtgagttcgggagctcaacaacaaaaacaattaagaatacctgaacctcctaacttatctcgcaacaaagaaaccgagctactcagacaaacacattcatcaaaaatatctggctgcacaatgagagggctagacaaaaacagtgcactacagacacttaagcccaattttcaacaaaatcaatataagaaacaaatgttggatgatattccagaagacaacaccctgaaggaaacctcattgtatcagttacagtttaaggaaaaagctagttctttaagaattatttctgcagttattgaaagcatgaagtattggcgtgaacatgcacagaaaactgtacttctttttgaagtattagctgttcttgattcagctgttacacctggcccatattattcgaagacttttcttatgagggatgggaaaaatactctgccttgtgtcttttatgaaatcgatcgtgaacttccgagactgattagaggccgagttcatagatgtgttggcaactatgaccagaaaaagaacattttccaatgtgtttctgtcagaccggcgtctgtttctgaacaaaaaactttccaggcatttgtcaaaattgcagatgttgagatgcagtattatattaatgtgatgaatgaaacttaagtagtgataaaaggaagtttagcataaattatagcagttttctgttattgcttaatttaccatctccatagttttatagctactattgtatttcacttgttgaattaaagtatttgaattcttttaaatgtgg

SEQ ID NO: 66708 - protein, 269 aa, Artificial Sequence
  derived and/or modified sequence
MKRSLNENSARSTAGCLPVPLFNQKKRNRQPLTSNPLKDDSGISTPSDNYDFPPLPTDWAWEAVNPELAPVMKTVDTGQIPHSVSRPLRSQDSVFNSIQSNTGRSQGGWSYRDGNKNTSLKTWNKNDFKPQCKRTNLVANDGKNSCPVSSGAQQQKQLRIPEPPNLSRNKETELLRQTHSSKISGCTMRGLDKNSALQTLKPNFQQNQYKKQMLDDIPEDNTLKETSLYQLQFKEKASSLRIISAVIESMKYWREHAQKTVLLFEVLGS

SEQ ID NO: 66709 - DNA, 810 bp, Artificial Sequence
  derived and/or modified sequence
atgaagagaagcctgaacgagaacagcgccagaagcaccgccggctgcctgcccgtgcccctgttcaaccagaagaagagaaacagacagcccctgaccagcaaccccctgaaggacgacagcggcatcagcacccccagcgacaactacgacttcccccccctgcccaccgactgggcctgggaggccgtgaaccccgagctggcccccgtgatgaagaccgtggacaccggccagatcccccacagcgtgagcagacccctgagaagccaggacagcgtgttcaacagcatccagagcaacaccggcagaagccagggcggctggagctacagagacggcaacaagaacaccagcctgaagacctggaacaagaacgacttcaagccccagtgcaagagaaccaacctggtggccaacgacggcaagaacagctgccccgtgagcagcggcgcccagcagcagaagcagctgagaatccccgagccccccaacctgagcagaaacaaggagaccgagctgctgagacagacccacagcagcaagatcagcggctgcaccatgagaggcctggacaagaacagcgccctgcagaccctgaagcccaacttccagcagaaccagtacaagaagcagatgctggacgacatccccgaggacaacaccctgaaggagaccagcctgtaccagctgcagttcaaggagaaggccagcagcctgagaatcatcagcgccgtgatcgagagcatgaagtactggagagagcacgcccagaagaccgtgctgctgttcgaggtgctgggcagctag

SEQ ID NO: 66710 - DNA, 810 bp, Artificial Sequence
  derived and/or modified sequence
atgaagcgctctctgaatgagaactctgcccgatcaaccgcgggatgcctgcctgttccactgttcaaccagaaaaaaagaaataggcaaccgcttacctccaatcccctgaaagatgatagtggaattagtaccccatccgacaattacgatttccctcctttgccaaccgattgggcttgggaagctgtaaatcccgaactggcccccgttatgaagactgtagatacaggacagattcctcattcggtgtcaagaccattgcggtcccaagacagtgtttttaattccatacagagtaatactgggaggtcccaaggcgggtggagctaccgtgatggtaacaagaacaccagccttaagacctggaacaaaaatgacttcaagccacagtgtaaacgtactaacctagttgctaatgatggcaagaactcgtgtcctgtgtcctccggcgcacagcaacagaagcagctgcgaatcccggagcctcccaacctgagtaggaataaagagacagagctgcttcgccagacccacagctctaaaatcagtggctgcaccatgcgcggcctagataagaactctgccctacagactctcaaacccaacttccagcaaaaccagtataaaaaacagatgctcgacgacattccggaagacaacacgctcaaagagacctctttgtatcagctgcagtttaaagaaaaagccagcagtctgcgcatcataagtgctgtgatcgagagtatgaagtactggcgcgagcacgctcagaagacagtactccttttcgaggtgctgggatcttag

SEQ ID NO: 66711 - DNA, 810 bp, Artificial Sequence
  derived and/or modified sequence
atgaagaggagcctgaatgaaaattctgcccggagcacagctggctgcctgcctgtgcccctcttcaaccagaagaagaggaaccggcagcccctgaccagcaaccccctgaaggatgattctggcatcagcacccccagcgacaactatgacttcccccccctgcccacagactgggcctgggaggccgtgaaccctgagctggcccctgtgatgaagacagtggacaccggccagatcccccacagcgtgtcccggcccctgcggagccaggacagcgtcttcaacagcatccagagcaacacaggccgcagccagggcggctggagctacagagatggcaacaagaacaccagcctgaagacctggaacaagaatgacttcaagccccagtgcaagaggaccaacctggtggccaatgatggcaagaacagctgccctgtgagcagcggggcccagcagcagaagcagctgcgcatccctgagccccccaacctgagcaggaacaaggagacagagctgctgcggcagacccacagcagcaagatcagcggctgcaccatgaggggcctggacaagaacagcgccctgcagaccctgaagcccaacttccagcagaaccagtacaagaagcagatgctggatgacatccctgaggacaacaccctgaaggagaccagcctgtaccagctgcagttcaaggagaaggccagcagcctgcgcatcatctctgctgtgattgaatccatgaagtactggagggagcacgcccagaagacagtgctgctgtttgaggtgctgggcagctag

SEQ ID NO: 66712 - DNA, 810 bp, Artificial Sequence
  derived and/or modified sequence
atgaagcggagcctgaacgagaacagcgcccggagcaccgccggctgcctgcctgtgcctttattcaaccaaaagaagagaaatcgccagccgctgacatcaaaccccctaaaggatgattcaggcatctcaaccccttccgacaattatgacttcccccccctccccaccgactgggcctgggaagctgtgaaccccgaattggccccagtgatgaagactgtcgatacaggccagattcctcattctgtctctaggcctttgaggtcacaggattcggtgttcaattctatccagtcaaacactggccgaagccaagggggatggagttacagagatggaaataaaaacacttccctcaaaacgtggaataaaaacgactttaaaccacagtgcaaacgtacaaatttagtagcgaatgacgggaaaaatagctgcccagtatcctctggtgctcaacagcagaaacagttgaggatccccgaacctcccaacctctcccgaaacaaggagactgagctgctccggcagacacatagctcaaaaatctcaggctgtaccatgcggggactggataaaaatagcgctctacaaacccttaagccgaatttccagcagaaccagtataagaagcagatgctcgatgacattcctgaggataacacactcaaggaaacatctttatatcagctgcagtttaaagaaaaggcatcctcgctcaggatcatcagcgctgtcattgagtccatgaagtattggcgcgagcatgcacagaagaccgtgctgctctttgaggttctggggtcttag

SEQ ID NO: 66713 - DNA, 810 bp, Artificial Sequence
  derived and/or modified sequence
atgaagcggagcttgaatgagaactcagcgaggtcaacagctgggtgtcttcccgtcccgttattcaatcagaaaaagagaaaccggcagcccctgacttctaatcctctgaaagatgactccgggatcagcaccccatctgataattacgattttccgcctctgcccactgactgggcctgggaggccgtgaatccagaactggcacccgttatgaaaacagttgacacgggacagattcctcactcagtatctaggcctctccgctcacaggactctgtgtttaatagtatccagagcaacaccggtcggtcccaaggagggtggtcgtatcgagatgggaataagaacacaagtttgaaaacatggaacaagaacgattttaagcctcagtgcaaaagaactaacttagttgcaaacgatgggaagaattcatgtcctgtaagtagcggcgcacagcaacagaagcagctgagaatccctgagccccctaacctatcacgtaataaggaaaccgagctgttacgtcaaacacactcttcaaagatctcaggatgcaccatgcgcggactggacaagaacagcgctctgcagacacttaaacctaatttccagcagaaccagtacaagaagcagatgttagacgacattcctgaagataacactctcaaagagacctcgctgtatcagctacagttcaaggaaaaggccagttcactacggattatctctgccgtgattgaatctatgaagtattggagggagcatgcacagaagaccgtccttctctttgaggtcctcggcagttag

SEQ ID NO: 66714 - DNA, 1543 bp, Artificial Sequence
  derived and/or modified sequence
ggggccgcctggacgacggttgacggaggcgagggaaactgagggcgaaagttgtgtgtcgtgttggcaggagggcctagaagggaaagactgtgcgttgataccaaactgcccccactccgtgggcgggtcaggagaggcctttggaagagcgtctcaactcggactggagcctcttctctcccaccgcggtcaggagccaaaacaggccgccatttgaggccgtggtttttgtgggtggtgtgtgtgtgtgtgcgtgcagattgagcacactttttgcacaccaatgccaccaaccccattactaacgccacttaggtccatttgggagctgggattgggggtctagtgggacaatgtcatattataaatttggaatgctgaatagaaaattatagattttgatattgaaggaaatgaagcgaagcctaaatgaaaattcagctcgaagtacagcaggctgtttgcctgttccgttgttcaatcagaaaaagaggaacagacagccattaacttctaatccacttaaagatgattcaggtatcagtaccccttctgacaattatgattttcctcctctacctacagattgggcctgggaagctgtgaatccagagttggctcctgtaatgaaaacagtggacaccgggcaaataccacattcagtttctcgtcctctgagaagtcaagattctgtctttaactctattcaatcaaatactggaagaagccagggtggttggagctacagagatggtaacaaaaataccagcttgaaaacttggaataaaaatgattttaagcctcaatgtaaacgaacaaacttagtggcaaatgatggaaaaaattcttgtccagtgagttcgggagctcaacaacaaaaacaattaagaatacctgaacctcctaacttatctcgcaacaaagaaaccgagctactcagacaaacacattcatcaaaaatatctggctgcacaatgagagggctagacaaaaacagtgcactacagacacttaagcccaattttcaacaaaatcaatataagaaacaaatgttggatgatattccagaagacaacaccctgaaggaaacctcattgtatcagttacagtttaaggaaaaagctagttctttaagaattatttctgcagttattgaaagcatgaagtattggcgtgaacatgcacagaaaactgtacttctttttgaagtattaggatcgtgaacttccgagactgattagaggccgagttcatagatgtgttggcaactatgaccagaaaaagaacattttccaatgtgtttctgtcagaccggcgtctgtttctgaacaaaaaactttccaggcatttgtcaaaattgcagatgttgagatgcagtattatattaatgtgatgaatgaaacttaagtagtgataaaaggaagtttagcataaattatagcagttttctgttattgcttaatttaccatctccatagttttatagctactattgtatttcacttgttgaattaaagtatttgaattcttttaaatgtgg

SEQ ID NO: 66715 - DNA, 2346 bp, Artificial Sequence
  derived and/or modified sequence
atgcacgacgagtgcaccccccagcagaccatgagcagcatccaggacaccaaggccgccgacatcgccgccagaggcgagctgaacgtgatcgagaccgccaccgtgagccccaccaacggcgaggagagccactacaccaaccaggtgcagctggagaagaacaagacccacatgagcagcgccctggtggagaaggagaacaacaccagcctgaacggcagagtgctgggccaggaggagagccagaacaagatgttccccgacaacgccgagaacgaggacgacaagcagatcgagcacatgaccgtggagaacatcaacggcaacagagaggagacccacggcatcatccagaccaccgagaccgagatccaggagaccagcgagagccccagagaggagatgaccaccagcagcatcatctgcgacatcagcaagaagtacatcaacagcaccctgcccaacgacagcgagaacatcaagcacaagaacaacatcatggagaaggagtacctggacgtgctgagcgacgtgaccggcccccaggtgagctgctacatcaccgcccccagctacgtgctgcagcagctggagtgcagaatcatcaaccacatgagcagcctgatcgtgggcgacaacgaggagctggtgagcaacgtgatcaccatcgagtgcagcgacaaggagaagagagtgcccttccccatcggcatcgccatccccttcaccgccagatacagaggcaactacagagacatcatggtgaaggtgtgcgacatcaacctgcagagcagctacctgaaccccaacagcctggagggcatgaagggcggctacaagggcacctgcgccagcgtgaaggtgtacaagctgggcatcttcagcgtggtgagctgcctgaagaaggagagcttcaccgtgaccaagaagggcctggccctgaagagcagcatggacagcagaatcagcctgaactacccccccggcgtgttcaccagccccgtgctggtgcagctgaagatccagcccgtggaccccgccctggtggcccacctgaaggcccagcaggacaccttctacagcgtgcagagcaccagccccctgatccacatccagcaccccagcacctaccccttccagaagcccgtgaccctgttcctgccctgcagcccctacctggacaagaacaacctgggcagcgagatcgaccacaagagaagagccagcgccaccatcaacagaatcacccccagctacttcaacagaaccaagatcgccagcatcagaaagcccagaaagaacgccagcgagtgcctgaagctgctgggcttcagaagccaggacagcggctggtgcggcctggacgacgtggtgaagaccatccagagcggcctggtgagcgtggagctgtacgagcacctggagagattcatcgtgctgcacctgagcagcaccatggacaacagccacctggtgaccttcgtgaagagcctggaggaggccatgctgagcaccaccgcctgcatcgtgctgagccaccagaaggacaacccccacagaatcgccgtgctggtggtgcccagcaaggacctgagccaggtgctgaaggacctgcacctggagggcttcggcggcccccccgagcccagcagacacttccaggtgagagagggcgagcagctgctgctgagattcaccggcaacatcttcgccagcagcaacggcaaggactacggcaaggactacaccctgatcttccacctgcagagaaagcccagactggagctgcagatcaaggaggtggacgagttcggcaactacagctgcccccactacaagggcaccatcgtggtgtacaaggtgcccaagggcaagatcgtgcccaacctgaaccagagcctggtgatcaacgagaaccacagccagctgcccatctgcaagctgcccctgaagctgcccaagcacaagaagctgatcaacagaccccagagcaccaagagagtgagcaaggaccccgtggaggccctgtgggacaacctgctgcactggctggccgaggagctgagcgaggagaacgccgagagcctgagcagcaccctgcccctgagaagaagcaccatccagctgatcaagctgaagaaccccgacgacctgaccgagcagatccacgagttcctgtgcttctggaagaagagcctgcccaccttcaccgacaagctgagactgctggccagacacctgagaaagatcggcagaagcgacctggccgaggagctgaagttcaagtgggagaacaaggtgttcaccgagccccagcagtgcttcgacgtggcccccgagtag

SEQ ID NO: 66716 - DNA, 2346 bp, Artificial Sequence
  derived and/or modified sequence
atgcacgacgaatgcacccctcaacagacaatgtcttctattcaggacaccaaagccgccgatatcgctgccaggggagaattgaatgtaatcgagacagccaccgtgtctcctactaacggcgaagaaagtcactatacaaatcaggtgcaactcgagaaaaacaaaacccatatgtccagcgcacttgtggagaaggagaacaacaccagccttaacggaagggtcctggggcaggaagagtcccaaaataagatgttccctgacaatgccgagaatgaagacgataaacagatcgaacatatgacggtcgagaatattaatggtaatagggaagaaactcacggcataattcagactacagagactgagattcaggaaacctccgagtccccacgggaagaaatgaccacatcctctattatttgcgacatatcgaaaaaatatatcaacagcacacttcccaacgactcagagaacatcaagcacaagaacaacatcatggaaaaggagtacctagacgtgctatccgatgtgaccggcccccaggtatcatgctacataaccgctcctagctacgtgttgcaacaattggaatgccgtattatcaaccatatgtcctccctgattgttggcgacaatgaggaattagtttcaaacgtcatcacaattgagtgtagcgacaaagaaaagagggttccgtttccgattggcattgcaatcccttttacagcccggtataggggtaattatagggatattatggtgaaagtgtgtgatatcaatcttcagtcctcatatctgaaccccaattctctcgaaggcatgaaaggcgggtataagggaacttgcgccagcgtgaaggtttacaaactcgggattttcagcgtggtctcctgtctgaagaaggagtctttcacagtaactaagaaggggctcgcattgaaatcctctatggattcacgcataagtttaaattatcccccaggagtgtttacctcccctgtgctggtgcagctcaagattcagcctgtcgatcccgcactcgtggctcacttgaaggcccaacaggacactttctattcagtgcaaagtactagccccctaatccacatccagcatccttctacgtacccattccagaaacccgttaccttgtttctgccgtgctcaccctatcttgacaagaacaatctgggttccgagatagaccacaaacggagagcctcagccactatcaataggataacccccagttacttcaacagaactaagattgcatcaataaggaagcctcgtaaaaatgccagcgaatgcctgaaactcctgggattccggtcccaagactccggctggtgcggactagatgatgtcgtcaaaactatccagtccggcctggtttctgtggaattatatgagcacctcgagaggtttatagtactccacctgagctccacgatggataactctcacctggttactttcgttaaatcactggaagaggctatgctttcgaccaccgcatgtattgtacttagccatcagaaggacaaccctcataggattgctgtactggtcgtgccttcaaaagacctttcacaggtgctgaaagatctgcatctggaaggatttggcgggccccctgaaccatcccggcattttcaagttcgtgagggagagcagctgctgctccgtttcacgggaaacattttcgcaagcagcaacggtaaagattacggcaaggactacaccctgatctttcatcttcagcgcaagcctaggttggaactgcagatcaaggaggtcgacgaatttgggaactacagctgcccacactataagggcaccattgtcgtctataaggtaccaaaggggaagatcgttcccaacttgaaccagtctctcgttatcaatgaaaaccactcccagcttcctatatgcaaactgccactaaagctacccaagcataagaagctgatcaacaggcctcaaagcacgaagagagtgagcaaagatccagtggaagcactctgggataatctcctccactggcttgccgaggaactgagcgaggagaatgccgaaagtctgtccagcaccctgcctctgaggcgatccaccatacagttaattaaactcaagaatcctgatgatcttaccgagcaaattcacgagtttctctgcttttggaagaaatctcttcccacatttacagacaagcttcgtcttctggcccgacacctgcgaaagataggccgcagcgatctggcagaggaattaaaatttaagtgggagaataaagtgttcaccgagcctcagcaatgtttcgatgtggctccggaatag

SEQ ID NO: 66717 - DNA, 2346 bp, Artificial Sequence
  derived and/or modified sequence
atgcatgatgagtgcaccccccagcagaccatgagcagcatccaggacaccaaggctgctgacattgctgcccggggggagctgaatgtgattgaaacagccaccgtgagccccaccaacggggaggagagccactacaccaaccaggtgcagctggagaagaacaagacccacatgagcagcgccctggtggagaaggagaacaacaccagcctgaatggccgggtgctgggccaggaggagagccagaacaagatgtttcctgacaatgcagaaaatgaagatgacaagcagatcgagcacatgacagtggagaacatcaatggaaaccgggaggagacccacggcatcatccagaccacagaaacagagatccaggagaccagcgagagcccccgggaggagatgaccaccagcagcatcatctgtgacatcagcaagaagtacatcaacagcaccctgcccaatgacagcgagaacatcaagcacaagaacaacatcatggagaaggagtacctggatgtgctgagtgatgtgacaggcccccaggtgtcctgctacatcacagcccccagctatgtgctgcagcagctggagtgccgcatcatcaaccacatgagcagcctcatcgtgggggacaatgaggagctggtgtccaatgtcatcaccattgaatgtagtgacaaggagaagagggtgcccttccccatcggcatcgccatccccttcaccgcccgctaccggggcaactacagagacatcatggtgaaggtgtgtgacatcaacctgcagagcagctacctgaaccccaacagcctggagggcatgaagggcggctacaagggcacctgtgcctctgtgaaggtgtacaagctgggcatcttctctgtggtgtcctgcctgaagaaggagagcttcaccgtgaccaagaagggcctggccctgaagagctccatggacagccgcatcagcctgaactacccacctggggtcttcaccagccctgtgctggtgcagctgaagatccagcctgtggaccctgccctggtggcccacctgaaggcccagcaggacaccttctacagcgtgcagagcaccagccccctcatccacatccagcaccccagcacctaccccttccagaagcctgtgaccctcttcctgccctgcagcccctacctggacaagaacaacctgggcagcgagattgaccacaagagaagagccagcgccaccatcaaccgcatcacccccagctacttcaacagaaccaagatcgccagcatcaggaagcccaggaagaatgccagcgagtgcctgaagctgctgggcttccgcagccaggacagcggctggtgtggcctggatgatgtggtgaagaccatccagagcggcctggtgtctgtggagctgtatgagcacctggagcgcttcatcgtgctgcacctgagcagcaccatggacaacagccacctggtgacctttgtgaagagcctggaggaggccatgctgagcaccacagcctgcatcgtgctgagccaccagaaggacaacccccacagaattgctgtgctggtggtgcccagcaaggacctgagccaggtgctgaaggacctgcacctggagggctttggaggccccccagagcccagccgccacttccaggtgcgggagggggagcagctgctgctgcgcttcaccggcaacatctttgccagcagcaatggcaaggactatggcaaggactacaccctcatcttccacctgcagaggaagccccggctggagctgcagatcaaggaggtggatgaatttggaaactacagctgcccccactacaagggcaccatcgtggtgtacaaggtgcccaagggcaagatcgtgcccaacctgaaccagagcctggtgatcaatgaaaaccacagccagctgcccatctgcaagctgcccctgaagctgcccaagcacaagaagctgatcaaccggccccagagcaccaagagggtgtccaaggaccctgtggaggccctgtgggacaacctgctgcactggctggccgaggagctgtctgaggagaatgctgagagcctgagcagcaccctgcccctgcggcgcagcaccatccagctgatcaagctgaagaacccagatgacctgacagagcagatccacgagttcctgtgcttctggaagaagagcctgcccaccttcacagacaagctgcggctgctggcccggcacctgaggaagattggccgcagtgacctggccgaggagctgaagttcaagtgggagaacaaggtgttcacagagccccagcagtgctttgatgtggcccctgagtag

SEQ ID NO: 66718 - DNA, 2346 bp, Artificial Sequence
  derived and/or modified sequence
atgcacgacgagtgcaccccccagcagaccatgagcagcatccaggacaccaaagccgccgatattgccgcccggggtgaactcaacgtgatcgagaccgcaaccgtgagccctaccaacggcgaggaaagccattataccaaccaggtccagttagaaaagaacaaaactcatatgtcttctgcacttgtcgagaaggagaataacacaagtctgaatggtcgggtcctagggcaagaggagagccaaaacaagatgttcccagataacgccgaaaatgaagacgataagcagattgagcacatgaccgtcgaaaatatcaacggaaacagggaggagacacacggcattatccaaaccacagagacagagattcaggaaacctctgaatcacctcgggaagaaatgaccacctcaagcattatctgcgatatctctaagaaatatattaattccacattgcccaatgactcagaaaatattaaacataagaacaatattatggaaaaggagtatctggatgttctgagcgatgtcaccggaccacaagtgtcttgctacattaccgccccctcctatgtgttgcagcagctggagtgtcgcattattaaccacatgagctcgctgattgtgggcgacaacgaggagctcgtgtcaaatgttataacaatcgagtgttcggataaagaaaaacgggtaccgttccccatcggtatcgcgattccattcaccgcgagatacagaggaaattacagagatatcatggtcaaggtttgtgacataaatctccagagcagttacctgaaccctaacagtctcgagggcatgaagggcggatacaaaggaacgtgcgcttcagtgaaagtttacaaactggggatcttctccgtagtgagctgcctgaaaaaggaaagcttcacggtgacaaaaaaaggacttgctctcaagagcagcatggactctaggattagcttaaactacccccctggagtgttcacaagccctgtgctcgtccagctcaaaatccagcccgttgaccctgcactggtcgctcatctgaaggcccagcaggacacattctattcagtccaaagtaccagcccgctgattcacatccagcatccatcaacctatcccttccaaaaaccagtgacactgttcctcccatgcagtccatatcttgataagaataaccttggcagcgagatagaccacaaaaggcgtgccagcgccactataaaccgcatcacccccagctattttaatcgtaccaagattgcaagcattcgtaaaccacgcaagaacgcctctgagtgtctgaagctcctggggttcagatcccaggactccggctggtgcggtctcgatgatgtagtgaaaacgattcaatcaggactggtgtccgttgaactttacgaacatctcgagcggttcattgtactccacctgagttccaccatggacaactcccaccttgtgacttttgtgaaaagcctagaagaagctatgctgagcaccaccgcttgtattgttctctcacaccagaaagataacccacatcgaatagctgtcttagtcgttccctccaaagatctgagccaagtcttgaaggatctgcatctagaagggtttggaggaccacccgaaccatccagacatttccaagtgagggaaggagagcagctgctcctgcgcttcaccgggaacatttttgcttctagcaatggtaaagactacgggaaggactacactctgattttccacttgcagagaaaacctcggctggagctgcagataaaggaagtggacgaattcggtaactattcctgcccacactataaaggaacaatcgtcgtgtacaaggtgcctaaggggaaaatcgtgccaaatctgaatcagtccctagtgattaatgagaaccatagtcagctgcccatctgcaagctccccctgaagcttcctaaacacaagaagctgatcaatcggcctcagagtaccaaacgagttagcaaagaccctgtcgaagccctgtgggataacctcctgcattggttagcggaggaactcagcgaggaaaatgcggagtcactgtccagcacgctaccgcttcgccgtagcaccattcagctgatcaagctgaagaatccagacgatctgaccgagcagatccatgagttcctctgtttttggaaaaaatctctgccgacattcaccgacaaactaaggctcctggcccggcatttgcggaagataggccgctctgacctcgccgaagagctgaagttcaagtgggagaataaggtctttacggaaccgcaacaatgcttcgatgtcgcaccagaatag

SEQ ID NO: 66719 - DNA, 2346 bp, Artificial Sequence
  derived and/or modified sequence
atgcatgatgaatgcactccacagcagactatgtcctcaatccaggatactaaagccgctgatattgccgctcgcggagaactcaatgttatcgaaacagccaccgtgtcgccgactaatggggaagaatctcattacaccaatcaagtccagctagaaaagaataagacccatatgtctagtgctctggtggagaaagagaacaatacaagccttaacggccgagtgctcggtcaggaggagagccagaataagatgtttcctgataacgccgagaacgaggatgacaagcagattgagcacatgacagtagagaacattaatggcaatagggaagaaacccatggaatcattcagactactgaaaccgaaatacaagaaacatccgagtcccccagggaggaaatgactacaagcagcattatctgcgacatctcaaagaagtatatcaattctacgcttcccaatgactccgagaacatcaagcataagaacaacattatggaaaaggaatatctggatgtcctatcagacgtaacagggccacaggtttcatgctatataaccgcaccatcgtatgtgctgcaacaattagagtgccgtataatcaatcacatgagttcgctaatcgtaggtgataacgaagagttagtgtcaaacgtgattaccatcgagtgcagtgataaggagaaacgggtgccctttcctattggcatcgccattccattcacagctcgttatcggggaaattaccgtgatataatggtgaaggtctgtgatataaacctgcagtcaagctacttgaatcccaactcccttgagggaatgaaaggtgggtacaaggggacctgtgccagcgtaaaggtatacaagctgggaatcttctccgtagtcagctgccttaagaaagaatctttcaccgtgacaaagaagggccttgctttgaagtctagcatggatagcaggatttccctgaactacccccctggtgtgtttacttctccggttttggtacaacttaagatccagcccgtcgacccggcactagtcgcccacctcaaagcccagcaggacactttctactcagttcagtccacaagccccctaatacacattcagcaccccagcacttacccatttcagaaacccgtcacactctttcttccttgcagcccctatctagataaaaataacctggggtctgagatcgaccacaagcgcagggccagtgccacgataaatagaatcacaccttcttacttcaatcggactaaaatcgccagtatccggaagccgcgaaagaacgcctcagagtgtctcaagctgttgggctttcggagtcaggatagcgggtggtgtggcttagacgacgtagtaaaaaccatacagagcgggctcgtgagtgtagagctatacgagcacttggaacgctttatcgtgctgcacttatcctctactatggataattcccatttagtgacatttgtgaagagcctggaggaggcaatgctgtcaacaaccgcctgtatcgtactcagtcaccagaaggacaaccctcaccgcattgcagtgctggtggttcctagcaaagatctgtctcaggtcttgaaggacctgcatcttgaaggcttcggaggaccccctgaacccagccgccatttccaggttagagagggcgagcagcttctgctgcggttcaccggaaatatctttgcatctagcaatgggaaggactatgggaaagactacaccttgatcttccacctccaaaggaaacctagactggagttgcagattaaagaagtcgatgaattcggaaactattcctgcccacactacaagggaactatcgttgtgtataaagtgccgaagggaaaaatcgtccccaatctcaaccaatcacttgtgatcaacgagaaccattcacagctgccaatctgtaagcttccactgaaactgccaaagcataagaagctgataaaccgcccacaaagcacaaagagggtcagtaaggatccggtcgaggccttatgggacaacctgctgcattggctggccgaagagctgagcgaggagaacgccgagtccctctcatctacactcccacttcgtcggagtacaattcaacttatcaagctgaagaaccctgacgacctcacagagcaaattcacgagtttttatgtttttggaaaaaaagtctgcctaccttcacagacaagctcaggctcctcgcccgtcaccttagaaagattggcagatctgatctcgctgaggaattaaaatttaagtgggaaaacaaagtgtttacagagccccagcaatgcttcgatgtggcccctgagtag

SEQ ID NO: 66720 - protein, 916 aa, Artificial Sequence
  derived and/or modified sequence
MPAKPFLSSVLLSWKVLDFSGPGPQGTGQPCSCGHWAEGQGGPPEPAGGPNVLAKALYDNVAESPDELSFRKGDIMTVLEQDTQGLDGWWLCSLHGRQGIVPGNRLKILVGMYDKKPAGPGPGPPATPAQPQPGLHAPAPPASQYTPMLPNTYQPQPDSVYLVPTPSKAQQGLYQVPGPSPQFQSPPAKQTSTFSKQTPHHPFPSPATDLYQVPPGPGGPAQDIYQVPPSAGMGHDIYQVPPSMDTRSWEGTKPPAKVVVPTRVGQGYVYEAAQPEQDEYDIPRHLLAPGPQDIYDVPPVRGLLPSQYGQEVYDTPPMAVKGPNGRDPLLEVYDVPPSVEKGLPPSNHHAVYDVPPSVSKDVPDGPLLREETYDVPPAFAKAKPFDPARTPLVLAAPPPDSPPAEDVYDVPPPAPDLYDVPPGLRRPGPGTLYDVPRERVLPPEVADGGVVDSGVYAVPPPAEREAPAEGKRLSASSTGSTRSSQSASSLEVAGPGREPLELEVAVEALARLQQGVSATVAHLLDLAGSAGATGSWRSPSEPQEPLVQDLQAAVAAVQSAVHELLEFARSAVGNAAHTSDRALHAKLSRQLQKMEDVHQTLVAHGQALDAGRGGSGATLEDLDRLVACSRAVPEDAKQLASFLHGNASLLFRRTKATAPGPEGGGTLHPNPTDKTSSIQSRPLPSPPKFTSQDSPDGQYENSEGGWMEDYDYVHLQGKEEFEKTQKELLEKGSITRQGKSQLELQQLKQFERLEQEVSRPIDHDLANWTPAQPLAPGRTGGLGPSDRQLLLFYLEQCEANLTTLTNAVDAFFTAVATNQPPKIFVAHSKFVILSAHKLVFIGDTLSRQAKAADVRSQVTHYSNLLCDLLRGIVATTKAAALQYPSPSAAQDMVERVKELGHSTQQFRRVLGQLAAA

SEQ ID NO: 66721 - DNA, 2751 bp, Artificial Sequence
  derived and/or modified sequence
atgccagcaaagccatttttatcgagtgtgctgctgtcctggaaggtgttagattttagcgggcccgggccccagggcaccggccagccctgctcatgcgggcactgggccgaagggcagggcggtccccctgagccagccgggggacctaatgtactggctaaagctctctatgacaatgttgcagagagccctgacgaactgagcttcagaaagggtgacatcatgacagtgttggaacaagacactcagggtctggacgggtggtggctctgctccttgcatggacggcagggcattgtgcctggaaatagactgaagatcctggtggggatgtatgacaagaaacctgccggccccggtcccggaccacccgcgactccagcacagccccaacccgggttgcacgcgccagctccacccgcctcccagtacactcccatgcttccaaatacctaccagcctcagcccgacagcgtttatctcgtgcccacaccctcaaaagcacaacaggggctgtaccaggtgcccggaccttcacctcaattccagagcccacccgcaaaacaaacctccactttttctaagcagacaccgcaccaccctttcccttcccccgcaactgacctgtatcaagttccccccggacccgggggaccagcccaggacatttaccaggtacctccatctgccggtatgggccacgatatatatcaggtgcctccctcaatggacactcggtcttgggaggggacaaagccgccagccaaggtcgtggttccaacacgcgtgggacaggggtacgtatatgaggccgcgcaaccagaacaggacgagtacgatattccccgacatctgttagcacccggaccccaggatatctacgatgtgccgccggtgaggggactgctgccatctcagtatggccaagaggtgtacgatactccccccatggcggttaaggggccaaatgggcgggaccccctgttagaggtatatgatgttcccccatcagtggagaagggactgccaccctcaaatcaccacgcagtgtacgacgttccaccctctgtttccaaagacgtcccggatggaccattgttacgggaggagacttacgacgtcccacccgcgttcgccaaggctaaaccttttgatcccgcacggacgcctctggtgctggccgctcctccccctgattcccccccagcggaggacgtgtatgacgtccctccacctgcccctgacctgtatgatgttccaccagggctccgcagacccggcccgggaaccctctacgatgtgccccgcgagcgtgtgctcccccccgaagtagcggatggaggagtggttgattctggagtctatgccgtcccccctccagcagagagagaggcccctgcagaaggtaagaggctaagtgctagctctaccggttcaacacggtcaagccagtcggctagtagcctcgaggtcgctggaccaggtcgcgagcctttggagctggaggtggccgtcgaggctcttgcaaggctgcagcagggcgttagtgccacagtggcccacctgcttgatctggccggtagcgctggggcgaccggctcgtggcgaagtccttctgagccgcaggagccactggtacaggatctgcaggccgcggtcgccgccgtgcagtctgcagtgcacgaattgctggagtttgccaggtcggccgtgggaaatgccgctcatacttcagatcgtgcgcttcacgccaagctgtcccgccaattgcagaaaatggaggacgtgcaccagactctcgtggcacacgggcaggccctggatgccggaagaggcggttccggcgctacccttgaggacctcgatcgattagtggcgtgctcgagagcggtacccgaggatgccaagcagctggcttcattcctgcacgggaacgcctctctcctctttagacgtaccaaagctacagctcccgggcccgagggaggcggcaccttgcacccaaatccgacagataaaacaagttccattcaatcccggccactgccgagtccccctaagttcaccagtcaggactctcccgatgggcagtacgagaacagtgaggggggttggatggaggattatgattacgtccatctccagggcaaagaggagttcgagaagacccagaaagaactgctggaaaaaggttcaatcacccgtcagggcaagtcccaactcgagctccagcagctgaaacaatttgagagactggagcaagaagtgtcccgtcctatcgatcatgacctggcaaactggacccctgcccagcccttggctccaggtaggaccggcggcctaggaccttctgaccggcagctgttgcttttctacctggagcagtgcgaggccaacctgacgacgctgacaaatgccgtggacgcattttttacagctgttgccactaaccagccacccaaaatctttgtcgcccatagcaaattcgtaatcctctccgcacacaaactagtgtttattggcgacacactgtcgaggcaggcgaaggctgccgacgtgaggagccaggtgacacattacagcaatctgttgtgtgatctgctcagagggatagtggccaccaccaaagccgcggcactgcaatacccgtccccctctgcagctcaagatatggtcgaacgggtaaaagaacttggccattcaactcaacaattcagaagggtgttaggacagctggccgccgcatag

SEQ ID NO: 66722 - DNA, 2751 bp, Artificial Sequence
  derived and/or modified sequence
atgcctgccaagcccttcctgagctctgtgctgctgtcctggaaggtgctggacttcagcggccctggcccccagggcaccggccagccctgcagctgtggccactgggccgagggccagggcggccccccagagcctgctgggggccccaacgtgctggccaaggccctgtatgacaacgtggccgagagcccagatgagctgtccttcaggaagggggacatcatgacagtgctggagcaggacacccagggcctggatggctggtggctgtgcagcctgcacggccggcagggcatcgtgcccggcaaccggctgaagatcctggtgggcatgtatgacaagaagccagctggccctggccctggccccccagccaccccagcccagccccagcccggcctgcacgccccagcccccccagccagccagtacacccccatgctgcccaacacctaccagccccagccagattctgtgtacctggtgcccacccccagcaaggcccagcagggcctgtaccaggtgcccggccccagcccccagttccagagccccccagccaagcagaccagcaccttcagcaagcagaccccccaccaccccttccccagccctgccacagacctgtaccaggtgcccccaggccctgggggccctgcccaggacatctaccaggtgccccccagcgctggcatgggccatgacatctaccaggtgcccccatccatggacaccaggtcctgggagggcaccaagcccccagccaaggtggtggtgcccaccagggtgggccagggctacgtgtatgaggccgcccagcctgagcaggatgaatatgacatccccaggcacctgctggcccctggcccccaggacatctatgatgtgccccctgtgcggggcctgctgcccagccagtatggccaggaggtgtatgacaccccacccatggctgtgaagggccccaacggccgggaccccctgctggaggtgtatgatgtgccccccagcgtggagaagggcctgccccccagcaaccaccacgctgtgtatgatgtgcccccatctgtgtccaaggatgtgcctgatggccccctgctgcgggaggagacctatgatgtgcccccagcctttgccaaggccaagccctttgatcctgcccggacccccctggtgctggccgcccctcctccagacagccccccagcagaagatgtgtatgatgtgcccccaccagccccagacctgtatgatgtgcccccaggcctgcggcggcccggccctggcaccctgtatgatgtgccccgggagcgggtgctgcccccagaggtggctgatggaggagtggtggacagcggcgtgtatgctgtgcccccacctgctgagcgggaggccccagctgagggcaagaggctgagcgccagcagcacaggcagcaccaggagcagccagagcgccagcagcctggaggtggccggccctggccgggagcccctggagctggaggtggccgtggaggccctggcccggctgcagcagggcgtgtctgccaccgtggcccacctgctggacctggccggcagcgctggggccaccggctcctggaggagccccagcgagccccaggagcccctggtgcaggacctgcaggccgctgtggccgctgtgcagagcgctgtgcatgagctgctggagtttgcccggtctgctgtgggcaatgctgcccacaccagtgaccgggccctgcacgccaagctgagccggcagctgcagaagatggaggatgtgcaccagaccctggtggcccacggccaggccctggatgctggccggggcggcagcggggccaccctggaggacctggaccggctggtggcctgcagcagagctgtgcctgaagatgccaagcagctggccagcttcctgcacggcaatgccagcctgctcttccggaggaccaaggccacagcccctggccctgagggcggcggcaccctgcaccccaaccccacagacaagaccagcagcatccagagccggcccctgcccagcccccccaagttcaccagccaggacagcccagatggccagtatgagaacagcgagggcggctggatggaggactatgactatgtgcacctgcagggcaaggaggagtttgagaagacccagaaggagctgctggagaagggcagcatcacccggcagggcaagagccagctggagctgcagcagctgaagcagtttgagcggctggagcaggaggtgtcccggcccatcgaccatgacctggccaactggaccccagcccagcccctggcccctggccgcactggaggcctgggccccagcgaccggcagctgctgctcttctacctggagcagtgtgaggccaacctgaccaccctgaccaatgctgtggatgccttcttcaccgctgtggccaccaaccagccccccaagatctttgtggcccacagcaagtttgtgatcctgagcgcccacaagctggtgttcatcggggacaccctgagccggcaggccaaggccgcagatgtgcgcagccaggtgacccactacagcaacctgctgtgtgacctgctgcggggcatcgtggccaccaccaaggctgctgccctgcagtaccccagccccagcgctgcccaggacatggtggagcgggtgaaggagctgggccacagcacccagcagttcagaagagtgctgggccagctggccgccgcctag

SEQ ID NO: 66723 - DNA, 2751 bp, Artificial Sequence
  derived and/or modified sequence
atgcccgccaagcccttcctgagcagcgtgctgctgagctggaaggtcctggacttcagcggacccggcccgcagggcacaggccaaccatgctcttgcggccattgggccgaggggcagggtggtccacccgaacctgctggcggcccaaatgtcctggcaaaagctctgtatgataatgttgccgagagcccggatgagctgtcatttagaaaaggagatatcatgacagtgctggaacaggacacccaagggctggacgggtggtggctgtgctcccttcacgggaggcaaggaattgtgcctggtaatcgactaaagatactggtggggatgtatgacaaaaaacccgccggcccaggccccggtccacccgccactccagcccagccacagcccggactgcatgcaccggcccctcctgcctcgcaatacacaccaatgctgcccaacacataccagccccaaccggattccgtttacctggttccaacaccgtccaaggcccaacagggcctgtatcaggtgccgggtccctctccacagtttcagtcaccccccgctaaacagacatctacatttagcaagcaaacaccccaccatccgttccctagccccgctacagacttatatcaagtcccccccggtccaggcggccctgcacaggatatatatcaggtgcctccaagcgctggcatgggacatgacatctaccaggtaccccctagtatggacaccagatcctgggaggggacaaaacctcctgctaaagtcgtagtgcccacccgagtcggacaggggtacgtgtatgaggctgctcagcctgagcaggacgaatacgatatccctaggcacctcctggctcctggcccccaggacatctacgacgtgccacccgtgcggggcttgctgccatcccagtatggtcaagaggtctatgatacacctcccatggctgtgaaaggccccaacggtcgagatcccctgctggaggtttacgatgttcccccttcagtcgagaagggcttgccaccttctaatcatcatgctgtgtatgacgtccctccatccgtgagtaaggatgtgccagatgggcccttgttaagagaggaaacatatgacgtaccaccagcattcgccaaggcaaagccctttgaccctgcaagaacgcctctggtcctggcagcacccccaccagattccccccccgccgaggatgtgtatgacgtgcccccaccagcaccagacttatacgacgtcccaccaggccttcgcaggcctggcccgggaacactatacgatgtcccccgggagcgagtattaccccctgaggtcgctgatggaggcgtggttgactccggagtgtatgccgtgcctccacccgccgagagggaagcccctgcggaggggaagcggctttcggcctccagtaccggatccacccgaagctcacagtccgcgagctcacttgaagttgcagggcccggtcgggagcctcttgagctcgaggtcgctgtcgaggcactagcacgcctccagcagggggtgagcgctactgtggctcatctactggatctggctgggtccgctggcgccacaggatcttggcggagtccctctgagccccaggagcctttagtacaggatcttcaggccgccgtggccgccgtacagtctgctgtgcacgaacttctggagttcgcacggagcgctgtaggcaatgccgcacatacttcagatcgcgccttgcacgcaaaattatcccggcagctgcagaaaatggaggatgtgcaccaaaccttggtggcgcacggccaggctcttgacgctggtagaggtggatccggtgctaccctcgaggaccttgaccgcctggttgcctgctcccgagctgtccctgaggatgctaagcagctggctagcttcctgcatggtaacgcttcacttctatttcgcagaacaaaggccactgcaccaggcccagagggcgggggcactctgcatcccaaccccacagacaagactagcagtattcagtcccgacctctgccctccccaccaaagtttacatcacaggacagcccagacggccagtacgaaaattcagagggtggctggatggaggactacgattacgtgcatctgcagggaaaagaggaatttgaaaaaactcagaaggagcttctggagaaaggatcaattacccgacaaggtaagagtcagttagaacttcagcagctgaagcagttcgaacggctagaacaggaagtgagccgccctatcgaccacgatctggccaattggaccccagcccagcctcttgcacctggccgtaccggtggcctgggaccatctgatagacagcttctcctgttttacctggaacaatgcgaagctaatctgactacactcacaaacgccgtcgacgcgttcttcaccgcagtagccaccaatcagcctcccaaaatcttcgtggctcactccaagtttgtaatcctgagcgctcataagcttgtctttataggagataccctgtcccgacaagccaaggccgctgacgtgaggtctcaagtcacacactatagcaatctgctctgcgatctgctgaggggtatcgtggccaccaccaaagcagctgcgttgcagtatccatctcctagtgctgctcaggacatggtcgagcgcgtgaaggagctgggacactcaacccagcagttccgaagggtcctcggccagttggccgcggcatag

SEQ ID NO: 66724 - DNA, 2751 bp, Artificial Sequence
  derived and/or modified sequence
atgcccgcaaagccattcctctccagtgtgctcctgtcttggaaggtgctggatttcagcggacccggtccccaggggaccgggcagccttgttcatgtggccactgggcggaaggtcagggtgggcctccagagcccgctggcggacccaacgtactggctaaggctctgtacgataacgtggctgagtccccagatgagttatccttcagaaagggcgatatcatgacggtgctcgagcaggatactcagggcttagatgggtggtggttatgttctctgcacggtaggcaggggattgtgccaggtaacaggttaaaaattttagtgggtatgtatgacaaaaagccggcaggtcccggtccgggaccacctgcaaccccagcccaaccacaaccaggtttacacgcccctgctccaccagcctctcagtacactcccatgctccccaatacctaccagccacagcccgacagtgtctaccttgtccccacaccatccaaagctcagcaggggctgtaccaggtgccgggaccaagcccgcagttccagtcccccccagccaagcagacatccacattctcaaagcaaacaccccaccacccgtttccttcgcccgctacagacctgtaccaggttcctcccggtcccggaggacctgctcaggatatttatcaggtcccaccttcagcaggcatgggccatgatatctaccaagtgcctccttccatggacacacgtagttgggaagggactaaacctcctgctaaagtagtcgtgcctacacgcgttggccaggggtacgtgtacgaggctgctcagccagagcaggacgagtatgacataccacgccatctgctggctcctggtcctcaggacatctacgacgtgccaccggtgcgcggtcttctgccttcacaatatgggcaggaggtgtatgacacccctcctatggcagtgaaagggcctaatggaagagatccactgttagaagtgtacgacgtgccgccttcagtggagaagggtctcccgccttcaaaccaccacgcagtctatgacgtgcccccaagcgtgagtaaggatgttcctgacggacctctcctccgagaggaaacctacgatgttccgccagcttttgcaaaggcaaaaccgttcgacccagccaggaccccactggtactcgccgctcctccacccgattctcctcctgctgaggatgtgtatgacgtccccccaccagcacccgacttgtatgatgtgccccctggcttacgcaggcctggacccggtactctctacgacgtccccagagagcgggttctgcctccagaagtcgccgacggcggagtcgtcgatagtggggtctatgccgtacccccaccagctgaacgcgaggcaccagccgaaggaaagcggttgagcgccagcagcacagggagtacacgatcatcacaaagcgcaagtagcctcgaggtagccggaccaggcagggagcccctggaacttgaggtggcggtcgaagccctcgcacggctccagcaaggtgtgagtgctacagtggcccacttgttggacttagctggatctgctggtgcaacggggtcttggcggtcccccagcgaaccacaagaaccattggttcaggatctccaggccgcagtcgcggctgttcagagcgcagtccacgagctgctcgagtttgcaagatccgctgtaggcaacgcggcacacacctctgacagagcgctccacgcgaagctgtcgcgacagttgcaaaaaatggaagacgtgcaccagaccctggtggcccacggacaggctcttgacgcgggtcggggtggttccggggcaactctggaagaccttgaccgactggtagcctgtagccgggcagttcctgaggacgcaaagcagctcgcaagctttctccatggcaacgctagtcttctctttcggaggaccaaagccacggcaccgggtcccgaggggggagggacactgcaccctaaccccaccgataagacttcgtccattcagagtagacccttgccaagcccgcctaagttcacctcacaggactctcctgacggacagtatgaaaacagtgagggcggttggatggaagactacgactacgtgcacctgcagggaaaagaggagtttgaaaagacgcagaaagagctcctggaaaaaggaagtatcacaagacagggcaaatcccagcttgagctgcagcagctgaagcagttcgagcgactagaacaggaggtctcgcggcctattgatcacgatctcgccaactggaccccagcccaacccctggctccaggacgcaccgggggtctcggacccagtgatcgccagctgctgcttttctatctcgagcagtgcgaggcaaacctcaccactctgacaaatgcggtggatgcattctttaccgccgtggcgaccaaccagccacctaaaatatttgttgcacatagtaagttcgtgattttaagtgcgcacaagctggtgttcataggggatacactgtcacggcaggctaaggctgcagacgtaagatctcaggtcacacattattcaaatcttctttgcgacttgctgaggggtatcgtcgcaacgaccaaagccgcagccctgcagtatccatctccctctgccgcacaagacatggtagagagggtaaaagaacttggtcactctacacagcagttccggagggtcctggggcagctggcagcggcttag

SEQ ID NO: 66725 - DNA, 3515 bp, Artificial Sequence
  derived and/or modified sequence
atgcgcggcgcggctggagcggccggacagtccggcgtccgggaacgctcaggagccggaggagccggaaagcgccgggacccctcgcggggcctctgagcggcgcgggcggacccgagcccccagcccgctggcgccgctgcccgccaggccccgggggcggcggccaagatgtccgtgcctatgaaaaaatgagggcttccagactgtgctgatgtgagccccgccatccgttctggttcagagcataatcgtctcgtcttcagaaagaaggaagacagaacatgcctgccaagcccttcctctcttctgttctgctctcctggaaagttctggacttctctggcccagggcctcaggggactggccagccctgctcctgtgggcactgggcagagggacaaggcggaccacctgagcctgctggagggccgaacgtgctggccaaagcgctctatgacaatgtggccgagtccccggatgagctctccttccgcaagggtgacatcatgacggtgctggagcaggacacgcagggcctggacggctggtggctctgctcgctgcatgggcgccagggcatcgtgcctgggaaccgcctcaagatcttggtgggcatgtatgataagaagccagcagggcctggccccggccctcccgccaccccggcccagcctcagcctggcctccatgccccagcgcctccggcctcccagtacacgcccatgctccccaacacctaccagccccagccagacagcgtctacctggtgcccactcccagcaaggctcagcaaggcctctaccaagtcccgggtcccagccctcagttccagtctcccccagccaagcagacatccaccttctcgaagcagacaccccatcacccgtttcccagcccggccacagacctgtaccaggtgcccccagggcctggaggccctgcccaggatatttaccaggtgccaccttctgccgggatggggcatgacatctaccaggtccccccgtccatggacacacgcagctgggagggcacgaagcccccggcaaaggtggtggtgcccacccgcgtggggcagggctatgtatacgaggccgcccagccggagcaggacgagtacgacatcccgcgacacctgctggccccggggccacaggacatctatgatgtgcccccggttcgggggctgcttcccagccagtatggccaggaggtgtatgacacaccccccatggctgtcaagggtcccaatggccgagacccgttgctggaggtgtatgacgtgccccccagtgtggagaagggcctgccaccgtccaaccaccacgcagtctacgacgttcctccatcggtgagcaaggatgtgcccgatggcccactgctgcgtgaggagacctacgatgtgccccccgccttcgccaaggccaagccctttgacccggcccgcaccccactggtactggctgcgccccctccagactccccgccggccgaggacgtgtatgacgtgccgcccccggctcctgacctctacgacgtgccccctggcttgcggcggcctggcccgggcaccctgtacgatgtgccccgtgaacgggtgcttcctcctgaggtggctgatggtggcgtggtcgacagtggtgtgtatgcggtgcctcccccagctgaacgtgaagccccggcagagggcaagcgcctgtcggcctccagcaccggcagcacacgcagcagccagtctgcgtcctccttggaggtggcagggccgggccgggaacccctggagctggaagttgctgtggaggccctggcacggctgcagcagggtgtgagcgccaccgttgcccaccttctggacctggcaggcagcgccggtgcgactgggagctggcgtagcccctctgagccacaggagccgctggtgcaggacctgcaggctgctgtggccgctgtccagagtgccgtccacgagctgttggagtttgcccgcagcgcggtgggcaatgctgcccacacatctgaccgtgccctgcatgccaagcttagccggcagctgcagaagatggaggacgtgcaccagacgctggtggcacatggtcaggccctcgacgctggccggggaggctctggagccacccttgaggacctggaccggctggtggcctgctcgcgggctgtgcccgaggacgccaagcagctggcctccttcctgcacggcaatgcctcactgctcttcagacggaccaaggccactgccccggggcctgaggggggtggcaccctgcaccccaaccccactgacaagaccagcagcatccagtcacgacccctgccctcaccccctaagttcacctcccaggactcgccagatgggcagtacgagaacagcgaggggggctggatggaggactatgactacgtccacctacaggggaaggaggagtttgagaagacccagaaggagctgctggaaaagggcagcatcacgcggcagggcaagagccagctggagttgcagcagctgaagcagtttgaacgactggaacaggaggtgtcacggcccatagaccacgacctggccaactggacgccagcccaacccctggccccggggcgaacaggcggcctggggccctcggaccggcagctgctgctcttctacctggagcagtgtgaggccaacctgaccacactgaccaacgccgtggacgccttctttaccgccgtggccaccaaccagccgcccaagatctttgtggcgcacagcaagttcgtcatcctcagcgcccacaagctggtgttcatcggggacacactgtcacggcaggccaaggctgctgacgtgcgcagccaggtgacccactacagcaacctgctgtgcgacctcctgcgcggcatcgtggccaccaccaaggccgctgccttgcagtacccatcgccttccgcggcccaggacatggtggagagggtcaaggagctgggccacagcacccagcagttccgccgcgtcctaggccagctggcagccgcctgagggtggtgaccccaggagggaggcaggggaggggtgcggcggtcccagctccctggctcccatgtcaagagtcgctgtgccacaggcttagggacaggaccccagctctgcgtcggtcctggtgccctggatgcccaggaatctgtatatatttatggccgggcagggtgtggggccatgcctcctcaggagccgaagcccaggggccggccagtggccttccccagcatgcaccacgggcccgggttgggtcaccagacggggctggagtgtgagggtcctgcagcctgcaggacctcgtgccaccccgagggctgagcctggtcccacgagggtgccgtgtcccctgacagggccagtgcagtttggtgtgtcctccgccttaccaggagaagaacctgaagaactatttttcgttattggttttccaatcatttgactaagagtctccatttaaataaagtttttaaaaggaagagc

SEQ ID NO: 66726 - DNA, 2751 bp, Artificial Sequence
  derived and/or modified sequence
atgcccgccaagcccttcctgagcagcgtgctgctgagctggaaggtgctggacttcagcggccccggcccccagggcaccggccagccctgcagctgcggccactgggccgagggccagggcggcccccccgagcccgccggcggccccaacgtgctggccaaggccctgtacgacaacgtggccgagagccccgacgagctgagcttcagaaagggcgacatcatgaccgtgctggagcaggacacccagggcctggacggctggtggctgtgcagcctgcacggcagacagggcatcgtgcccggcaacagactgaagatcctggtgggcatgtacgacaagaagcccgccggccccggccccggcccccccgccacccccgcccagccccagcccggcctgcacgcccccgccccccccgccagccagtacacccccatgctgcccaacacctaccagccccagcccgacagcgtgtacctggtgcccacccccagcaaggcccagcagggcctgtaccaggtgcccggccccagcccccagttccagagcccccccgccaagcagaccagcaccttcagcaagcagaccccccaccaccccttccccagccccgccaccgacctgtaccaggtgccccccggccccggcggccccgcccaggacatctaccaggtgccccccagcgccggcatgggccacgacatctaccaggtgccccccagcatggacaccagaagctgggagggcaccaagccccccgccaaggtggtggtgcccaccagagtgggccagggctacgtgtacgaggccgcccagcccgagcaggacgagtacgacatccccagacacctgctggcccccggcccccaggacatctacgacgtgccccccgtgagaggcctgctgcccagccagtacggccaggaggtgtacgacaccccccccatggccgtgaagggccccaacggcagagaccccctgctggaggtgtacgacgtgccccccagcgtggagaagggcctgccccccagcaaccaccacgccgtgtacgacgtgccccccagcgtgagcaaggacgtgcccgacggccccctgctgagagaggagacctacgacgtgccccccgccttcgccaaggccaagcccttcgaccccgccagaacccccctggtgctggccgcccccccccccgacagcccccccgccgaggacgtgtacgacgtgcccccccccgcccccgacctgtacgacgtgccccccggcctgagaagacccggccccggcaccctgtacgacgtgcccagagagagagtgctgccccccgaggtggccgacggcggcgtggtggacagcggcgtgtacgccgtgcccccccccgccgagagagaggcccccgccgagggcaagagactgagcgccagcagcaccggcagcaccagaagcagccagagcgccagcagcctggaggtggccggccccggcagagagcccctggagctggaggtggccgtggaggccctggccagactgcagcagggcgtgagcgccaccgtggcccacctgctggacctggccggcagcgccggcgccaccggcagctggagaagccccagcgagccccaggagcccctggtgcaggacctgcaggccgccgtggccgccgtgcagagcgccgtgcacgagctgctggagttcgccagaagcgccgtgggcaacgccgcccacaccagcgacagagccctgcacgccaagctgagcagacagctgcagaagatggaggacgtgcaccagaccctggtggcccacggccaggccctggacgccggcagaggcggcagcggcgccaccctggaggacctggacagactggtggcctgcagcagagccgtgcccgaggacgccaagcagctggccagcttcctgcacggcaacgccagcctgctgttcagaagaaccaaggccaccgcccccggccccgagggcggcggcaccctgcaccccaaccccaccgacaagaccagcagcatccagagcagacccctgcccagcccccccaagttcaccagccaggacagccccgacggccagtacgagaacagcgagggcggctggatggaggactacgactacgtgcacctgcagggcaaggaggagttcgagaagacccagaaggagctgctggagaagggcagcatcaccagacagggcaagagccagctggagctgcagcagctgaagcagttcgagagactggagcaggaggtgagcagacccatcgaccacgacctggccaactggacccccgcccagcccctggcccccggcagaaccggcggcctgggccccagcgacagacagctgctgctgttctacctggagcagtgcgaggccaacctgaccaccctgaccaacgccgtggacgccttcttcaccgccgtggccaccaaccagccccccaagatcttcgtggcccacagcaagttcgtgatcctgagcgcccacaagctggtgttcatcggcgacaccctgagcagacaggccaaggccgccgacgtgagaagccaggtgacccactacagcaacctgctgtgcgacctgctgagaggcatcgtggccaccaccaaggccgccgccctgcagtaccccagccccagcgccgcccaggacatggtggagagagtgaaggagctgggccacagcacccagcagttcagaagagtgctgggccagctggccgccgcctag

SEQ ID NO: 66727 - protein, 888 aa, Artificial Sequence
  derived and/or modified sequence
MHCPGEAPLAAPRPTPKDPCLRNVLAKALYDNVAESPDELSFRKGDIMTVLEQDTQGLDGWWLCSLHGRQGIVPGNRLKILVGMYDKKPAGPGPGPPATPAQPQPGLHAPAPPASQYTPMLPNTYQPQPDSVYLVPTPSKAQQGLYQVPGPSPQFQSPPAKQTSTFSKQTPHHPFPSPATDLYQVPPGPGGPAQDIYQVPPSAGMGHDIYQVPPSMDTRSWEGTKPPAKVVVPTRVGQGYVYEAAQPEQDEYDIPRHLLAPGPQDIYDVPPVRGLLPSQYGQEVYDTPPMAVKGPNGRDPLLEVYDVPPSVEKGLPPSNHHAVYDVPPSVSKDVPDGPLLREETYDVPPAFAKAKPFDPARTPLVLAAPPPDSPPAEDVYDVPPPAPDLYDVPPGLRRPGPGTLYDVPRERVLPPEVADGGVVDSGVYAVPPPAEREAPAEGKRLSASSTGSTRSSQSASSLEVAGPGREPLELEVAVEALARLQQGVSATVAHLLDLAGSAGATGSWRSPSEPQEPLVQDLQAAVAAVQSAVHELLEFARSAVGNAAHTSDRALHAKLSRQLQKMEDVHQTLVAHGQALDAGRGGSGATLEDLDRLVACSRAVPEDAKQLASFLHGNASLLFRRTKATAPGPEGGGTLHPNPTDKTSSIQSRPLPSPPKFTSQDSPDGQYENSEGGWMEDYDYVHLQGKEEFEKTQKELLEKGSITRQGKSQLELQQLKQFERLEQEVSRPIDHDLANWTPAQPLAPGRTGGLGPSDRQLLLFYLEQCEANLTTLTNAVDAFFTAVATNQPPKIFVAHSKFVILSAHKLVFIGDTLSRQAKAADVRSQVTHYSNLLCDLLRGIVATTKAAALQYPSPSAAQDMVERVKELGHSTQQFRRVLGQLAAA

SEQ ID NO: 66728 - DNA, 2667 bp, Artificial Sequence
  derived and/or modified sequence
atgcattgccctggggaggcacccctcgccgcaccacggcctacaccaaaggacccttgcctcagaaatgttctggctaaagcactgtacgataatgtggctgagtcacctgacgaattgtcattcagaaagggcgacattatgaccgttctggagcaggatacgcagggcctggacgggtggtggttatgcagtctgcacggacggcagggcatcgttcccggcaacaggctgaaaatcttggtgggcatgtacgataagaagcctgcaggccccggacctggcccccctgccactccggcgcagcctcagccaggactgcacgcccctgccccacccgctagccagtatacaccaatgctacctaatacgtaccagccccagcctgatagcgtgtacctggtacctaccccttctaaggcacagcaggggctttatcaagtcccaggcccctctccgcagttccagtcaccccccgccaagcagacaagcactttttcaaagcaaacaccccatcacccctttcccagccctgccaccgatctctatcaggtgccgcccggccccggcggaccagctcaggacatttaccaggtccctccctccgccgggatgggccacgatatctatcaggtacctccctccatggatacgcgcagttgggagggcactaaacctcccgctaaggttgtggtgccaacaagagtggggcagggttacgtgtatgaggccgctcagccagagcaggacgaatatgatatccctcgccatctcctggccccaggcccccaagacatatatgatgtgccgcccgtccggggcctgctgccctcccagtacgggcaggaggtgtatgatactccacccatggcagtgaagggccccaacggaagggaccccctcctggaggtctacgacgtacccccatccgtcgagaaagggctgccaccttctaaccaccatgccgtttatgacgtgcccccttccgtgtctaaggacgtacccgacggtccgctgctgcgggaagagacatatgatgtgccccccgcctttgctaaggccaaaccctttgatcctgcacggaccccccttgtcctggccgcccctccccccgactcgccacctgctgaggacgtttacgatgtccctccaccggctccagacctttacgacgtccctccagggttgcggcggcctggccccgggacactgtacgatgtgccccgtgaacgggtgttaccacccgaggtagccgacgggggcgttgtggacagtggtgtctacgcagtgcctcctcccgctgagcgcgaagcccccgccgaaggcaagcggctgagcgccagtagcactggttccacacggagtagccagtctgctagtagccttgaagtggccgggccaggtcgagaaccactggagctggaagttgccgtggaggcactggctagactccagcaaggcgtgagcgctacagttgctcatctgctggacctcgcaggatctgccggcgccacaggttcttggcgttcgccaagcgaaccccaggaacctctggtccaagatctccaggccgctgtcgccgctgtgcaatccgccgtccatgaacttttggaattcgctcggtcagctgtcggaaatgctgcccacacttcagatcgtgccttacatgccaagcttagccgccagctgcaaaagatggaagatgttcaccagaccttagtggcccacggtcaggctctggacgccggtagggggggtagcggggctacgctcgaggacctggacaggctcgtcgcatgcagtagagccgtacccgaagatgctaagcagctggccagttttctgcacgggaatgccagcctcctgttcagaagaacgaaagcaactgctccggggcctgaaggagggggtactctgcatccaaatccaacagataaaacttcttctattcaatcccgaccacttccgtctcctccaaagttcacctcacaggactcccctgacggacagtacgagaatagtgagggcggctggatggaagattatgactacgtccatctgcagggtaaggaagagttcgaaaagacacagaaagagctgctggaaaagggctccatcacccgccagggcaaaagccaattggagctgcaacaactgaagcagtttgaacgactggagcaagaggtgtcccgtcctattgatcatgacttggcgaactggacaccagcccaacctctcgcacccggacggactggcggactgggcccctcagacagacagctcctactgttctatctcgagcagtgcgaggctaacttaaccacactcacaaacgccgtggacgcatttttcaccgctgtagcaaccaaccagccaccgaagattttcgtggcacacagcaaatttgtcatcctgtctgcacacaagttggtctttataggcgacactctgagccgccaggctaaggctgctgatgtgagaagccaggtgacacactattccaatctcttgtgtgatttgctgcggggcattgttgccacaaccaaggccgccgctctccagtatccgtcaccgagcgcggcccaagacatggtggagcgggtcaaggaattaggccatagcacgcagcagtttcggcgcgtgcttgggcaacttgcagccgcatag

SEQ ID NO: 66729 - DNA, 2667 bp, Artificial Sequence
  derived and/or modified sequence
atgcactgccctggagaggcccccctggccgccccccggcccacccccaaggacccctgcctgagaaatgtgctggccaaggccctgtatgacaacgtggccgagagcccagatgagctgtccttcaggaagggggacatcatgacagtgctggagcaggacacccagggcctggatggctggtggctgtgcagcctgcacggccggcagggcatcgtgcccggcaaccggctgaagatcctggtgggcatgtatgacaagaagccagctggccctggccctggccccccagccaccccagcccagccccagcccggcctgcacgccccagcccccccagccagccagtacacccccatgctgcccaacacctaccagccccagccagattctgtgtacctggtgcccacccccagcaaggcccagcagggcctgtaccaggtgcccggccccagcccccagttccagagccccccagccaagcagaccagcaccttcagcaagcagaccccccaccaccccttccccagccctgccacagacctgtaccaggtgcccccaggccctgggggccctgcccaggacatctaccaggtgccccccagcgctggcatgggccatgacatctaccaggtgcccccatccatggacaccaggtcctgggagggcaccaagcccccagccaaggtggtggtgcccaccagggtgggccagggctacgtgtatgaggccgcccagcctgagcaggatgaatatgacatccccaggcacctgctggcccctggcccccaggacatctatgatgtgccccctgtgcggggcctgctgcccagccagtatggccaggaggtgtatgacaccccacccatggctgtgaagggccccaacggccgggaccccctgctggaggtgtatgatgtgccccccagcgtggagaagggcctgccccccagcaaccaccacgctgtgtatgatgtgcccccatctgtgtccaaggatgtgcctgatggccccctgctgcgggaggagacctatgatgtgcccccagcctttgccaaggccaagccctttgatcctgcccggacccccctggtgctggccgcccctcctccagacagccccccagcagaagatgtgtatgatgtgcccccaccagccccagacctgtatgatgtgcccccaggcctgcggcggcccggccctggcaccctgtatgatgtgccccgggagcgggtgctgcccccagaggtggctgatggaggagtggtggacagcggcgtgtatgctgtgcccccacctgctgagcgggaggccccagctgagggcaagaggctgagcgccagcagcacaggcagcaccaggagcagccagagcgccagcagcctggaggtggccggccctggccgggagcccctggagctggaggtggccgtggaggccctggcccggctgcagcagggcgtgtctgccaccgtggcccacctgctggacctggccggcagcgctggggccaccggctcctggaggagccccagcgagccccaggagcccctggtgcaggacctgcaggccgctgtggccgctgtgcagagcgctgtgcatgagctgctggagtttgcccggtctgctgtgggcaatgctgcccacaccagtgaccgggccctgcacgccaagctgagccggcagctgcagaagatggaggatgtgcaccagaccctggtggcccacggccaggccctggatgctggccggggcggcagcggggccaccctggaggacctggaccggctggtggcctgcagcagagctgtgcctgaagatgccaagcagctggccagcttcctgcacggcaatgccagcctgctcttccggaggaccaaggccacagcccctggccctgagggcggcggcaccctgcaccccaaccccacagacaagaccagcagcatccagagccggcccctgcccagcccccccaagttcaccagccaggacagcccagatggccagtatgagaacagcgagggcggctggatggaggactatgactatgtgcacctgcagggcaaggaggagtttgagaagacccagaaggagctgctggagaagggcagcatcacccggcagggcaagagccagctggagctgcagcagctgaagcagtttgagcggctggagcaggaggtgtcccggcccatcgaccatgacctggccaactggaccccagcccagcccctggcccctggccgcactggaggcctgggccccagcgaccggcagctgctgctcttctacctggagcagtgtgaggccaacctgaccaccctgaccaatgctgtggatgccttcttcaccgctgtggccaccaaccagccccccaagatctttgtggcccacagcaagtttgtgatcctgagcgcccacaagctggtgttcatcggggacaccctgagccggcaggccaaggccgcagatgtgcgcagccaggtgacccactacagcaacctgctgtgtgacctgctgcggggcatcgtggccaccaccaaggctgctgccctgcagtaccccagccccagcgctgcccaggacatggtggagcgggtgaaggagctgggccacagcacccagcagttcagaagagtgctgggccagctggccgccgcctag

SEQ ID NO: 66730 - DNA, 2667 bp, Artificial Sequence
  derived and/or modified sequence
atgcactgccccggcgaggcccccctggccgccccccggcccaccccaaaggacccttgcctgaggaacgtcctagcaaaggcattgtacgataacgtcgcagaaagcccagatgaactctcgttccgcaagggcgacataatgacagtcctggagcaggacacacagggactggatgggtggtggctttgcagcctccatggaaggcagggaatagttcctggcaacagactcaagattttagtgggtatgtatgacaagaaacccgccggcccaggtcccggcccccctgcaacccctgctcagcctcagcccggcctgcatgcaccggctcctcctgctagtcagtatacgcccatgctaccaaacacctatcagccacaaccagactcagtgtatctggttcctacacccagcaaggctcaacagggcctctaccaggtacctggtccgagcccgcaattccagtccccacctgcaaaacagacatctacgttcagtaaacagacacctcatcatccattcccatccccggccaccgacttgtatcaggtccccccggggcctggagggcctgcccaagatatctatcaggtacccccctccgccggcatgggtcacgatatctatcaagtccctcccagtatggacaccagaagctgggagggaacaaagccgcccgccaaggtggtcgtgccaacacgcgtcggtcagggttacgtttatgaggccgctcaaccagagcaggatgagtacgacattcctcggcatctgcttgcgccaggcccacaggatatctacgacgtaccccccgtgcgaggtctgttgccctctcagtatggccaggaagtgtacgacaccccgccaatggctgtgaaaggtcccaatggaagggatcccctgctggaagtgtatgatgtgcctccttccgtggaaaagggtctaccaccatcgaaccatcatgctgtttatgatgttcccccctccgtgagcaaggatgtcccagacgggcccctcctgcgagaagagacatacgacgtgccccctgctttcgcaaaagcaaaaccatttgaccctgcacggacccctcttgtgctcgccgctccgcctccagatagtccgccggcagaagacgtgtacgatgtgcctccgcctgccccagacctgtatgacgtccctcccggactcaggagaccaggccccggcactctgtacgatgttcctagagagagagtcctgccaccggaggttgccgacggcggtgtagtggactccggcgtctacgcagttcccccccctgcggagagggaagctccggcggagggcaaaaggctgtcggcttcctccacaggctccaccaggtcaagccagtctgcttcatcccttgaggtggcaggcccagggcgggagcccctggaactggaggtggccgtagaagctttggctcggctccagcagggcgtgtcggccactgttgcgcatctgttggacctcgctgggtccgccggcgctactggtagctggcggagccccagcgagcctcaggagcccctggtacaggatctccaggccgccgtggcagcagtccaatctgccgtgcacgagttgttggaattcgctagatcagccgtgggcaatgcagcccacacatcagacagagccctgcatgctaagctcagtcgacaacttcagaaaatggaagatgtgcaccagacactcgtcgctcacggacaggcactggacgccggccgcggaggtagcggcgccactctagaggatctagatagattagtggcttgtagccgcgccgtgcctgaagacgccaagcagttagcttccttcctacacgggaacgcatcactccttttcagacgtacaaaggctacggcacctggacctgaagggggagggacattacaccccaaccctaccgacaagacttccagtatccagtctaggcctctgccgtccccccccaaatttacctctcaggacagtcctgacggtcaatatgaaaatagcgaaggtggctggatggaggattacgactatgtgcacctccaggggaaagaggagtttgagaagacccagaaagagctgttggagaaagggagcatcactcgtcagggcaagagccaactggagcttcagcagctaaagcagtttgaaagattggagcaagaggtatcaaggcccattgaccatgatttggctaactggacgccagcccaaccactagcccctggtcggactggaggcctgggaccatctgatcgccagctgttgctcttctatcttgagcagtgcgaggctaatttgactactttgactaatgcagtggatgccttttttacggccgttgccaccaaccagccgcctaaaattttcgtcgctcactcgaaattcgtgattctgtctgctcacaagctcgtattcataggcgacactctgtcccgccaagctaaagcagccgacgtgcgtagccaggtgacccactacagcaacctgctgtgcgacttgctgcgcggcatcgtggcaactacaaaggcagctgcactgcagtacccatcaccatcagcggcccaggacatggttgagcgcgtgaaggagttaggtcactctacccaacagttccggagggtgttgggccagctggctgcagcctag

SEQ ID NO: 66731 - DNA, 2667 bp, Artificial Sequence
  derived and/or modified sequence
atgcactgccctggagaggcgccactggctgcacccagacctaccccgaaggacccctgtctaaggaacgtactggccaaagcgctgtacgacaacgtggccgagagtccggacgagttgagtttcagaaagggggacatcatgacagtgctggagcaggacacgcagggccttgacgggtggtggctttgttcccttcacggcagacaagggattgtacctggtaatcggctgaagattctggtgggtatgtatgataagaaaccagccggacccggaccgggacctcccgctaccccagcacaaccccagccgggattacatgcacctgcgcctccggcatcccagtacacacccatgttacctaatacataccaaccgcagcccgacagtgtgtacttagtgccaactccaagcaaggcacagcagggcctgtatcaggtgccagggccatcaccacagttccagagtccaccagccaagcagacctcgacattcagcaagcagacaccccaccatcccttcccctccccagcgactgacttgtaccaggtgccacccggtccaggtggcccagcccaggatatttaccaggttcctccttctgccggtatggggcacgatatttaccaagtgccacctagtatggacactcgctcttgggagggcactaagccacctgccaaggtagtagtgcctacacgggtgggtcaagggtatgtctacgaggccgctcaacctgaacaagacgaatatgacatcccacgtcacctgttagcaccaggtccacaagatatttatgacgtcccgccagtgcggggtctgctacctagccagtacggccaagaggtctatgatacaccacctatggcagtgaaaggaccgaacgggagggatcctcttcttgaagtctatgacgtgcctccctccgtggagaaaggcctccctccctccaaccatcacgctgtctacgatgtgccaccttcagtttctaaggatgtcccggacgggccattgctccgggaggagacctatgatgtgccacctgctttcgcgaaggccaaaccctttgacccagcacggacgccccttgtgctcgccgcaccccctcccgattccccccctgcggaagacgtgtatgatgtccctccaccggcacccgatctctacgatgtaccacccggactacgtcgtcccggtcctgggacactgtacgacgtgcctagggaacgggtgctccccccagaagtagctgatggaggcgtggtggattcaggcgtttatgccgttcctccgccagctgaaagggaggccccagctgagggtaagcggttgtccgcctcttccactggttctacacggtcctcgcaatctgcaagtagtctggaagtggccggacccggtcgtgaacccctggagctggaggtggccgtggaagccctcgccagattacagcaaggtgttagcgctacagtcgcccatttgcttgaccttgcgggttccgccggtgccaccggctcctggcgatcacctagcgagcctcaagaaccgcttgtgcaggacttgcaggctgccgtagctgccgttcaaagcgccgtgcacgagctgctggaatttgcccgttcagcggtgggcaacgctgctcatacatctgatcgggcactgcacgcgaagttgtcccggcagctccagaagatggaagatgtccatcaaacacttgttgcccacggacaagcacttgatgcgggaagaggtggcagcggggcaacactcgaggacctcgaccgactggtggcctgctctagagcagtcccagaagacgctaaacagttagcctcctttctgcatgggaacgcctcactactctttcgaagaaccaaggcaactgcccctggccctgaaggcggaggcaccctccacccaaacccaaccgacaagacctcttccatacagtccagacctttacccagtcctccgaaattcacatcacaagattcgcctgatggacagtacgaaaattctgaaggcggatggatggaggattacgattacgtacatcttcagggcaaggaagaatttgaaaagacgcagaaggagctgcttgagaagggctcaattacccgacagggcaagtctcaacttgaactacaacaactgaagcaattcgagagacttgaacaggaggttagtcggccaatagaccacgatctagctaactggaccccagcacaacctctggcaccgggtcgaacaggaggcctgggaccctccgataggcagttacttctgttttatctggagcagtgtgaggctaatctgacaacactgacaaacgccgtggacgccttcttcacagcggtggccacaaaccagccccctaagatctttgtggcccactcgaaatttgtcatcctgagcgcccacaagttagtgttcattggagataccctttcgcgccaggctaaagctgctgatgtgcgatcccaggtcacacactacagcaatctcctgtgtgacctcttgcggggtatagtggctaccaccaaagctgccgcattgcagtacccctccccatctgctgcccaggatatggtggaacgagtgaaggaactggggcacagtacccagcaatttaggcgagtcctcggacagctcgctgccgcatag

SEQ ID NO: 66732 - DNA, 3221 bp, Artificial Sequence
  derived and/or modified sequence
tttgcctgccaggagtgggtgagggaggagcagccgccgccttcacagacacctggtagtgtcaggagagggcatgcactgccctggtgaggctcctctggctgcccccaggcccacacccaaggatccctgcctcagaaacgtgctggccaaagcgctctatgacaatgtggccgagtccccggatgagctctccttccgcaagggtgacatcatgacggtgctggagcaggacacgcagggcctggacggctggtggctctgctcgctgcatgggcgccagggcatcgtgcctgggaaccgcctcaagatcttggtgggcatgtatgataagaagccagcagggcctggccccggccctcccgccaccccggcccagcctcagcctggcctccatgccccagcgcctccggcctcccagtacacgcccatgctccccaacacctaccagccccagccagacagcgtctacctggtgcccactcccagcaaggctcagcaaggcctctaccaagtcccgggtcccagccctcagttccagtctcccccagccaagcagacatccaccttctcgaagcagacaccccatcacccgtttcccagcccggccacagacctgtaccaggtgcccccagggcctggaggccctgcccaggatatttaccaggtgccaccttctgccgggatggggcatgacatctaccaggtccccccgtccatggacacacgcagctgggagggcacgaagcccccggcaaaggtggtggtgcccacccgcgtggggcagggctatgtatacgaggccgcccagccggagcaggacgagtacgacatcccgcgacacctgctggccccggggccacaggacatctatgatgtgcccccggttcgggggctgcttcccagccagtatggccaggaggtgtatgacacaccccccatggctgtcaagggtcccaatggccgagacccgttgctggaggtgtatgacgtgccccccagtgtggagaagggcctgccaccgtccaaccaccacgcagtctacgacgttcctccatcggtgagcaaggatgtgcccgatggcccactgctgcgtgaggagacctacgatgtgccccccgccttcgccaaggccaagccctttgacccggcccgcaccccactggtactggctgcgccccctccagactccccgccggccgaggacgtgtatgacgtgccgcccccggctcctgacctctacgacgtgccccctggcttgcggcggcctggcccgggcaccctgtacgatgtgccccgtgaacgggtgcttcctcctgaggtggctgatggtggcgtggtcgacagtggtgtgtatgcggtgcctcccccagctgaacgtgaagccccggcagagggcaagcgcctgtcggcctccagcaccggcagcacacgcagcagccagtctgcgtcctccttggaggtggcagggccgggccgggaacccctggagctggaagttgctgtggaggccctggcacggctgcagcagggtgtgagcgccaccgttgcccaccttctggacctggcaggcagcgccggtgcgactgggagctggcgtagcccctctgagccacaggagccgctggtgcaggacctgcaggctgctgtggccgctgtccagagtgccgtccacgagctgttggagtttgcccgcagcgcggtgggcaatgctgcccacacatctgaccgtgccctgcatgccaagcttagccggcagctgcagaagatggaggacgtgcaccagacgctggtggcacatggtcaggccctcgacgctggccggggaggctctggagccacccttgaggacctggaccggctggtggcctgctcgcgggctgtgcccgaggacgccaagcagctggcctccttcctgcacggcaatgcctcactgctcttcagacggaccaaggccactgccccggggcctgaggggggtggcaccctgcaccccaaccccactgacaagaccagcagcatccagtcacgacccctgccctcaccccctaagttcacctcccaggactcgccagatgggcagtacgagaacagcgaggggggctggatggaggactatgactacgtccacctacaggggaaggaggagtttgagaagacccagaaggagctgctggaaaagggcagcatcacgcggcagggcaagagccagctggagttgcagcagctgaagcagtttgaacgactggaacaggaggtgtcacggcccatagaccacgacctggccaactggacgccagcccaacccctggccccggggcgaacaggcggcctggggccctcggaccggcagctgctgctcttctacctggagcagtgtgaggccaacctgaccacactgaccaacgccgtggacgccttctttaccgccgtggccaccaaccagccgcccaagatctttgtggcgcacagcaagttcgtcatcctcagcgcccacaagctggtgttcatcggggacacactgtcacggcaggccaaggctgctgacgtgcgcagccaggtgacccactacagcaacctgctgtgcgacctcctgcgcggcatcgtggccaccaccaaggccgctgccttgcagtacccatcgccttccgcggcccaggacatggtggagagggtcaaggagctgggccacagcacccagcagttccgccgcgtcctaggccagctggcagccgcctgagggtggtgaccccaggagggaggcaggggaggggtgcggcggtcccagctccctggctcccatgtcaagagtcgctgtgccacaggcttagggacaggaccccagctctgcgtcggtcctggtgccctggatgcccaggaatctgtatatatttatggccgggcagggtgtggggccatgcctcctcaggagccgaagcccaggggccggccagtggccttccccagcatgcaccacgggcccgggttgggtcaccagacggggctggagtgtgagggtcctgcagcctgcaggacctcgtgccaccccgagggctgagcctggtcccacgagggtgccgtgtcccctgacagggccagtgcagtttggtgtgtcctccgccttaccaggagaagaacctgaagaactatttttcgttattggttttccaatcatttgactaagagtctccatttaaataaagtttttaaaaggaagagca

SEQ ID NO: 66733 - DNA, 2667 bp, Artificial Sequence
  derived and/or modified sequence
atgcactgccccggcgaggcccccctggccgcccccagacccacccccaaggacccctgcctgagaaacgtgctggccaaggccctgtacgacaacgtggccgagagccccgacgagctgagcttcagaaagggcgacatcatgaccgtgctggagcaggacacccagggcctggacggctggtggctgtgcagcctgcacggcagacagggcatcgtgcccggcaacagactgaagatcctggtgggcatgtacgacaagaagcccgccggccccggccccggcccccccgccacccccgcccagccccagcccggcctgcacgcccccgccccccccgccagccagtacacccccatgctgcccaacacctaccagccccagcccgacagcgtgtacctggtgcccacccccagcaaggcccagcagggcctgtaccaggtgcccggccccagcccccagttccagagcccccccgccaagcagaccagcaccttcagcaagcagaccccccaccaccccttccccagccccgccaccgacctgtaccaggtgccccccggccccggcggccccgcccaggacatctaccaggtgccccccagcgccggcatgggccacgacatctaccaggtgccccccagcatggacaccagaagctgggagggcaccaagccccccgccaaggtggtggtgcccaccagagtgggccagggctacgtgtacgaggccgcccagcccgagcaggacgagtacgacatccccagacacctgctggcccccggcccccaggacatctacgacgtgccccccgtgagaggcctgctgcccagccagtacggccaggaggtgtacgacaccccccccatggccgtgaagggccccaacggcagagaccccctgctggaggtgtacgacgtgccccccagcgtggagaagggcctgccccccagcaaccaccacgccgtgtacgacgtgccccccagcgtgagcaaggacgtgcccgacggccccctgctgagagaggagacctacgacgtgccccccgccttcgccaaggccaagcccttcgaccccgccagaacccccctggtgctggccgcccccccccccgacagcccccccgccgaggacgtgtacgacgtgcccccccccgcccccgacctgtacgacgtgccccccggcctgagaagacccggccccggcaccctgtacgacgtgcccagagagagagtgctgccccccgaggtggccgacggcggcgtggtggacagcggcgtgtacgccgtgcccccccccgccgagagagaggcccccgccgagggcaagagactgagcgccagcagcaccggcagcaccagaagcagccagagcgccagcagcctggaggtggccggccccggcagagagcccctggagctggaggtggccgtggaggccctggccagactgcagcagggcgtgagcgccaccgtggcccacctgctggacctggccggcagcgccggcgccaccggcagctggagaagccccagcgagccccaggagcccctggtgcaggacctgcaggccgccgtggccgccgtgcagagcgccgtgcacgagctgctggagttcgccagaagcgccgtgggcaacgccgcccacaccagcgacagagccctgcacgccaagctgagcagacagctgcagaagatggaggacgtgcaccagaccctggtggcccacggccaggccctggacgccggcagaggcggcagcggcgccaccctggaggacctggacagactggtggcctgcagcagagccgtgcccgaggacgccaagcagctggccagcttcctgcacggcaacgccagcctgctgttcagaagaaccaaggccaccgcccccggccccgagggcggcggcaccctgcaccccaaccccaccgacaagaccagcagcatccagagcagacccctgcccagcccccccaagttcaccagccaggacagccccgacggccagtacgagaacagcgagggcggctggatggaggactacgactacgtgcacctgcagggcaaggaggagttcgagaagacccagaaggagctgctggagaagggcagcatcaccagacagggcaagagccagctggagctgcagcagctgaagcagttcgagagactggagcaggaggtgagcagacccatcgaccacgacctggccaactggacccccgcccagcccctggcccccggcagaaccggcggcctgggccccagcgacagacagctgctgctgttctacctggagcagtgcgaggccaacctgaccaccctgaccaacgccgtggacgccttcttcaccgccgtggccaccaaccagccccccaagatcttcgtggcccacagcaagttcgtgatcctgagcgcccacaagctggtgttcatcggcgacaccctgagcagacaggccaaggccgccgacgtgagaagccaggtgacccactacagcaacctgctgtgcgacctgctgagaggcatcgtggccaccaccaaggccgccgccctgcagtaccccagccccagcgccgcccaggacatggtggagagagtgaaggagctgggccacagcacccagcagttcagaagagtgctgggccagctggccgccgcctag

SEQ ID NO: 66734 - protein, 888 aa, Artificial Sequence
  derived and/or modified sequence
MLTHRPQEAEQRGRTPGPSFEWNVLAKALYDNVAESPDELSFRKGDIMTVLEQDTQGLDGWWLCSLHGRQGIVPGNRLKILVGMYDKKPAGPGPGPPATPAQPQPGLHAPAPPASQYTPMLPNTYQPQPDSVYLVPTPSKAQQGLYQVPGPSPQFQSPPAKQTSTFSKQTPHHPFPSPATDLYQVPPGPGGPAQDIYQVPPSAGMGHDIYQVPPSMDTRSWEGTKPPAKVVVPTRVGQGYVYEAAQPEQDEYDIPRHLLAPGPQDIYDVPPVRGLLPSQYGQEVYDTPPMAVKGPNGRDPLLEVYDVPPSVEKGLPPSNHHAVYDVPPSVSKDVPDGPLLREETYDVPPAFAKAKPFDPARTPLVLAAPPPDSPPAEDVYDVPPPAPDLYDVPPGLRRPGPGTLYDVPRERVLPPEVADGGVVDSGVYAVPPPAEREAPAEGKRLSASSTGSTRSSQSASSLEVAGPGREPLELEVAVEALARLQQGVSATVAHLLDLAGSAGATGSWRSPSEPQEPLVQDLQAAVAAVQSAVHELLEFARSAVGNAAHTSDRALHAKLSRQLQKMEDVHQTLVAHGQALDAGRGGSGATLEDLDRLVACSRAVPEDAKQLASFLHGNASLLFRRTKATAPGPEGGGTLHPNPTDKTSSIQSRPLPSPPKFTSQDSPDGQYENSEGGWMEDYDYVHLQGKEEFEKTQKELLEKGSITRQGKSQLELQQLKQFERLEQEVSRPIDHDLANWTPAQPLAPGRTGGLGPSDRQLLLFYLEQCEANLTTLTNAVDAFFTAVATNQPPKIFVAHSKFVILSAHKLVFIGDTLSRQAKAADVRSQVTHYSNLLCDLLRGIVATTKAAALQYPSPSAAQDMVERVKELGHSTQQFRRVLGQLAAA

SEQ ID NO: 66735 - DNA, 2667 bp, Artificial Sequence
  derived and/or modified sequence
atgctgactcatcgcccacaggaagccgagcagagggggcgtacgcccggcccttcttttgagtggaatgtgctggccaaggccctgtacgacaacgtggctgaaagcccagacgaactgtcttttaggaaaggggatattatgactgtgctcgagcaggatacacagggacttgatggttggtggctgtgctccctgcatggcaggcagggaattgttcccggcaataggcttaagattctcgtggggatgtacgacaagaagcccgctgggccaggcccaggacccccggccacccccgcccaaccccaacccggactccacgcccctgcacccccagcatctcagtacaccccaatgctaccgaacacataccagcctcagcccgatagtgtatacctggtccccaccccatccaaggcccagcaaggcctatatcaggtgccaggaccatcccctcagttccagtccccaccagccaagcagacttctacattctccaaacagacccctcaccatccctttccaagcccagccactgacctctaccaagttcctcctggcccaggaggcccagctcaagatatataccaggtgcctccatcagctggaatgggtcacgacatctatcaggtccccccaagcatggataccagaagttgggagggcaccaagcccccagctaaggttgtggtgccaactagagtgggccaaggatatgtctacgaggccgcccaacccgaacaggatgagtacgacatacctcgtcacttattggcgcctggcccacaggatatttacgacgtcccgcctgtgcggggcctgctgccttctcaatacgggcaggaagtctacgatactccacccatggctgtgaaagggccaaatggtagggaccccctgttagaggtgtacgatgtccccccctccgttgaaaaaggacttcccccttctaaccaccacgccgtatacgatgtccctccaagcgtttctaaggacgtgcccgacggaccgctgctgcgtgaggagacgtacgacgtgcctccagcgtttgccaaggctaaaccattcgaccctgcccggacgcctctggtgctcgccgcccctccgcctgactctcctccagctgaagacgtgtatgacgtgccaccaccggcacccgacttatatgatgtcccccctggactgcgaaggccaggaccgggcactctgtatgacgtcccacgtgagcgcgtactccccccagaagtagcagacgggggcgtcgtggactccggcgtttacgcagtgcctccgccagcagaacgggaagcgcccgcagaaggtaaaaggctgtcggccagcagtaccggctcgacgaggagcagccagtctgcttcaagtttggaagtggccggccccggacgcgagcctttggagcttgaggtcgccgtggaagcactagctaggttgcagcagggggtgtctgccacagtggctcatctattagatcttgccggaagtgccggcgccactgggtcctggcgttctcccagtgaaccacaggaaccactggtccaggacctccaggccgctgtggctgccgtgcagtccgccgtgcacgaactgctggagtttgctcgttccgccgttggtaacgctgctcatacctctgaccgggcactccatgccaagctatcacgacagctgcagaagatggaagacgtacaccagaccctggtcgctcatggccaggcacttgacgccgggcgcggcggatctggcgctaccctggaggatttggatcggctcgtggcttgtagtcgggctgttcctgaggacgccaagcaattggcctcatttcttcacggcaacgcctcactgctttttcggcggacaaaggccactgcgcccggacccgagggaggtgggactttacatcccaaccccacagataaaacgtcttccatccaatctagacccctcccgtcaccgccgaaatttacatcacaggactcccccgatgggcaatacgagaatagcgagggtggttggatggaggactacgactatgtgcacctccagggtaaagaagaatttgagaaaacccagaaggagctgcttgagaagggcagtattaccaggcaaggcaaatcacaactggagctgcagcagttaaaacaatttgagcgactcgagcaggaagtctctaggccaatcgaccacgacctggcaaattggacgcccgcccagccccttgccccaggacgaacgggcggactggggcccagcgataggcagcttctgttgttctaccttgaacagtgcgaagcaaacctaaccacacttaccaatgcagtggatgcatttttcacagctgtcgcgactaaccagccccccaaaatctttgtggctcactccaagtttgtcatcctaagtgcacataagctggtgtttataggcgacactctctcgcgacaggccaaagcagccgatgtaagatctcaggtgacacactactcaaaccttctctgcgacctgttacgcggcatcgtggccacaacaaaggccgcggccctgcaatatccttctccgtctgccgctcaggatatggtcgaaagagtcaaggagctggggcattctacacagcagtttaggagggtgttgggacagttggctgcggcttag

SEQ ID NO: 66736 - DNA, 2667 bp, Artificial Sequence
  derived and/or modified sequence
atgctgacccaccggccccaggaggccgagcagaggggccgcaccccaggccccagctttgagtggaatgtgctggccaaggccctgtatgacaacgtggccgagagcccagatgagctgtccttcaggaagggggacatcatgacagtgctggagcaggacacccagggcctggatggctggtggctgtgcagcctgcacggccggcagggcatcgtgcccggcaaccggctgaagatcctggtgggcatgtatgacaagaagccagctggccctggccctggccccccagccaccccagcccagccccagcccggcctgcacgccccagcccccccagccagccagtacacccccatgctgcccaacacctaccagccccagccagattctgtgtacctggtgcccacccccagcaaggcccagcagggcctgtaccaggtgcccggccccagcccccagttccagagccccccagccaagcagaccagcaccttcagcaagcagaccccccaccaccccttccccagccctgccacagacctgtaccaggtgcccccaggccctgggggccctgcccaggacatctaccaggtgccccccagcgctggcatgggccatgacatctaccaggtgcccccatccatggacaccaggtcctgggagggcaccaagcccccagccaaggtggtggtgcccaccagggtgggccagggctacgtgtatgaggccgcccagcctgagcaggatgaatatgacatccccaggcacctgctggcccctggcccccaggacatctatgatgtgccccctgtgcggggcctgctgcccagccagtatggccaggaggtgtatgacaccccacccatggctgtgaagggccccaacggccgggaccccctgctggaggtgtatgatgtgccccccagcgtggagaagggcctgccccccagcaaccaccacgctgtgtatgatgtgcccccatctgtgtccaaggatgtgcctgatggccccctgctgcgggaggagacctatgatgtgcccccagcctttgccaaggccaagccctttgatcctgcccggacccccctggtgctggccgcccctcctccagacagccccccagcagaagatgtgtatgatgtgcccccaccagccccagacctgtatgatgtgcccccaggcctgcggcggcccggccctggcaccctgtatgatgtgccccgggagcgggtgctgcccccagaggtggctgatggaggagtggtggacagcggcgtgtatgctgtgcccccacctgctgagcgggaggccccagctgagggcaagaggctgagcgccagcagcacaggcagcaccaggagcagccagagcgccagcagcctggaggtggccggccctggccgggagcccctggagctggaggtggccgtggaggccctggcccggctgcagcagggcgtgtctgccaccgtggcccacctgctggacctggccggcagcgctggggccaccggctcctggaggagccccagcgagccccaggagcccctggtgcaggacctgcaggccgctgtggccgctgtgcagagcgctgtgcatgagctgctggagtttgcccggtctgctgtgggcaatgctgcccacaccagtgaccgggccctgcacgccaagctgagccggcagctgcagaagatggaggatgtgcaccagaccctggtggcccacggccaggccctggatgctggccggggcggcagcggggccaccctggaggacctggaccggctggtggcctgcagcagagctgtgcctgaagatgccaagcagctggccagcttcctgcacggcaatgccagcctgctcttccggaggaccaaggccacagcccctggccctgagggcggcggcaccctgcaccccaaccccacagacaagaccagcagcatccagagccggcccctgcccagcccccccaagttcaccagccaggacagcccagatggccagtatgagaacagcgagggcggctggatggaggactatgactatgtgcacctgcagggcaaggaggagtttgagaagacccagaaggagctgctggagaagggcagcatcacccggcagggcaagagccagctggagctgcagcagctgaagcagtttgagcggctggagcaggaggtgtcccggcccatcgaccatgacctggccaactggaccccagcccagcccctggcccctggccgcactggaggcctgggccccagcgaccggcagctgctgctcttctacctggagcagtgtgaggccaacctgaccaccctgaccaatgctgtggatgccttcttcaccgctgtggccaccaaccagccccccaagatctttgtggcccacagcaagtttgtgatcctgagcgcccacaagctggtgttcatcggggacaccctgagccggcaggccaaggccgcagatgtgcgcagccaggtgacccactacagcaacctgctgtgtgacctgctgcggggcatcgtggccaccaccaaggctgctgccctgcagtaccccagccccagcgctgcccaggacatggtggagcgggtgaaggagctgggccacagcacccagcagttcagaagagtgctgggccagctggccgccgcctag

SEQ ID NO: 66737 - DNA, 2667 bp, Artificial Sequence
  derived and/or modified sequence
atgctgacccaccggccccaggaggccgagcagcggggccggaccccagggccatcattcgaatggaacgtgcttgcaaaggcgttgtacgacaatgttgccgagagtcctgatgagctgagcttccggaagggagatataatgaccgtgttggagcaggatacccaggggctcgacggctggtggctctgtagtctgcacggacgccaggggattgtaccaggaaaccgccttaaaatcctcgtagggatgtatgacaagaaacccgcgggccccgggcctggacctcccgctaccccggcccagccacaacccgggctacatgccccagctcctcccgcctcccagtacacacccatgttaccgaatacatatcagcctcagccagattctgtgtatttagttcccactccatctaaagcccagcagggtctgtatcaagttccgggcccttcacctcagtttcagtctcctccagccaaacaaacctcaacattcagcaaacagaccccccaccacccctttcctagtccggcaacagatctgtaccaagtgccgcccggtcctgggggtcccgctcaagatatctatcaggttccgcccagcgctggtatgggacatgacatataccaggtcccacctagcatggacactagatcctgggaaggcactaagccgcctgccaaagtggtggttccgacgcgggtagggcagggctatgtctacgaggctgcccagccagagcaggatgagtatgacatccccaggcacctgctggccccaggccctcaggatatttatgatgtacccccagttaggggactgcttcccagtcagtacggtcaagaggtctacgacaccccaccaatggctgtgaaggggccaaacggtcgtgacccactcctggaggtgtacgacgtgccaccaagcgtcgaaaagggtttgcctccttctaatcaccatgctgtgtatgacgtgccgccgtcagtttccaaagacgtacctgacggccctttgttaagagaggaaacctatgacgttccccctgcattcgccaaagccaagccctttgatccagctagaacacctttggtgctggctgctccacctccggactctccaccagcggaagatgtctatgacgtgcctccccccgcccccgacctgtatgacgtgccgccaggactgcgacgccccggtcccggcaccctctatgatgtgccaagagagcgcgtcctgccccccgaagttgcggacggtggggtcgtggactctggagtttatgccgttccgccccctgccgaaagagaggccccagccgagggcaaacgactgagtgctagcagcactgggtcaactcgcagctcacagagtgcttcttccctagaggtcgctggccccggccgggaaccattggagctagaggtggccgtagaagcgctggcccgtctgcagcagggggtatccgccactgtggcccacctgcttgaccttgccggatccgccggagccactggctcttggcggtctccaagtgagccccaggagccactcgtgcaagacctgcaggcggctgtcgctgccgttcagtccgccgttcacgagctcctcgaatttgcccggtccgccgtgggaaacgctgcgcatacaagcgaccgggccctgcacgctaaactgtcccgacagcttcaaaaaatggaggatgtacatcagacattagtggcccatggacaggctctggacgcaggtcggggcgggtccggtgccactctggaggatctggacaggttggtggcatgttcacgcgcagtgcctgaggatgctaaacagcttgcttctttcctccatggcaacgcttctttgctgttccgaaggaccaaagccacagctcctggacctgaggggggcggcacactgcatccaaatcccaccgacaaaacgtctagtatccagtcccgtcccctgccctctccccctaaatttacctctcaagacagccccgatggacagtacgagaactccgagggcggttggatggaggattacgactacgtacatctgcaaggtaaggaagaattcgaaaagacccagaaggagctcctcgaaaaagggagtatcacaaggcagggcaagagccagttggagctccaacagctcaagcaattcgagaggctggaacaggaagtgagcaggcccatcgatcacgacctggccaactggacccccgcacaacctcttgcgccagggcggaccggtggtttgggaccatcagaccgacagttacttcttttttatctcgagcagtgtgaggcaaatctgacaacattgacgaacgcggtagatgcgttcttcaccgctgtagctaccaatcaaccaccgaagattttcgtcgcacatagcaagtttgttattctcagcgcccacaagcttgtgttcattggagatacactatcccggcaggcgaaggccgctgacgtgaggtcccaggtcactcactactccaatctactgtgtgatctcctcaggggcattgtcgctacaacaaaagctgccgctctacagtatccgtccccatctgccgcgcaagacatggtggaacgggtgaaggagttggggcacagtacgcagcaatttagacgcgtgctggggcaattggctgcagcttag

SEQ ID NO: 66738 - DNA, 2667 bp, Artificial Sequence
  derived and/or modified sequence
atgctgacccatcgcccacaggaagctgagcagagggggaggacgcccggaccatcattcgagtggaacgtcttggccaaagccttgtacgacaacgtggccgaaagccctgacgagctgtcatttcgtaagggagacatcatgactgtcttagagcaggacacacaaggccttgacggctggtggctctgtagcctacacggcagacaagggatagtgccaggcaatcgtctgaaaatactcgtgggaatgtatgacaagaagcctgccggacccggacctggcccaccggctactcccgctcagccacaacctggcctgcatgctcccgcacccccagccagtcagtatactcccatgttacctaatacgtaccagccacagcccgacagcgtgtatctggtcccaactccatctaaagcccaacagggcctgtaccaagtgcctggtccctctcctcaatttcagagcccgcctgcaaagcagacgagtactttcagcaaacaaaccccacaccacccgtttccttctcctgctaccgacctgtatcaggtgccccctggaccagggggtcctgcccaggatatttaccaggtacccccaagcgctgggatgggccatgatatttaccaggttcctcctagtatggacacccgctcttgggagggaaccaaacctcccgcaaaagtcgtagtgccgacacgagtagggcagggctacgtgtacgaggcagcccaacctgagcaagatgaatacgatattcccaggcatctgctcgcccctggtcctcaggacatctacgatgtgcccccagtgagagggctcctgccatcacaatatgggcaagaggtgtatgacaccccaccaatggccgtgaaggggcctaacggaagagaccccttgctcgaggtttacgacgttcccccatcagttgaaaagggcctgccacctagcaaccatcacgctgtgtatgacgttcctcctagtgtttctaaagacgtacctgacggtcccctgctcagggaagagacatacgacgtgcctccagcttttgccaaagctaaaccgtttgatccagctaggacccccctcgtgctggctgcacccccaccggattctcctcccgctgaagatgtgtacgatgtcccacctcctgcaccagatctgtatgacgtcccacccggactccgtcgacctggccctggaacgctgtatgatgtaccccgtgaaagagtgctcccccctgaggtggccgatgggggagtggtggattccggagtctatgccgtgccccctccagcagagagagaagcaccagcagaggggaaacggttgagtgcctccagtacaggaagcaccagaagcagccagtctgcgtcgtcactggaggtggcaggacctgggcgtgagcccctagagttggaagtggccgttgaggccttggcaagacttcaacagggcgtgtcggctaccgtggcgcatttgctggacttggctgggtccgccggagcaacaggcagttggaggagtccctctgagcctcaagaaccattggtacaggacttgcaagctgcagtagctgccgtgcagtccgcagttcacgagctcctcgagtttgcccgatctgctgtcggcaacgcagcccacacttcagaccgagctctccatgccaagctgagtagacagttgcagaaaatggaggatgtacaccaaacacttgttgcacatgggcaggctctggatgccggtcgaggcggatctggcgcaacattagaggacttggacaggctggtggcctgctcaagagcggtccccgaagacgctaagcaattggcatctttcctccacggcaatgcttccctgctgttcagaaggacaaaggctacagcccctggcccagagggtggcggaacgttacaccccaacccgaccgacaaaacttccagcattcagagccgccctctaccaagcccaccaaaattcaccagtcaggatagtcccgacggacagtatgagaactccgagggaggatggatggaggactacgactacgtgcacctgcagggcaaggaggagtttgagaagactcaaaaggaactactggagaagggcagcatcacgaggcaagggaagtctcaactcgagctgcagcagctgaagcagttcgagcggctcgagcaagaggtctccaggcccatcgatcatgacctggcaaactggacacccgctcagcctctggcgccaggcagaacaggcggattggggccaagtgaccgacagttactgcttttctacctggagcagtgcgaggccaatctcacaaccctaactaatgcagtcgatgctttctttacagcagtggccacgaatcagcctcctaagatcttcgtggcacatagcaagtttgtgattctcagtgctcacaaattggtattcatcggagacaccctgtcacgccaggccaaagcggcagatgttcgctctcaggtcacacactacagtaatctgctatgtgatttattgcggggtattgtcgccactacaaaggcagcggcactgcagtacccatctccctccgccgctcaggacatggtggaacgggtaaaagagcttgggcacagtactcagcaattccgcagagtccttggtcagctcgccgctgcctag

SEQ ID NO: 66739 - DNA, 3177 bp, Artificial Sequence
  derived and/or modified sequence
tgctctggaccccagccccacttgctctagatgctcacccaccgtccccaggaagcagaacagaggggtcggacccctggtccttcctttgagtggaacgtgctggccaaagcgctctatgacaatgtggccgagtccccggatgagctctccttccgcaagggtgacatcatgacggtgctggagcaggacacgcagggcctggacggctggtggctctgctcgctgcatgggcgccagggcatcgtgcctgggaaccgcctcaagatcttggtgggcatgtatgataagaagccagcagggcctggccccggccctcccgccaccccggcccagcctcagcctggcctccatgccccagcgcctccggcctcccagtacacgcccatgctccccaacacctaccagccccagccagacagcgtctacctggtgcccactcccagcaaggctcagcaaggcctctaccaagtcccgggtcccagccctcagttccagtctcccccagccaagcagacatccaccttctcgaagcagacaccccatcacccgtttcccagcccggccacagacctgtaccaggtgcccccagggcctggaggccctgcccaggatatttaccaggtgccaccttctgccgggatggggcatgacatctaccaggtccccccgtccatggacacacgcagctgggagggcacgaagcccccggcaaaggtggtggtgcccacccgcgtggggcagggctatgtatacgaggccgcccagccggagcaggacgagtacgacatcccgcgacacctgctggccccggggccacaggacatctatgatgtgcccccggttcgggggctgcttcccagccagtatggccaggaggtgtatgacacaccccccatggctgtcaagggtcccaatggccgagacccgttgctggaggtgtatgacgtgccccccagtgtggagaagggcctgccaccgtccaaccaccacgcagtctacgacgttcctccatcggtgagcaaggatgtgcccgatggcccactgctgcgtgaggagacctacgatgtgccccccgccttcgccaaggccaagccctttgacccggcccgcaccccactggtactggctgcgccccctccagactccccgccggccgaggacgtgtatgacgtgccgcccccggctcctgacctctacgacgtgccccctggcttgcggcggcctggcccgggcaccctgtacgatgtgccccgtgaacgggtgcttcctcctgaggtggctgatggtggcgtggtcgacagtggtgtgtatgcggtgcctcccccagctgaacgtgaagccccggcagagggcaagcgcctgtcggcctccagcaccggcagcacacgcagcagccagtctgcgtcctccttggaggtggcagggccgggccgggaacccctggagctggaagttgctgtggaggccctggcacggctgcagcagggtgtgagcgccaccgttgcccaccttctggacctggcaggcagcgccggtgcgactgggagctggcgtagcccctctgagccacaggagccgctggtgcaggacctgcaggctgctgtggccgctgtccagagtgccgtccacgagctgttggagtttgcccgcagcgcggtgggcaatgctgcccacacatctgaccgtgccctgcatgccaagcttagccggcagctgcagaagatggaggacgtgcaccagacgctggtggcacatggtcaggccctcgacgctggccggggaggctctggagccacccttgaggacctggaccggctggtggcctgctcgcgggctgtgcccgaggacgccaagcagctggcctccttcctgcacggcaatgcctcactgctcttcagacggaccaaggccactgccccggggcctgaggggggtggcaccctgcaccccaaccccactgacaagaccagcagcatccagtcacgacccctgccctcaccccctaagttcacctcccaggactcgccagatgggcagtacgagaacagcgaggggggctggatggaggactatgactacgtccacctacaggggaaggaggagtttgagaagacccagaaggagctgctggaaaagggcagcatcacgcggcagggcaagagccagctggagttgcagcagctgaagcagtttgaacgactggaacaggaggtgtcacggcccatagaccacgacctggccaactggacgccagcccaacccctggccccggggcgaacaggcggcctggggccctcggaccggcagctgctgctcttctacctggagcagtgtgaggccaacctgaccacactgaccaacgccgtggacgccttctttaccgccgtggccaccaaccagccgcccaagatctttgtggcgcacagcaagttcgtcatcctcagcgcccacaagctggtgttcatcggggacacactgtcacggcaggccaaggctgctgacgtgcgcagccaggtgacccactacagcaacctgctgtgcgacctcctgcgcggcatcgtggccaccaccaaggccgctgccttgcagtacccatcgccttccgcggcccaggacatggtggagagggtcaaggagctgggccacagcacccagcagttccgccgcgtcctaggccagctggcagccgcctgagggtggtgaccccaggagggaggcaggggaggggtgcggcggtcccagctccctggctcccatgtcaagagtcgctgtgccacaggcttagggacaggaccccagctctgcgtcggtcctggtgccctggatgcccaggaatctgtatatatttatggccgggcagggtgtggggccatgcctcctcaggagccgaagcccaggggccggccagtggccttccccagcatgcaccacgggcccgggttgggtcaccagacggggctggagtgtgagggtcctgcagcctgcaggacctcgtgccaccccgagggctgagcctggtcccacgagggtgccgtgtcccctgacagggccagtgcagtttggtgtgtcctccgccttaccaggagaagaacctgaagaactatttttcgttattggttttccaatcatttgactaagagtctccatttaaataaagtttttaaaaggaagagc

SEQ ID NO: 66740 - DNA, 2667 bp, Artificial Sequence
  derived and/or modified sequence
atgctgacccacagaccccaggaggccgagcagagaggcagaacccccggccccagcttcgagtggaacgtgctggccaaggccctgtacgacaacgtggccgagagccccgacgagctgagcttcagaaagggcgacatcatgaccgtgctggagcaggacacccagggcctggacggctggtggctgtgcagcctgcacggcagacagggcatcgtgcccggcaacagactgaagatcctggtgggcatgtacgacaagaagcccgccggccccggccccggcccccccgccacccccgcccagccccagcccggcctgcacgcccccgccccccccgccagccagtacacccccatgctgcccaacacctaccagccccagcccgacagcgtgtacctggtgcccacccccagcaaggcccagcagggcctgtaccaggtgcccggccccagcccccagttccagagcccccccgccaagcagaccagcaccttcagcaagcagaccccccaccaccccttccccagccccgccaccgacctgtaccaggtgccccccggccccggcggccccgcccaggacatctaccaggtgccccccagcgccggcatgggccacgacatctaccaggtgccccccagcatggacaccagaagctgggagggcaccaagccccccgccaaggtggtggtgcccaccagagtgggccagggctacgtgtacgaggccgcccagcccgagcaggacgagtacgacatccccagacacctgctggcccccggcccccaggacatctacgacgtgccccccgtgagaggcctgctgcccagccagtacggccaggaggtgtacgacaccccccccatggccgtgaagggccccaacggcagagaccccctgctggaggtgtacgacgtgccccccagcgtggagaagggcctgccccccagcaaccaccacgccgtgtacgacgtgccccccagcgtgagcaaggacgtgcccgacggccccctgctgagagaggagacctacgacgtgccccccgccttcgccaaggccaagcccttcgaccccgccagaacccccctggtgctggccgcccccccccccgacagcccccccgccgaggacgtgtacgacgtgcccccccccgcccccgacctgtacgacgtgccccccggcctgagaagacccggccccggcaccctgtacgacgtgcccagagagagagtgctgccccccgaggtggccgacggcggcgtggtggacagcggcgtgtacgccgtgcccccccccgccgagagagaggcccccgccgagggcaagagactgagcgccagcagcaccggcagcaccagaagcagccagagcgccagcagcctggaggtggccggccccggcagagagcccctggagctggaggtggccgtggaggccctggccagactgcagcagggcgtgagcgccaccgtggcccacctgctggacctggccggcagcgccggcgccaccggcagctggagaagccccagcgagccccaggagcccctggtgcaggacctgcaggccgccgtggccgccgtgcagagcgccgtgcacgagctgctggagttcgccagaagcgccgtgggcaacgccgcccacaccagcgacagagccctgcacgccaagctgagcagacagctgcagaagatggaggacgtgcaccagaccctggtggcccacggccaggccctggacgccggcagaggcggcagcggcgccaccctggaggacctggacagactggtggcctgcagcagagccgtgcccgaggacgccaagcagctggccagcttcctgcacggcaacgccagcctgctgttcagaagaaccaaggccaccgcccccggccccgagggcggcggcaccctgcaccccaaccccaccgacaagaccagcagcatccagagcagacccctgcccagcccccccaagttcaccagccaggacagccccgacggccagtacgagaacagcgagggcggctggatggaggactacgactacgtgcacctgcagggcaaggaggagttcgagaagacccagaaggagctgctggagaagggcagcatcaccagacagggcaagagccagctggagctgcagcagctgaagcagttcgagagactggagcaggaggtgagcagacccatcgaccacgacctggccaactggacccccgcccagcccctggcccccggcagaaccggcggcctgggccccagcgacagacagctgctgctgttctacctggagcagtgcgaggccaacctgaccaccctgaccaacgccgtggacgccttcttcaccgccgtggccaccaaccagccccccaagatcttcgtggcccacagcaagttcgtgatcctgagcgcccacaagctggtgttcatcggcgacaccctgagcagacaggccaaggccgccgacgtgagaagccaggtgacccactacagcaacctgctgtgcgacctgctgagaggcatcgtggccaccaccaaggccgccgccctgcagtaccccagccccagcgccgcccaggacatggtggagagagtgaaggagctgggccacagcacccagcagttcagaagagtgctgggccagctggccgccgcctag

SEQ ID NO: 66741 - protein, 888 aa, Artificial Sequence
  derived and/or modified sequence
MNHLNVLAKALYDNVAESPDELSFRKGDIMTVLEQDTQGLDGWWLCSLHGRQGIVPGNRLKILVGMYDKKPAGPGPGPPATPAQPQPGLHAPAPPASQYTPMLPNTYQPQPDSVYLVPTPSKAQQGLYQVPGPSPQFQSPPAKQTSTFSKQTPHHPFPSPATDLYQVPPGPGGPAQDIYQVPPSAGMGHDIYQVPPSMDTRSWEGTKPPAKVVVPTRVGQGYVYEAAQPEQDEYDIPRHLLAPGPQDIYDVPPVRGLLPSQYGQEVYDTPPMAVKGPNGRDPLLEVYDVPPSVEKGLPPSNHHAVSKCQGNARARLRLWGVWVYDVPPSVSKDVPDGPLLREETYDVPPAFAKAKPFDPARTPLVLAAPPPDSPPAEDVYDVPPPAPDLYDVPPGLRRPGPGTLYDVPRERVLPPEVADGGVVDSGVYAVPPPAEREAPAEGKRLSASSTGSTRSSQSASSLEVAGPGREPLELEVAVEALARLQQGVSATVAHLLDLAGSAGATGSWRSPSEPQEPLVQDLQAAVAAVQSAVHELLEFARSAVGNAAHTSDRALHAKLSRQLQKMEDVHQTLVAHGQALDAGRGGSGATLEDLDRLVACSRAVPEDAKQLASFLHGNASLLFRRTKATAPGPEGGGTLHPNPTDKTSSIQSRPLPSPPKFTSQDSPDGQYENSEGGWMEDYDYVHLQGKEEFEKTQKELLEKGSITRQGKSQLELQQLKQFERLEQEVSRPIDHDLANWTPAQPLAPGRTGGLGPSDRQLLLFYLEQCEANLTTLTNAVDAFFTAVATNQPPKIFVAHSKFVILSAHKLVFIGDTLSRQAKAADVRSQVTHYSNLLCDLLRGIVATTKAAALQYPSPSAAQDMVERVKELGHSTQQFRRVLGQLAAA

SEQ ID NO: 66742 - DNA, 2667 bp, Artificial Sequence
  derived and/or modified sequence
atgaatcatctcaatgtcctggctaaggcactgtatgacaatgtcgctgagagtcccgacgagctttccttcagaaagggcgatataatgaccgtcttggaacaggatactcaggggcttgacggatggtggttgtgtagcctacacggaaggcagggcattgtccccgggaatagacttaaaatcctagtgggcatgtatgataaaaagcccgccgggccaggtcctgggccacctgcaactcctgctcagcctcagcccggacttcacgctcctgcaccacctgcatcacagtataccccaatgctccccaacacctaccagccccagccagacagtgtctatctggtgcccacgccttctaaggcacagcagggtctctaccaggtaccaggccccagccctcaatttcagagtcctcctgccaagcagaccagtacttttagtaaacagacaccgcatcacccctttccaagccccgcaaccgacctgtaccaggtgccccctggcccaggcggccccgctcaggatatctatcaggtgcccccgagcgccgggatgggtcatgacatttaccaggttccaccttcaatggacacccgtagctgggagggaaccaagccccctgcgaaggtggtggtgcctacaagggttgggcagggctacgtgtacgaggccgcgcagcccgagcaggatgaatatgacattccccgccatctactggctccggggccccaggatatctatgacgtgccacccgttcgcgggctactgccgtctcaatacggccaggaagtgtatgacactcctccaatggctgtgaagggcccgaacggccgcgacccactgctggaggtttatgacgtacctccctcggtagagaaagggctgcctccttcaaatcaccatgccgtgagcaaatgccagggtaacgcgagggccaggctcagattgtggggcgtgtgggtctacgatgtccccccctcggtgagcaaggatgtccccgatggccccctcctgagagaggagacgtacgacgtccctcctgccttcgcgaaggctaagccattcgatcctgcaagaacccccctggttctggcggcgccccctcctgatagccctcccgctgaggatgtgtatgacgtgccgccaccagctccggacctatatgacgttcccccaggcctgcgaagaccagggccagggacactgtatgacgttccccgtgaacgagttcttccacccgaggtggccgacgggggtgtggtcgactcgggcgtttatgccgtgccaccaccagcagagcgcgaagcacctgccgaagggaagagactgtccgcaagcagcaccggcagcacgcgctctagtcagtctgcatcctccctggaagtggctggccctggcagggaaccgctggagctggaagttgccgtcgaggccttggccagattgcagcaaggcgtgtcagcaacggtggcacacctgttagacttggctgggagcgcgggcgcaactggttcctggaggtcccctagtgagcctcaggagccgctggtgcaggatctgcaagctgccgtcgctgctgtgcaatcagccgtccatgagctgctggagtttgcccgatccgctgtcggtaacgcagctcacacaagcgatcgggctttacatgcgaaactgagtagacagctgcagaagatggaagatgtgcatcagaccctggttgcccatgggcaagcgttggatgccggacgaggagggagcggagcgaccttagaggatttggatcgcctggtggcctgttctagggccgttccagaagatgctaagcagcttgcgagtttcctccatgggaacgcctccctgctctttaggcgcacaaaagcaaccgcacccggccctgaggggggtgggactctccaccccaatcctacagacaagacatcttctattcagagccggcctctaccctctccaccaaagttcacttctcaagattcacccgacggccagtacgagaactcagaaggaggctggatggaggactatgactatgtgcatttacagggcaaagaagaattcgagaagactcagaaagagctattggagaagggtagtattaccagacaggggaagagccagctagagctgcagcaactgaagcagtttgagcgactggagcaggaggtgagtagacccatcgaccacgatctcgctaattggactccggctcaacctctggcccccggcagaactggtggcctggggccaagcgaccgccagcttcttctgttttatctggagcagtgcgaggcaaatcttacaaccctgacaaacgcggtggacgctttttttactgcagtggccacaaaccagcccccaaagattttcgtggctcactcgaaattcgtgattctgtctgcccataagctcgtattcataggcgacactctgtcaagacaggccaaagctgccgacgtgaggtctcaggtgactcattatagtaacctgctgtgcgatcttctaaggggtatagtagcaacgaccaaagccgcggccttgcaatacccgagcccatcagctgcccaggacatggtagaaagggtcaaagagctgggacatagcacccagcaattcagaagggtcctgggccagctggccgccgcgtag

SEQ ID NO: 66743 - DNA, 2667 bp, Artificial Sequence
  derived and/or modified sequence
atgaaccacctgaatgtgctggccaaggccctgtatgacaacgtggccgagagcccagatgagctgtccttcaggaagggggacatcatgacagtgctggagcaggacacccagggcctggatggctggtggctgtgcagcctgcacggccggcagggcatcgtgcccggcaaccggctgaagatcctggtgggcatgtatgacaagaagccagctggccctggccctggccccccagccaccccagcccagccccagcccggcctgcacgccccagcccccccagccagccagtacacccccatgctgcccaacacctaccagccccagccagattctgtgtacctggtgcccacccccagcaaggcccagcagggcctgtaccaggtgcccggccccagcccccagttccagagccccccagccaagcagaccagcaccttcagcaagcagaccccccaccaccccttccccagccctgccacagacctgtaccaggtgcccccaggccctgggggccctgcccaggacatctaccaggtgccccccagcgctggcatgggccatgacatctaccaggtgcccccatccatggacaccaggtcctgggagggcaccaagcccccagccaaggtggtggtgcccaccagggtgggccagggctacgtgtatgaggccgcccagcctgagcaggatgaatatgacatccccaggcacctgctggcccctggcccccaggacatctatgatgtgccccctgtgcggggcctgctgcccagccagtatggccaggaggtgtatgacaccccacccatggctgtgaagggccccaacggccgggaccccctgctggaggtgtatgatgtgccccccagcgtggagaagggcctgccccccagcaaccaccacgctgtgtccaagtgccagggcaatgcccgggcccggctgcggctgtggggcgtgtgggtgtatgatgtgcccccatctgtgtccaaggatgtgcctgatggccccctgctgcgggaggagacctatgatgtgcccccagcctttgccaaggccaagccctttgatcctgcccggacccccctggtgctggccgcccctcctccagacagccccccagcagaagatgtgtatgatgtgcccccaccagccccagacctgtatgatgtgcccccaggcctgcggcggcccggccctggcaccctgtatgatgtgccccgggagcgggtgctgcccccagaggtggctgatggaggagtggtggacagcggcgtgtatgctgtgcccccacctgctgagcgggaggccccagctgagggcaagaggctgagcgccagcagcacaggcagcaccaggagcagccagagcgccagcagcctggaggtggccggccctggccgggagcccctggagctggaggtggccgtggaggccctggcccggctgcagcagggcgtgtctgccaccgtggcccacctgctggacctggccggcagcgctggggccaccggctcctggaggagccccagcgagccccaggagcccctggtgcaggacctgcaggccgctgtggccgctgtgcagagcgctgtgcatgagctgctggagtttgcccggtctgctgtgggcaatgctgcccacaccagtgaccgggccctgcacgccaagctgagccggcagctgcagaagatggaggatgtgcaccagaccctggtggcccacggccaggccctggatgctggccggggcggcagcggggccaccctggaggacctggaccggctggtggcctgcagcagagctgtgcctgaagatgccaagcagctggccagcttcctgcacggcaatgccagcctgctcttccggaggaccaaggccacagcccctggccctgagggcggcggcaccctgcaccccaaccccacagacaagaccagcagcatccagagccggcccctgcccagcccccccaagttcaccagccaggacagcccagatggccagtatgagaacagcgagggcggctggatggaggactatgactatgtgcacctgcagggcaaggaggagtttgagaagacccagaaggagctgctggagaagggcagcatcacccggcagggcaagagccagctggagctgcagcagctgaagcagtttgagcggctggagcaggaggtgtcccggcccatcgaccatgacctggccaactggaccccagcccagcccctggcccctggccgcactggaggcctgggccccagcgaccggcagctgctgctcttctacctggagcagtgtgaggccaacctgaccaccctgaccaatgctgtggatgccttcttcaccgctgtggccaccaaccagccccccaagatctttgtggcccacagcaagtttgtgatcctgagcgcccacaagctggtgttcatcggggacaccctgagccggcaggccaaggccgcagatgtgcgcagccaggtgacccactacagcaacctgctgtgtgacctgctgcggggcatcgtggccaccaccaaggctgctgccctgcagtaccccagccccagcgctgcccaggacatggtggagcgggtgaaggagctgggccacagcacccagcagttcagaagagtgctgggccagctggccgccgcctag

SEQ ID NO: 66744 - DNA, 2667 bp, Artificial Sequence
  derived and/or modified sequence
atgaaccacctgaacgtgctggccaaggccctgtacgacaacgtggccgagagcccggatgaactgagcttcaggaagggagatatcatgaccgtgttagagcaggatacccagggactggacggctggtggctgtgctccctccacggtagacaagggattgtccccggtaaccgcctgaagattctggtgggaatgtacgacaagaaaccagctggacctggccccgggccccccgctacccctgcgcaaccgcagccgggcctccacgctcccgcccctccagctagtcagtatacacccatgctgccaaacacatatcaaccacagcctgactcggtgtacctggtgcctacccctagcaaggcccagcaggggctgtaccaggttccaggcccgtctcctcagtttcagtcaccgcctgctaagcaaacatccactttttcaaaacagactccacaccatccattcccatccccggccactgacctttaccaggtacccccaggaccaggaggccctgctcaggacatctaccaagtgccccccagtgcaggtatgggccacgacatctatcaggttcctccaagtatggatactcggagttgggaaggaaccaagccccctgcgaaggtggtggtgcctacccgcgtcggccaaggctatgtgtacgaggcggcccagcccgagcaggatgagtatgacataccccgacacctgctggctcctggccctcaggacatctatgatgtccctcctgtgagggggctgcttccctcacagtacggccaagaagtgtatgatacacccccaatggctgttaagggccccaacggacgcgacccactcctcgaggtttacgatgttcctccttctgtcgagaagggcctgcccccttcgaatcatcacgccgtgagtaagtgtcagggaaatgccagagcaaggctgcgcctctggggcgtgtgggtgtatgatgttccgccctctgtgtctaaggatgttccggacggtccgttactgcgggaggagacctatgacgtgccgcccgcctttgccaaagcgaagcctttcgacccagcgcggaccccgctagtcttagctgcaccaccccctgattcacccccagccgaggacgtgtacgacgtcccaccccctgcccctgacctgtacgacgtgcctcctggcctgcggaggcccggccccggaacattatatgatgtgcccagggagagagtgctcccacctgaggttgcagatggaggcgtggtcgacagtggggtgtatgccgtgcccccgcccgcagagcgggaagcaccagctgaaggcaagagactgagcgccagttcaactgggtctacaagatcttcccagtccgcttcctccctggaagtagccggtcctgggagggaacctctggagctggaagtcgccgtggaagctcttgctcgcctgcagcagggcgtctccgctacagtcgcacacttactggacctcgccggctcagctggggcaaccggctcctggcggagcccctccgagcctcaggagcccttagtgcaagatctgcaagcagcagtggccgccgtgcagtctgccgtacacgagctgttggaatttgctaggtctgctgtcggtaatgctgcacatacttccgatcgggctcttcacgcaaaactgtccaggcagctccagaaaatggaagatgttcatcagacgctggttgcgcatggacaggccctagacgccggacgtgggggctccggagctacattagaagatttggacaggcttgtggcctgttcaagagctgtccccgaggatgctaagcaacttgcttcctttctgcacgggaatgcatccctgctgttccgtcgtacaaaagccaccgcccctggacccgaagggggggggacactgcacccaaaccctacagacaagacaagcagcattcagtcacggccactgccatcaccgcctaagtttacgtctcaagattcacccgacgggcagtacgagaacagcgaggggggatggatggaagactacgactatgtgcaccttcaggggaaggaagaattcgaaaaaacccaaaaggagctcctggagaaggggagtataaccaggcagggcaaatcccagctcgagctgcaacaactgaagcagtttgaacgcttggaacaggaggtgagccgccctatcgatcatgacttggcaaactggacacctgcccagccactggcccctggcaggacaggtggtctgggaccaagtgatcgacagcttctactgttctacctcgaacagtgtgaggcaaatcttacaacgctgacaaatgccgtggatgcgtttttcacggcagttgctacgaaccagccccctaagatattcgttgcacactctaagtttgtgatactaagtgcacacaaacttgtgttcataggtgataccctgtctcgccaggccaaggcagccgatgtgagatctcaggtgacgcactatagtaatcttctttgcgacctccttaggggcattgttgcaaccaccaaggccgccgcccttcagtacccaagcccttctgccgcacaggatatggtggaaagagtgaaagagctgggccattccacccagcaattccggagagttctcggtcagcttgcagctgcctag

SEQ ID NO: 66745 - DNA, 2667 bp, Artificial Sequence
  derived and/or modified sequence
atgaaccacctcaacgtgctcgccaaggcactgtacgacaacgtggccgaatcacccgacgagctgagctttcggaaaggcgacatcatgacggtgctggagcaggacactcagggtctggacggctggtggttgtgctctttacacgggcgacagggcatcgtcccgggaaatagactgaagatactggtgggcatgtacgacaagaaaccggctgggccaggacccggaccacccgctacgccagcacagcctcagcccggtctgcacgcgccagccccaccagccagccagtacacaccaatgttgccaaatacctatcagcctcagccagatagcgtgtacctggttcctaccccctccaaggcacagcagggtctctaccaggttccaggccctagcccgcagttccagtcaccccctgctaagcaaacatccactttttccaagcagactccccatcatcccttccctagtcctgccacggacctgtaccaggtgcctccaggacccggaggccctgctcaggatatataccaagtgccgcctagtgccggaatgggccatgatatatatcaggtgcctcccagtatggatacaaggagctgggagggaaccaagcctccggctaaagtggtggttcctactcgtgtgggtcaggggtacgtttatgaggctgctcagccagagcaagatgaatatgacatcccaagacacctgcttgctccaggaccgcaggatatctatgatgtgccccctgtaaggggactgctgccaagccaatacggtcaggaagtgtatgatacaccaccgatggccgtgaaaggccctaatggcagggatcctctgctcgaggtctatgatgtccccccatcagtggagaaaggcttaccccctagtaatcaccacgccgtgtctaaatgccagggcaacgctagggcacggctgcggctgtggggggtgtgggtatacgatgtgcccccaagcgtgagtaaagacgttcccgatgggccattgctgcgtgaggagacctacgatgttccccctgcctttgcgaaggccaagccattcgacccggctagaacccccctagtgctcgccgctcctccccctgatagcccgccagcagaggatgtttatgatgtaccaccccctgccccagacctgtacgacgtaccacccggtctcagaagaccagggccaggcacactgtacgacgttcctcgtgagcgcgtgctgcctcccgaggtggccgatggtggggtggtcgatagtggggtttacgccgtgccacccccagctgaaagagaggcacccgcagaaggcaaacgcctgagcgcctcttcaaccggcagcactcgcagctcccagtctgctagcagcctggaagtcgctgggcctgggcgtgagcctctggaactggaggttgccgtggaggctctcgcacgtctacagcaaggcgtctctgcaaccgttgcgcacttactagatctggcaggatccgcaggcgctaccggatcttggcgatccccctctgagcctcaagaaccgttagtacaagacttacaggcggcagtcgcagcagtacagagtgctgtccacgagcttcttgaattcgcacgatcagctgtgggcaatgcggcacatacttcagatcgcgcactacatgcaaaactgtcaaggcagctgcagaagatggaagacgtgcaccaaacactggtcgcccacgggcaagctcttgatgccggtcggggaggatctggggctacattggaggatctcgatcggctggtcgcctgttctagagctgtacccgaggacgctaaacagctggcttcttttctgcacggtaatgcctccctcctgtttcgccgtacgaaagccaccgctcccggacccgagggtggcggtactctccacccaaaccccacagacaagacatcaagcatacaatctcgccctctcccctctccccctaaattcaccagccaagatagtccagatggacagtatgaaaacagcgaggggggatggatggaggattacgactacgtgcacctgcagggaaaagaagagttcgagaaaacccaaaaggagctactggaaaaaggcagcataacccgccaggggaagtcacagctggagctgcagcaactgaaacagttcgaacgactcgaacaggaggtctcccgacctatcgaccatgacctggccaattggactccagcacagccattggcccctggaaggactgggggactgggtccttccgacaggcagttactactgttctacctagaacagtgtgaggccaacctgaccactttgacaaacgccgtggatgcattcttcaccgctgtcgcaacaaaccagcctccaaaaatttttgtcgctcatagcaagtttgtgattctaagtgctcataagctggtttttatcggggataccctgagccgccaggcgaaggcggctgacgttcggtcacaggttacacattacagcaacctgttgtgcgaccttctgcggggtattgtggcgaccaccaaggctgctgcgctccaatatccttccccctcagctgcgcaagacatggtggaaagggtcaaggagttgggccattcaacccaacagttccgcagagtgttgggacagctcgccgctgcatag

SEQ ID NO: 66746 - DNA, 3293 bp, Artificial Sequence
  derived and/or modified sequence
ggctggaccggctctgggtggccgaggcggcagctgcgcggcggcaccggggcggctgcggcgcgctcggagccccgagggcacgcggcccgggcagctcggtgtgcgcccccgcgagagccggggccccaggcccgccggacaccatgaaccacctgaacgtgctggccaaagcgctctatgacaatgtggccgagtccccggatgagctctccttccgcaagggtgacatcatgacggtgctggagcaggacacgcagggcctggacggctggtggctctgctcgctgcatgggcgccagggcatcgtgcctgggaaccgcctcaagatcttggtgggcatgtatgataagaagccagcagggcctggccccggccctcccgccaccccggcccagcctcagcctggcctccatgccccagcgcctccggcctcccagtacacgcccatgctccccaacacctaccagccccagccagacagcgtctacctggtgcccactcccagcaaggctcagcaaggcctctaccaagtcccgggtcccagccctcagttccagtctcccccagccaagcagacatccaccttctcgaagcagacaccccatcacccgtttcccagcccggccacagacctgtaccaggtgcccccagggcctggaggccctgcccaggatatttaccaggtgccaccttctgccgggatggggcatgacatctaccaggtccccccgtccatggacacacgcagctgggagggcacgaagcccccggcaaaggtggtggtgcccacccgcgtggggcagggctatgtatacgaggccgcccagccggagcaggacgagtacgacatcccgcgacacctgctggccccggggccacaggacatctatgatgtgcccccggttcgggggctgcttcccagccagtatggccaggaggtgtatgacacaccccccatggctgtcaagggtcccaatggccgagacccgttgctggaggtgtatgacgtgccccccagtgtggagaagggcctgccaccgtccaaccaccacgcagtgagcaaatgccagggcaatgccagggccaggctgaggctgtggggtgtctgggtctacgacgttcctccatcggtgagcaaggatgtgcccgatggcccactgctgcgtgaggagacctacgatgtgccccccgccttcgccaaggccaagccctttgacccggcccgcaccccactggtactggctgcgccccctccagactccccgccggccgaggacgtgtatgacgtgccgcccccggctcctgacctctacgacgtgccccctggcttgcggcggcctggcccgggcaccctgtacgatgtgccccgtgaacgggtgcttcctcctgaggtggctgatggtggcgtggtcgacagtggtgtgtatgcggtgcctcccccagctgaacgtgaagccccggcagagggcaagcgcctgtcggcctccagcaccggcagcacacgcagcagccagtctgcgtcctccttggaggtggcagggccgggccgggaacccctggagctggaagttgctgtggaggccctggcacggctgcagcagggtgtgagcgccaccgttgcccaccttctggacctggcaggcagcgccggtgcgactgggagctggcgtagcccctctgagccacaggagccgctggtgcaggacctgcaggctgctgtggccgctgtccagagtgccgtccacgagctgttggagtttgcccgcagcgcggtgggcaatgctgcccacacatctgaccgtgccctgcatgccaagcttagccggcagctgcagaagatggaggacgtgcaccagacgctggtggcacatggtcaggccctcgacgctggccggggaggctctggagccacccttgaggacctggaccggctggtggcctgctcgcgggctgtgcccgaggacgccaagcagctggcctccttcctgcacggcaatgcctcactgctcttcagacggaccaaggccactgccccggggcctgaggggggtggcaccctgcaccccaaccccactgacaagaccagcagcatccagtcacgacccctgccctcaccccctaagttcacctcccaggactcgccagatgggcagtacgagaacagcgaggggggctggatggaggactatgactacgtccacctacaggggaaggaggagtttgagaagacccagaaggagctgctggaaaagggcagcatcacgcggcagggcaagagccagctggagttgcagcagctgaagcagtttgaacgactggaacaggaggtgtcacggcccatagaccacgacctggccaactggacgccagcccaacccctggccccggggcgaacaggcggcctggggccctcggaccggcagctgctgctcttctacctggagcagtgtgaggccaacctgaccacactgaccaacgccgtggacgccttctttaccgccgtggccaccaaccagccgcccaagatctttgtggcgcacagcaagttcgtcatcctcagcgcccacaagctggtgttcatcggggacacactgtcacggcaggccaaggctgctgacgtgcgcagccaggtgacccactacagcaacctgctgtgcgacctcctgcgcggcatcgtggccaccaccaaggccgctgccttgcagtacccatcgccttccgcggcccaggacatggtggagagggtcaaggagctgggccacagcacccagcagttccgccgcgtcctaggccagctggcagccgcctgagggtggtgaccccaggagggaggcaggggaggggtgcggcggtcccagctccctggctcccatgtcaagagtcgctgtgccacaggcttagggacaggaccccagctctgcgtcggtcctggtgccctggatgcccaggaatctgtatatatttatggccgggcagggtgtggggccatgcctcctcaggagccgaagcccaggggccggccagtggccttccccagcatgcaccacgggcccgggttgggtcaccagacggggctggagtgtgagggtcctgcagcctgcaggacctcgtgccaccccgagggctgagcctggtcccacgagggtgccgtgtcccctgacagggccagtgcagtttggtgtgtcctccgccttaccaggagaagaacctgaagaactatttttcgttattggttttccaatcatttgactaagagtctccatttaaataaagtttttaaaaggaagagc

SEQ ID NO: 66747 - DNA, 2667 bp, Artificial Sequence
  derived and/or modified sequence
atgaaccacctgaacgtgctggccaaggccctgtacgacaacgtggccgagagccccgacgagctgagcttcagaaagggcgacatcatgaccgtgctggagcaggacacccagggcctggacggctggtggctgtgcagcctgcacggcagacagggcatcgtgcccggcaacagactgaagatcctggtgggcatgtacgacaagaagcccgccggccccggccccggcccccccgccacccccgcccagccccagcccggcctgcacgcccccgccccccccgccagccagtacacccccatgctgcccaacacctaccagccccagcccgacagcgtgtacctggtgcccacccccagcaaggcccagcagggcctgtaccaggtgcccggccccagcccccagttccagagcccccccgccaagcagaccagcaccttcagcaagcagaccccccaccaccccttccccagccccgccaccgacctgtaccaggtgccccccggccccggcggccccgcccaggacatctaccaggtgccccccagcgccggcatgggccacgacatctaccaggtgccccccagcatggacaccagaagctgggagggcaccaagccccccgccaaggtggtggtgcccaccagagtgggccagggctacgtgtacgaggccgcccagcccgagcaggacgagtacgacatccccagacacctgctggcccccggcccccaggacatctacgacgtgccccccgtgagaggcctgctgcccagccagtacggccaggaggtgtacgacaccccccccatggccgtgaagggccccaacggcagagaccccctgctggaggtgtacgacgtgccccccagcgtggagaagggcctgccccccagcaaccaccacgccgtgagcaagtgccagggcaacgccagagccagactgagactgtggggcgtgtgggtgtacgacgtgccccccagcgtgagcaaggacgtgcccgacggccccctgctgagagaggagacctacgacgtgccccccgccttcgccaaggccaagcccttcgaccccgccagaacccccctggtgctggccgcccccccccccgacagcccccccgccgaggacgtgtacgacgtgcccccccccgcccccgacctgtacgacgtgccccccggcctgagaagacccggccccggcaccctgtacgacgtgcccagagagagagtgctgccccccgaggtggccgacggcggcgtggtggacagcggcgtgtacgccgtgcccccccccgccgagagagaggcccccgccgagggcaagagactgagcgccagcagcaccggcagcaccagaagcagccagagcgccagcagcctggaggtggccggccccggcagagagcccctggagctggaggtggccgtggaggccctggccagactgcagcagggcgtgagcgccaccgtggcccacctgctggacctggccggcagcgccggcgccaccggcagctggagaagccccagcgagccccaggagcccctggtgcaggacctgcaggccgccgtggccgccgtgcagagcgccgtgcacgagctgctggagttcgccagaagcgccgtgggcaacgccgcccacaccagcgacagagccctgcacgccaagctgagcagacagctgcagaagatggaggacgtgcaccagaccctggtggcccacggccaggccctggacgccggcagaggcggcagcggcgccaccctggaggacctggacagactggtggcctgcagcagagccgtgcccgaggacgccaagcagctggccagcttcctgcacggcaacgccagcctgctgttcagaagaaccaaggccaccgcccccggccccgagggcggcggcaccctgcaccccaaccccaccgacaagaccagcagcatccagagcagacccctgcccagcccccccaagttcaccagccaggacagccccgacggccagtacgagaacagcgagggcggctggatggaggactacgactacgtgcacctgcagggcaaggaggagttcgagaagacccagaaggagctgctggagaagggcagcatcaccagacagggcaagagccagctggagctgcagcagctgaagcagttcgagagactggagcaggaggtgagcagacccatcgaccacgacctggccaactggacccccgcccagcccctggcccccggcagaaccggcggcctgggccccagcgacagacagctgctgctgttctacctggagcagtgcgaggccaacctgaccaccctgaccaacgccgtggacgccttcttcaccgccgtggccaccaaccagccccccaagatcttcgtggcccacagcaagttcgtgatcctgagcgcccacaagctggtgttcatcggcgacaccctgagcagacaggccaaggccgccgacgtgagaagccaggtgacccactacagcaacctgctgtgcgacctgctgagaggcatcgtggccaccaccaaggccgccgccctgcagtaccccagccccagcgccgcccaggacatggtggagagagtgaaggagctgggccacagcacccagcagttcagaagagtgctgggccagctggccgccgcctag

SEQ ID NO: 66748 - protein, 870 aa, Artificial Sequence
  derived and/or modified sequence
MSVPNVLAKALYDNVAESPDELSFRKGDIMTVLEQDTQGLDGWWLCSLHGRQGIVPGNRLKILVGMYDKKPAGPGPGPPATPAQPQPGLHAPAPPASQYTPMLPNTYQPQPDSVYLVPTPSKAQQGLYQVPGPSPQFQSPPAKQTSTFSKQTPHHPFPSPATDLYQVPPGPGGPAQDIYQVPPSAGMGHDIYQVPPSMDTRSWEGTKPPAKVVVPTRVGQGYVYEAAQPEQDEYDIPRHLLAPGPQDIYDVPPVRGLLPSQYGQEVYDTPPMAVKGPNGRDPLLEVYDVPPSVEKGLPPSNHHAVYDVPPSVSKDVPDGPLLREETYDVPPAFAKAKPFDPARTPLVLAAPPPDSPPAEDVYDVPPPAPDLYDVPPGLRRPGPGTLYDVPRERVLPPEVADGGVVDSGVYAVPPPAEREAPAEGKRLSASSTGSTRSSQSASSLEVAGPGREPLELEVAVEALARLQQGVSATVAHLLDLAGSAGATGSWRSPSEPQEPLVQDLQAAVAAVQSAVHELLEFARSAVGNAAHTSDRALHAKLSRQLQKMEDVHQTLVAHGQALDAGRGGSGATLEDLDRLVACSRAVPEDAKQLASFLHGNASLLFRRTKATAPGPEGGGTLHPNPTDKTSSIQSRPLPSPPKFTSQDSPDGQYENSEGGWMEDYDYVHLQGKEEFEKTQKELLEKGSITRQGKSQLELQQLKQFERLEQEVSRPIDHDLANWTPAQPLAPGRTGGLGPSDRQLLLFYLEQCEANLTTLTNAVDAFFTAVATNQPPKIFVAHSKFVILSAHKLVFIGDTLSRQAKAADVRSQVTHYSNLLCDLLRGIVATTKAAALQYPSPSAAQDMVERVKELGHSTQQFRRVLGQLAAA

SEQ ID NO: 66749 - DNA, 2613 bp, Artificial Sequence
  derived and/or modified sequence
atgtccgtccccaatgtgctggcaaaagccttgtatgacaatgtggccgagagccctgatgaactctcgtttcgaaagggggacataatgacagtgctcgaacaggacacgcagggtctcgatggatggtggctgtgctctttacatggcaggcagggcatagttccagggaaccggctgaaaatcctggtgggcatgtacgataagaaacccgcagggcctggacccggcccgcctgcaaccccggcacaaccacagcctggactgcacgcaccggctcctcccgcaagtcaatatacccccatgctcccaaatacctaccagccgcagcccgacagcgtttacttggtacccactccttcaaaagctcagcagggactataccaggtcccgggaccctcccctcagtttcagagtcctccagccaaacaaacctcgacattctctaagcagactccccaccaccccttcccctctccggcaactgatctttatcaggtcccccctggcccagggggtccagcccaggatatttatcaggtgccccctagtgcaggcatggggcatgacatctaccaagtccccccaagcatggacactcggagttgggaaggcactaagcctcccgcgaaggttgtagtgccaacgagggtgggacagggctacgtgtacgaggcggcacagccggagcaggatgaatatgacatccctagacacctcctagcccctgggcctcaggatatctatgatgttccccctgtccgggggttactgccaagccagtatggtcaggaggtctacgacacccccccaatggccgtaaaaggccccaacggccgcgatccacttcttgaggtgtatgacgtacccccctccgtcgaaaaggggctacccccatcaaatcaccacgctgtatacgatgtcccgccaagcgtgagcaaagatgtgcccgacgggccgcttctgagggaagaaacctacgatgtgccccccgcattcgccaaggcaaaacctttcgaccccgcaaggactccactggtgctggccgctccgcctccagattccccccctgcagaagacgtttatgatgttcctccccctgccccagacttgtacgacgtgcctccagggctgaggcgaccaggacccggcacattgtatgacgttcctagagaacgggtgctgcctccagaagtggctgacggcggggtagtggatagcggcgtgtatgccgtcccaccacccgctgagcgggaagcacctgcagagggaaagcggctaagcgcatctagtacgggatctacacgtagcagccagagcgccagctcactggaagttgcaggacccggccgtgaacctcttgagttggaggtggccgtggaggctctcgcacggctgcaacagggggtgtcagccacagtcgcccacctgctggacctcgctggctcggcaggtgccactgggtcttggcggtctccatccgagccgcaagaacctctggtgcaggacctgcaggccgctgtggccgcggtccagagcgcggtgcacgagttgctcgaatttgctcgttcagctgtggggaacgccgcgcacaccagcgaccgggccttgcatgcgaaactgagcaggcagctccagaagatggaagatgtgcaccagacacttgtggcccatggtcaggcccttgacgccggacgtggcggctccggggccacactcgaggacctggatcggctggtggcgtgctctagggccgtgcccgaggatgctaagcaactggcttcattccttcatggtaatgccagcctgctgtttcggagaaccaaagccaccgccccagggcccgaggggggcgggactctccaccccaaccctaccgacaaaacctcttcgattcagtctagaccacttccctccccaccaaaattcacctcccaagactcgccagatggacagtacgagaattctgaaggaggctggatggaggattatgactatgtgcacctgcaaggtaaagaagagttcgagaaaacgcagaaagagctgctcgaaaagggatctatcaccagacaggggaaatcccaactggagctccagcaactgaagcagttcgaacggctggagcaagaggtctcacggcccatcgaccacgacctggccaattggacacctgcacagcctctggcacccgggcgcactggtggcctgggaccttccgaccgccaactgttgttgttctatcttgagcagtgtgaggccaatctgaccactttgacaaatgctgtggatgcgttttttaccgcagtcgccacaaatcagcctccaaagatttttgtggcccacagcaaattcgtaattctctctgcccacaagctggtgttcataggcgatactctctctaggcaggctaaggccgccgatgtcaggtcacaggtcacacactactctaacctcctgtgtgacctactacgaggcatcgtggctactaccaaggcggctgcacttcagtacccctcgccatccgcagcccaagacatggtggaacgggtgaaagagctgggacactccactcagcagttccgccgagtcctgggacaactcgcagctgcatag

SEQ ID NO: 66750 - DNA, 2613 bp, Artificial Sequence
  derived and/or modified sequence
atgtctgtgcccaacgtgctggccaaggccctgtatgacaacgtggccgagagcccagatgagctgtccttcaggaagggggacatcatgacagtgctggagcaggacacccagggcctggatggctggtggctgtgcagcctgcacggccggcagggcatcgtgcccggcaaccggctgaagatcctggtgggcatgtatgacaagaagccagctggccctggccctggccccccagccaccccagcccagccccagcccggcctgcacgccccagcccccccagccagccagtacacccccatgctgcccaacacctaccagccccagccagattctgtgtacctggtgcccacccccagcaaggcccagcagggcctgtaccaggtgcccggccccagcccccagttccagagccccccagccaagcagaccagcaccttcagcaagcagaccccccaccaccccttccccagccctgccacagacctgtaccaggtgcccccaggccctgggggccctgcccaggacatctaccaggtgccccccagcgctggcatgggccatgacatctaccaggtgcccccatccatggacaccaggtcctgggagggcaccaagcccccagccaaggtggtggtgcccaccagggtgggccagggctacgtgtatgaggccgcccagcctgagcaggatgaatatgacatccccaggcacctgctggcccctggcccccaggacatctatgatgtgccccctgtgcggggcctgctgcccagccagtatggccaggaggtgtatgacaccccacccatggctgtgaagggccccaacggccgggaccccctgctggaggtgtatgatgtgccccccagcgtggagaagggcctgccccccagcaaccaccacgctgtgtatgatgtgcccccatctgtgtccaaggatgtgcctgatggccccctgctgcgggaggagacctatgatgtgcccccagcctttgccaaggccaagccctttgatcctgcccggacccccctggtgctggccgcccctcctccagacagccccccagcagaagatgtgtatgatgtgcccccaccagccccagacctgtatgatgtgcccccaggcctgcggcggcccggccctggcaccctgtatgatgtgccccgggagcgggtgctgcccccagaggtggctgatggaggagtggtggacagcggcgtgtatgctgtgcccccacctgctgagcgggaggccccagctgagggcaagaggctgagcgccagcagcacaggcagcaccaggagcagccagagcgccagcagcctggaggtggccggccctggccgggagcccctggagctggaggtggccgtggaggccctggcccggctgcagcagggcgtgtctgccaccgtggcccacctgctggacctggccggcagcgctggggccaccggctcctggaggagccccagcgagccccaggagcccctggtgcaggacctgcaggccgctgtggccgctgtgcagagcgctgtgcatgagctgctggagtttgcccggtctgctgtgggcaatgctgcccacaccagtgaccgggccctgcacgccaagctgagccggcagctgcagaagatggaggatgtgcaccagaccctggtggcccacggccaggccctggatgctggccggggcggcagcggggccaccctggaggacctggaccggctggtggcctgcagcagagctgtgcctgaagatgccaagcagctggccagcttcctgcacggcaatgccagcctgctcttccggaggaccaaggccacagcccctggccctgagggcggcggcaccctgcaccccaaccccacagacaagaccagcagcatccagagccggcccctgcccagcccccccaagttcaccagccaggacagcccagatggccagtatgagaacagcgagggcggctggatggaggactatgactatgtgcacctgcagggcaaggaggagtttgagaagacccagaaggagctgctggagaagggcagcatcacccggcagggcaagagccagctggagctgcagcagctgaagcagtttgagcggctggagcaggaggtgtcccggcccatcgaccatgacctggccaactggaccccagcccagcccctggcccctggccgcactggaggcctgggccccagcgaccggcagctgctgctcttctacctggagcagtgtgaggccaacctgaccaccctgaccaatgctgtggatgccttcttcaccgctgtggccaccaaccagccccccaagatctttgtggcccacagcaagtttgtgatcctgagcgcccacaagctggtgttcatcggggacaccctgagccggcaggccaaggccgcagatgtgcgcagccaggtgacccactacagcaacctgctgtgtgacctgctgcggggcatcgtggccaccaccaaggctgctgccctgcagtaccccagccccagcgctgcccaggacatggtggagcgggtgaaggagctgggccacagcacccagcagttcagaagagtgctgggccagctggccgccgcctag

SEQ ID NO: 66751 - DNA, 2613 bp, Artificial Sequence
  derived and/or modified sequence
atgagcgtgcccaacgtgctggccaaggccctgtacgacaacgtggcagaatctcccgacgagctaagttttaggaagggggatatcatgacggtgctggaacaggacactcaaggactcgatggatggtggctctgttccttacacggacgacagggtattgtgccgggtaatcgtctgaagatattggtaggcatgtacgacaaaaaaccagcaggaccagggccaggaccccctgccacccctgcgcaaccgcaaccaggcttgcacgcaccggccccccccgccagccagtacactcctatgctgcccaatacctaccagccacagcccgattcagtgtacttggtaccaacacctagtaaggcgcagcaaggcctctatcaagtaccgggtccatcgccccaattccaatcaccacccgcaaagcagaccagcacatttagtaagcagacccctcatcatcccttccccagtcccgccaccgacttgtaccaggtaccaccaggccctggcggtcctgcccaggatatctatcaggtgcctcccagtgcaggaatgggccacgatatctatcaggtgcctccaagcatggatacccgaagctgggagggtaccaagccaccggccaaagtggtggtccccacgcgagtggggcaaggctatgtttacgaggcggcacagccggaacaggatgaatacgacatccccagacaccttctggctccaggacctcaggatatctacgacgtcccacccgttcgggggcttctgcccagtcagtacggccaggaagtatacgacactccacccatggccgtgaagggccccaacggacgggaccccctgctggaggtctacgatgtgcctccttcggtggaaaaagggctgccaccatctaatcatcatgcagtttacgatgtgccaccctccgtgtctaaggacgtgcctgacggccctctgttacgggaggagacctacgatgtgccaccggccttcgcaaaagctaagccatttgatccggcccgtaccccattagtgcttgctgcccccccccctgacagtccaccagcagaggatgtctacgatgtccccccacctgcccccgacctgtacgatgttccacccggcctccgacggcccgggcctggaactctctacgacgtccccagagagagggtcctgcccccagaagttgctgatggtggcgtcgtagacagcggggtgtacgctgtgccaccccctgcagagagggaggcgccagccgaaggcaaacggctctcagctagtagtactggctcaacgagaagcagccagtccgcctcttctcttgaggtcgccggtccaggccgggagcccctcgagctcgaggtcgcggtggaagccctcgctagacttcagcagggagtgagcgcgactgtggcacacttactggatctggcagggtctgcgggtgccactggttcatggcgtagccccagtgagccccaggaacctctggtccaggatcttcaggccgcagtagcggcagtgcaaagcgccgttcacgagcttctcgagttcgcccgctctgcggtcgggaacgcagcacacacctccgacagggcactgcatgcaaagctgtccagacaattgcagaaaatggaggatgttcaccagacacttgttgcccacggacaggcacttgatgcagggaggggcggatctggagcaacactggaggatttggacaggttagtggcatgctccagagcagtccctgaggacgcaaaacagttagcaagttttctgcacgggaacgctagccttcttttcagaagaacaaaagcaaccgcccccggcccagagggtggtgggacacttcatcccaaccccaccgacaaaaccagtagcattcagtcacggccacttccctccccgccgaagtttacttcacaggactctccagacgggcagtatgaaaactctgagggcgggtggatggaggactacgattacgtacacctccaggggaaggaagagtttgagaagacacagaaagagctgctggagaagggcagcatcaccaggcagggtaaatctcagttggagctacagcagctaaaacagttcgagcggctcgagcaagaggtgtcacggcccattgaccacgatctcgcaaattggacacctgcccaacccttggctccaggacgcactggcgggttggggccttccgaccgtcagttacttctcttctatctcgagcagtgtgaggccaacctaaccacgctcactaacgcagtggatgctttttttacggctgtcgcgaccaatcagccaccgaaaatctttgtggctcactccaagtttgtaatcttgtctgcacataaactggtctttatcggggacacgctttctcgccaggccaaagccgccgatgtgagaagtcaggtcactcactactctaacttactttgcgatctgctgaggggaattgtggccacgacaaaggccgcagcactgcaatacccaagtcctagtgccgcccaagacatggtggagcgagtgaaagaacttggccacagcacgcaacagttcaggcgcgtcctcggacaattagcagcggcctag

SEQ ID NO: 66752 - DNA, 2613 bp, Artificial Sequence
  derived and/or modified sequence
atgagcgtgcctaatgtccttgcgaaagccctctatgataacgttgcagagtctcctgacgagctgagcttccgcaagggtgacatcatgactgtcctggagcaggatacacagggtcttgatggttggtggctttgttcccttcacgggaggcaggggatcgtgcccggaaaccggctgaagattctggtcggcatgtacgataaaaagcccgctgggccaggtccagggcctcctgcaactcccgctcaaccacagccgggtctgcatgctcccgctccaccagcgagtcagtacacccccatgctgcccaatacatatcagccccagcccgactccgtgtatctagttcccacgccaagcaaggcccagcagggactgtatcaagtgcctggtccgagcccacaatttcagagcccccctgcaaagcagacctccaccttctcaaagcagaccccacaccatccttttccatcaccggctaccgacctctaccaggtgcctcccggaccagggggacccgctcaggacatttaccaggtcccaccaagcgctggcatgggtcatgacatctaccaggtgccgccttctatggacactaggtcctgggaaggaaccaagcctccagctaaagtagttgtacccaccagggtaggccagggttatgtgtatgaggccgctcagcccgagcaggacgaatatgacatcccccgacacctactcgccccaggcccacaagacatttacgatgtgccgcctgtacggggactgctacccagtcaatatggacaggaagtgtacgatacccccccaatggctgtgaagggtcctaatggcagagacccactcctggaggtttacgacgttccgccaagtgtggagaaaggtttgccaccctccaaccatcatgccgtttacgacgtgccgccatcggtatccaaggatgttccagacggtccactgctgagggaagagacatatgacgtgccaccagcatttgccaaggcaaaaccatttgaccccgcaaggactcctctggtcttggctgcaccgcctcccgatagcccacctgcggaggacgtgtatgacgtccccccacccgcaccagacctctatgacgtgccgcctggcttgcgacggcctggccctggtaccctctacgacgtgccacgtgagagggttctgccacctgaagtagccgatggaggagtcgttgactctggagtttatgccgtgcctccaccagctgagagggaggcacccgctgaagggaagcgcttgagcgccagttcaactgggtcaacacgttcctcacagtcagcctctagtctggaagtggccggaccgggtcgggagcctcttgagcttgaggtagctgtagaagcccttgcccgactgcagcagggcgttagcgctaccgtggcccatctgctggacctggccggaagcgcaggggctaccggtagctggcgaagcccgagcgagccacaggaacccctggtccaagacctgcaggctgcagtggcagcagtgcagtccgcagtccatgagttactggagtttgcacggtcagccgtcggcaacgccgctcacacatctgaccgtgcattgcatgcaaagctgagtcgtcagctgcaaaaaatggaggacgtgcaccaaaccctggtcgcccacgggcaagcactggatgcaggtcgtggtggctcgggtgcaaccctcgaggatctggatcgtctcgtcgcatgtagcagggctgtacccgaagacgccaaacagctggcgtccttcctgcacgggaatgcaagcctgctgtttaggaggactaaggccacagcgccaggccctgagggtgggggaactttgcatccaaaccctaccgacaagactagcagtattcaatccaggccactgcccagccctccaaagttcacgtcccaggactcaccagacggccagtacgagaatagtgagggagggtggatggaagactacgactatgtacatttacaggggaaggaggagtttgagaaaacgcaaaaggagctgcttgaaaagggttctattactcgacagggcaaatcccaactggagctccagcaacttaagcagttcgagagacttgagcaagaggtcagcaggccaatcgaccacgatctagccaactggaccccagcgcagccgctggcacctggaaggaccggcggactgggacctagtgacaggcaactactgctattttatctggagcagtgtgaggcgaacctgacgacgttgaccaatgccgttgacgcctttttcaccgccgtcgccaccaaccagccaccaaaaatattcgtggcacattccaaatttgtgatcctgagtgcacacaaattggtatttattggagatactctcagccgtcaggcaaaggccgctgatgtgcgctcacaggtgacccactacagtaacctattgtgcgaccttctgaggggcatagtggcgactactaaggccgctgccctacagtatccttcaccgtccgcggcacaggatatggtggaacgtgtgaaagagcttggtcattcaacgcagcaattcagaagggtcctgggccaactagcagctgcatag

SEQ ID NO: 66753 - DNA, 3264 bp, Artificial Sequence
  derived and/or modified sequence
atgcgcggcgcggctggagcggccggacagtccggcgtccgggaacgctcaggagccggaggagccggaaagcgccgggacccctcgcggggcctctgagcggcgcgggcggacccgagcccccagcccgctggcgccgctgcccgccaggccccgggggcggcggccaagatgtccgtgcctaacgtgctggccaaagcgctctatgacaatgtggccgagtccccggatgagctctccttccgcaagggtgacatcatgacggtgctggagcaggacacgcagggcctggacggctggtggctctgctcgctgcatgggcgccagggcatcgtgcctgggaaccgcctcaagatcttggtgggcatgtatgataagaagccagcagggcctggccccggccctcccgccaccccggcccagcctcagcctggcctccatgccccagcgcctccggcctcccagtacacgcccatgctccccaacacctaccagccccagccagacagcgtctacctggtgcccactcccagcaaggctcagcaaggcctctaccaagtcccgggtcccagccctcagttccagtctcccccagccaagcagacatccaccttctcgaagcagacaccccatcacccgtttcccagcccggccacagacctgtaccaggtgcccccagggcctggaggccctgcccaggatatttaccaggtgccaccttctgccgggatggggcatgacatctaccaggtccccccgtccatggacacacgcagctgggagggcacgaagcccccggcaaaggtggtggtgcccacccgcgtggggcagggctatgtatacgaggccgcccagccggagcaggacgagtacgacatcccgcgacacctgctggccccggggccacaggacatctatgatgtgcccccggttcgggggctgcttcccagccagtatggccaggaggtgtatgacacaccccccatggctgtcaagggtcccaatggccgagacccgttgctggaggtgtatgacgtgccccccagtgtggagaagggcctgccaccgtccaaccaccacgcagtctacgacgttcctccatcggtgagcaaggatgtgcccgatggcccactgctgcgtgaggagacctacgatgtgccccccgccttcgccaaggccaagccctttgacccggcccgcaccccactggtactggctgcgccccctccagactccccgccggccgaggacgtgtatgacgtgccgcccccggctcctgacctctacgacgtgccccctggcttgcggcggcctggcccgggcaccctgtacgatgtgccccgtgaacgggtgcttcctcctgaggtggctgatggtggcgtggtcgacagtggtgtgtatgcggtgcctcccccagctgaacgtgaagccccggcagagggcaagcgcctgtcggcctccagcaccggcagcacacgcagcagccagtctgcgtcctccttggaggtggcagggccgggccgggaacccctggagctggaagttgctgtggaggccctggcacggctgcagcagggtgtgagcgccaccgttgcccaccttctggacctggcaggcagcgccggtgcgactgggagctggcgtagcccctctgagccacaggagccgctggtgcaggacctgcaggctgctgtggccgctgtccagagtgccgtccacgagctgttggagtttgcccgcagcgcggtgggcaatgctgcccacacatctgaccgtgccctgcatgccaagcttagccggcagctgcagaagatggaggacgtgcaccagacgctggtggcacatggtcaggccctcgacgctggccggggaggctctggagccacccttgaggacctggaccggctggtggcctgctcgcgggctgtgcccgaggacgccaagcagctggcctccttcctgcacggcaatgcctcactgctcttcagacggaccaaggccactgccccggggcctgaggggggtggcaccctgcaccccaaccccactgacaagaccagcagcatccagtcacgacccctgccctcaccccctaagttcacctcccaggactcgccagatgggcagtacgagaacagcgaggggggctggatggaggactatgactacgtccacctacaggggaaggaggagtttgagaagacccagaaggagctgctggaaaagggcagcatcacgcggcagggcaagagccagctggagttgcagcagctgaagcagtttgaacgactggaacaggaggtgtcacggcccatagaccacgacctggccaactggacgccagcccaacccctggccccggggcgaacaggcggcctggggccctcggaccggcagctgctgctcttctacctggagcagtgtgaggccaacctgaccacactgaccaacgccgtggacgccttctttaccgccgtggccaccaaccagccgcccaagatctttgtggcgcacagcaagttcgtcatcctcagcgcccacaagctggtgttcatcggggacacactgtcacggcaggccaaggctgctgacgtgcgcagccaggtgacccactacagcaacctgctgtgcgacctcctgcgcggcatcgtggccaccaccaaggccgctgccttgcagtacccatcgccttccgcggcccaggacatggtggagagggtcaaggagctgggccacagcacccagcagttccgccgcgtcctaggccagctggcagccgcctgagggtggtgaccccaggagggaggcaggggaggggtgcggcggtcccagctccctggctcccatgtcaagagtcgctgtgccacaggcttagggacaggaccccagctctgcgtcggtcctggtgccctggatgcccaggaatctgtatatatttatggccgggcagggtgtggggccatgcctcctcaggagccgaagcccaggggccggccagtggccttccccagcatgcaccacgggcccgggttgggtcaccagacggggctggagtgtgagggtcctgcagcctgcaggacctcgtgccaccccgagggctgagcctggtcccacgagggtgccgtgtcccctgacagggccagtgcagtttggtgtgtcctccgccttaccaggagaagaacctgaagaactatttttcgttattggttttccaatcatttgactaagagtctccatttaaataaagtttttaaaaggaagagc

SEQ ID NO: 66754 - DNA, 2613 bp, Artificial Sequence
  derived and/or modified sequence
atgagcgtgcccaacgtgctggccaaggccctgtacgacaacgtggccgagagccccgacgagctgagcttcagaaagggcgacatcatgaccgtgctggagcaggacacccagggcctggacggctggtggctgtgcagcctgcacggcagacagggcatcgtgcccggcaacagactgaagatcctggtgggcatgtacgacaagaagcccgccggccccggccccggcccccccgccacccccgcccagccccagcccggcctgcacgcccccgccccccccgccagccagtacacccccatgctgcccaacacctaccagccccagcccgacagcgtgtacctggtgcccacccccagcaaggcccagcagggcctgtaccaggtgcccggccccagcccccagttccagagcccccccgccaagcagaccagcaccttcagcaagcagaccccccaccaccccttccccagccccgccaccgacctgtaccaggtgccccccggccccggcggccccgcccaggacatctaccaggtgccccccagcgccggcatgggccacgacatctaccaggtgccccccagcatggacaccagaagctgggagggcaccaagccccccgccaaggtggtggtgcccaccagagtgggccagggctacgtgtacgaggccgcccagcccgagcaggacgagtacgacatccccagacacctgctggcccccggcccccaggacatctacgacgtgccccccgtgagaggcctgctgcccagccagtacggccaggaggtgtacgacaccccccccatggccgtgaagggccccaacggcagagaccccctgctggaggtgtacgacgtgccccccagcgtggagaagggcctgccccccagcaaccaccacgccgtgtacgacgtgccccccagcgtgagcaaggacgtgcccgacggccccctgctgagagaggagacctacgacgtgccccccgccttcgccaaggccaagcccttcgaccccgccagaacccccctggtgctggccgcccccccccccgacagcccccccgccgaggacgtgtacgacgtgcccccccccgcccccgacctgtacgacgtgccccccggcctgagaagacccggccccggcaccctgtacgacgtgcccagagagagagtgctgccccccgaggtggccgacggcggcgtggtggacagcggcgtgtacgccgtgcccccccccgccgagagagaggcccccgccgagggcaagagactgagcgccagcagcaccggcagcaccagaagcagccagagcgccagcagcctggaggtggccggccccggcagagagcccctggagctggaggtggccgtggaggccctggccagactgcagcagggcgtgagcgccaccgtggcccacctgctggacctggccggcagcgccggcgccaccggcagctggagaagccccagcgagccccaggagcccctggtgcaggacctgcaggccgccgtggccgccgtgcagagcgccgtgcacgagctgctggagttcgccagaagcgccgtgggcaacgccgcccacaccagcgacagagccctgcacgccaagctgagcagacagctgcagaagatggaggacgtgcaccagaccctggtggcccacggccaggccctggacgccggcagaggcggcagcggcgccaccctggaggacctggacagactggtggcctgcagcagagccgtgcccgaggacgccaagcagctggccagcttcctgcacggcaacgccagcctgctgttcagaagaaccaaggccaccgcccccggccccgagggcggcggcaccctgcaccccaaccccaccgacaagaccagcagcatccagagcagacccctgcccagcccccccaagttcaccagccaggacagccccgacggccagtacgagaacagcgagggcggctggatggaggactacgactacgtgcacctgcagggcaaggaggagttcgagaagacccagaaggagctgctggagaagggcagcatcaccagacagggcaagagccagctggagctgcagcagctgaagcagttcgagagactggagcaggaggtgagcagacccatcgaccacgacctggccaactggacccccgcccagcccctggcccccggcagaaccggcggcctgggccccagcgacagacagctgctgctgttctacctggagcagtgcgaggccaacctgaccaccctgaccaacgccgtggacgccttcttcaccgccgtggccaccaaccagccccccaagatcttcgtggcccacagcaagttcgtgatcctgagcgcccacaagctggtgttcatcggcgacaccctgagcagacaggccaaggccgccgacgtgagaagccaggtgacccactacagcaacctgctgtgcgacctgctgagaggcatcgtggccaccaccaaggccgccgccctgcagtaccccagccccagcgccgcccaggacatggtggagagagtgaaggagctgggccacagcacccagcagttcagaagagtgctgggccagctggccgccgcctag

SEQ ID NO: 66755 - protein, 868 aa, Artificial Sequence
  derived and/or modified sequence
MENVLAKALYDNVAESPDELSFRKGDIMTVLEQDTQGLDGWWLCSLHGRQGIVPGNRLKILVGMYDKKPAGPGPGPPATPAQPQPGLHAPAPPASQYTPMLPNTYQPQPDSVYLVPTPSKAQQGLYQVPGPSPQFQSPPAKQTSTFSKQTPHHPFPSPATDLYQVPPGPGGPAQDIYQVPPSAGMGHDIYQVPPSMDTRSWEGTKPPAKVVVPTRVGQGYVYEAAQPEQDEYDIPRHLLAPGPQDIYDVPPVRGLLPSQYGQEVYDTPPMAVKGPNGRDPLLEVYDVPPSVEKGLPPSNHHAVYDVPPSVSKDVPDGPLLREETYDVPPAFAKAKPFDPARTPLVLAAPPPDSPPAEDVYDVPPPAPDLYDVPPGLRRPGPGTLYDVPRERVLPPEVADGGVVDSGVYAVPPPAEREAPAEGKRLSASSTGSTRSSQSASSLEVAGPGREPLELEVAVEALARLQQGVSATVAHLLDLAGSAGATGSWRSPSEPQEPLVQDLQAAVAAVQSAVHELLEFARSAVGNAAHTSDRALHAKLSRQLQKMEDVHQTLVAHGQALDAGRGGSGATLEDLDRLVACSRAVPEDAKQLASFLHGNASLLFRRTKATAPGPEGGGTLHPNPTDKTSSIQSRPLPSPPKFTSQDSPDGQYENSEGGWMEDYDYVHLQGKEEFEKTQKELLEKGSITRQGKSQLELQQLKQFERLEQEVSRPIDHDLANWTPAQPLAPGRTGGLGPSDRQLLLFYLEQCEANLTTLTNAVDAFFTAVATNQPPKIFVAHSKFVILSAHKLVFIGDTLSRQAKAADVRSQVTHYSNLLCDLLRGIVATTKAAALQYPSPSAAQDMVERVKELGHSTQQFRRVLGQLAAA

SEQ ID NO: 66756 - DNA, 2607 bp, Artificial Sequence
  derived and/or modified sequence
atggagaatgttctcgcaaaagctttatacgataacgtggccgagtcccccgacgagcttagttttaggaagggagacataatgacggttcttgagcaggatactcagggcttagacgggtggtggctctgctcattgcatggtcggcaggggatcgttcctgggaaccggttaaaaattctggttgggatgtatgataagaagcctgctggtcctggaccaggccctcccgctacccctgcgcagccccagcccggactgcacgctcctgcaccacccgcctcacagtatacacctatgttgcccaatacctaccagccccagcccgatagcgtgtatctggttcccacgccctcaaaagcccagcagggcttataccaggtgcctggaccaagcccccaattccagtctcctcctgcaaaacagacctcaacattcagtaaacagacaccacaccaccctttcccctctcccgcaaccgacctctaccaggtgccacctggacctggtggcccagcacaagatatctaccaagttcctccaagtgcaggaatggggcatgatatataccaagtcccaccctcgatggacactcgttcttgggagggaacaaagccccctgctaaggtggtggtgccgacccgcgtcggacaaggttacgtgtacgaagctgcacagcctgagcaggacgaatacgatatccctcggcacctgttagctcccggtccacaggatatatatgatgtgcccccagtcaggggcctgttgccttctcagtacggacaggaagtttacgatacccctccaatggcggtgaagggccctaacggccgcgatccacttcttgaagtatacgatgttcctcccagtgtcgaaaaaggcttgcctccctcaaaccatcatgcagtgtacgacgtgccccccagcgtcagcaaagatgtcccagacggaccccttctgcgggaggagacctatgatgtccctccagccttcgcaaaagccaagccttttgatcccgctagaaccccccttgtgctggccgcgccaccacctgacagtccacctgccgaagacgtctacgatgtaccccctccagccccagacctatacgacgtcccgccagggttgcgaaggccagggcctggcaccctgtacgatgtacctcgcgagcgggtgctgccacctgaggtcgccgatggcggagtcgtcgactcaggggtttacgcagtgcctccacccgccgagagggaagcgcccgcagaaggcaagaggctatcggcatcaagcacagggagcacccggtcatcacagagcgccagcagcctcgaagtcgctgggcctggaagagaacccctggaactggaagtggccgttgaggctctcgctcgactccagcagggggtcagcgccaccgtggcccacctgctcgacctcgctggatcagccggcgccaccgggagttggagatcccccagtgaaccacaggagcccctcgtgcaggatcttcaggctgccgtagccgctgtccagagcgccgtccacgaactcctcgaatttgcccgtagtgcagttggcaatgccgcccacacatctgaccgggcgctccatgcaaaactgagtcggcagctccagaaaatggaggacgtccaccagaccttggtggcacacggacaggctctcgatgctgggcgtggagggtccggcgctacactagaagatttggatcgccttgttgcctgctcacgagctgtccccgaggatgccaaacaactagcctcgttcctgcatggcaacgcttcactactcttcagacggacaaaagccaccgccccaggacccgaaggcggcgggacgctgcatcccaacccgactgacaaaacctcctctatccagtccaggccgctccccagcccccctaaattcacgagtcaggacagccctgatggccagtatgaaaactccgagggagggtggatggaggattacgactacgttcatctgcaggggaaggaggaattcgagaaaacgcagaaggaactactggagaaaggaagtattacacgtcagggcaaaagtcagcttgaactccagcagcttaaacagtttgaaaggcttgaacaggaagtgtctagacccatcgaccatgacctcgctaactggaccccagcacagcccttggctccaggacggaccggaggacttggccccagcgaccggcagttgttattgttttacctcgaacagtgcgaggcaaatctgacaaccctcacgaatgccgtggacgcgttcttcaccgccgtggccaccaatcagccgcccaaaatcttcgtggcccactccaagtttgtcatcctgtccgcgcataagctggttttcattggtgatactctgtcaaggcaagcgaaggcggcagacgtgcgatctcaagttacccattacagtaacctactgtgcgatcttcttaggggtatagtcgcaactactaaagctgccgctttgcaatacccgtctccatcagccgctcaggacatggtggagagagtcaaggagctcggccactctacccaacagtttcggcgagttctcgggcagcttgcagccgcttag

SEQ ID NO: 66757 - DNA, 2607 bp, Artificial Sequence
  derived and/or modified sequence
atggagaatgtgctggccaaggccctgtatgacaacgtggccgagagcccagatgagctgtccttcaggaagggggacatcatgacagtgctggagcaggacacccagggcctggatggctggtggctgtgcagcctgcacggccggcagggcatcgtgcccggcaaccggctgaagatcctggtgggcatgtatgacaagaagccagctggccctggccctggccccccagccaccccagcccagccccagcccggcctgcacgccccagcccccccagccagccagtacacccccatgctgcccaacacctaccagccccagccagattctgtgtacctggtgcccacccccagcaaggcccagcagggcctgtaccaggtgcccggccccagcccccagttccagagccccccagccaagcagaccagcaccttcagcaagcagaccccccaccaccccttccccagccctgccacagacctgtaccaggtgcccccaggccctgggggccctgcccaggacatctaccaggtgccccccagcgctggcatgggccatgacatctaccaggtgcccccatccatggacaccaggtcctgggagggcaccaagcccccagccaaggtggtggtgcccaccagggtgggccagggctacgtgtatgaggccgcccagcctgagcaggatgaatatgacatccccaggcacctgctggcccctggcccccaggacatctatgatgtgccccctgtgcggggcctgctgcccagccagtatggccaggaggtgtatgacaccccacccatggctgtgaagggccccaacggccgggaccccctgctggaggtgtatgatgtgccccccagcgtggagaagggcctgccccccagcaaccaccacgctgtgtatgatgtgcccccatctgtgtccaaggatgtgcctgatggccccctgctgcgggaggagacctatgatgtgcccccagcctttgccaaggccaagccctttgatcctgcccggacccccctggtgctggccgcccctcctccagacagccccccagcagaagatgtgtatgatgtgcccccaccagccccagacctgtatgatgtgcccccaggcctgcggcggcccggccctggcaccctgtatgatgtgccccgggagcgggtgctgcccccagaggtggctgatggaggagtggtggacagcggcgtgtatgctgtgcccccacctgctgagcgggaggccccagctgagggcaagaggctgagcgccagcagcacaggcagcaccaggagcagccagagcgccagcagcctggaggtggccggccctggccgggagcccctggagctggaggtggccgtggaggccctggcccggctgcagcagggcgtgtctgccaccgtggcccacctgctggacctggccggcagcgctggggccaccggctcctggaggagccccagcgagccccaggagcccctggtgcaggacctgcaggccgctgtggccgctgtgcagagcgctgtgcatgagctgctggagtttgcccggtctgctgtgggcaatgctgcccacaccagtgaccgggccctgcacgccaagctgagccggcagctgcagaagatggaggatgtgcaccagaccctggtggcccacggccaggccctggatgctggccggggcggcagcggggccaccctggaggacctggaccggctggtggcctgcagcagagctgtgcctgaagatgccaagcagctggccagcttcctgcacggcaatgccagcctgctcttccggaggaccaaggccacagcccctggccctgagggcggcggcaccctgcaccccaaccccacagacaagaccagcagcatccagagccggcccctgcccagcccccccaagttcaccagccaggacagcccagatggccagtatgagaacagcgagggcggctggatggaggactatgactatgtgcacctgcagggcaaggaggagtttgagaagacccagaaggagctgctggagaagggcagcatcacccggcagggcaagagccagctggagctgcagcagctgaagcagtttgagcggctggagcaggaggtgtcccggcccatcgaccatgacctggccaactggaccccagcccagcccctggcccctggccgcactggaggcctgggccccagcgaccggcagctgctgctcttctacctggagcagtgtgaggccaacctgaccaccctgaccaatgctgtggatgccttcttcaccgctgtggccaccaaccagccccccaagatctttgtggcccacagcaagtttgtgatcctgagcgcccacaagctggtgttcatcggggacaccctgagccggcaggccaaggccgcagatgtgcgcagccaggtgacccactacagcaacctgctgtgtgacctgctgcggggcatcgtggccaccaccaaggctgctgccctgcagtaccccagccccagcgctgcccaggacatggtggagcgggtgaaggagctgggccacagcacccagcagttcagaagagtgctgggccagctggccgccgcctag

SEQ ID NO: 66758 - DNA, 2607 bp, Artificial Sequence
  derived and/or modified sequence
atggagaacgtgctggccaaggccctgtacgacaacgtggccgagtccccagatgaattgagctttaggaaaggcgacattatgactgttctggagcaagacacacaggggcttgatgggtggtggctttgcagcttacatggtaggcagggaattgtgcccggcaaccggttgaagattttagtgggaatgtacgacaagaaaccggctggcccggggcccggcccacccgctactcctgctcagccccagcctgggttacacgcgcctgcacctccagcaagtcagtatacacccatgctccctaatacataccaaccgcaacctgacagcgtgtacctggttcctacacccagcaaagcccagcaaggtctgtatcaggtccctggaccctctcctcagttccagtctccaccagctaaacagacaagcacattctccaagcagactccccaccaccccttcccaagcccagccacagacctatatcaggtgccccctgggcccggcggacccgcccaggatatttaccaggtgcctccgtcagcgggcatgggccacgacatataccaggtgccaccttcgatggacaccaggtcctgggagggcaccaagccacctgcaaaggtggtcgtccccacacgagtcggtcaggggtatgtgtatgaagccgctcagcctgaacaggatgaatacgatattcccaggcacctgctcgcaccgggccctcaagatatctacgacgtacctccagtacgtgggctccttccaagtcagtatggacaggaagtgtatgacacacctccaatggccgttaaaggccccaatggaagagatccattactcgaggtctacgatgtgcctccctctgtggaaaaaggtttgcctccctccaatcatcatgctgtctacgatgttccaccctctgtcagtaaagacgtgccagatggtccactactgagggaagaaacatacgatgtcccccctgcatttgcaaaagcaaagccctttgacccagcccggacccctctggtgctggccgctccaccccctgactccccacccgcagaggatgtttatgacgtcccgccgcccgcaccagacctctatgacgttcctccaggcctgagacggccagggcctgggaccttgtacgacgtgcctagagagcgtgtactacctcctgaagtggcggacggcggcgtggttgactctggggtgtacgctgtgccccctcctgccgagcgggaagccccagcagaggggaagagactatccgcctcatctaccggatcaactaggtcatcgcagtcagcttccagcctggaggtcgctggacccggcagagagcccctggaactggaagtggcggtggaggccctggctcgcctgcagcagggagtgtccgccaccgtcgcccatctcctggatttggctgggtctgcaggcgcaactggctcatggcggtcaccctcggagcctcaggagccactggtgcaagacctgcaggccgctgtggctgctgtgcagtccgccgtccacgagctcctggaattcgcacgctccgcggtgggcaatgccgcccacactagcgaccgggctctgcatgctaaactatcaagacagctgcagaaaatggaggacgtgcaccagaccctcgtggctcacgggcaagcactggatgctggaagaggaggaagtggtgcaactctcgaagatttggatcgcctggtggcatgtagccgggccgtgcctgaagatgcgaagcaactcgcctcctttctgcacggcaacgcctcattgctttttcgtagaaccaaggcgaccgcccctggacccgagggcgggggtacactgcatccaaacccaaccgataaaacttcctcgattcagtcacggccccttccgtctccacctaaattcacttcccaggatagtcccgacgggcagtacgaaaacagtgagggcggatggatggaggattacgattacgttcatctccaaggcaaggaagaattcgaaaagacacagaaggaacttctggagaagggctcaatcactcggcagggaaagagccagttagagttacagcagctgaaacagtttgaacggctggaacaggaggtgtcccggccaatcgaccacgatttagccaattggacacctgcgcagcccctggcccctgggcggaccggggggttagggccctccgacagacaactcttgctattctatttagagcagtgcgaagcaaacctaacaacactgaccaatgccgtggacgcattcttcacagccgttgccacaaatcagccacccaaaatctttgtggcacactcaaagtttgttattctctctgcccacaagctggtgttcatcggggataccctctcccggcaagcaaaagctgccgacgtccggtcgcaggtgacccattatagcaaccttctttgcgacctacttcggggaatcgtggcaaccacaaaagccgccgcccttcaatacccaagcccgtccgcagcgcaggatatggtcgagagggtgaaggaactggggcatagcacacagcaattcagacgggtgctgggacaacttgccgcagcttag

SEQ ID NO: 66759 - DNA, 2607 bp, Artificial Sequence
  derived and/or modified sequence
atggagaacgttcttgccaaggccctctacgacaacgtggcagagtcaccagatgagctctcttttagaaaaggggacatcatgaccgtactcgaacaggatacgcaagggctggatggatggtggctatgcagtttgcacgggagacaggggatcgtaccaggcaaccgcctgaaaattctggtgggaatgtacgataaaaaaccagccggtccaggtccgggacctccggctactcctgcgcagccacagccaggcctgcacgctcctgcacctcccgcaagtcagtataccccgatgcttccaaacacttaccagccccagcctgactctgtctatcttgtgccaactccatcaaaagcccagcaggggctgtaccaggtgcccggtccctctcctcaattccaatccccgcctgcaaaacaaacaagcacatttagcaagcagactccccatcacccatttccatcaccagccactgatctgtaccaggttccgcctggtccaggtggcccagctcaggacatttaccaggtgccaccatctgctggtatggggcacgacatctatcaggtgcctccaagcatggacacgaggagctgggaggggactaagccacccgcaaaagtagtggtacctacgcgagtggggcaaggctacgtgtatgaggccgctcagcctgagcaagacgagtacgacatacctaggcacctgttagcacctggtccccaggatatctacgacgtccctcccgtaaggggcctgttacccagccagtatggtcaagaggtgtacgacacaccacctatggccgtcaagggcccaaacggcagggatccactgctggaggtgtacgatgtcccgccttccgtggagaagggattgccgccatcaaaccatcatgcagtttatgacgtgcctccatcagtgtccaaggacgtacccgacggaccacttttgcgagaggagacatatgatgttccacccgcatttgccaaagccaagcctttcgaccccgctcgtacgcctctcgtgctagctgctcctccccctgatagcccacccgctgaggatgtgtatgatgtccctccacccgctccagacctttatgatgtccctccaggcctgaggaggccaggacccggaactttatatgatgtcccgagggagcgggtgctgccaccagaggtagccgacggcggagtcgtcgatagcggcgtttatgccgttccgcctcccgctgagcgcgaagccccagctgagggaaaacggctgagtgcctcctctactgggtctactcggagtagtcagtctgcaagcagtctggaagttgccggtccagggagggaaccgttggagctggaagtcgctgtcgaagccctcgcacgcctgcagcagggagtcagtgcaaccgttgcccacctcctggaccttgccggttccgcaggagcaacgggatcatggcgaagcccctccgagccacaggagcctttagttcaagatctccaagccgcagtcgccgcagtgcagtctgctgtgcatgagctcctggagttcgcacgctcggctgtcggaaacgcagcccacacatctgacagagccctgcacgctaagctctctagacagctgcagaaaatggaagatgtccaccagacactcgttgcccacgggcaagctcttgacgccggacggggaggatctggagctaccctcgaggatctggataggttagtggcctgttcgcgagccgtccccgaagatgcaaagcagctggcttcattcctacatggcaatgcctccctgctgttccgaaggactaaagcaaccgccccagggcctgagggtggcggtactctccacccaaaccctaccgacaagacgtccagcatccagtccaggcccctgccctcgccgcctaagttcaccagccaggactccccagatggtcagtacgagaactctgagggcggttggatggaggactacgattacgttcacctgcaggggaaagaagagttcgagaagactcagaaagaacttcttgagaagggctcaatcacaagacaggggaagtcccagttggagctgcagcagctgaagcagtttgagcggcttgaacaggaggtgtcgagacctattgatcatgacctggcaaattggacccccgcacagccgttggctccgggaagaactggaggactcggcccaagtgacaggcaactactgctgttctacctggagcagtgcgaagcgaaccttacgactttaacgaacgctgtagacgcattcttcactgccgtcgctacaaaccagccaccaaaaattttcgttgctcatagcaaatttgtgatcctgagcgcccataagctcgtgttcattggagacacgctcagtagacaagcgaaggctgccgatgtgcgcagtcaggttacccactatagcaatctcctgtgtgatctgttacgcggaatcgttgctaccactaaagcagctgccctccagtatccatctccttcagccgcacaggacatggtcgaaagagtgaaggaattgggtcattccacccagcagtttaggagagtgcttggacagctggccgctgcatag

SEQ ID NO: 66760 - DNA, 3354 bp, Artificial Sequence
  derived and/or modified sequence
agtgtttcccaagtgcctgctatgtgcgaggctctgtgctggggcgggtgcatgtgtgcgttgggggcgtggacaggaggggtgggaaaggcctgtgacatttcctctggtggtttccacgaacccaggcgtcacccctcggtggagataaagtggagccacccagctccaccgtgtctcagcctggggtcggcctctgctgcttctggactcagtgaccctgggctgtcagggagcttctgagccttggttttcctgtctagtaagatggagaacgtgctggccaaagcgctctatgacaatgtggccgagtccccggatgagctctccttccgcaagggtgacatcatgacggtgctggagcaggacacgcagggcctggacggctggtggctctgctcgctgcatgggcgccagggcatcgtgcctgggaaccgcctcaagatcttggtgggcatgtatgataagaagccagcagggcctggccccggccctcccgccaccccggcccagcctcagcctggcctccatgccccagcgcctccggcctcccagtacacgcccatgctccccaacacctaccagccccagccagacagcgtctacctggtgcccactcccagcaaggctcagcaaggcctctaccaagtcccgggtcccagccctcagttccagtctcccccagccaagcagacatccaccttctcgaagcagacaccccatcacccgtttcccagcccggccacagacctgtaccaggtgcccccagggcctggaggccctgcccaggatatttaccaggtgccaccttctgccgggatggggcatgacatctaccaggtccccccgtccatggacacacgcagctgggagggcacgaagcccccggcaaaggtggtggtgcccacccgcgtggggcagggctatgtatacgaggccgcccagccggagcaggacgagtacgacatcccgcgacacctgctggccccggggccacaggacatctatgatgtgcccccggttcgggggctgcttcccagccagtatggccaggaggtgtatgacacaccccccatggctgtcaagggtcccaatggccgagacccgttgctggaggtgtatgacgtgccccccagtgtggagaagggcctgccaccgtccaaccaccacgcagtctacgacgttcctccatcggtgagcaaggatgtgcccgatggcccactgctgcgtgaggagacctacgatgtgccccccgccttcgccaaggccaagccctttgacccggcccgcaccccactggtactggctgcgccccctccagactccccgccggccgaggacgtgtatgacgtgccgcccccggctcctgacctctacgacgtgccccctggcttgcggcggcctggcccgggcaccctgtacgatgtgccccgtgaacgggtgcttcctcctgaggtggctgatggtggcgtggtcgacagtggtgtgtatgcggtgcctcccccagctgaacgtgaagccccggcagagggcaagcgcctgtcggcctccagcaccggcagcacacgcagcagccagtctgcgtcctccttggaggtggcagggccgggccgggaacccctggagctggaagttgctgtggaggccctggcacggctgcagcagggtgtgagcgccaccgttgcccaccttctggacctggcaggcagcgccggtgcgactgggagctggcgtagcccctctgagccacaggagccgctggtgcaggacctgcaggctgctgtggccgctgtccagagtgccgtccacgagctgttggagtttgcccgcagcgcggtgggcaatgctgcccacacatctgaccgtgccctgcatgccaagcttagccggcagctgcagaagatggaggacgtgcaccagacgctggtggcacatggtcaggccctcgacgctggccggggaggctctggagccacccttgaggacctggaccggctggtggcctgctcgcgggctgtgcccgaggacgccaagcagctggcctccttcctgcacggcaatgcctcactgctcttcagacggaccaaggccactgccccggggcctgaggggggtggcaccctgcaccccaaccccactgacaagaccagcagcatccagtcacgacccctgccctcaccccctaagttcacctcccaggactcgccagatgggcagtacgagaacagcgaggggggctggatggaggactatgactacgtccacctacaggggaaggaggagtttgagaagacccagaaggagctgctggaaaagggcagcatcacgcggcagggcaagagccagctggagttgcagcagctgaagcagtttgaacgactggaacaggaggtgtcacggcccatagaccacgacctggccaactggacgccagcccaacccctggccccggggcgaacaggcggcctggggccctcggaccggcagctgctgctcttctacctggagcagtgtgaggccaacctgaccacactgaccaacgccgtggacgccttctttaccgccgtggccaccaaccagccgcccaagatctttgtggcgcacagcaagttcgtcatcctcagcgcccacaagctggtgttcatcggggacacactgtcacggcaggccaaggctgctgacgtgcgcagccaggtgacccactacagcaacctgctgtgcgacctcctgcgcggcatcgtggccaccaccaaggccgctgccttgcagtacccatcgccttccgcggcccaggacatggtggagagggtcaaggagctgggccacagcacccagcagttccgccgcgtcctaggccagctggcagccgcctgagggtggtgaccccaggagggaggcaggggaggggtgcggcggtcccagctccctggctcccatgtcaagagtcgctgtgccacaggcttagggacaggaccccagctctgcgtcggtcctggtgccctggatgcccaggaatctgtatatatttatggccgggcagggtgtggggccatgcctcctcaggagccgaagcccaggggccggccagtggccttccccagcatgcaccacgggcccgggttgggtcaccagacggggctggagtgtgagggtcctgcagcctgcaggacctcgtgccaccccgagggctgagcctggtcccacgagggtgccgtgtcccctgacagggccagtgcagtttggtgtgtcctccgccttaccaggagaagaacctgaagaactatttttcgttattggttttccaatcatttgactaagagtctccatttaaataaagtttttaaaaggaagagc

SEQ ID NO: 66761 - DNA, 2607 bp, Artificial Sequence
  derived and/or modified sequence
atggagaacgtgctggccaaggccctgtacgacaacgtggccgagagccccgacgagctgagcttcagaaagggcgacatcatgaccgtgctggagcaggacacccagggcctggacggctggtggctgtgcagcctgcacggcagacagggcatcgtgcccggcaacagactgaagatcctggtgggcatgtacgacaagaagcccgccggccccggccccggcccccccgccacccccgcccagccccagcccggcctgcacgcccccgccccccccgccagccagtacacccccatgctgcccaacacctaccagccccagcccgacagcgtgtacctggtgcccacccccagcaaggcccagcagggcctgtaccaggtgcccggccccagcccccagttccagagcccccccgccaagcagaccagcaccttcagcaagcagaccccccaccaccccttccccagccccgccaccgacctgtaccaggtgccccccggccccggcggccccgcccaggacatctaccaggtgccccccagcgccggcatgggccacgacatctaccaggtgccccccagcatggacaccagaagctgggagggcaccaagccccccgccaaggtggtggtgcccaccagagtgggccagggctacgtgtacgaggccgcccagcccgagcaggacgagtacgacatccccagacacctgctggcccccggcccccaggacatctacgacgtgccccccgtgagaggcctgctgcccagccagtacggccaggaggtgtacgacaccccccccatggccgtgaagggccccaacggcagagaccccctgctggaggtgtacgacgtgccccccagcgtggagaagggcctgccccccagcaaccaccacgccgtgtacgacgtgccccccagcgtgagcaaggacgtgcccgacggccccctgctgagagaggagacctacgacgtgccccccgccttcgccaaggccaagcccttcgaccccgccagaacccccctggtgctggccgcccccccccccgacagcccccccgccgaggacgtgtacgacgtgcccccccccgcccccgacctgtacgacgtgccccccggcctgagaagacccggccccggcaccctgtacgacgtgcccagagagagagtgctgccccccgaggtggccgacggcggcgtggtggacagcggcgtgtacgccgtgcccccccccgccgagagagaggcccccgccgagggcaagagactgagcgccagcagcaccggcagcaccagaagcagccagagcgccagcagcctggaggtggccggccccggcagagagcccctggagctggaggtggccgtggaggccctggccagactgcagcagggcgtgagcgccaccgtggcccacctgctggacctggccggcagcgccggcgccaccggcagctggagaagccccagcgagccccaggagcccctggtgcaggacctgcaggccgccgtggccgccgtgcagagcgccgtgcacgagctgctggagttcgccagaagcgccgtgggcaacgccgcccacaccagcgacagagccctgcacgccaagctgagcagacagctgcagaagatggaggacgtgcaccagaccctggtggcccacggccaggccctggacgccggcagaggcggcagcggcgccaccctggaggacctggacagactggtggcctgcagcagagccgtgcccgaggacgccaagcagctggccagcttcctgcacggcaacgccagcctgctgttcagaagaaccaaggccaccgcccccggccccgagggcggcggcaccctgcaccccaaccccaccgacaagaccagcagcatccagagcagacccctgcccagcccccccaagttcaccagccaggacagccccgacggccagtacgagaacagcgagggcggctggatggaggactacgactacgtgcacctgcagggcaaggaggagttcgagaagacccagaaggagctgctggagaagggcagcatcaccagacagggcaagagccagctggagctgcagcagctgaagcagttcgagagactggagcaggaggtgagcagacccatcgaccacgacctggccaactggacccccgcccagcccctggcccccggcagaaccggcggcctgggccccagcgacagacagctgctgctgttctacctggagcagtgcgaggccaacctgaccaccctgaccaacgccgtggacgccttcttcaccgccgtggccaccaaccagccccccaagatcttcgtggcccacagcaagttcgtgatcctgagcgcccacaagctggtgttcatcggcgacaccctgagcagacaggccaaggccgccgacgtgagaagccaggtgacccactacagcaacctgctgtgcgacctgctgagaggcatcgtggccaccaccaaggccgccgccctgcagtaccccagccccagcgccgcccaggacatggtggagagagtgaaggagctgggccacagcacccagcagttcagaagagtgctgggccagctggccgccgcctag

SEQ ID NO: 66762 - protein, 722 aa, Artificial Sequence
  derived and/or modified sequence
MQGKNVLAKALYDNVAESPDELSFRKGDIMTVLEQDTQGLDGWWLCSLHGRQGIVPGNRLKILVVVPTRVGQGYVYEAAQPEQDEYDIPRHLLAPGPQDIYDVPPVRGLLPSQYGQEVYDTPPMAVKGPNGRDPLLEVYDVPPSVEKGLPPSNHHAVYDVPPSVSKDVPDGPLLREETYDVPPAFAKAKPFDPARTPLVLAAPPPDSPPAEDVYDVPPPAPDLYDVPPGLRRPGPGTLYDVPRERVLPPEVADGGVVDSGVYAVPPPAEREAPAEGKRLSASSTGSTRSSQSASSLEVAGPGREPLELEVAVEALARLQQGVSATVAHLLDLAGSAGATGSWRSPSEPQEPLVQDLQAAVAAVQSAVHELLEFARSAVGNAAHTSDRALHAKLSRQLQKMEDVHQTLVAHGQALDAGRGGSGATLEDLDRLVACSRAVPEDAKQLASFLHGNASLLFRRTKATAPGPEGGGTLHPNPTDKTSSIQSRPLPSPPKFTSQDSPDGQYENSEGGWMEDYDYVHLQGKEEFEKTQKELLEKGSITRQGKSQLELQQLKQFERLEQEVSRPIDHDLANWTPAQPLAPGRTGGLGPSDRQLLLFYLEQCEANLTTLTNAVDAFFTAVATNQPPKIFVAHSKFVILSAHKLVFIGDTLSRQAKAADVRSQVTHYSNLLCDLLRGIVATTKAAALQYPSPSAAQDMVERVKELGHSTQQFRRVLGQLAAA

SEQ ID NO: 66763 - DNA, 2169 bp, Artificial Sequence
  derived and/or modified sequence
atgcagggaaagaacgtcctggcgaaagctctgtacgacaacgttgccgagagccccgatgagctttccttccgaaagggcgatatcatgaccgtactggaacaggatacccaaggtctcgatggatggtggttgtgcagcctccatggacggcaagggatcgttccaggtaacaggctcaagatcttagtcgtggtgccaactagggtggggcagggctatgtttacgaagctgctcaaccggaacaagatgagtatgacatcccaagacacttactggcccctggaccacaggatatttatgatgtgccccccgtgcggggtctgttgccgagtcagtacgggcaagaggtttacgataccccaccgatggctgttaagggaccaaatgggagagaccccctcctcgaagtttacgacgtgccacccagcgtggagaaggggctgcccccctcgaatcaccacgctgtttatgatgtccctccttcagtgagtaaagacgtccctgatggccctctcttacgggaagagacttacgacgtccctcccgcgtttgccaaagcaaagccgttcgacccagccagaacacctctcgtgctcgcggcgcctccaccagacagcccaccagctgaggacgtatacgacgtgcctccaccggccccagatttatatgatgtgccccccggcctgaggaggcccggacccggtactttgtatgatgtcccaagggaacgggtgctaccacctgaggttgccgacggaggggttgtggactctggggtgtatgcggtgccaccccctgccgagcgcgaagccccagctgaaggtaaacgactgagcgctagctcgaccggtagcaccaggagtagtcaaagtgcgagttctctggaagtagctggacctgggcgtgagcccctggaactagaggttgccgtggaagccctggcacgtctgcaacaaggtgtgtcagctactgttgcccacctgctggatctagctgggtcagctggcgcaacggggtcgtggcgctcaccatccgaaccacaggagcctctagttcaagatctgcaggctgccgttgccgccgtccagtccgcggttcacgagctcttggaattcgcccgtagcgcggtgggtaacgcagctcatactagcgaccgtgccttgcacgctaaactaagcaggcagctccagaaaatggaagacgtacaccagaccctggtggctcacggccaagcgctcgacgctggccgcgggggttctggggcgaccctggaagacttagataggctggttgcctgtagcagggcagtgcccgaagatgccaaacaactggcatcctttttgcatgggaacgcgagtctgttatttcgccgcacgaaagccactgcgccaggtccggagggtggtggcacgctgcacccgaatccaactgataaaacatcgtcaatacagtcacggcctttaccctcaccccctaaattcacgagccaggattcgccagatggacagtacgagaactccgagggcggatggatggaggattatgattatgttcaccttcaaggaaaggaagaatttgagaaaacccagaaagaattactcgagaaaggctccattactcgccagggcaaaagccaactcgagcttcaacaactgaagcagttcgaaagactcgagcaggaagtctctcgccccattgatcacgacctggctaactggacaccagctcagcccttagcccccggacgcacaggcgggctgggccctagcgataggcaactgttgctgttttaccttgaacagtgtgaggctaatctaaccaccctaactaacgctgtggacgcctttttcactgcagtggcaactaaccagccccctaaaatttttgtggctcattctaagtttgtgattctctctgctcataaactggttttcatcggggacacactgtcccgccaggccaaagccgccgatgttaggagtcaggtgacccactactccaacctgctgtgcgatcttcttagaggtatagttgccaccactaaagccgccgccctgcagtaccccagccctagtgccgcacaagatatggttgaaagggtcaaggagctgggccactcgacccaacaattccggcgggtgttgggtcagctggccgccgcttag

SEQ ID NO: 66764 - DNA, 2169 bp, Artificial Sequence
  derived and/or modified sequence
atgcagggcaagaatgtgctggccaaggccctgtatgacaacgtggccgagagcccagatgagctgtccttcaggaagggggacatcatgacagtgctggagcaggacacccagggcctggatggctggtggctgtgcagcctgcacggccggcagggcatcgtgcccggcaaccggctgaagatcctggtggtggtgcccaccagggtgggccagggctacgtgtatgaggccgcccagcctgagcaggatgaatatgacatccccaggcacctgctggcccctggcccccaggacatctatgatgtgccccctgtgcggggcctgctgcccagccagtatggccaggaggtgtatgacaccccacccatggctgtgaagggccccaacggccgggaccccctgctggaggtgtatgatgtgccccccagcgtggagaagggcctgccccccagcaaccaccacgctgtgtatgatgtgcccccatctgtgtccaaggatgtgcctgatggccccctgctgcgggaggagacctatgatgtgcccccagcctttgccaaggccaagccctttgatcctgcccggacccccctggtgctggccgcccctcctccagacagccccccagcagaagatgtgtatgatgtgcccccaccagccccagacctgtatgatgtgcccccaggcctgcggcggcccggccctggcaccctgtatgatgtgccccgggagcgggtgctgcccccagaggtggctgatggaggagtggtggacagcggcgtgtatgctgtgcccccacctgctgagcgggaggccccagctgagggcaagaggctgagcgccagcagcacaggcagcaccaggagcagccagagcgccagcagcctggaggtggccggccctggccgggagcccctggagctggaggtggccgtggaggccctggcccggctgcagcagggcgtgtctgccaccgtggcccacctgctggacctggccggcagcgctggggccaccggctcctggaggagccccagcgagccccaggagcccctggtgcaggacctgcaggccgctgtggccgctgtgcagagcgctgtgcatgagctgctggagtttgcccggtctgctgtgggcaatgctgcccacaccagtgaccgggccctgcacgccaagctgagccggcagctgcagaagatggaggatgtgcaccagaccctggtggcccacggccaggccctggatgctggccggggcggcagcggggccaccctggaggacctggaccggctggtggcctgcagcagagctgtgcctgaagatgccaagcagctggccagcttcctgcacggcaatgccagcctgctcttccggaggaccaaggccacagcccctggccctgagggcggcggcaccctgcaccccaaccccacagacaagaccagcagcatccagagccggcccctgcccagcccccccaagttcaccagccaggacagcccagatggccagtatgagaacagcgagggcggctggatggaggactatgactatgtgcacctgcagggcaaggaggagtttgagaagacccagaaggagctgctggagaagggcagcatcacccggcagggcaagagccagctggagctgcagcagctgaagcagtttgagcggctggagcaggaggtgtcccggcccatcgaccatgacctggccaactggaccccagcccagcccctggcccctggccgcactggaggcctgggccccagcgaccggcagctgctgctcttctacctggagcagtgtgaggccaacctgaccaccctgaccaatgctgtggatgccttcttcaccgctgtggccaccaaccagccccccaagatctttgtggcccacagcaagtttgtgatcctgagcgcccacaagctggtgttcatcggggacaccctgagccggcaggccaaggccgcagatgtgcgcagccaggtgacccactacagcaacctgctgtgtgacctgctgcggggcatcgtggccaccaccaaggctgctgccctgcagtaccccagccccagcgctgcccaggacatggtggagcgggtgaaggagctgggccacagcacccagcagttcagaagagtgctgggccagctggccgccgcctag

SEQ ID NO: 66765 - DNA, 2169 bp, Artificial Sequence
  derived and/or modified sequence
atgcagggcaagaacgtgctggccaaggccctgtacgacaacgtggcagaatcacccgacgaactcagcttccgcaaaggcgatattatgaccgtgctggagcaggatactcagggcctagatggctggtggctctgtagccttcatggccgacagggcattgtcccagggaatagactcaaaatcctggtcgtggttcccacccgtgtggggcaggggtacgtttatgaagccgcccagccagagcaggacgagtatgacattccacgccatctcctggctcccgggccacaggacatttacgacgtgcctcccgttcgcggcctcctgccgagtcagtatggccaagaagtgtacgatacacctcccatggccgtgaaaggaccgaacggaagagaccccttgctcgaggtctatgacgtaccacctagtgtcgaaaaagggctgcccccctcgaaccatcacgccgtgtatgacgtgccgccctccgtgtctaaggatgtgcctgacgggccgctactgagggaagagacctacgatgtcccaccagcctttgcaaaagcaaagccttttgatcctgccagaactcccctggtgctggcggcccccccccctgactcccctcctgcggaggatgtgtacgatgtccctccacccgcaccagatctgtatgacgtgcctcccggactcaggagaccagggccaggaacactctacgatgttcctcgagaacgggttttaccccccgaggtggcagacggcggagtcgtggactccggggtctatgccgtgccccctccagctgagagagaggcccctgctgaagggaaaagactgagtgcgtccagtacaggatcgacgcgatccagtcaaagcgcctctagcctggaagtggccggcccaggcagagagcccttggaactggaagtcgctgtggaggctctggccaggctccagcagggagtttctgctacagtggcccacctgctagacctggccggttcagctggagccaccggttcttggagaagccctagtgaaccccaggagccactggtccaagacctgcaagctgcagtggctgcggtgcaatctgccgttcatgagttattagagttcgcacggtctgccgtcggtaacgctgcccacacttccgacagagccctgcatgccaagcttagtcgccagttgcaaaaaatggaagacgtgcatcagactctggtggctcacgggcaagcactagatgccggtcgcggtgggagcggcgctacccttgaagacctggatcgcctcgtggcttgcagcagagccgtccctgaagatgctaagcaacttgctagttttctgcacggcaatgcatctctgctattcagacgaacaaaagctactgccccaggaccggaggggggcgggacactccacccaaatccaacagacaagacttcttctattcagagccgaccacttcccagcccccccaagtttacatctcaggacagccccgatggtcagtacgaaaatagtgagggcggttggatggaagattatgattacgtgcatctgcagggaaaagaggagttcgagaaaacccaaaaagagctccttgagaagggctctatcacaagacagggcaaaagtcagcttgaactgcagcaactgaagcagttcgaacggttggagcaagaggtctctcgccctattgatcacgatttagccaattggacccctgcgcaacccttggcccctggacggactggcgggctgggcccctctgatcgtcagttactgcttttctacctggagcagtgcgaggctaacttgacaaccctgactaacgcggtggacgctttctttacggcagttgcgaccaaccaaccccctaagatcttcgtcgctcatagcaagtttgtaatcttgtctgcacataaactggtcttcatcggtgatacactctcaaggcaggcaaaggccgccgatgtgcgcagccaggttacacactatagcaacctgttgtgtgatctcctcagaggcatcgtggccaccactaaagccgctgcactgcaatacccgagtccgtccgctgctcaggatatggtggaacgggttaaagagttggggcacagtacgcagcagttcagaagagtcctgggccaactcgcggccgcttag

SEQ ID NO: 66766 - DNA, 2169 bp, Artificial Sequence
  derived and/or modified sequence
atgcagggtaaaaatgtcttggccaaggctctgtacgacaatgtcgctgaatcaccagatgagctgagttttaggaaaggggacattatgaccgttctcgaacaagatactcaagggctagacgggtggtggttgtgcagtcttcacggcagacagggtatcgtgcccggaaatcggctgaagatactggtggttgtgcctacccgggtcggacagggctatgtatatgaagctgctcagcctgaacaggatgaatacgacattcctcggcacttactcgcgccaggtccccaggatatttatgacgtacctcctgtgcgaggcctgctcccctcacagtacggccaggaggtctatgacacccctcccatggccgtaaaaggccctaatggcagagatccgctcttagaggtgtatgatgtacccccaagtgttgagaaaggactccccccttcaaatcaccacgccgtgtatgacgtgcctccaagcgtgagcaaagatgtgccagacggccctctcctcagggaagagacctacgatgtgccccctgcctttgcgaaagctaaaccattcgacccggctaggactcctttggtgctggcagctccacccccagattctccaccggctgaagacgtctacgacgtgcctcctcctgctcctgatctgtatgatgtaccaccagggttacgaaggccaggacccggaacactttacgatgtgccacgagagcgtgttttaccacccgaagtggcggatgggggtgttgtcgacagcggcgtatatgcagtcccccctccagcagaaagagaagcaccagccgaaggaaagcgcttgagtgcgagctcaacaggatccacccgctctagccagtctgcatcctccttggaggtcgctggacccggtcgggagcctttggaattggaggtggccgtcgaggcgctggccagactccagcagggtgtgtcagctacggtggctcacttgctggatctggccggatctgccggagccacaggatcatggcgatccccaagcgaaccccaggagccattggtgcaagacctgcaggcggctgttgcggctgtgcagtctgcagtccacgagttgctggagttcgcacgctctgctgtcggcaatgccgcacacacaagtgacagagcgctgcatgccaagctctctaggcagctgcagaaaatggaggacgttcaccaaacgctggttgcgcacggacaggccttggatgctgggagaggagggtcaggtgcaacgctcgaagacttagatcgacttgttgcttgcagccgtgcagtgcctgaagatgcaaaacagttagcctccttcctgcacggcaatgcatccctgctctttcgcaggaccaaagcgaccgctcctggcccagagggagggggtacacttcacccaaatccgacggacaagacttcttccatacagtcccgccctttaccctctccccctaagtttaccagccaggatagccctgatggtcaatatgagaactccgaagggggttggatggaggactacgactatgtgcatttgcaaggaaaggaagaattcgagaaaactcagaaggagttgcttgagaaaggcagtatcaccaggcagggcaagtcacaactggagctgcaacaactcaaacagtttgagcgactggaacaggaagtgagccggccaatcgatcacgatctggcaaattggacccccgctcagcctctggctccaggcagaacaggaggccttggcccatcggataggcagttactgctattttacctggagcaatgtgaggccaacctcacaaccctgacaaatgccgtcgacgctttcttcacagcagtggcaaccaatcagccccctaagatttttgtagctcatagcaaattcgtaatcctgtctgcccataaattggtctttattggggacactctgagcagacaggccaaggcggctgatgtgcgaagccaggtgacgcactactctaatctgctgtgtgatctactcaggggcattgttgccactacaaaggcagccgctttacagtatcccagccccagtgccgctcaggacatggtggagcgagtgaaggagctgggccattccacccagcagttccggcgagtgcttggccagcttgcagccgcatag

SEQ ID NO: 66767 - DNA, 2925 bp, Artificial Sequence
  derived and/or modified sequence
aggagccggaaagcgccgggacccctcgcggggcctctgagcggcgcgggcggacccgagcccccagcccgctggcgccgctgcccgccaggccccgggggcggcggccaagatgtccgtgccttgccgctctcctaccccatgtcgctgaagcagatgagttggagcaggactcaggagggtactaggcccaggttttaggctgaacctaggaatgagtaatgagaggaggcagatcagctggaggaccagcccgagtccccagatgtcggcacaatgcaggggaagaacgtgctggccaaagcgctctatgacaatgtggccgagtccccggatgagctctccttccgcaagggtgacatcatgacggtgctggagcaggacacgcagggcctggacggctggtggctctgctcgctgcatgggcgccagggcatcgtgcctgggaaccgcctcaagatcttggtggtggtgcccacccgcgtggggcagggctatgtatacgaggccgcccagccggagcaggacgagtacgacatcccgcgacacctgctggccccggggccacaggacatctatgatgtgcccccggttcgggggctgcttcccagccagtatggccaggaggtgtatgacacaccccccatggctgtcaagggtcccaatggccgagacccgttgctggaggtgtatgacgtgccccccagtgtggagaagggcctgccaccgtccaaccaccacgcagtctacgacgttcctccatcggtgagcaaggatgtgcccgatggcccactgctgcgtgaggagacctacgatgtgccccccgccttcgccaaggccaagccctttgacccggcccgcaccccactggtactggctgcgccccctccagactccccgccggccgaggacgtgtatgacgtgccgcccccggctcctgacctctacgacgtgccccctggcttgcggcggcctggcccgggcaccctgtacgatgtgccccgtgaacgggtgcttcctcctgaggtggctgatggtggcgtggtcgacagtggtgtgtatgcggtgcctcccccagctgaacgtgaagccccggcagagggcaagcgcctgtcggcctccagcaccggcagcacacgcagcagccagtctgcgtcctccttggaggtggcagggccgggccgggaacccctggagctggaagttgctgtggaggccctggcacggctgcagcagggtgtgagcgccaccgttgcccaccttctggacctggcaggcagcgccggtgcgactgggagctggcgtagcccctctgagccacaggagccgctggtgcaggacctgcaggctgctgtggccgctgtccagagtgccgtccacgagctgttggagtttgcccgcagcgcggtgggcaatgctgcccacacatctgaccgtgccctgcatgccaagcttagccggcagctgcagaagatggaggacgtgcaccagacgctggtggcacatggtcaggccctcgacgctggccggggaggctctggagccacccttgaggacctggaccggctggtggcctgctcgcgggctgtgcccgaggacgccaagcagctggcctccttcctgcacggcaatgcctcactgctcttcagacggaccaaggccactgccccggggcctgaggggggtggcaccctgcaccccaaccccactgacaagaccagcagcatccagtcacgacccctgccctcaccccctaagttcacctcccaggactcgccagatgggcagtacgagaacagcgaggggggctggatggaggactatgactacgtccacctacaggggaaggaggagtttgagaagacccagaaggagctgctggaaaagggcagcatcacgcggcagggcaagagccagctggagttgcagcagctgaagcagtttgaacgactggaacaggaggtgtcacggcccatagaccacgacctggccaactggacgccagcccaacccctggccccggggcgaacaggcggcctggggccctcggaccggcagctgctgctcttctacctggagcagtgtgaggccaacctgaccacactgaccaacgccgtggacgccttctttaccgccgtggccaccaaccagccgcccaagatctttgtggcgcacagcaagttcgtcatcctcagcgcccacaagctggtgttcatcggggacacactgtcacggcaggccaaggctgctgacgtgcgcagccaggtgacccactacagcaacctgctgtgcgacctcctgcgcggcatcgtggccaccaccaaggccgctgccttgcagtacccatcgccttccgcggcccaggacatggtggagagggtcaaggagctgggccacagcacccagcagttccgccgcgtcctaggccagctggcagccgcctgagggtggtgaccccaggagggaggcaggggaggggtgcggcggtcccagctccctggctcccatgtcaagagtcgctgtgccacaggcttagggacaggaccccagctctgcgtcggtcctggtgccctggatgcccaggaatctgtatatatttatggccgggcagggtgtggggccatgcctcctcaggagccgaagcccaggggccggccagtggccttccccagcatgcaccacgggcccgggttgggtcaccagacggggctggagtgtgagggtcctgcagcctgcaggacctcgtgccaccccgagggctgagcctggtcccacgagggtgccgtgtcccctgacagggccagtgcagtttggtgtgtcctccgccttaccaggagaagaacctgaagaactatttttcgttattggttttccaatcatttgactaagagtctccatttaaataaagtttttaaaaggaagagc

SEQ ID NO: 66768 - DNA, 2169 bp, Artificial Sequence
  derived and/or modified sequence
atgcagggcaagaacgtgctggccaaggccctgtacgacaacgtggccgagagccccgacgagctgagcttcagaaagggcgacatcatgaccgtgctggagcaggacacccagggcctggacggctggtggctgtgcagcctgcacggcagacagggcatcgtgcccggcaacagactgaagatcctggtggtggtgcccaccagagtgggccagggctacgtgtacgaggccgcccagcccgagcaggacgagtacgacatccccagacacctgctggcccccggcccccaggacatctacgacgtgccccccgtgagaggcctgctgcccagccagtacggccaggaggtgtacgacaccccccccatggccgtgaagggccccaacggcagagaccccctgctggaggtgtacgacgtgccccccagcgtggagaagggcctgccccccagcaaccaccacgccgtgtacgacgtgccccccagcgtgagcaaggacgtgcccgacggccccctgctgagagaggagacctacgacgtgccccccgccttcgccaaggccaagcccttcgaccccgccagaacccccctggtgctggccgcccccccccccgacagcccccccgccgaggacgtgtacgacgtgcccccccccgcccccgacctgtacgacgtgccccccggcctgagaagacccggccccggcaccctgtacgacgtgcccagagagagagtgctgccccccgaggtggccgacggcggcgtggtggacagcggcgtgtacgccgtgcccccccccgccgagagagaggcccccgccgagggcaagagactgagcgccagcagcaccggcagcaccagaagcagccagagcgccagcagcctggaggtggccggccccggcagagagcccctggagctggaggtggccgtggaggccctggccagactgcagcagggcgtgagcgccaccgtggcccacctgctggacctggccggcagcgccggcgccaccggcagctggagaagccccagcgagccccaggagcccctggtgcaggacctgcaggccgccgtggccgccgtgcagagcgccgtgcacgagctgctggagttcgccagaagcgccgtgggcaacgccgcccacaccagcgacagagccctgcacgccaagctgagcagacagctgcagaagatggaggacgtgcaccagaccctggtggcccacggccaggccctggacgccggcagaggcggcagcggcgccaccctggaggacctggacagactggtggcctgcagcagagccgtgcccgaggacgccaagcagctggccagcttcctgcacggcaacgccagcctgctgttcagaagaaccaaggccaccgcccccggccccgagggcggcggcaccctgcaccccaaccccaccgacaagaccagcagcatccagagcagacccctgcccagcccccccaagttcaccagccaggacagccccgacggccagtacgagaacagcgagggcggctggatggaggactacgactacgtgcacctgcagggcaaggaggagttcgagaagacccagaaggagctgctggagaagggcagcatcaccagacagggcaagagccagctggagctgcagcagctgaagcagttcgagagactggagcaggaggtgagcagacccatcgaccacgacctggccaactggacccccgcccagcccctggcccccggcagaaccggcggcctgggccccagcgacagacagctgctgctgttctacctggagcagtgcgaggccaacctgaccaccctgaccaacgccgtggacgccttcttcaccgccgtggccaccaaccagccccccaagatcttcgtggcccacagcaagttcgtgatcctgagcgcccacaagctggtgttcatcggcgacaccctgagcagacaggccaaggccgccgacgtgagaagccaggtgacccactacagcaacctgctgtgcgacctgctgagaggcatcgtggccaccaccaaggccgccgccctgcagtaccccagccccagcgccgcccaggacatggtggagagagtgaaggagctgggccacagcacccagcagttcagaagagtgctgggccagctggccgccgcctag

SEQ ID NO: 66769 - protein, 215 aa, Artificial Sequence
  derived and/or modified sequence
MSAKRAELKKTHLVKERHCWTSKNYKAVCLELKPEPTKTFDYKAVKQEGRFTKAGVTQDLKNELREVREELKEKMEEIKQIKDLMDKDFDKLHEFVEIMKEMQKDMDEKMDILINTQKNYKLPLRRAPKEQQELRLMGKTHREPQLRPKKMDGASGVNGAPCALHKKTMAPQKTKQGSLDPLHHCGTCCEKCLLCALKNNYNRGIYAAVGLLDLW

SEQ ID NO: 66770 - DNA, 648 bp, Artificial Sequence
  derived and/or modified sequence
atgagcgccaagagagccgagctgaagaagacccacctggtgaaggagagacactgctggaccagcaagaactacaaggccgtgtgcctggagctgaagcccgagcccaccaagaccttcgactacaaggccgtgaagcaggagggcagattcaccaaggccggcgtgacccaggacctgaagaacgagctgagagaggtgagagaggagctgaaggagaagatggaggagatcaagcagatcaaggacctgatggacaaggacttcgacaagctgcacgagttcgtggagatcatgaaggagatgcagaaggacatggacgagaagatggacatcctgatcaacacccagaagaactacaagctgcccctgagaagagcccccaaggagcagcaggagctgagactgatgggcaagacccacagagagccccagctgagacccaagaagatggacggcgccagcggcgtgaacggcgccccctgcgccctgcacaagaagaccatggccccccagaagaccaagcagggcagcctggaccccctgcaccactgcggcacctgctgcgagaagtgcctgctgtgcgccctgaagaacaactacaacagaggcatctacgccgccgtgggcctgctggacctgtggtag

SEQ ID NO: 66771 - DNA, 648 bp, Artificial Sequence
  derived and/or modified sequence
atgtccgctaagagagccgagctgaaaaagacccacctcgtgaaggagcggcattgctggactagtaagaattacaaggccgtctgtctggaattaaaacctgagcccacaaaaacatttgactacaaggcagttaagcaggaggggagattcaccaaggcgggtgtgacacaggatctgaaaaacgaactgcgtgaggtacgcgaggaattaaaagaaaaaatggaagaaattaaacagatcaaagacctgatggataaggattttgacaagctgcatgagttcgtggagattatgaaagagatgcagaaggacatggatgaaaaaatggacatacttattaacacccagaagaactataagcttcctttaagacgcgccccaaaagaacaacaggaactccgcctcatgggtaagacccatcgagagcctcagctgcgtcccaagaagatggacggcgccagtggcgtgaacggggcaccttgcgccctgcataagaaaactatggcgccccagaagactaagcaggggtccttggaccccctgcaccattgcggaacatgttgtgaaaagtgtctactatgtgcactgaaaaacaattataacagagggatttacgccgcagttggccttctggacctgtggtag

SEQ ID NO: 66772 - DNA, 785 bp, Artificial Sequence
  derived and/or modified sequence
aggggctgttgtggggagttgaagaacaccctggcctcctccatcatgtcggccaagagggcagaattgaagaaaacacatctggtaaaagagagacattgctggacaagcaagaactacaaggcagtttgcctggaattgaagccagagccgaccaaaacatttgattacaaagcagttaaacaagaagggcggtttaccaaagcaggagtgacacaggacctaaagaatgaactcagggaagtgagagaagagctcaaggagaaaatggaggagataaaacagataaaggatctaatggacaaggattttgataaacttcacgaatttgtggaaattatgaaggaaatgcagaaagatatggatgagaagatggacattttaataaatacacagaagaactataagcttccccttagaagagcaccaaaggagcagcaggaactcaggctgatgggaaagactcacagagaaccacagctcaggcccaagaaaatggatggagccagtggagtcaatggagcaccctgtgctcttcacaagaagacgatggcaccacaaaaaacaaaacagggctcactggatccccttcatcactgtgggacctgctgcgagaaatgtttgttgtgtgctctaaagaacaactacaatcggggtatatacgctgcagtgggactgctggatctatggtagctcaatttttagttttttgaggaacaacctccaaactgttctccatagtggctgtactaatttacattcccaccaacagtgtacaaagattc

SEQ ID NO: 66773 - DNA, 648 bp, Artificial Sequence
  derived and/or modified sequence
atgtctgccaagagagctgagctgaagaagacccacctggtgaaggagcggcactgctggaccagcaagaactacaaggctgtgtgcctggagctgaagccagagcccaccaagacctttgactacaaggctgtgaagcaggagggccgcttcaccaaggccggcgtgacccaggacctgaagaatgagctgcgggaggtgcgggaggagctgaaggagaagatggaggagatcaagcagatcaaggacctgatggacaaggactttgacaagctgcatgaatttgtggagatcatgaaggagatgcagaaggacatggatgagaagatggacatcctgatcaacacccagaagaactacaagctgcccctgcggcgggcccccaaggagcagcaggagctgcggctgatgggcaagacccaccgggagccccagctgcggcccaagaagatggatggagccagcggcgtgaatggagccccctgtgccctgcacaagaagaccatggccccccagaagaccaagcagggcagcctggaccccctgcaccactgcggcacctgctgtgagaagtgcctgctgtgtgccctgaagaacaactacaacagaggcatctatgctgctgtgggcctgctggacctgtggtag

SEQ ID NO: 66774 - DNA, 648 bp, Artificial Sequence
  derived and/or modified sequence
atgagcgccaagcgggccgagctgaagaagacccacctggtgaaggaaaggcactgttggaccagtaaaaattacaaggctgtgtgtctggagcttaagcccgagccgaccaaaacattcgattataaagccgttaagcaggaagggcgattcaccaaggctggggtgacccaggatcttaaaaacgagttgcgggaagtgcgcgaagaacttaaggagaaaatggaagagatcaagcagattaaggacctgatggataaggacttcgacaaactccatgagttcgtggaaatcatgaaagagatgcaaaaagatatggatgaaaagatggacattttaatcaatactcagaagaactacaaactcccattgagaagagcacctaaggagcagcaggagctgcgcctgatgggcaagacccatcgcgagccccagctgcggcccaaaaagatggacggagcttccggagtcaatggcgccccatgtgctctgcacaagaaaacgatggcgccccaaaaaactaagcaggggtctttggatccattgcaccactgtggtacctgctgcgagaagtgcttactgtgtgccctgaagaataactacaaccggggtatctatgcagccgtcggcctcctggacctctggtag

SEQ ID NO: 66775 - DNA, 648 bp, Artificial Sequence
  derived and/or modified sequence
atgtccgcaaagcgggctgaactgaagaagacccatctggttaaggagagacactgctggaccagcaaaaattacaaagctgtctgcctggagctgaagccggaaccaacaaagacgtttgactacaaagccgtgaaacaggagggccgtttcaccaaagctggggtgactcaagacctgaagaacgaacttcgggaggtcagagaggaactaaaggagaagatggaggaaatcaaacagataaaggatttgatggataaggattttgataaactacatgagtttgtggagattatgaaggagatgcagaaagacatggatgaaaaaatggatatcctgatcaatactcagaagaactacaaactccccctccggagagctcccaaagagcagcaggaactacgcctgatggggaaaacccaccgggaaccacagctacggcctaaaaagatggatggggcttctggagtcaatggagctccgtgtgccttacacaaaaaaacaatggctccccaaaagactaagcaaggctcactggaccctctgcaccactgcgggacctgctgcgagaagtgcctgttgtgcgctcttaaaaacaactacaacaggggcatttacgccgcagtcgggctgctcgacctgtggtag

SEQ ID NO: 66776 - protein, 212 aa, Artificial Sequence
  derived and/or modified sequence
MSAKRAELKKTHLSKNYKAVCLELKPEPTKTFDYKAVKQEGRFTKAGVTQDLKNELREVREELKEKMEEIKQIKDLMDKDFDKLHEFVEIMKEMQKDMDEKMDILINTQKNYKLPLRRAPKEQQELRLMGKTHREPQLRPKKMDGASGVNGAPCALHKKTMAPQKTKQGSLDPLHHCGTCCEKCLLCALKNNYNRAQLQNLPAVPIHHLQAP

SEQ ID NO: 66777 - DNA, 639 bp, Artificial Sequence
  derived and/or modified sequence
atgagcgccaagagagccgagctgaagaagacccacctgagcaagaactacaaggccgtgtgcctggagctgaagcccgagcccaccaagaccttcgactacaaggccgtgaagcaggagggcagattcaccaaggccggcgtgacccaggacctgaagaacgagctgagagaggtgagagaggagctgaaggagaagatggaggagatcaagcagatcaaggacctgatggacaaggacttcgacaagctgcacgagttcgtggagatcatgaaggagatgcagaaggacatggacgagaagatggacatcctgatcaacacccagaagaactacaagctgcccctgagaagagcccccaaggagcagcaggagctgagactgatgggcaagacccacagagagccccagctgagacccaagaagatggacggcgccagcggcgtgaacggcgccccctgcgccctgcacaagaagaccatggccccccagaagaccaagcagggcagcctggaccccctgcaccactgcggcacctgctgcgagaagtgcctgctgtgcgccctgaagaacaactacaacagagcccagctgcagaacctgcccgccgtgcccatccaccacctgcaggccccctag

SEQ ID NO: 66778 - DNA, 540 bp, Artificial Sequence
  derived and/or modified sequence
atggacaaagactttgacaagctccatgagttcgtcgagatcatgaaggagatgcagaaagatatggacgaaaaaatggatattctgattaacacccagaaaaactataaactgccacttagaagggcccctaaggagcagcaggagctcaggctgatgggtaaaactcacagggagccccagcttcgacccaagaagatggacggcgcctctggagttaacggtgctccatgtgcattgcacaagaaaaccatggcccctcagaagactaaacagggctccctggaccctctgcaccactgcggcacatgctgtgagaaatgccttctttgtgctttaaaaaacaactataaccgtgcggcgccactgaaagaggcacgccacctgcttactgcaaattccattgatccatccgccgccctggtacttctcattgaatttctgctcttaaccctggtgactggtgccgccgctcccggcttggatgcgtgcggacaccagcgtaatatgagggacgagattaactccgagagaaggtag

SEQ ID NO: 66779 - DNA, 639 bp, Artificial Sequence
  derived and/or modified sequence
atgagtgccaagcgggccgagctgaagaagactcatctctctaagaattacaaagcagtgtgcctggaactgaagcccgaaccaaccaagacctttgactataaagccgtgaagcaggagggccggttcactaaagctggagtgacacaggacctaaagaatgaattacgtgaagtcagggaggaactaaaggagaaaatggaagaaatcaagcagataaaggacctgatggacaaggacttcgataagcttcacgagtttgtggaaattatgaaggagatgcagaaagacatggacgagaagatggatattctaattaacactcaaaaaaattacaagctgccactccgtcgtgctccgaaggaacagcaggaactgcggctgatgggtaaaacacacagagagccgcagctccgcccaaaaaaaatggacggggcgtccggagttaatggtgccccctgtgccctgcataagaaaactatggctcctcaaaagaccaaacaaggttcgctggatccgttacaccactgtggcacatgctgcgagaagtgcctgctgtgtgccctgaaaaataattacaacagggcccaactgcagaacttgcctgccgtgcctatacatcacctccaggctccttag

SEQ ID NO: 66780 - DNA, 802 bp, Artificial Sequence
  derived and/or modified sequence
ctgtaagttgcctaggacagtggcctggtcccaggggctgttgtggggagttgaagaacaccctggcctcctccatcatgtcggccaagagggcagaattgaagaaaacacatctgagcaagaactacaaggcagtttgcctggaattgaagccagagccgaccaaaacatttgattacaaagcagttaaacaagaagggcggtttaccaaagcaggagtgacacaggacctaaagaatgaactcagggaagtgagagaagagctcaaggagaaaatggaggagataaaacagataaaggatctaatggacaaggattttgataaacttcacgaatttgtggaaattatgaaggaaatgcagaaagatatggatgagaagatggacattttaataaatacacagaagaactataagcttccccttagaagagcaccaaaggagcagcaggaactcaggctgatgggaaagactcacagagaaccacagctcaggcccaagaaaatggatggagccagtggagtcaatggagcaccctgtgctcttcacaagaagacgatggcaccacaaaaaacaaaacagggctcactggatccccttcatcactgtgggacctgctgcgagaaatgtttgttgtgtgctctaaagaacaactacaatcgggcgcagctgcagaacctaccagcagttccgattcatcacctccaagctccttaagatgcacagtcagggcttcttgtcctgttaaataccaccccaaccccaggcctccactggagattaaaaaccttcattcaaagcca

SEQ ID NO: 66781 - DNA, 540 bp, Artificial Sequence
  derived and/or modified sequence
atggacaaggactttgacaagctgcatgaatttgtggagatcatgaaggagatgcagaaggacatggatgagaagatggacatcctgatcaacacccagaagaactacaagctgcccctgcggcgggcccccaaggagcagcaggagctgcggctgatgggcaagacccaccgggagccccagctgcggcccaagaagatggatggagccagcggcgtgaatggagccccctgtgccctgcacaagaagaccatggccccccagaagaccaagcagggcagcctggaccccctgcaccactgcggcacctgctgtgagaagtgcctgctgtgtgccctgaagaacaactacaacagagctgcccccctgaaggaggcccggcacctgctgacagccaacagcattgaccccagcgctgccctggtgctgctgattgagttcctgctgctgaccctggtgactggagctgctgcccctggcctggatgcctgtggccaccagaggaacatgagagatgagatcaacagcgagaggaggtag

SEQ ID NO: 66782 - DNA, 639 bp, Artificial Sequence
  derived and/or modified sequence
atgtctgccaagagagctgagctgaagaagacccacctgagcaagaactacaaggctgtgtgcctggagctgaagccagagcccaccaagacctttgactacaaggctgtgaagcaggagggccgcttcaccaaggccggcgtgacccaggacctgaagaatgagctgcgggaggtgcgggaggagctgaaggagaagatggaggagatcaagcagatcaaggacctgatggacaaggactttgacaagctgcatgaatttgtggagatcatgaaggagatgcagaaggacatggatgagaagatggacatcctgatcaacacccagaagaactacaagctgcccctgcggcgggcccccaaggagcagcaggagctgcggctgatgggcaagacccaccgggagccccagctgcggcccaagaagatggatggagccagcggcgtgaatggagccccctgtgccctgcacaagaagaccatggccccccagaagaccaagcagggcagcctggaccccctgcaccactgcggcacctgctgtgagaagtgcctgctgtgtgccctgaagaacaactacaacagagcccagctgcagaacctgcctgctgtgcccatccaccacctgcaggccccctag

SEQ ID NO: 66783 - DNA, 540 bp, Artificial Sequence
  derived and/or modified sequence
atggacaaggacttcgacaagctgcacgagttcgtggagatcatgaaagaaatgcagaaagatatggacgagaagatggatattttaattaatacccaaaaaaactataaacttccacttagaagggcgccgaaggaacaacaggaactgcggctcatgggtaagactcaccgagagccgcagttgcgccctaaaaaaatggatggtgcctctggggtgaatggggcaccgtgcgccctgcataaaaaaaccatggctccacaaaaaacaaagcaaggatctctcgacccattacaccactgcggcacttgctgcgagaagtgcctcctatgcgcactcaaaaacaactacaatcgcgccgcacccttgaaagaagcgcgccacctcctgaccgccaacagcatcgatcctagtgccgctttggttctgctgatcgagttcttgttactgaccctggtgactggggcagccgcaccagggcttgacgcttgtggccatcaaagaaacatgagggatgagataaacagcgagcgtcgctag

SEQ ID NO: 66784 - DNA, 639 bp, Artificial Sequence
  derived and/or modified sequence
atgagcgccaagcgggccgagctgaagaagacccacctgagcaagaactacaaagccgtgtgccttgaattgaagcccgaacctacaaagaccttcgactacaaagcagtgaaacaggaggggagatttacaaaggctggggtgacacaggatctcaagaatgagctgagagaagtgcgggaggaactgaaagaaaagatggaggaaattaaacagataaaggatttaatggacaaggacttcgacaagttgcacgaattcgtggagatcatgaaagagatgcaaaaggatatggacgagaagatggatattctgataaacacccagaagaattataagctgcctctgcggagagcccctaaggaacagcaggagctacgccttatgggcaaaacccatagggagcctcagcttagacccaagaagatggacggagcaagtggagtcaacggtgctccttgcgcactgcacaaaaaaacaatggctccacaaaagactaagcagggtagcctggatcccctccatcactgcggcacgtgctgtgaaaagtgccttttatgcgccctcaagaacaattacaatcgagcacagctgcagaacctgccggcggtgccaatccatcaccttcaggccccatag

SEQ ID NO: 66785 - DNA, 540 bp, Artificial Sequence
  derived and/or modified sequence
atggataaggacttcgacaaactgcacgagtttgtcgagatcatgaaagagatgcaaaaagatatggatgaaaaaatggacatcctcatcaacactcagaagaattacaaactgccactgcggcgagctcccaaggagcaacaagagctgcgcctgatgggcaaaactcacagggaacctcagctcagaccaaaaaagatggatggcgcatcgggcgtgaatggggcaccatgcgccctgcataaaaagacaatggccccacagaaaacaaaacaggggagtctggatccactccaccactgcggcacatgctgcgagaaatgtctgctctgcgccctcaaaaataattataacagggcagcacccctcaaagaggcccgtcatctgttaacagccaacagtatcgatccaagcgccgctttagtgctattgattgaatttcttctcttgactctggttacaggcgcagcagcaccaggcctggacgcttgcggccaccagcgcaacatgagagatgaaatcaactccgaacgcaggtag

SEQ ID NO: 66786 - DNA, 639 bp, Artificial Sequence
  derived and/or modified sequence
atgtccgccaaacgggctgagctaaaaaagacacacctatccaagaactacaaagccgtgtgcctcgaattgaagccagaacccacaaaaacatttgattacaaagccgtcaaacaggaaggtaggtttacgaaggctggagtcacccaggatctgaagaatgagctgcgggaggtccgtgaagaactcaaagaaaagatggaagagattaaacaaattaaggatttgatggacaaggactttgataaactccatgagttcgtcgagatcatgaaggaaatgcagaaggacatggacgaaaagatggacatcctgatcaatacgcagaagaactacaaactccctcttcggagggcgcctaaagagcagcaggaactccgcctgatgggcaagacccaccgcgagccgcagttgcggccaaaaaaaatggacggggcttcaggggttaatggagccccttgcgccctgcataagaagactatggcaccacagaaaactaaacaggggagtctggatcccctacaccactgtggtacgtgttgtgaaaaatgtctcctgtgtgcacttaaaaacaactataacagggcgcagctccagaacctaccagcggtgcccattcatcacctacaggcaccatag

SEQ ID NO: 66787 - DNA, 153 bp, Artificial Sequence
  derived and/or modified sequence
aaaacaggactgacaggcagcccttcttccctgtgggatctgctgagagaaatgttcgttgtctgctccaaggagcagctacagtccggcggaaagtacagccatcaggtttgggcgcctttttcgcccttggccagcggcgcagctttttag

SEQ ID NO: 66788 - DNA, 344 bp, Artificial Sequence
  derived and/or modified sequence
aaaacagggctcactggatccccttcatcactgtgggacctgctgcgagaaatgtttgttgtgtgctctaaagaacaactacaatcgggtgggaaatattcacaccaggtctgggcacccttttcacccttggcttctggagctgccttctgatttatctgtacctcaaccccggtgacatcgaatatgtgtttccaacctagcgcagctgcagaacctaccagcagttccgattcatcacctccaagctccttaagatgcacagtcagggcttcttgtcctgttaaataccaccccaaccccaggcctccactggagattaaaaaccttcattcaaagccaaa

SEQ ID NO: 66789 - DNA, 880 bp, Artificial Sequence
  derived and/or modified sequence
acacaaaggggtggtcaccctgccctcaccttgacctgtaagttgcctaggacagtggcctggtcccaggggctgttgtggggagttgaagaacaccctggcctcctccatcatgtcggccaagagggcagaattgaagaaaacacatctgagcaagaactacaaggcagtttgcctggaattgaagccagagccgaccaaaacatttgattacaaagcagttaaacaagaagggcggtttaccaaagcaggagtgacacaggacctaaagaatgaactcagggaagtgagagaagagctcaaggagaaaatggaggagataaaacagataaaggatctaatggacaaggattttgataaacttcacgaatttgtggaaattatgaaggaaatgcagaaagatatggatgagaagatggacattttaataaatacacagaagaactataagcttccccttagaagagcaccaaaggagcagcaggaactcaggctgatgggaaagactcacagagaaccacagctcaggcccaagaaaatggatggagccagtggagtcaatggagcaccctgtgctcttcacaagaagacgatggcaccacaaaaaacaaaacagggctcactggatccccttcatcactgtgggacctgctgcgagaaatgtttgttgtgtgctctaaagaacaactacaatcgggctgctcccctaaaggaagctcgtcacctcctgacagccaattctattgacccttctgcagctcttgttcttctgattgagttcctgcttttgaccctggtaacaggtgcggcagccccaggccttgacgcatgtggtcatcagagaaacatgagggatgaaataaactcagagagaaggtaa

SEQ ID NO: 66790 - DNA, 540 bp, Artificial Sequence
  derived and/or modified sequence
atggacaaggacttcgacaagctgcacgagttcgtggagatcatgaaggagatgcagaaggacatggacgagaagatggacatcctgatcaacacccagaagaactacaagctgcccctgagaagagcccccaaggagcagcaggagctgagactgatgggcaagacccacagagagccccagctgagacccaagaagatggacggcgccagcggcgtgaacggcgccccctgcgccctgcacaagaagaccatggccccccagaagaccaagcagggcagcctggaccccctgcaccactgcggcacctgctgcgagaagtgcctgctgtgcgccctgaagaacaactacaacagagccgcccccctgaaggaggccagacacctgctgaccgccaacagcatcgaccccagcgccgccctggtgctgctgatcgagttcctgctgctgaccctggtgaccggcgccgccgcccccggcctggacgcctgcggccaccagagaaacatgagagacgagatcaacagcgagagaagatag

SEQ ID NO: 66791 - protein, 99 aa, Artificial Sequence
  derived and/or modified sequence
MSAKRAELKKTHLSKNYKAVCLELKPEPTKVRSPFEAMQAARPEIHGEVTRSQGSFADPSGQDLSQTFDYKAVKQEGRFTKAGRTPRLLEELSLLLLPL

SEQ ID NO: 66792 - DNA, 606 bp, Artificial Sequence
  derived and/or modified sequence
atgagcgccaagagagccgagctgaagaagacccacctgagcaagaactacaaggccgtgtgcctggagctgaagcccgagcccaccaagaccttcgactacaaggccgtgaagcaggagggcagattcaccaaggccggcgtgacccaggacctgaagaacgagctgagagaggtgagagaggagctgaaggagaagatggaggagatcaagcagatcaaggacctgatggacaaggacttcgacaagctgcacgagttcgtggagatcatgaaggagatgcagaaggacatggacgagaagatggacatcctgatcaacacccagaagaactacaagctgcccctgagaagagcccccaaggagcagcaggagctgagactgatgggcaagacccacagagagccccagctgagacccaagaagatggacggcgccagcggcgtgaacggcgccccctgcgccctgcacaagaagaccatggccccccagaagaccaagcagggcagcctggaccccctgcaccactgcggcacctgctgcgtgagcgagaccctgcccgagcccagcaccggcgccagacccctggcccccgccccctggtag

SEQ ID NO: 66793 - DNA, 300 bp, Artificial Sequence
  derived and/or modified sequence
atgagcgccaagagagccgagctgaagaagacccacctgagcaagaactacaaggccgtgtgcctggagctgaagcccgagcccaccaaggtgagaagccccttcgaggccatgcaggccgccagacccgagatccacggcgaggtgaccagaagccagggcagcttcgccgaccccagcggccaggacctgagccagaccttcgactacaaggccgtgaagcaggagggcagattcaccaaggccggcagaacccccagactgctggaggagctgagcctgctgctgctgcccctgtag

SEQ ID NO: 66794 - DNA, 606 bp, Artificial Sequence
  derived and/or modified sequence
atgtccgctaagcgggctgagttgaaaaaaacccatttaagcaagaattataaagcagtatgtctcgagctcaagcccgagcctacaaagacattcgactacaaggcagtgaaacaggagggcagattcaccaaagcaggggtgacgcaagatctcaaaaacgagctgcgtgaggtacgagaggagctcaaagagaagatggaagagatcaagcagatcaaggatcttatggacaaggattttgacaaactgcacgaattcgtggagattatgaaagaaatgcagaaggacatggatgagaagatggatattctgattaatacacaaaagaattataagctacctctgcgaagggctccaaaagagcagcaggaactccggctgatggggaaaacacacagggaaccgcagctgcgaccaaaaaagatggatggagcttcaggagtgaatggtgcaccatgcgccttacacaagaagaccatggcccctcaaaagacaaaacagggtagtctggaccctctgcaccattgcggaacctgctgcgtgtcagagacacttccggagcctagcacaggcgcaaggccactggctcccgcaccttggtag

SEQ ID NO: 66795 - DNA, 300 bp, Artificial Sequence
  derived and/or modified sequence
atgagtgctaaacgcgccgaactcaagaaaacccacttatctaagaattacaaagcagtgtgtctggagctgaagccagagccaaccaaagtgcgatccccatttgaagcaatgcaggcagctcggcccgagattcatggagaggtgaccagatcccagggttctttcgcggatcctagtggtcaagacctctcccagactttcgactataaagcagttaagcaagaggggcggtttacaaaggccggaaggactcctcgactgctggaggagttgtcattgctgttgttgcctttgtag

SEQ ID NO: 66796 - DNA, 2377 bp, Artificial Sequence
  derived and/or modified sequence
agtggcctggtcccaggggctgttgtggggagttgaagaacaccctggcctcctccatcatgtcggccaagagggcagaattgaagaaaacacatctgagcaagaactacaaggcagtttgcctggaattgaagccagagccgaccaaaacatttgattacaaagcagttaaacaagaagggcggtttaccaaagcaggagtgacacaggacctaaagaatgaactcagggaagtgagagaagagctcaaggagaaaatggaggagataaaacagataaaggatctaatggacaaggattttgataaacttcacgaatttgtggaaattatgaaggaaatgcagaaagatatggatgagaagatggacattttaataaatacacagaagaactataagcttccccttagaagagcaccaaaggagcagcaggaactcaggctgatgggaaagactcacagagaaccacagctcaggcccaagaaaatggatggagccagtggagtcaatggagcaccctgtgctcttcacaagaagacgatggcaccacaaaaaacaaaacagggctcactggatccccttcatcactgtgggacctgctgcgtaagtgaaaccctgcccgagcccagcactggtgccagacccctggctccggctccctggtgacttccccgagcttgtgctgtatcatagtgaagggacaggtccgcccgctgctgacttctgggtgccgcccgagcctgcgccctccctgacctgccttgccttctaggcctgtggagcctccttagctgtgaccatgcaggacttgaccctggatgggcctacccgccagctccaccctcttattctgtccttccctttagcaagggcagataaggtgcctagcaggctgcccttcttggaccaggggaaattgatctttcttgtgccgtttctgtcctctgcaggagaaatgtttgttgtgtgctctaaagaacaactacaatcggggtaggtagattcatacaagatgtgccttttctcgatcaggtgccttgttgtccccaaggccatgtgctcccagccgcattcacatcacacccctcctgaggttgtgccaggagtagggactgttagcagatgctgccacccagcatgctcagtcatacaggatgtggcaccaggaaggaggacttgggtcacccagcctagaggctgctgcctggggctcccatggtggggagggtgcaccactagtggcggaactgaccttgcctcaggtcctgccctttctccccatccagtgggaaatattcacaccaggtctgggcacccttttcacccttggcttctggagctgccttctgatttatctgtacctcaaccccggtgacatcgaatatgtgtttccaacctagcgcagctgcagaacctaccagcagttccgattcatcacctccaagctccttaagatgcacagtcagggcttcttgtcctgttaaataccaccccaaccccaggcctccactggagattaaaaaccttcattcaaagccaaaggggatgtcatggttttgagtaccagtccaaaacttgagtgtgtggaggttgattatttttggttctatatcagtgtatttcagactccaacccttccccctgcttcctgatggattggtgggaaattacatcttagtcatcttagggtcctcccaaccaccacctccctccattccacctgggtctgcaaacgtcccaggtcatagcatggggagggcccctgatgatagcggacgccagtctgtgtggtctcaggagagaccctgctgcctggcccatccgctccctccacataatcagcctccacctgtgcatggggccagggtgtcttgggtgatgcagggaacccctcagcctcgagttctgcctgcaccacacccctctgaggtcttgtcaccaagcaggactcaggtccctgctgctcataggaactgggtagctttcttgggttctggggatccacccttctcacccccttgaaggtttcctctccctccctccacccccaaagggaacattccttcagaggcctcaggcctttacaaaggtggagaggagccagtgaccacccaaccttctgtgggccacgctgtgcctgccccaaagtcccagactgagggaaggtgaagcttaactgccagcttgaaatgagagtaaagaagatacagagcaaacagtgtttcagaaactgtcctgccctgggtgtgattctttggcttcaatttgaaggacgaggaatgatgggatttcatattttatttcacaccagttcctccttgtttcatctctttgctaagctggctgcttctaccatctaataaataattggccaagtt

SEQ ID NO: 66797 - DNA, 2452 bp, Artificial Sequence
  derived and/or modified sequence
gttgcctaggacagtggcctggtcccaggggctgttgtggggagttgaagaacaccctggcctcctccatcatgtcggccaagagggcagaattgaagaaaacacatctgagcaagaactacaaggcagtttgcctggaattgaagccagagccgaccaaagtaagaagcccttttgaggccatgcaggcagccaggcctgagatccatggggaagtgaccaggagtcaggggtcatttgctgatcctagtggccaagatttgtcccagacatttgattacaaagcagttaaacaagaagggcggtttaccaaagcaggaaggacacccagactcttggaggagttgtctttgctcctactgcccctgtgacttggagtcaaggccttccatggccacccgtgtactggttatctccttgtcatgctgcaaaatgtctccccaactctctgcccctccctggccctcctcccccagtccccttagaagagcaccaaaggagcagcaggaactcaggctgatgggaaagactcacagagaaccacagctcaggcccaagaaaatggatggagccagtggagtcaatggagcaccctgtgctcttcacaagaagacgatggcaccacaaaaaacaaaacagggctcactggatccccttcatcactgtgggacctgctgcgtaagtgaaaccctgcccgagcccagcactggtgccagacccctggctccggctccctggtgacttccccgagcttgtgctgtatcatagtgaagggacaggtccgcccgctgctgacttctgggtgccgcccgagcctgcgccctccctgacctgccttgccttctaggcctgtggagcctccttagctgtgaccatgcaggacttgaccctggatgggcctacccgccagctccaccctcttattctgtccttccctttagcaagggcagataaggtgcctagcaggctgcccttcttggaccaggggaaattgatctttcttgtgccgtttctgtcctctgcaggagaaatgtttgttgtgtgctctaaagaacaactacaatcggggtaggtagattcatacaagatgtgccttttctcgatcaggtgccttgttgtccccaaggccatgtgctcccagccgcattcacatcacacccctcctgaggttgtgccaggagtagggactgttagcagatgctgccacccagcatgctcagtcatacaggatgtggcaccaggaaggaggacttgggtcacccagcctagaggctgctgcctggggctcccatggtggggagggtgcaccactagtggcggaactgaccttgcctcaggtcctgccctttctccccatccagtgggaaatattcacaccaggtctgggcacccttttcacccttggcttctggagctgccttctgatttatctgtacctcaaccccggtgacatcgaatatgtgtttccaacctagcgcagctgcagaacctaccagcagttccgattcatcacctccaagctccttaagatgcacagtcagggcttcttgtcctgttaaataccaccccaaccccaggcctccactggagattaaaaaccttcattcaaagccaaaggggatgtcatggttttgagtaccagtccaaaacttgagtgtgtggaggttgattatttttggttctatatcagtgtatttcagactccaacccttccccctgcttcctgatggattggtgggaaattacatcttagtcatcttagggtcctcccaaccaccacctccctccattccacctgggtctgcaaacgtcccaggtcatagcatggggagggcccctgatgatagcggacgccagtctgtgtggtctcaggagagaccctgctgcctggcccatccgctccctccacataatcagcctccacctgtgcatggggccagggtgtcttgggtgatgcagggaacccctcagcctcgagttctgcctgcaccacacccctctgaggtcttgtcaccaagcaggactcaggtccctgctgctcataggaactgggtagctttcttgggttctggggatccacccttctcacccccttgaaggtttcctctccctccctccacccccaaagggaacattccttcagaggcctcaggcctttacaaaggtggagaggagccagtgaccacccaaccttctgtgggccacgctgtgcctgccccaaagtcccagactgagggaaggtgaagcttaactgccagcttgaaatgagagtaaagaagatacagagcaaacagtgtttcagaaactgtcctgccctgggtgtgattctttggcttcaatttgaaggacgaggaatgatgggatttcatattttatttcacaccagttcctccttgtttcatctctttgctaagctggctgcttctaccatctaataaataattggccaagt

SEQ ID NO: 66798 - DNA, 606 bp, Artificial Sequence
  derived and/or modified sequence
atgtctgccaagagagctgagctgaagaagacccacctgagcaagaactacaaggctgtgtgcctggagctgaagccagagcccaccaagacctttgactacaaggctgtgaagcaggagggccgcttcaccaaggccggcgtgacccaggacctgaagaatgagctgcgggaggtgcgggaggagctgaaggagaagatggaggagatcaagcagatcaaggacctgatggacaaggactttgacaagctgcatgaatttgtggagatcatgaaggagatgcagaaggacatggatgagaagatggacatcctgatcaacacccagaagaactacaagctgcccctgcggcgggcccccaaggagcagcaggagctgcggctgatgggcaagacccaccgggagccccagctgcggcccaagaagatggatggagccagcggcgtgaatggagccccctgtgccctgcacaagaagaccatggccccccagaagaccaagcagggcagcctggaccccctgcaccactgcggcacctgctgcgtgtctgagaccctgcctgagcccagcactggagcccggcccctggccccagccccctggtag

SEQ ID NO: 66799 - DNA, 300 bp, Artificial Sequence
  derived and/or modified sequence
atgtctgccaagagagctgagctgaagaagacccacctgagcaagaactacaaggctgtgtgcctggagctgaagccagagcccaccaaggtgcgcagcccctttgaggccatgcaggccgcccggcctgagatccacggggaggtgaccaggagccagggcagctttgctgaccccagcggccaggacctgagccagacctttgactacaaggctgtgaagcaggagggccgcttcaccaaggccggccgcaccccccggctgctggaggagctgagcctgctgctgctgcccctgtag

SEQ ID NO: 66800 - DNA, 606 bp, Artificial Sequence
  derived and/or modified sequence
atgagcgccaagcgggccgagctgaagaagacccacctgagcaagaattataaggctgtatgcctggagcttaaacctgagcccacaaagaccttcgattataaagcagtcaagcaggaaggcagatttacaaaggcaggagtcacacaggaccttaaaaacgagctgcgcgaggtcagggaggaattgaaagagaagatggaggagattaaacagattaaagacctgatggacaaagactttgataaactccatgagtttgtggaaatcatgaaagagatgcagaaagatatggatgaaaaaatggacatcctcattaatacccagaagaattacaaactcccacttaggagagcgccgaaggaacagcaggaattgcgtctgatgggcaaaacccacagggagccacagctgagacctaagaaaatggatggcgcatctggggtgaatggggctccttgcgcacttcacaagaaaacaatggcaccacagaagacaaagcagggaagtttggatcctctccatcattgcgggacctgctgtgtttccgagaccctgcctgagcccagtaccggggccagacccctcgcccccgccccctggtag

SEQ ID NO: 66801 - DNA, 300 bp, Artificial Sequence
  derived and/or modified sequence
atgagcgccaagcgggccgagctgaagaagacccacctgagcaagaattataaggcagtatgcctggagctgaagcccgaacccacgaaggtgcggtcccctttcgaggccatgcaggctgcgaggcctgaaattcacggtgaggtgacccggtcacagggaagttttgccgatccaagcggacaggatctctcccagacattcgattataaagccgtcaagcaggaaggcagattcactaaggcaggtcgcaccccccgactgttggaggaactgtcgctgctgcttctccctttgtag

SEQ ID NO: 66802 - DNA, 606 bp, Artificial Sequence
  derived and/or modified sequence
atgtcagcgaagagagcagagctaaagaaaacccatttatctaagaattacaaggccgtgtgcttggaactaaaaccagaaccgacgaagacgttcgactataaggccgtcaagcaggagggcagattcaccaaggctggtgtcactcaggatctaaaaaacgaattgcgcgaagtgcgggaggagctgaaggagaaaatggaggagatcaagcagattaaggacctgatggacaaggacttcgacaagctgcatgagttcgttgaaattatgaaagagatgcagaaagatatggacgagaagatggacatactgatcaatacccaaaagaactataagcttccattaagaagggcccctaaggaacaacaggaacttcgactcatggggaaaacccaccgggaaccacagctacggcctaagaagatggacggggctagcggggtcaatggtgccccttgtgccctgcataagaagaccatggcaccacagaagaccaagcagggctctctcgaccctcttcatcactgcggtacgtgctgcgtgagtgagaccctgccagaaccttctacaggcgctagacctctcgcaccggctccttggtag

SEQ ID NO: 66803 - DNA, 300 bp, Artificial Sequence
  derived and/or modified sequence
atgagtgcaaaaagagccgagctgaagaagactcacttgagtaagaattacaaggcagtttgcttagaactgaaacctgaacctaccaaagtacggagcccattcgaggcgatgcaagctgccagacctgaaatacacggcgaggtgactcgaagtcagggtagctttgccgaccccagcggccaggacttgagccaaactttcgattataaagccgtgaagcaggagggcaggttcactaaggctggtcggaccccacgcctgctcgaagaactgagcctgcttctgttgccactgtag

SEQ ID NO: 66804 - protein, 1182 aa, Artificial Sequence
  derived and/or modified sequence
MESLLENPVRAVLYLKELTAIVQNQQSLIHTQRERIDELERRLDELSAENRSLWEHQQLLQAQPPPGLVPPSSAPLPAAPATAPAAAARAQEPLQDQGQRSAAAPHPAPDRPPRQHHGQLLEQPQRGPGSRAHTPQSPHKHLGTQGAVTDKEKERPPSCCAAAGALLQHKSPSALGKGVLSRRPENETVLHQFCCPAADACSDLASQSDGSCTQAGGGMEDSVVAAAAVAAGRPSAHAPKAQAQELQEEEERPGAGAASPRAGPQHKASPGRQQPALATALCPHAPAASDYELSLDLKNKQIEMLEHKYGGHLVSRRAACTIQTAFRQYQLSKNFEKIRNSLLESRLPRRISLRKVRSPTAESLAAEKALMEGYGLVGLPLVRSPSLPPTFAGTLTELEDSFTEQVQSLAKSIDDALSTWSLKTMCSLRESGAYQLHQALQAAAGPPGLEAEGRAPESAGPGPGDDAAETPGLPPAHSGTLMMAFRDVTVQIANQNISVSSSTALSVANCLGAQTVQAPAEPAAGKAEQGETSGREAPEAPAVGREDASAEDSCAEAAASGAADGATAPKTEEEEEEEETAEVGRGAEAEAGDLEQLSSSSTSTKSAKSGSEASASASKDALQAMILSLPRYHCENPASCKSPTLSTDTLRKRLYRIGLNLFNINPDKGIQFLISRGFIPDTPIGVAHFLLQRKGLSRQMIGEFLGNSKKQFNRDVLDCVVDEMDFSSMELDEALRKFQAHIRVQGEAQKVERLIEAFSQRYCMCNPEVVQQFHNPDTIFILAFAIILLNTDMYSPNIKPDRKMMLEDFIRNLRGVDDGADIPRELVVGIYERIQQKELKSNEDHVTYVTKVEKSIVGMKTVLSVPHRRLVCCSRLFEVTDVNKLQKQAAHQREVFLFNDLLVILKLCPKKKSSSTYTFCKSVGLLGMQFQLFENEYYSHGITLVTPLSGSEKKQVLHFCALGSDEMQKFVEDLKESIAEVTELEQIRIEWELEKQQGTKTLSFKPCGAQGDPQSKQGSPTAKREAALRERPAESTVEVSIHNRLQTSQHNSGLGAERGAPVPPPDLQPSPPRQQTPPLPPPPPTPPGTLVQCQQIVKVIVLDKPCLARMEPLLSQALSCYTSSSSDSCGSTPLGGPGSPVKVTHQPPLPPPPPPYNHPHQFCPPGSLLHGHRYSSGSRSLV

SEQ ID NO: 66805 - DNA, 3549 bp, Artificial Sequence
  derived and/or modified sequence
atggaaagtctgcttgaaaatccagttagggctgtgctgtacttgaaggaactgaccgcaattgtccagaatcaacagtccctcatccacacacagcgggagcgcatagacgaactagaacggagactggacgagttgagcgcagaaaacagatctctctgggagcaccaacaactgctgcaagcgcagccaccgcccggacttgtcccgccttcttcggccccactgcccgcggctccggccacagcccccgctgcagcggcacgcgcccaggaaccgctgcaggatcaagggcagagatccgcagccgccccccaccccgctcccgatcgaccacccaggcagcatcacggacagctgcttgagcagccacagagaggcccagggagccgggcccatactccacaatcccctcacaaacatttgggcacacagggggccgtgaccgataaggagaaggagagaccccccagctgctgtgctgcagcgggagcacttctccaacataaaagcccatccgccttgggaaagggagtgttgtctagaagaccagagaacgagacagtgttacatcagttctgttgtccagccgccgatgcttgcagcgacctggcatcacagtcggacgggtcgtgtacccaagcgggggggggtatggaggattcggtggttgctgcagctgcggtggccgccggaagaccttccgctcacgctcctaaagcccaggcccaagaactgcaagaagaagaagaaaggcctggcgccggggctgccagtccacgggccggcccacagcataaggccagccctggacgccagcaacctgccttggctaccgcgctgtgcccacacgccccagccgcttctgactacgaattgtcactggatcttaaaaataagcaaatagagatgctggaacataagtatggagggcacctggtcagccgcagagctgcgtgcactatccaaacagcattccgccaatatcagctgagcaagaacttcgagaagatccgcaacagcttattggagagtcggttacccagacgcatctctctgagaaaggtgaggagccccaccgctgaatctctggcagccgagaaagcattaatggagggctatggactcgtgggacttccccttgtgcggtccccatccctcccaccaaccttcgccgggaccctcacagagttggaggattctttcacggaacaggtccaatcactggccaagtcaattgacgacgccctctctacttggtctctcaagacaatgtgctccctccgtgaatctggggcctaccagctccatcaggctctgcaggcagcagcaggacctcctggactggaagccgagggacgcgcgcccgagtccgcgggtcccggccctggcgacgatgccgccgagactcccggtttgccgccagctcactccggcacgcttatgatggcatttcgggacgtgacagtccagattgccaatcaaaacatttctgtgtccagctccactgcccttagtgtggctaactgcctaggagctcagactgtgcaggcccctgctgaaccggctgcagggaaagcagaacagggagagacttccggccgtgaggccccggaggcccccgccgtgggcagggaggatgcgagcgctgaggactcctgcgccgaggctgcagcctctggagcggccgacggtgcaacggcacccaaaaccgaggaggaagaggaagaggaagagaccgctgaggtcggccgtggggccgaggcggaggctggtgatttagagcagctgagttcctcgagtacttctaccaaatccgctaagtccgggtccgaagcttctgcctccgcatctaaggacgctctacaggcaatgattctgtcccttccaagatatcactgtgagaaccctgcatcatgtaagtctcctacactgagtacagacactctgcggaaacgcctctacagaataggcctaaatctcttcaacattaaccctgataaaggaattcagtttttgatttctcgcggcttcattccagatacgcccatcggagtagcacactttctgctgcagaggaagggcctgtcaaggcagatgataggcgaatttctgggcaactcaaagaaacagttcaaccgcgacgtcctagactgtgtggtggatgagatggacttttcctctatggaactggacgaggccctgagaaagtttcaagcgcacatccgcgtgcagggggaagcgcagaaggtggagcgactgattgaagccttttcccagcgttattgtatgtgtaatccggaggttgtccaacagtttcacaacccggacaccatatttatattggccttcgccatcattttgctgaacacagacatgtactctcctaatatcaagccggaccgcaagatgatgctcgaggactttattagaaatctcaggggcgtcgacgatggtgctgacatccccagggagttagtggtggggatatacgagagaatccaacagaaagagcttaagagtaatgaggaccatgtgacgtatgttacaaaggtagagaaaagcattgtcggaatgaagacggtgttatctgtgccacaccggagattggtgtgttgctcccgcctcttcgaggttacagatgtgaataagctgcaaaagcaggccgcccatcagagagaggtgtttttgtttaatgacttactggtgatccttaaactgtgtccaaagaaaaaatccagttcaacgtacaccttttgcaaaagtgtgggcctgctgggcatgcaatttcagcttttcgagaatgagtactattcccatggaatcaccctcgtcacacccctcagcggcagcgagaagaaacaggtcttgcatttttgcgccctcggctccgacgaaatgcagaagttcgtagaggacctgaaggagtccattgcggaagttactgaacttgaacagatcagaatagagtgggagttagaaaaacagcagggtactaaaactctgtcttttaagccttgtggagctcagggggatccacagtccaaacagggtagcccaacggccaagcgcgaggccgcactgcgggaacgcccagcagagagcactgtggaagttagcatccataatagactccagacttcccagcacaactcaggcctaggtgctgaacgcggcgcacctgtgccgccccctgacctacagcctagtccaccccgccagcagactcctcctttaccccctccgccgccaacgcctcccgggacactagtgcagtgccagcagatagtgaaagttatcgtccttgacaagccctgccttgcacgaatggaaccgctgttatctcaggccttgtcctgttacacttcatcatcttccgatagttgtgggagcacccctctcggcggacctggtagccccgtgaaggttacccaccagccccctctgcctccaccacccccaccatataatcacccgcaccaattttgtcctcctggaagtttgcttcacgggcaccggtatagtagcgggagcaggtccctcgtgtag

SEQ ID NO: 66806 - DNA, 3549 bp, Artificial Sequence
  derived and/or modified sequence
atggagagcttgttggaaaatcctgttcgggctgtcttgtacctaaaggaactgacagctatagtgcagaatcaacagtcccttattcacacgcagcgcgagcgcatagacgaacttgaaaggcggctggacgaactgtcggcagagaacaggtcactctgggagcatcagcagctgctgcaggcccaacctcctcccggattggtcccgccatccagcgccccactgcccgccgctccggcaactgcccctgctgccgctgcccgggctcaggagccacttcaggaccaggggcagcgatcagcagctgccccgcaccccgctccggaccggccaccaaggcagcaccatggtcagctgctcgagcaaccccagcggggccccggctcgcgagcccataccccacagtctccccataagcacctgggcacgcaaggggctgtcacggataaagaaaaggagcgacccccttcttgctgtgccgctgccggagctctcttgcaacacaaaagtccttcagctctggggaaaggggtcctcagtaggcggcccgaaaatgagacggttctccatcaattttgttgtcccgctgctgacgcgtgttcagatcttgccagccaatctgacggaagctgtacccaggccggcgggggaatggaggattcagtggtagccgctgccgccgtggcagccggtagaccatccgcgcacgcacccaaagcccaagctcaagaactccaggaggaggaagagaggcctggcgctggcgccgctagccccagagctgggccgcagcacaaggcctcccctggtaggcaacagcccgctcttgcaaccgccctttgtccccacgcccccgccgcatcggactatgagctttcactcgacttgaagaacaaacagatcgagatgctggagcataagtacgggggccacctggtatcacggcgcgccgcatgtactattcagacagcctttagacagtatcagctgagcaagaatttcgaaaagatccgaaattcactgttggaatcccgactacctagacgcatttctctgcggaaggtcaggtccccaactgccgagtccctggcagccgagaaagctctcatggaggggtatggactggtgggcctcccccttgtgcggtctcccagcctgccccctacgtttgcagggacgctgaccgagctagaggattcttttaccgagcaggtgcagtcactggcaaaaagtatcgatgatgccttgtcaacttggagcctgaagacaatgtgttctttgagggagtcaggcgcatatcagctgcaccaggcactgcaagcagccgcagggccacccggtctggaggcagaaggccgagcaccagaatctgctgggccaggccctggagacgacgctgctgagacccccgggctaccccccgcacatagtggaactctgatgatggcatttcgagatgtgacggtgcagatagctaaccagaacatatccgtctcaagcagcactgccttatcggtggctaactgtttaggcgcgcagacggtgcaggctcccgcggaaccagctgcagggaaggccgagcaaggggagacctctgggcgagaagcccccgaggcgcctgcggtggggcgcgaggacgcctctgccgaggactcttgtgctgaagctgcagcttcgggggcagctgatggagctaccgccccaaagaccgaagaggaagaggaggaggaggaaactgccgaggtaggtcgaggagctgaagcagaggccggagatttggaacagctaagctcttcgtccacatccacgaaatctgctaaatccggcagcgaggcaagtgcctccgcctcgaaagacgcgctgcaggctatgatcctcagcctcccccggtatcattgcgagaatcccgcatcatgtaagagccctactttgagtaccgacactctgcgtaagcgtctgtaccgcatcggcctgaacctgttcaatataaaccctgataaagggattcagttcctcataagtaggggttttattcccgatacacccattggcgtggcacattttcttctgcagcgaaaagggctatcacgacagatgataggtgaattcctcgggaatagcaaaaagcagttcaacagggacgtcttagattgtgtcgtggatgagatggactttagtagtatggagctcgacgaggcactgcggaagtttcaagcccatatcagggtgcagggcgaggcacagaaagtggagcgactgattgaagcattcagccagaggtactgtatgtgcaatcccgaggtggttcaacagtttcataaccccgacacaattttcatccttgcctttgccattatactgctaaatacagacatgtacagcccgaacatcaaacctgataggaagatgatgctggaagattttattaggaacttgaggggagttgatgacggagctgatattcccagagagctggtggttggaatctatgagaggattcagcagaaagaactaaagagcaacgaggatcatgtcacttacgtgaccaaggtggaaaagtccatcgtcgggatgaaaacggtgctttctgtcccccaccgccgcctggtgtgctgtagtcggttgttcgaggttacagacgttaacaaactgcagaagcaagcagcccatcagagggaagtcttcctcttcaatgacttgttggtaatccttaaactgtgtcctaaaaagaaatcctcttccacttatacgttttgtaagtccgttggtctcctgggtatgcagtttcaattgtttgagaatgaatattacagccacggcatcactctggtgactcccttgagcggtagcgaaaagaaacaggtcctccacttctgcgcattgggaagcgacgagatgcagaagtttgtggaagatctcaaagagtctattgctgaggttaccgagctggagcagattcgcatcgagtgggagctggaaaagcaacaggggaccaagactctgtcctttaagccctgtggggcccagggagaccctcagtccaagcagggaagtcccactgccaagcgtgaggcagccctgcgagaaagacctgccgagtcgacagtcgaagtcagtatacacaatcgcctgcagactagccagcacaacagcggcctgggcgccgaacggggggcccccgtgcctccgccggatctgcagccttccccaccgagacagcagaccccgcctctgccccctccgccccctacaccgcctggaaccctcgtgcagtgccagcagatcgtgaaggtcattgtccttgataaaccctgcctggctcgcatggaaccattgctgagccaggccctgtcctgctacacatcttcaagttccgattcttgcggcagtacgccactggggggtccaggtagcccggtgaaagtcactcaccaacctccactcccgccaccacctcctccttacaaccaccctcaccagttctgcccacctgggagtcttctgcatggtcacagatactccagtggctctcgaagcctggtctag

SEQ ID NO: 66807 - DNA, 6863 bp, Artificial Sequence
  derived and/or modified sequence
atggagagcctgctggagaatccggtgcgcgccgtgctctacctcaaggagctcacggccatcgtgcagaaccagcagagcctcatccacacccagcgagagcgtatcgacgagctggagcggcggctggacgagctgagcgctgagaaccgcagcctgtgggagcaccagcagctgctgcaagcccagcctccgcccgggctcgtccccccgtcatcggccccgctgccggccgctccggccaccgctcctgccgccgccgccagggcccaggaacctctccaggaccagggacagcgctcagcagccgcgccgcatcccgcgcccgatcggccgccgcgtcagcaccacggacagctcctggagcagccccagcggggccctggcagcagggctcacacaccccagtcgccccacaagcatctggggacacaaggggccgtgactgacaaggagaaggagcgtcccccgagttgctgcgctgctgccggagccctccttcagcacaaatccccctccgccctcggcaagggcgtcctgagcaggagacctgagaatgagaccgtgctgcaccagttctgctgcccagccgccgacgcctgctccgacctggcctcccaaagtgatggctcctgcacccaggccggtgggggcatggaggactccgtggtggcagcggcggcggtggcagccggcagacccagtgcccatgccccgaaggctcaagcccaggagctgcaggaggaggaggagcggccgggggcaggggctgcctccccaagggctggcccccagcacaaggcctcccccggccggcagcagcctgccctggcgacggcgctgtgcccccacgcccctgccgcctccgattacgaactctcccttgacctaaagaataaacagattgaaatgctagaacataagtacggcggtcacctggtgtcccggcgcgccgcttgcaccatccaaaccgccttccgccaataccagctcagcaagaacttcgagaaaatccgcaactcgcttctggagagccgcctgccacggcggatctccctgcgcaaggtgcggtcacccacggccgagagcctggcggccgagaaagcgctcatggagggctacggcctcgtggggctgccgctggtgcgctcgccctccctgccgcccaccttcgcaggcaccctcaccgagctggaggactccttcaccgagcaggtgcaatccctggccaagtccatcgacgacgcgctcagcacgtggagcctcaagaccatgtgctccctgcgggagagtggcgcttaccagctccaccaggccctgcaggcggccgcggggcccccaggcctggaggccgaggggcgggcgccggagagcgcgggccccgggcccggggatgacgccgcggagacccccggcctgcccccggcccacagcgggaccctcatgatggctttccgggacgtcacggtgcagatcgccaaccagaacatatccgtctcctcctccacggctctgtcggtggccaactgcctgggcgctcagacggtccaggcccccgcagagcccgcggcgggcaaggccgagcagggcgagacctctgggcgggaggccccggaagcccccgccgtgggccgggaggacgcgtcagccgaggactcatgcgcagaggctgcggctagtggggcggcggatggggccacagcccccaaaacagaggaggaagaggaggaggaggagacggcggaggtggggagaggggccgaggccgaggcaggcgacttggagcagctgagcagcagcagcacgtccaccaagtccgccaagtcaggctcggaggcgtcggcctccgcctccaaggacgccctgcaggccatgatcctgagcctgccgcgctaccactgcgagaacccagccagctgcaagtcgcccacgctctccaccgacaccctgcgcaagcggctctaccgcatcggcctcaacctcttcaacataaaccccgacaagggcatccagttcctgatctcacgcggcttcatcccggacacccccatcggtgtggcccatttcctcctccagcgaaagggcctcagccgccagatgattggagagttcctgggcaacagcaagaagcagttcaaccgcgacgtgctggactgcgtggtggacgagatggacttctccagcatggagctggacgaggccctgcgcaagttccaggcacacatccgtgtgcagggggaggctcagaaggtggagcggctcattgaggccttcagccagcgctactgcatgtgcaaccccgaagtggttcagcagttccacaaccccgacaccatcttcatcctcgccttcgccatcatcctcctcaacaccgacatgtacagccccaacatcaagcctgaccggaagatgatgctggaggacttcatccgaaaccttcgaggtgtggacgatggcgctgacatccccagggagctggtggtaggcatctatgagaggatacagcagaaggagctcaagtccaatgaggaccacgtcacgtacgtcaccaaggtggagaagtccattgtgggcatgaagacagtgctgtccgtgccccaccgccgcctggtgtgctgcagccggctcttcgaggtgacggatgtgaacaagctgcagaagcaggcagcgcatcagagggaggtgttcctcttcaatgacctgctggtgattctcaaactttgcccgaagaagaagagctcctccacgtacaccttttgcaagtcagttggcctgctgggcatgcagttccagctctttgagaacgagtattactctcatggcatcacactggtgaccccgctctcgggctccgagaagaagcaggtgctgcatttctgtgccctgggctcggacgagatgcagaagttcgtggaggacctgaaggagtccattgctgaggtgacggagctggagcagatccgaatagagtgggagctggagaagcagcagggaacaaagacactctccttcaagccctgcggagcccagggggacccacagtcaaagcaaggatcgccgacagccaaaagggaagccgcgctcagggagaggccggcggagagcacggtggaggtgtcaattcacaacaggcttcaaacgtcccagcacaactccgggctgggggccgagaggggagcgccggtgccgccgccagacctgcagcctagccccccgagacagcagaccccaccactgccgccgccgccacccacgcccccgggcaccctggtgcagtgccagcaaattgtcaaggtcattgtcctggacaagccctgcctggcccgcatggagcccctgctgagccaggctctctcctgctacacctcgtcgtcctctgactcctgcggctccacacccctgggcggtcccggctctccggtcaaggtcacccaccagcctccgctgcccccgcccccacccccctacaaccaccctcaccagttctgtcccccaggctccctgctgcacgggcaccgctactccagtggctcaaggagcctggtgtagactctgccccaccaccctgctgtcctgggagggctggccactggggggcctgggctgcccctccactgctccccataccctggcacgatgcgttcctggtcactgatcaccatcattttgggaagagaatcccaatccctggcacctgggtttgcctcatccaaccatccttccctttctcagctgcaccccctctgcagatctgaagacacacctcactctcccagggccctacacagccagacccggcgaggcctcctcttcccctggccaccactttcccccattggaccatggactgaagaaaacgagctgagggtctaacgagcttgcaggctttgagtctgttagtgcccggggcctcgggccttgggcagcagcatgaggctgggccggccggcagtggagcactagacagagtggctggctcgcagcccagaactagtgcctctgtagctgcactgaggggaggagggttggtcccacccctggagggacaggtgggaggagtgaggagggggctttttctgccacccccgcccccaagcctgaaactctcaggagtctacttcttggtccccagggacattggctgtcctgaccatgtccttccccctcctcccagggcctctgcttcctcaggagctgcccagactccagaaaagcctggaaaaagggaggcgggaaggggagcactttcggctttctataggtcagtccagcagggccacgggatcgcgaggtcatgtatctgcaaaatgcacctttttaaagagtgtcttagttccccagccccagctaatacccggccaatgccgtgtacgcaccggcatgtgcacgcaaacacgcatgagaaccaggccattccttccgctgtggaagcagaactggagacggggcaggaatgtgcccagcagagatggggctcagcccgaggcagggctccctcctgcatgaggctcggcccgaggcagggctccctcctgcatgagtctgtggcctccaggagggacttgggtgcagatgtaagcaagaaaaaccggggctccagaggcatgtgcatttcccctgcgcccctcagcctttaaatattccctcctcctagaaggttctagaccccccccttccagcaggggtgcccaagagtccctggaccctcaaaattgcaaaggagacccaagcggggctcgctgacctcccagggcccagcaagatgggatagccagccttaggtggccccacgagcccaagcctggggaagggcccctccccagccagacgagaggcagccaccccagagaccacaggagccgtaccatggcctgcgcagtcaggccctatcaggatgtgtctgtcccaagcctggccaggctccagtcctgtgccagtagctcactgctgtcctatgtgcaggtcccccaacacttggagcctgtggttaaggcctcctgggagaggcagtgagcatgagtcaaaggtgacatggacttgaatctccccaccccgccccgcctgcagtagccgggccaggtaggaggcaaggatcattccctgctcccagaggttccagatgacctagtttcgttttgtgtgtgtgtgtgtgtggtcacccagacgtcactgtgatatcacctagtgaatctatttctggccctgtcttcgtcggcccagtttctgtaacttgcagccaatttgccctctcccctgtggctgccagcccatctgcccctctgtgtccttgctgccctggccctcctctgttttctgtaacagatgctccagtcattgcctttcagagtggagcagatgacagatggggtgcacgcattcagacacctctgatgcccttagccagggcagggatcgtccttaaagtgaaggcctggacaggaggagtcagggacttgggaggaggtggagctgtggggatgggagtggaggaatcaaaatgagggaagctgaaaatagaatgaaaacgatgactaagaggcagggagtgcgaggtatgggggaataggaactatgagctaaatatacttatggggtgggggccgtgggggccagggacactctcccagacagccctgacccgccaggcaggaccccgtcccctgctcacacagctcttcaaacttaccaaggacaggcaggaccccgtcccctgctcacacagctcttcaagcttaccaagtcccctgttgagggcacagcaaccccaggccctccctcccacctcagctgaagccccaatcttccaaatcggaaccagcaagtcttagggctggcacgcatctgggcctctagctgagaacccggactctcaggcacctcagtgcccctgccccagggcagaggcccaccccgtgggttggtgcagtggctgccctgggctccacgggcagcacagggagtctgtccaggaagcagcccagccggggtcagtattccgtggagccagtcctgagctgggaggggcatttaacacccctgagggcctggggcaggacacagctggccctcctcattgtcaggggaagcaagtgcccaacatctgtaacctcccttccctgctcagtccccaggccaaggttgggacccctctccatccctgtccccagagcctagacctcagggacctaggaaaagcctcctgctccctccccacggcagcagacagggcagggcctccagcccccagagggccggtggggggtgctctcgggccttcctgctctcctaaggttgcggggacagtagagtgctgagccccagacccagtcaccccaagatggccccactctatccactctctagacctttgggaaatctgggtccctctcctgatttgatccattcggccccaactccagagtcgggaatgggagatgaaactagttttccacccacttttggacaagtcccacccctagatctgaagcaagctctaccagcagcgtgtcctggaagcctgcctgcctgcctgcccgtctgcacaggtgtcttgatccagccctgcgtcttcgagcccctgtgccaccggtccccacggcccgccaggagtctctttgtacccactaggcttccctgatgaccatctgtctgtccgtccctgtttttgctgtacataactcctgctgcaccctctccccgcacacccgtcacccatgagagagagaaacctctctagggaaaggcagggtggctgcacccagcaactaatccaaatggcaaatattttgtaacaaaatagcccagaggtattttatctgttcaattcatagagttttagagattatattgaaagatgtcacttg

SEQ ID NO: 66808 - DNA, 7094 bp, Artificial Sequence
  derived and/or modified sequence
ggaggctgggccggtgggagagggaggcgagccgaccgctgggctgctgggctcccgcgccctcgcgctccccgccgccagcccaggcgcaggcagggcgcaggcggcggcgggcggcatggagagcctgctggagaatccggtgcgcgccgtgctctacctcaaggagctcacggccatcgtgcagaaccagcagagcctcatccacacccagcgagagcgtatcgacgagctggagcggcggctggacgagctgagcgctgagaaccgcagcctgtgggagcaccagcagctgctgcaagcccagcctccgcccgggctcgtccccccgtcatcggccccgctgccggccgctccggccaccgctcctgccgccgccgccagggcccaggaacctctccaggaccagggacagcgctcagcagccgcgccgcatcccgcgcccgatcggccgccgcgtcagcaccacggacagctcctggagcagccccagcggggccctggcagcagggctcacacaccccagtcgccccacaagcatctggggacacaaggggccgtgactgacaaggagaaggagcgtcccccgagttgctgcgctgctgccggagccctccttcagcacaaatccccctccgccctcggcaagggcgtcctgagcaggagacctgagaatgagaccgtgctgcaccagttctgctgcccagccgccgacgcctgctccgacctggcctcccaaagtgatggctcctgcacccaggccggtgggggcatggaggactccgtggtggcagcggcggcggtggcagccggcagacccagtgcccatgccccgaaggctcaagcccaggagctgcaggaggaggaggagcggccgggggcaggggctgcctccccaagggctggcccccagcacaaggcctcccccggccggcagcagcctgccctggcgacggcgctgtgcccccacgcccctgccgcctccgattacgaactctcccttgacctaaagaataaacagattgaaatgctagaacataagtacggcggtcacctggtgtcccggcgcgccgcttgcaccatccaaaccgccttccgccaataccagctcagcaagaacttcgagaaaatccgcaactcgcttctggagagccgcctgccacggcggatctccctgcgcaaggtgcggtcacccacggccgagagcctggcggccgagaaagcgctcatggagggctacggcctcgtggggctgccgctggtgcgctcgccctccctgccgcccaccttcgcaggcaccctcaccgagctggaggactccttcaccgagcaggtgcaatccctggccaagtccatcgacgacgcgctcagcacgtggagcctcaagaccatgtgctccctgcgggagagtggcgcttaccagctccaccaggccctgcaggcggccgcggggcccccaggcctggaggccgaggggcgggcgccggagagcgcgggccccgggcccggggatgacgccgcggagacccccggcctgcccccggcccacagcgggaccctcatgatggctttccgggacgtcacggtgcagatcgccaaccagaacatatccgtctcctcctccacggctctgtcggtggccaactgcctgggcgctcagacggtccaggcccccgcagagcccgcggcgggcaaggccgagcagggcgagacctctgggcgggaggccccggaagcccccgccgtgggccgggaggacgcgtcagccgaggactcatgcgcagaggctgcggctagtggggcggcggatggggccacagcccccaaaacagaggaggaagaggaggaggaggagacggcggaggtggggagaggggccgaggccgaggcaggcgacttggagcagctgagcagcagcagcacgtccaccaagtccgccaagtcaggctcggaggcgtcggcctccgcctccaaggacgccctgcaggccatgatcctgagcctgccgcgctaccactgcgagaacccagccagctgcaagtcgcccacgctctccaccgacaccctgcgcaagcggctctaccgcatcggcctcaacctcttcaacataaaccccgacaagggcatccagttcctgatctcacgcggcttcatcccggacacccccatcggtgtggcccatttcctcctccagcgaaagggcctcagccgccagatgattggagagttcctgggcaacagcaagaagcagttcaaccgcgacgtgctggactgcgtggtggacgagatggacttctccagcatggagctggacgaggccctgcgcaagttccaggcacacatccgtgtgcagggggaggctcagaaggtggagcggctcattgaggccttcagccagcgctactgcatgtgcaaccccgaagtggttcagcagttccacaaccccgacaccatcttcatcctcgccttcgccatcatcctcctcaacaccgacatgtacagccccaacatcaagcctgaccggaagatgatgctggaggacttcatccgaaaccttcgaggtgtggacgatggcgctgacatccccagggagctggtggtaggcatctatgagaggatacagcagaaggagctcaagtccaatgaggaccacgtcacgtacgtcaccaaggtggagaagtccattgtgggcatgaagacagtgctgtccgtgccccaccgccgcctggtgtgctgcagccggctcttcgaggtgacggatgtgaacaagctgcagaagcaggcagcgcatcagagggaggtgttcctcttcaatgacctgctggtgattctcaaactttgcccgaagaagaagagctcctccacgtacaccttttgcaagtcagttggcctgctgggcatgcagttccagctctttgagaacgagtattactctcatggcatcacactggtgaccccgctctcgggctccgagaagaagcaggtgctgcatttctgtgccctgggctcggacgagatgcagaagttcgtggaggacctgaaggagtccattgctgaggtgacggagctggagcagatccgaatagagtgggagctggagaagcagcagggaacaaagacactctccttcaagccctgcggagcccagggggacccacagtcaaagcaaggatcgccgacagccaaaagggaagccgcgctcagggagaggccggcggagagcacggtggaggtgtcaattcacaacaggcttcaaacgtcccagcacaactccgggctgggggccgagaggggagcgccggtgccgccgccagacctgcagcctagccccccgagacagcagaccccaccactgccgccgccgccacccacgcccccgggcaccctggtgcagtgccagcaaattgtcaaggtcattgtcctggacaagccctgcctggcccgcatggagcccctgctgagccaggctctctcctgctacacctcgtcgtcctctgactcctgcggctccacacccctgggcggtcccggctctccggtcaaggtcacccaccagcctccgctgcccccgcccccacccccctacaaccaccctcaccagttctgtcccccaggctccctgctgcacgggcaccgctactccagtggctcaaggagcctggtgtagactctgccccaccaccctgctgtcctgggagggctggccactggggggcctgggctgcccctccactgctccccataccctggcacgatgcgttcctggtcactgatcaccatcattttgggaagagaatcccaatccctggcacctgggtttgcctcatccaaccatccttccctttctcagctgcaccccctctgcagatctgaagacacacctcactctcccagggccctacacagccagacccggcgaggcctcctcttcccctggccaccactttcccccattggaccatggactgaagaaaacgagctgagggtctaacgagcttgcaggctttgagtctgttagtgcccggggcctcgggccttgggcagcagcatgaggctgggccggccggcagtggagcactagacagagtggctggctcgcagcccagaactagtgcctctgtagctgcactgaggggaggagggttggtcccacccctggagggacaggtgggaggagtgaggagggggctttttctgccacccccgcccccaagcctgaaactctcaggagtctacttcttggtccccagggacattggctgtcctgaccatgtccttccccctcctcccagggcctctgcttcctcaggagctgcccagactccagaaaagcctggaaaaagggaggcgggaaggggagcactttcggctttctataggtcagtccagcagggccacgggatcgcgaggtcatgtatctgcaaaatgcacctttttaaagagtgtcttagttccccagccccagctaatacccggccaatgccgtgtacgcaccggcatgtgcacgcaaacacgcatgagaaccaggccattccttccgctgtggaagcagaactggagacggggcaggaatgtgcccagcagagatggggctcagcccgaggcagggctccctcctgcatgaggctcggcccgaggcagggctccctcctgcatgagtctgtggcctccaggagggacttgggtgcagatgtaagcaagaaaaaccggggctccagaggcatgtgcatttcccctgcgcccctcagcctttaaatattccctcctcctagaaggttctagaccccccccttccagcaggggtgcccaagagtccctggaccctcaaaattgcaaaggagacccaagcggggctcgctgacctcccagggcccagcaagatgggatagccagccttaggtggccccacgagcccaagcctggggaagggcccctccccagccagacgagaggcagccaccccagagaccacaggagccgtaccatggcctgcgcagtcaggccctatcaggatgtgtctgtcccaagcctggccaggctccagtcctgtgccagtagctcactgctgtcctatgtgcaggtcccccaacacttggagcctgtggttaaggcctcctgggagaggcagtgagcatgagtcaaaggtgacatggacttgaatctccccaccccgccccgcctgcagtagccgggccaggtaggaggcaaggatcattccctgctcccagaggttccagatgacctagtttcgttttgtgtgtgtgtgtgtgtggtcacccagacgtcactgtgatatcacctagtgaatctatttctggccctgtcttcgtcggcccagtttctgtaacttgcagccaatttgccctctcccctgtggctgccagcccatctgcccctctgtgtccttgctgccctggccctcctctgttttctgtaacagatgctccagtcattgcctttcagagtggagcagatgacagatggggtgcacgcattcagacacctctgatgcccttagccagggcagggatcgtccttaaagtgaaggcctggacaggaggagtcagggacttgggaggaggtggagctgtggggatgggagtggaggaatcaaaatgagggaagctgaaaatagaatgaaaacgatgactaagaggcagggagtgcgaggtatgggggaataggaactatgagctaaatatacttatggggtgggggccgtgggggccagggacactctcccagacagccctgacccgccaggcaggaccccgtcccctgctcacacagctcttcaaacttaccaaggacaggcaggaccccgtcccctgctcacacagctcttcaagcttaccaaggacaggcagaaccccgtcccctgctcacacagctcttcaagcttaccaaggacaggcaggaccccgtcccctgctcacacagctcttcaaacttaccaagtgccctctcccctgttgagggcacagcaaccccaggccctccctcccacctcagctgaagccccaatcttccaaatcggaaccagcaagtcttagggctggcacgcatctgggcctctagctgagaacccggactctcaggcacctcagtgcccctgccccagggcagaggcccaccccgtgggttggtgcagtggctgccctgggctccacgggcagcacagggagtctgtccaggaagcagcccagccggggtcagtattccgtggagccagtcctgagctgggaggggcatttaacacccctgagggcctggggcaggacacagctggccctcctcattgtcaggggaagcaagtgcccaacatctgtaacctcccttccctgctcagtccccaggccaaggttgggacccctctccatccctgtccccagagcctagacctcagggacctaggaaaagcctcctgctccctccccacggcagcagacagggcagggcctccagcccccagagggccggtggggggtgctctcgggccttcctgctctcctaaggttgcggggacagtagagtgctgagccccagacccagtcaccccaagatggccccactctatccactctctagacctttgggaaatctgggtccctctcctgatttgatccattcggccccaactccagagtcgggaatgggagatgaaactagttttccacccacttttggacaagtcccacccctagatctgaagcaagctctaccagcagcgtgtcctggaagcctgcctgcctgcctgcccgtctgcacaggtgtcttgatccagccctgcgtcttcgagcccctgtgccaccggtccccacggcccgccaggagtctctttgtacccactaggcttccctgatgaccatctgtctgtccgtccctgtttttgctgtacataactcctgctgcaccctctccccgcacacccgtcacccatgagagagagaaacctctctagggaaaggcagggtggctgcacccagcaactaatccaaatggcaaatattttgtaacaaaatagcccagaggtattttatctgttcaattcatagagttttagagattatattgaaagatgtcacttgagcaaa

SEQ ID NO: 66809 - DNA, 3549 bp, Artificial Sequence
  derived and/or modified sequence
atggagagcctgctggagaaccctgtgcgggctgtgctgtacctgaaggagctgacagccatcgtgcagaaccagcagagcctcatccacacccagcgggagagaattgatgagctggagcggcggctggatgagctgtctgcagaaaatagaagcctgtgggagcaccagcagctgctgcaggcccagcccccacctggcctggtgccccccagcagcgcccccctgcctgctgccccagccacagccccagctgctgctgcccgggcccaggagcccctgcaggaccagggccagaggtctgctgctgccccccacccagccccagaccggcccccccggcagcaccacggccagctgctggagcagccccagaggggccctggcagccgggcccacaccccccagagcccccacaagcacctgggcacccagggcgctgtgacagacaaggagaaggagcggccccccagctgctgtgccgctgctggggccctgctgcagcacaagagccccagcgccctgggcaaaggagtgctgagccggcggccagaaaatgagaccgtgctgcaccagttctgctgcccagctgctgatgcctgcagcgacctggccagccagagtgatggcagctgcacccaggccggcggcggcatggaggacagcgtggtggccgctgctgctgtggccgccggccggcccagcgcccacgcccccaaggcccaggcccaggagctgcaggaggaggaggagaggcctggagctggagctgccagcccccgggccggcccccagcacaaggccagccctggccggcagcagcctgccctggccacagccctgtgcccccacgccccagctgccagtgactatgagctgagcctggacctgaagaacaagcagatcgagatgctggagcacaagtatggaggccacctggtgtcccggcgggccgcctgcaccatccagacagccttccggcagtaccagctgagcaagaactttgagaagatccggaacagcctgctggagagccggctgccccggcgcatcagcctgaggaaggtgcgcagccccacagctgagagcctggccgctgagaaggccctgatggagggctacggcctggtgggcctgcccctggtgcgcagccccagcctgccccccacctttgctggcaccctgacagagctggaggacagcttcacagagcaggtgcagagcctggccaagagcattgatgatgccctgagcacctggagcctgaagaccatgtgcagcctgcgggagagcggggcctaccagctgcaccaggccctgcaggccgccgccggccccccaggcctggaggccgagggccgggcccctgagagcgctggccctggccctggagatgatgctgctgagaccccaggcctgcccccagcccacagcggcaccctgatgatggccttcagagatgtgacagtgcagatcgccaaccagaacatctctgtgagcagcagcacagccctgtctgtggccaactgcctgggcgcccagacagtgcaggccccagctgagcctgctgctgggaaggccgagcagggcgagaccagcggccgggaggcccctgaggccccagctgtgggccgggaggatgccagcgctgaggacagctgtgccgaggccgccgccagcggggctgctgatggagccacagcccccaagacagaggaggaggaggaggaggaggagacagctgaggtgggcagaggagctgaggccgaggccggggacctggagcagctgagcagcagcagcaccagcaccaagagcgccaagagcggcagcgaggccagcgccagcgccagcaaggatgccctgcaggccatgatcctgagcctgccccgctaccactgtgaaaatcctgccagctgcaagagccccaccctgagcacagacaccctgaggaagaggctgtacagaattggcctgaacctcttcaacatcaacccagacaagggcatccagttcctgatcagccggggcttcatcccagacacccccatcggcgtggcccacttcctgctgcagaggaagggcctgagccggcagatgattggagagttcctgggcaacagcaagaagcagttcaacagagatgtgctggactgtgtggtggatgagatggacttcagctccatggagctggatgaggccctgaggaagttccaggcccacatccgggtgcagggcgaggcccagaaggtggagcggctgattgaggccttcagccagcgctactgcatgtgcaaccctgaggtggtgcagcagttccacaacccagacaccatcttcatcctggcctttgccatcatcctgctgaacacagacatgtacagccccaacatcaagccagacaggaagatgatgctggaggacttcatccggaacctgcggggcgtggatgatggagctgacatcccccgggagctggtggtgggcatctatgagcgcatccagcagaaggagctgaagagcaatgaagatcatgtgacctacgtgaccaaggtggagaagagcatcgtgggcatgaagacagtgctgtctgtgccccaccggcggctggtgtgctgcagccggctgtttgaggtgacagatgtgaacaagctgcagaagcaggccgcccaccagcgggaggtgttcctgttcaatgacctgctggtgatcctgaagctgtgccccaagaagaagagcagcagcacctacaccttctgcaagtctgtgggcctgctgggcatgcagttccagctgtttgaaaatgagtactacagccacggcatcaccctggtgacccccctgagcggcagcgagaagaagcaggtgctgcacttctgtgccctgggcagtgatgagatgcagaagtttgtggaggacctgaaggagagcattgctgaggtgacagagctggagcagatcagaattgagtgggagctggagaagcagcagggcaccaagaccctgtccttcaagccctgtggggcccagggcgacccccagagcaagcagggcagccccacagccaagcgggaggccgccctgcgggagaggcctgctgagagcacagtggaggtgtccatccacaaccggctgcagaccagccagcacaacagcggcctgggcgctgagcggggggcccctgtgcccccaccagacctgcagcccagccccccccggcagcagaccccacccctgcccccacctccacccaccccacctggcaccctggtgcagtgccagcagatcgtgaaggtgattgtgctggacaagccctgcctggccaggatggagcccctgctgagccaggccctgagctgctacaccagcagcagcagtgacagctgtggcagcacccccctgggcggccctggcagccctgtgaaggtgacccaccagccccccctgcccccacctcctccaccctacaaccacccccaccagttctgccccccaggcagcctgctgcacggccaccgctacagcagcggcagccgcagcctggtgtag

SEQ ID NO: 66810 - DNA, 3549 bp, Artificial Sequence
  derived and/or modified sequence
atggagagcctgctggagaaccccgtgcgggccgtgctgtacctgaaggagttaacagcgatcgtccaaaatcaacagtccctcatccacacacagagggagaggatcgatgaactggagcgaaggctggacgaattgtctgccgagaataggtcactgtgggagcaccagcagctacttcaggcccagcccccacccggacttgttcctccttctagcgcaccactacccgccgcacccgccactgcaccggcagcagcggcgcgcgctcaggagcccctgcaggatcaaggtcagagatcagctgccgccccccaccctgcgcctgacaggccgccacgtcagcaccatggccagctcctggagcagccgcagagaggccccggctctagagcccacactccacagtcaccgcataaacacctcggcactcagggagcagtcaccgacaaagagaaagagagacctccgtcatgttgcgcagctgcgggcgcacttttacagcataagtctccctccgcacttggcaaaggggtgctgtccagaagacccgaaaatgaaaccgtgctacatcagttctgttgtcctgccgctgatgcctgcagcgatctggcctctcagagcgacgggagctgtacccaggctggtggggggatggaagatagcgtggtggccgcagctgctgtggctgccgggcgcccgtccgctcatgcccccaaagcccaagcacaggaactccaggaggaggaagagcgccctggcgcaggagccgcaagccccagggccgggcctcaacacaaagcttctcctggacgccagcaacccgccctggcaacagccttatgtccacacgctcctgcagcatcagactatgagctgtcactggacctgaagaataagcaaatcgagatgctggagcacaagtacgggggccatctagtttccaggagggctgcctgcacaatccagaccgcattcagacaataccaacttagcaaaaatttcgaaaagattcgcaattcactcctcgagagccgcctgccaaggcggattagcctcagaaaggtgcgctctcccaccgccgaaagcctggctgccgaaaaagcactcatggagggatatggcctagttgggttacctttggtgcggagtccctcactgcccccgacgtttgcgggaacactcacggagttagaagactcctttaccgaacaggtgcagagcctggctaaaagtatagacgacgccctctcaacgtggagcctgaaaactatgtgttcactgagggagagcggagcttatcaactgcatcaggctctgcaggctgctgccgggccacctggcctggaggcagaaggtagagccccagaatcagctgggccggggccgggcgacgacgccgccgagactcccggcttgcctccagcacattctggtacccttatgatggcctttcgagatgtgactgtgcagatcgctaatcaaaatatttctgtaagttcctctacagccttgagtgtggccaattgcctgggagctcagactgtacaagcacctgccgagccggctgccggcaaggctgagcaaggggaaacatccggcagggaggctcctgaagcccccgctgttgggcgggaggatgcgtctgctgaagattcctgtgcagaagccgcagcttcgggcgccgctgacggagctaccgctcccaaaacagaagaagaggaagaagaggaagagactgctgaggtcgggcggggcgcagaagctgaggcaggcgatttggaacaattgtcctccagctcaacgagcaccaaaagcgccaagagtggaagcgaggccagcgccagcgcatctaaagacgcacttcaggctatgatactgtcgttgcctcggtaccattgtgagaatcctgcctcttgtaaatcgcctacccttagcacagacaccctaaggaagcggctctatcggataggtctcaacctctttaacatcaaccctgataaagggatccaatttctaatatcccgcggctttattccagataccccaattggagtggctcacttcctgctacagcgcaaaggattatctagacagatgatcggagagttcctcggtaacagcaagaagcaattcaatcgagatgtgctggattgcgtggtggatgagatggatttctcttctatggagttagacgaggcgttgcgcaagtttcaagcccatatacgggtccagggagaagctcagaaggtcgaaagactgattgaagcattttcccaacggtattgtatgtgtaatcctgaggtggtgcagcagttccacaaccccgacactatcttcatcttggccttcgccattatacttctgaacacagatatgtactctcctaatatcaagcccgatcggaaaatgatgttagaagatttcattaggaatcttagaggggtggacgatggggcggacatcccccgggagctcgtggttggtatctacgaacgcattcagcaaaaagaactgaagagtaacgaggatcatgtgacctacgtcactaaagttgaaaaatctatagttgggatgaagactgtgctgtcagtgcctcatcgccggcttgtttgttgttcacgactcttcgaagtaactgatgtgaacaagctacagaagcaggccgcacaccagagggaggtgtttttgttcaatgatctgctcgtaatcctgaagctctgtcctaagaagaagtcttcctctacgtacaccttctgcaaatcggtcgggcttctaggcatgcagtttcagttgtttgaaaatgaatattactcacatggcataacactagtaaccccactgtcgggaagcgaaaaaaagcaggtgttgcatttttgcgcgttaggttcagacgagatgcagaagttcgtcgaggatcttaaagaaagcattgctgaagtcaccgagctcgagcaaattcggatagagtgggagctggagaagcagcaggggacaaaaacgctttcttttaagccttgcggagcacagggggacccccagagtaagcaggggtctcccacagctaaacgagaggcagctctgcgagaaaggcctgccgaatccactgtcgaggtgagcatacataatcgcctccagactagccagcataactctgggctgggcgccgaacgcggggctcccgtaccccctccggatctacagccctccccacccaggcagcagacccccccactgccacccccacctcccacccctccaggcaccctggtccagtgtcagcagatcgtgaaggtgattgtcttagataaaccatgcctggccaggatggaaccactactgtcacaggctctgtcgtgctataccagctctagttctgacagttgcggctctacccccttagggggcccaggatccccagttaaggtgacacaccagccacccctgccacctccacctccaccttataatcatccacaccagttctgcccgccaggatcgctgctgcatggtcatcgctattccagcggtagtcgttcattggtctag

SEQ ID NO: 66811 - DNA, 3549 bp, Artificial Sequence
  derived and/or modified sequence
atggagagcctgctggagaaccccgtgcgggccgtgctgtacctgaaagagttaactgcgatagtccagaaccaacagtccctgatccatacccagagggagcgcattgacgaactcgagcgtcgtctcgatgaactgtctgctgaaaacagatcattatgggagcatcagcagttgctacaggcccagcctcccccaggcctggtacctccaagttcagccccgctccctgctgcccccgccaccgcccctgctgctgcagcacgggcccaggagcccctgcaggatcagggacagcgatctgctgccgctccacacccagctccggaccggcccccacggcagcaccacgggcaactgctggagcagccacagagggggcctggttcacgggcgcacactcctcagtcccctcacaagcacctgggtactcaaggggctgttaccgataaggagaaagagagacctccaagttgctgcgccgccgcgggcgctctgctccagcacaagagcccgagtgcattgggaaagggcgttctcagccgaagacctgagaacgaaactgtgctccaccaattctgctgccctgctgctgacgcctgttcagacctggcatcccagtccgacggctcttgtacacaggccgggggtgggatggaggactccgttgtagccgcagctgcagttgcggccggccgcccttccgctcacgccccgaaagcgcaagcccaagaactgcaggaggaggaggagagacccggagcgggtgccgctagtccccgggcgggacctcagcataaggcctcaccgggcagacaacagcctgccttggcaacggccctgtgcccacacgcccctgcagcttccgactatgagctgagtttggatctcaagaataaacagattgaaatgctggagcacaaatacggcgggcacttggtgtctaggcgcgccgcatgtaccatccaaacagctttcaggcagtatcaactctccaaaaattttgaaaaaatccggaatagcctcctcgagtcccggctgccccgcagaatctccctgagaaaagtcaggtcccctacagctgaatctctcgcagccgagaaagccctcatggagggttatgggctggttggcttgcccctcgtaagaagcccgtccctgcctcccaccttcgcaggtacactcacagaactggaggacagctttacggaacaggtgcagtccctagccaagagcatcgacgacgccctatccacatggagtttgaagacgatgtgctccctgagagagtccggtgcgtatcagttgcaccaggcgctccaggctgcagcagggccacccggactggaggcagaaggccgagccccagagtcagcagggcctggtcccggcgacgacgccgctgagactcccggcctgccacccgcccacagtggaacactcatgatggctttcagggatgttaccgtccagatcgccaaccagaacatcagtgtctccagttccacagcgctttctgtggctaattgcctgggagctcaaacggttcaggccccagcagagcccgccgcaggcaaggctgaacagggggagaccagcgggcgtgaagccccggaagctcctgcggtggggagggaagatgcgtccgccgaagacagctgtgctgaggccgcagctagtggggccgctgacggcgcgacggcccctaagaccgaggaagaagaagaagaggaggagaccgccgaggtgggtagaggagcagaggccgaagccggtgacctggaacaactctctagctcatccacatccacaaagtcagccaaaagcggctccgaagcttccgctagcgctagtaaggatgcactccaggccatgatcctgtcactgccacgctaccactgcgagaacccagcctcatgtaagtcccccacgctcagtaccgatacccttagaaagcggctataccgcataggccttaatctttttaacatcaacccagacaagggcatccagttcctgatctctcggggcttcataccagacacccccatcggagtggctcatttcctacttcaacgcaaaggcctttcccgccagatgattggtgaatttttaggaaattctaaaaaacagtttaatcgcgatgtgctggattgtgtggtagacgaaatggatttcagcagcatggaactagatgaggccctacgaaagtttcaggcacacattagggtacagggcgaggcccagaaggtcgagcggctcatcgaggcctttagccaaaggtattgcatgtgtaacccagaggtagtgcagcagtttcacaaccctgatacgatttttatcctggcctttgccattattctgctcaacaccgatatgtatagccctaatattaaacccgaccggaagatgatgctcgaggacttcattagaaatcttcgcggagtcgatgatggagctgacatcccacgggaactggtggttggaatatacgagcgtatacagcagaaagagctgaaatccaacgaagaccacgtgacctacgtgacaaaggtggaaaagtctattgtggggatgaagacagtgttatcggtgccccaccggagactggtttgctgtagtagactattcgaggtcacagatgtgaataagttgcagaaacaggctgcccatcagagggaggtttttctgtttaatgacctgctggtgatcctcaaattgtgtcctaagaaaaagtcttcttccacatatactttctgcaaatccgtgggactgcttgggatgcagttccagctattcgagaatgaatattatagccacggcatcaccctggtcactccgctgagcggcagcgaaaagaagcaagtgctgcatttctgcgctttaggttctgacgagatgcagaaattcgtggaagacctgaaggagtccatcgcagaagtcacagaactggagcaaataagaatcgaatgggaactggagaagcagcaaggaacaaagaccctatccttcaaaccttgcggggcacagggggacccccagtccaaacagggatcccctacagcgaagagggaagctgccctgagggaaaggccagcggagtctactgtagaagtctctattcacaatcgtctgcaaaccagtcaacacaatagcgggctgggtgccgagcggggtgccccagtgcctccacctgacttgcaacccagtccaccccgccagcagacgccgcctctgccgccacccccaccaaccccacccgggaccttggtccaatgccagcagatcgtgaaggtgatcgtgctggataagccctgtctggcgcgcatggaacctctcttgagtcaagcactgtcatgttacacctcctcctcctccgactcctgcggctctacccctctgggtggcccaggttcgccggtgaaggtgacacaccaacccccactgccgccgcctccacccccatataaccacccacaccagttttgtccacccgggagtctgcttcatggtcataggtatagttcaggcagtcgtagcctagtatag

SEQ ID NO: 66812 - DNA, 3549 bp, Artificial Sequence
  derived and/or modified sequence
atggaatctctcttagagaatcccgtgagggccgtgctgtacctcaaggaactgactgccatcgtgcagaatcagcagagtctaattcacacgcagcgtgaacgaattgatgaactggagcgtcgacttgatgagctctccgccgaaaacaggtcactttgggagcatcaacagttgctccaggcccaaccgcctcctggacttgtgccgccatcctctgcccctcttcctgccgcaccagctaccgcaccagccgctgccgctagagcgcaggaacccttgcaagaccaaggccagcgatccgctgccgctcctcatccagcacccgataggccaccacgccaacaccatggtcaactgctcgaacagcctcagcgcggacccggaagcagggcgcacacaccacagtctccacacaagcacttagggacacaaggggctgttacggataaagaaaaggagcgcccaccttcttgctgtgcggcagccggagctcttctgcagcataaatctccgtctgcccttggcaagggcgttctcagtaggaggccggaaaacgagactgtcctgcaccaattctgctgcccggctgctgacgcctgctctgacctggcttcgcaatctgacggctcatgcacacaggctggcggaggaatggaagacagtgttgtggccgctgctgcagtcgctgccggaagaccttccgcccacgctcccaaagcccaggctcaggagcttcaggaagaggaagaacggcctggagccggtgccgcttcgcccagagcaggtccacagcacaaagcctcccctgggcgtcaacagcctgcactagcaactgcgctgtgcccacacgctcctgcagcctctgattacgagctgtccttggacctcaaaaataagcagattgagatgctggaacataaatatgggggtcacctggtctctcggagagccgcttgcaccattcagacggcattcagacagtaccagctgtccaagaatttcgaaaagatccgcaactccctgctggagagtagactccctagacgaatcagcctgcggaaggtgcgctcccccacggccgagagtctcgcggcagaaaaggcgctgatggagggctatggactggttggcttacctttagttaggtctcctagtctcccgcctacattcgcaggcaccctgactgaacttgaagatagcttcacagagcaggtccagagtttggctaaaagtattgatgacgctctgtccacatggtctttgaagacaatgtgttcactacgtgagtccggcgcatatcagctgcatcaggctctccaggcagccgctgggcctcccggactggaggccgaaggtagagccccagagtcggccggaccaggccctggagacgacgcggctgagacaccaggcctcccaccggctcatagcggcacgctgatgatggctttcagagatgtgacggtacagattgctaaccagaacatatccgtgagtagctctaccgctttgagtgtcgccaattgtttgggggctcagaccgtccaggcgcctgcagagccagccgctggaaaagccgagcagggcgaaacatcagggagggaggcgcctgaagccccagcagtcggccgagaggatgcgtctgccgaggactcatgtgctgaggcggctgcctccggcgctgccgacggtgccacagcccctaagacggaggaggaagaagaagaagaagagaccgccgaagtaggcaggggcgctgaagctgaggcgggtgatctggagcagctgagtagctcctccacaagtactaagtcagctaagtccggaagcgaagcatccgcctccgcttccaaagatgctctgcaggccatgatactcagccttcccaggtaccattgtgagaatcctgcctcctgcaaatcccctactctctctacagacacccttagaaagcggctttataggattgggttgaacttatttaatataaatccagacaaggggatacaatttctgataagccggggattcattccagatacacctatcggggttgcgcactttttacttcaacgcaaagggctgagccggcaaatgatcggcgaattccttggcaacagtaagaaacagttcaaccgtgatgttcttgattgcgtggtcgatgaaatggatttcagttccatggaactggatgaagccctaaggaaattccaggcccatattcgggtgcagggcgaagcccagaaggtcgaacgcctgattgaagctttcagtcagcggtattgtatgtgtaacccagaggtggtgcagcagttccataatccagacaccatattcatcctggccttcgcgatcatcctgctgaatacagacatgtactcccccaacattaagcctgatcgcaagatgatgctggaagactttattcggaacctccgaggagtggacgatggggcagatatcccccgagagctggtagtaggaatctatgaacgtatccagcagaaggagcttaaatcgaacgaggaccacgttacatacgttaccaaggtggaaaagagcatcgtcgggatgaaaactgtgctgagtgtgcctcaccgacgactagtctgttgctctcgtttgttcgaagtcactgacgtgaacaagctgcagaagcaagcggctcaccagcgcgaggtcttcctattcaacgatcttttagttattcttaaactgtgcccaaaaaaaaaaagttctagcacctatactttttgtaaaagtgtcgggctgctcgggatgcaatttcagttgtttgagaatgagtactattcgcatggcattaccctcgttacaccgctaagcggctcagagaagaagcaggtactccatttctgcgccttggggtcggatgaaatgcagaaatttgttgaggacctcaaggagtcgatcgctgaagtaactgaactggaacagattcgaattgaatgggaactggagaaacagcagggaactaagactttaagttttaaaccttgcggagcacaaggagatccacaaagcaagcaggggagccctaccgccaaaagagaagccgcactcagggagaggccggctgagtctacggtagaggtgtcgatacacaaccgtctacagacatcccagcacaactccggccttggggctgagaggggcgcaccggtgccccctcctgacctacagccctcgcctccaaggcagcagacgcccccactacctccccctccccctacccctccaggcaccctcgtccaatgtcagcagattgtcaaagtgatcgtgctcgataagccgtgcctcgctagaatggaacccctcttgagccaagctttgagctgctacacttcaagctcatccgactcctgtggaagcacgccgttgggcggacctgggtcacctgtaaaggtcacccaccagccacctctgccccctcctcctcctccatataatcatccacaccaattttgtccacctggaagccttcttcacgggcaccggtacagctcaggctctaggagcctggtttag

SEQ ID NO: 66813 - DNA, 3549 bp, Artificial Sequence
  derived and/or modified sequence
atggaaagcctgctcgagaaccccgtaagagctgtactatacctgaaagaactgactgcgattgtgcagaaccagcagagcctgatccatacccagagggagaggattgatgagctcgaacgcaggcttgatgaactatccgcagagaaccgcagcctctgggagcaccagcaactgttgcaggcccaacctccaccagggttagtgccaccatcatcagcccctctcccagctgccccagctactgcaccagccgctgccgctcgagcacaggaaccgctgcaggatcagggtcagagatcagccgctgctccacaccccgctcccgatcgaccacccaggcagcatcatgggcagctgctcgaacagccacagcggggacccggttctcgggctcacacgccacagagtccccataagcacttaggcacacagggcgctgtaaccgacaaagaaaaggagcgaccccctagttgctgtgcggcagccggtgcgctcctgcagcataaatccccgtccgcgctcgggaagggtgtcttatcgaggagacccgagaacgagacggtcttacaccagttctgctgtcctgctgcagatgcttgcagtgatctggcctcacagagtgatggaagttgtacgcaggcaggcggaggtatggaggactccgttgtggctgcggctgctgtcgcagcaggcaggccctcagcccatgctcctaaagcccaggcccaggagctgcaggaagaggaggaacgcccaggtgcgggagccgcatccccaagagcaggccctcagcataaagccagtcctgggcgtcagcaaccagccttggccacggcactgtgcccccacgctcccgcagcaagcgactacgaattgagcctcgatctgaagaataagcaaatagaaatgctggagcacaagtatgggggacacctggtttctagaagggccgcttgtactatccagaccgcatttcgacagtatcaactttctaaaaactttgagaagattcggaattcgttactggagtcccggctcccaaggcgcattagtctccggaaagtgcgttcccccacagccgagagcctcgccgctgagaaggccctgatggaggggtacggcctcgttggcttacctctcgtgcgctcaccctcattacccccaactttcgcagggacactcactgaactggaagactccttcactgaacaggtgcagtctctggctaaaagtatagatgacgcgctgtctacctggagtctgaaaaccatgtgcagcctgcgggagagcggcgcataccaactgcaccaggccctgcaggctgctgcagggcctccgggacttgaagctgaaggcagggctccggagtctgctggacctgggccaggcgacgacgcagcagagacaccaggcttaccaccagctcatagcggcaccctcatgatggccttcagggatgtcacggtgcagattgcaaaccaaaatatttccgtgtctagttcaaccgccctctcagtggccaattgcctaggggctcagacagtgcaggctcctgcagagccagcagctggcaaagctgagcagggggagaccagtgggagagaggctccagaagccccagcggtaggaagggaggacgccagtgccgaggactcatgtgcggaagctgctgccagcggcgcagccgatggcgctaccgctcctaagactgaggaggaagaagaagaagaggagacagccgaagttggtcgaggtgctgaagcagaagccggtgacttggagcagctttcatctagcagtacctctacgaagagtgccaagtctggcagtgaagcaagcgccagtgcaagcaaagatgctttgcaagccatgattctctctctgcccagatatcattgtgagaatcctgcttcctgtaaatctcccacattgtcaaccgacaccctgcgcaaacgactttacagaatcggtctgaatctcttcaacattaatcctgacaagggcattcagttcttaatttcacgcggttttatccctgataccccaatcggtgtggcacactttctgctgcaacggaagggcttgtctagacagatgattggcgagtttttgggcaactctaaaaaacaattcaatcgagacgtcctggattgtgtagtcgacgagatggattttagttccatggagctggatgaggcactgcggaaatttcaggcgcatatacgcgtgcagggagaggcgcagaaggtggaacggctcattgaagcattctctcagcggtattgtatgtgtaatcctgaggtcgtccagcagtttcataacccagacacgattttcatcctcgcctttgctatcatcctcctgaacacagatatgtacagtcctaacataaagcccgatcgtaaaatgatgcttgaggattttattaggaatttgcgcggtgtcgacgacggggctgatataccaagggaattagtggtgggaatctacgagcgcatacagcagaaggagctgaaatccaatgaagaccatgtgacgtatgttacgaaagtggaaaagtccatcgtcgggatgaaaactgttctgagtgtcccccaccggaggctcgtgtgctgcagcagactattcgaggtcactgacgtcaacaagttgcagaagcaggcggcacaccaaagagaggttttcttgttcaatgatctcctggtaattctgaagctgtgtccaaagaagaaaagctcatccacctatactttctgtaaaagtgttggtctcctgggcatgcaattccagttgttcgaaaatgaatattattctcacggcattaccttggttacccctctctccggatctgagaaaaagcaggtgctgcacttctgtgcactgggctccgatgaaatgcaaaaattcgtcgaagatctgaaggagtccatcgctgaggtcacagaactggagcagattagaattgaatgggaactcgagaagcagcaagggaccaaaactctatcattcaaaccttgcggggctcagggagacccgcagagcaagcagggaagtccaactgccaagagggaggctgctctgcgggaaagaccagccgaaagcacagtcgaagtgtctatacacaatcgcctgcagacgtcacaacataattccggactgggcgcagagcggggtgcccctgtgccaccacccgatctccaaccttccccacccaggcagcagactccccctctgccccctccaccgcctacaccgcctggcacactggtacaatgccagcagatcgtcaaagtgattgtgctcgataagccatgcctggctcgaatggagcctctcctgtcacaagcactctcctgctacaccagtagtagctcagattcttgcggctccacacccctgggaggtccaggatccccagtgaaggtcacacatcagcctccacttcctcctccgccaccaccatacaaccacccccaccaattttgcccaccaggctcgctgctgcacgggcaccgatattcgagcgggtcaagaagccttgtgtag

SEQ ID NO: 66814 - DNA, 3549 bp, Artificial Sequence
  derived and/or modified sequence
atggagagcctgctggagaaccccgtgagagccgtgctgtacctgaaggagctgaccgccatcgtgcagaaccagcagagcctgatccacacccagagagagagaatcgacgagctggagagaagactggacgagctgagcgccgagaacagaagcctgtgggagcaccagcagctgctgcaggcccagcccccccccggcctggtgccccccagcagcgcccccctgcccgccgcccccgccaccgcccccgccgccgccgccagagcccaggagcccctgcaggaccagggccagagaagcgccgccgccccccaccccgcccccgacagaccccccagacagcaccacggccagctgctggagcagccccagagaggccccggcagcagagcccacaccccccagagcccccacaagcacctgggcacccagggcgccgtgaccgacaaggagaaggagagaccccccagctgctgcgccgccgccggcgccctgctgcagcacaagagccccagcgccctgggcaagggcgtgctgagcagaagacccgagaacgagaccgtgctgcaccagttctgctgccccgccgccgacgcctgcagcgacctggccagccagagcgacggcagctgcacccaggccggcggcggcatggaggacagcgtggtggccgccgccgccgtggccgccggcagacccagcgcccacgcccccaaggcccaggcccaggagctgcaggaggaggaggagagacccggcgccggcgccgccagccccagagccggcccccagcacaaggccagccccggcagacagcagcccgccctggccaccgccctgtgcccccacgcccccgccgccagcgactacgagctgagcctggacctgaagaacaagcagatcgagatgctggagcacaagtacggcggccacctggtgagcagaagagccgcctgcaccatccagaccgccttcagacagtaccagctgagcaagaacttcgagaagatcagaaacagcctgctggagagcagactgcccagaagaatcagcctgagaaaggtgagaagccccaccgccgagagcctggccgccgagaaggccctgatggagggctacggcctggtgggcctgcccctggtgagaagccccagcctgccccccaccttcgccggcaccctgaccgagctggaggacagcttcaccgagcaggtgcagagcctggccaagagcatcgacgacgccctgagcacctggagcctgaagaccatgtgcagcctgagagagagcggcgcctaccagctgcaccaggccctgcaggccgccgccggcccccccggcctggaggccgagggcagagcccccgagagcgccggccccggccccggcgacgacgccgccgagacccccggcctgccccccgcccacagcggcaccctgatgatggccttcagagacgtgaccgtgcagatcgccaaccagaacatcagcgtgagcagcagcaccgccctgagcgtggccaactgcctgggcgcccagaccgtgcaggcccccgccgagcccgccgccggcaaggccgagcagggcgagaccagcggcagagaggcccccgaggcccccgccgtgggcagagaggacgccagcgccgaggacagctgcgccgaggccgccgccagcggcgccgccgacggcgccaccgcccccaagaccgaggaggaggaggaggaggaggagaccgccgaggtgggcagaggcgccgaggccgaggccggcgacctggagcagctgagcagcagcagcaccagcaccaagagcgccaagagcggcagcgaggccagcgccagcgccagcaaggacgccctgcaggccatgatcctgagcctgcccagataccactgcgagaaccccgccagctgcaagagccccaccctgagcaccgacaccctgagaaagagactgtacagaatcggcctgaacctgttcaacatcaaccccgacaagggcatccagttcctgatcagcagaggcttcatccccgacacccccatcggcgtggcccacttcctgctgcagagaaagggcctgagcagacagatgatcggcgagttcctgggcaacagcaagaagcagttcaacagagacgtgctggactgcgtggtggacgagatggacttcagcagcatggagctggacgaggccctgagaaagttccaggcccacatcagagtgcagggcgaggcccagaaggtggagagactgatcgaggccttcagccagagatactgcatgtgcaaccccgaggtggtgcagcagttccacaaccccgacaccatcttcatcctggccttcgccatcatcctgctgaacaccgacatgtacagccccaacatcaagcccgacagaaagatgatgctggaggacttcatcagaaacctgagaggcgtggacgacggcgccgacatccccagagagctggtggtgggcatctacgagagaatccagcagaaggagctgaagagcaacgaggaccacgtgacctacgtgaccaaggtggagaagagcatcgtgggcatgaagaccgtgctgagcgtgccccacagaagactggtgtgctgcagcagactgttcgaggtgaccgacgtgaacaagctgcagaagcaggccgcccaccagagagaggtgttcctgttcaacgacctgctggtgatcctgaagctgtgccccaagaagaagagcagcagcacctacaccttctgcaagagcgtgggcctgctgggcatgcagttccagctgttcgagaacgagtactacagccacggcatcaccctggtgacccccctgagcggcagcgagaagaagcaggtgctgcacttctgcgccctgggcagcgacgagatgcagaagttcgtggaggacctgaaggagagcatcgccgaggtgaccgagctggagcagatcagaatcgagtgggagctggagaagcagcagggcaccaagaccctgagcttcaagccctgcggcgcccagggcgacccccagagcaagcagggcagccccaccgccaagagagaggccgccctgagagagagacccgccgagagcaccgtggaggtgagcatccacaacagactgcagaccagccagcacaacagcggcctgggcgccgagagaggcgcccccgtgcccccccccgacctgcagcccagcccccccagacagcagaccccccccctgcccccccccccccccaccccccccggcaccctggtgcagtgccagcagatcgtgaaggtgatcgtgctggacaagccctgcctggccagaatggagcccctgctgagccaggccctgagctgctacaccagcagcagcagcgacagctgcggcagcacccccctgggcggccccggcagccccgtgaaggtgacccaccagccccccctgcccccccccccccccccctacaaccacccccaccagttctgcccccccggcagcctgctgcacggccacagatacagcagcggcagcagaagcctggtgtag

SEQ ID NO: 66815 - protein, 133 aa, Artificial Sequence
  derived and/or modified sequence
MPMAGLLKGLVRQLERFSVQQQASKMPPKGKSGSGKAGKGGAASGSDSADKKAQGPKGGGNAVKVRHILCEKHGKIMEAMEKLKSGMRFNEVAAQYSEDKARQGIPSLQQHAGHHRDLRSTLISLVSYLQTTP

SEQ ID NO: 66816 - DNA, 402 bp, Artificial Sequence
  derived and/or modified sequence
atgccaatggctggcctacttaagggactggtgcgccagctggaacgcttttcagtgcagcaacaggcttcaaaaatgccccctaaaggaaaatccggatcgggtaaggccggaaaggggggggccgcctccggctcagactctgcagataagaaggcccaggggcccaaggggggaggcaacgcagttaaggtgagacatatactctgcgagaagcatggcaagataatggaggccatggaaaagctcaaatcagggatgcgatttaacgaagtggctgctcagtattccgaagataaagctaggcaggggatcccctcactccaacagcacgctggacatcatcgggatctgcggtccaccctaatctcgctggtatcctacctgcagaccacgccatag

SEQ ID NO: 66817 - DNA, 402 bp, Artificial Sequence
  derived and/or modified sequence
atgcccatggccggcctgctgaagggcctggtgcggcagctggagcgcttctctgtgcagcagcaggccagcaagatgccacccaagggcaagagcggcagcggcaaggccgggaaaggaggagctgccagcggcagtgacagcgctgacaagaaggcccagggccccaagggcggcggcaatgctgtgaaggtgcgccacatcctgtgtgagaagcacggcaagatcatggaggccatggagaagctgaagagcggcatgaggttcaatgaggtggccgcccagtacagcgaggacaaggcccggcagggcatccccagcctgcagcagcacgccggccaccaccgggacctgcggagcaccctcatcagcctggtgtcctacctgcagaccaccccctag

SEQ ID NO: 66818 - DNA, 402 bp, Artificial Sequence
  derived and/or modified sequence
atgcccatggccggcctgctgaagggcctggtgcggcagctggagcgcttctcagtacagcagcaggcgtctaagatgcctcctaaaggtaagagtggctcaggaaaggcaggcaaaggaggggccgcctcgggcagcgactcggccgataaaaaggcccaggggccaaagggcggaggcaatgctgttaaagtacggcacattctctgcgagaagcacggaaagatcatggaggccatggagaagctcaaaagtggtatgcggttcaacgaggttgccgcccaatatagcgaggacaaagcgcggcaagggattccaagtttgcaacaacatgctggtcaccatcgcgacctccggtccaccctgatttccctcgtatcctacttacagactactccatag

SEQ ID NO: 66819 - DNA, 402 bp, Artificial Sequence
  derived and/or modified sequence
atgccaatggccggtttgctgaaaggcttagtgaggcaactcgagaggttttcagttcagcaacaagccagtaaaatgcctccaaaaggaaaaagcggcagcgggaaagccggaaagggaggcgctgcctctggatccgactccgctgacaaaaaggcgcagggcccaaaaggcggtggcaatgctgtgaaagtcagacacatcctgtgcgaaaagcacggaaagattatggaggctatggagaaactgaagtctggcatgcggttcaatgaggtggctgcacagtactccgaggataaagcacgacagggcattcctagtctgcagcagcacgccggacatcatagagatctgagaagtactctaatctcgctggtgagctacttgcagaccaccccctag

SEQ ID NO: 66820 - DNA, 1605 bp, Artificial Sequence
  derived and/or modified sequence
aattgagatgcggctttcaggcatttgtttaggacatgcccatggcggggcttctaaaggggcttgtacggcaactggagcggttcagcgttcaacaacaagcttccaagatgccgcccaaaggaaaaagtggttctggaaaagcggggaaagggggagcagcctctgggagtgacagtgctgacaagaaggctcaaggtcccaaaggtggtggcaatgcagtaaaggtcagacacattctatgtgaaaaacatggcaaaatcatggaagccatggaaaagttaaagtctgggatgagattcaatgaagtggccgcacagtatagtgaagataaagccaggcaagggattcccagcctgcagcaacatgctggtcaccatagagacctgagaagcaccctcatctcattggtatcatatttacaaaccaccccttaaagtggattattttgcagatggctgatctcatctattcaatgttgattctattagttccaatttcagaaggtgacattttctgactttgtccccttaagcacaaacaaaaactatggatttttgtttttgttttcagaaaagagaaagtacaaggtgtgcttggggaacagcaaggaaaccagacagatgtgggggcgggtttgtaggggaactgctggatgtacctcattaatttgttcatttgttcagcacccacagggtgccagtgaacgggctaggtgctggggatagagtggtgaacaagatgagccttatgcacctcacagtctcctgggggagacagccaaatagacaattttaatacaatgtggcaaattctatgatgggaagaagagagaaatggtgtgtgtgagtccctcaccttcccagaggtttcccaggggaagcaacgtttcagctgagacctgaaggatggatgacagtccaccagaaaaaagttagtggagcggggacaagcagggttgcagagtggaagaaaaatgttcctgtgagaagaaactgtccaaagagtctgaagagaaaagggaacagggtgaatttgaggccctacaagaaaaacaggagaccattcaacaggagacgcccagggagcaggtggctttgtgggcctgatgtccaagaaagaagtcgtggtggtaaacagagacttgggattgcaagctactgttgtctttctattgaaaaaatagctgagcaccacactagggaggccttgcaaggacagcccaaagaatttgaacttgattctacaggcagtgattttgaacaagaggttttgaagagaacgtgacacacgtcaagctgagctctagggagtgggcagcagcctgcagaagagggactaggctaggagcacagaaagtagcccacggcagaggtagcagaaggaatggaggagtgcccatgtgaggggtactgaggtggcacacttgccagaatcagggcagcctgcttggtctcataccagctggaaccagttcctaccagctcccaagggctaattgttaaactttcaggaattttctcagcattcattaaaaatgaaaaaaagtatcaatattaaaaatatttttgctggacatggtgtctcaggcctgtaatcccagct

SEQ ID NO: 66821 - DNA, 402 bp, Artificial Sequence
  derived and/or modified sequence
atgcccatggccggcctgctgaagggcctggtgagacagctggagagattcagcgtgcagcagcaggccagcaagatgccccccaagggcaagagcggcagcggcaaggccggcaagggcggcgccgccagcggcagcgacagcgccgacaagaaggcccagggccccaagggcggcggcaacgccgtgaaggtgagacacatcctgtgcgagaagcacggcaagatcatggaggccatggagaagctgaagagcggcatgagattcaacgaggtggccgcccagtacagcgaggacaaggccagacagggcatccccagcctgcagcagcacgccggccaccacagagacctgagaagcaccctgatcagcctggtgagctacctgcagaccaccccctag

SEQ ID NO: 66822 - protein, 444 aa, Artificial Sequence
  derived and/or modified sequence
MGSPAHRPALLLLLPPLLLLLLLRVPPSRSFPDTPWCSPIKVKYGDVYCRAPQGGYYKTALGTRCDIRCQKGYELHGSSLLICQSNKRWSDKVICKQKRCPTLAMPANGGFKCVDGAYFNSRCEYYCSPGYTLKGERTVTCMDNKAWSGRPASCVDMEPPRIKCPSVKERIAEPNKLTVRVSWETPEGRDTADGILTDVILKGLPPGSNFPEGDHKIQYTVYDRAENKGTCKFRVKVRVKRCGKLNAPENGYMKCSSDGDNYGATCEFSCIGGYELQGSPARVCQSNLAWSGTEPTCAAMNVNVGVRTAAALLDQFYEKRRLLIVSTPTARNLLYRLQLGMLQQAQCGLDLRHITVVELVGVFPTLIGRIGAKIMPPALALQLRLLLRIPLYSFSMVLVDKHGMDKERYVSLVMPVALFNLIDTFPLRKEEMVLQAEMSQTCNT

SEQ ID NO: 66823 - DNA, 1356 bp, Artificial Sequence
  derived and/or modified sequence
atggacttcgacgtgggcagaaccacccacctgagcagcagcccctgcagcgccagcaacggcggcgagagcggccaggtgagcaagagaagatgcctgatcggcgagagcggccacgacaccccctggtgcagccccatcaaggtgaagtacggcgacgtgtactgcagagccccccagggcggctactacaagaccgccctgggcaccagatgcgacatcagatgccagaagggctacgagctgcacggcagcagcctgctgatctgccagagcaacaagagatggagcgacaaggtgatctgcaagcagaagagatgccccaccctggccatgcccgccaacggcggcttcaagtgcgtggacggcgcctacttcaacagcagatgcgagtactactgcagccccggctacaccctgaagggcgagagaaccgtgacctgcatggacaacaaggcctggagcggcagacccgccagctgcgtggacatggagccccccagaatcaagtgccccagcgtgaaggagagaatcgccgagcccaacaagctgaccgtgagagtgagctgggagacccccgagggcagagacaccgccgacggcatcctgaccgacgtgatcctgaagggcctgccccccggcagcaacttccccgagggcgaccacaagatccagtacaccgtgtacgacagagccgagaacaagggcacctgcaagttcagagtgaaggtgagagtgaagagatgcggcaagctgaacgcccccgagaacggctacatgaagtgcagcagcgacggcgacaactacggcgccacctgcgagttcagctgcatcggcggctacgagctgcagggcagccccgccagagtgtgccagagcaacctggcctggagcggcaccgagcccacctgcgccgccatgaacgtgaacgtgggcgtgagaaccgccgccgccctgctggaccagttctacgagaagagaagactgctgatcgtgagcacccccaccgccagaaacctgctgtacagactgcagctgggcatgctgcagcaggcccagtgcggcctggacctgagacacatcaccgtggtggagctggtgggcgtgttccccaccctgatcggcagaatcggcgccaagatcatgccccccgccctggccctgcagctgagactgctgctgagaatccccctgtacagcttcagcatggtgctggtggacaagcacggcatggacaaggagagatacgtgagcctggtgatgcccgtggccctgttcaacctgatcgacaccttccccctgagaaaggaggagatggtgctgcaggccgagatgagccagacctgcaacacctag

SEQ ID NO: 66824 - DNA, 1335 bp, Artificial Sequence
  derived and/or modified sequence
atgggcagccccgcccacagacccgccctgctgctgctgctgccccccctgctgctgctgctgctgctgagagtgccccccagcagaagcttccccgacaccccctggtgcagccccatcaaggtgaagtacggcgacgtgtactgcagagccccccagggcggctactacaagaccgccctgggcaccagatgcgacatcagatgccagaagggctacgagctgcacggcagcagcctgctgatctgccagagcaacaagagatggagcgacaaggtgatctgcaagcagaagagatgccccaccctggccatgcccgccaacggcggcttcaagtgcgtggacggcgcctacttcaacagcagatgcgagtactactgcagccccggctacaccctgaagggcgagagaaccgtgacctgcatggacaacaaggcctggagcggcagacccgccagctgcgtggacatggagccccccagaatcaagtgccccagcgtgaaggagagaatcgccgagcccaacaagctgaccgtgagagtgagctgggagacccccgagggcagagacaccgccgacggcatcctgaccgacgtgatcctgaagggcctgccccccggcagcaacttccccgagggcgaccacaagatccagtacaccgtgtacgacagagccgagaacaagggcacctgcaagttcagagtgaaggtgagagtgaagagatgcggcaagctgaacgcccccgagaacggctacatgaagtgcagcagcgacggcgacaactacggcgccacctgcgagttcagctgcatcggcggctacgagctgcagggcagccccgccagagtgtgccagagcaacctggcctggagcggcaccgagcccacctgcgccgccatgaacgtgaacgtgggcgtgagaaccgccgccgccctgctggaccagttctacgagaagagaagactgctgatcgtgagcacccccaccgccagaaacctgctgtacagactgcagctgggcatgctgcagcaggcccagtgcggcctggacctgagacacatcaccgtggtggagctggtgggcgtgttccccaccctgatcggcagaatcggcgccaagatcatgccccccgccctggccctgcagctgagactgctgctgagaatccccctgtacagcttcagcatggtgctggtggacaagcacggcatggacaaggagagatacgtgagcctggtgatgcccgtggccctgttcaacctgatcgacaccttccccctgagaaaggaggagatggtgctgcaggccgagatgagccagacctgcaacacctag

SEQ ID NO: 66825 - DNA, 1356 bp, Artificial Sequence
  derived and/or modified sequence
atggattttgatgtgggccgcaccactcatctttcctcttccccctgtagtgcttcgaatggcggtgagagtggacaggttagcaaaagaaggtgcctaatcggcgagagcggccacgacaccccttggtgttctcctataaaggttaaatatggtgatgtgtattgcagagcccctcagggaggatactacaagaccgccctcggcactcgttgcgatattcgctgccagaaaggatatgagctacatggatcatccttattaatttgccaatccaacaaaaggtggagcgacaaagttatttgtaagcagaagaggtgccctactttagcaatgcccgcgaacggagggttcaagtgtgttgatggcgcatacttcaatagcaggtgtgagtattactgctcccctggatacactctcaagggagagaggacagtgacttgtatggacaataaggcttggagcggccgcccagcgagctgcgtcgatatggagccacctaggattaaatgcccctctgttaaggagcgtattgcggaaccaaacaagctgactgtgagggtgtcttgggaaacgccggagggacgagatactgcagacggaattctgaccgatgtaattctcaagggactgcctccagggagcaatttccctgaaggagaccataagattcagtacactgtgtacgatcgggccgaaaataagggcacgtgtaaatttagagtaaaagttagagtgaagcgctgtggaaaactgaacgcccctgaaaacggctatatgaaatgctcttcggacggtgacaactacggagcaacctgtgaattttcttgcattggcggctatgagttacagggttcccccgcgcgggtgtgtcagtctaatctcgcctggtccgggaccgaacctacatgcgccgctatgaatgtgaacgtgggagtgcggactgccgcagccctgctggatcagttctatgaaaaacggagacttctgattgtctcaacacccactgcacggaacctgctgtacaggttgcaactcggaatgttgcagcaggcgcagtgcggtctagatcttcgccatatcacagttgttgagctcgtaggggtgttccccactctcatcggccgtatcggtgcaaaaattatgcctccagcactcgcactccaactgaggctgctgctgagaatacccctgtactccttcagcatggtgctcgtagataaacatgggatggataaagaacgctatgtctcactcgtgatgcccgtggccctcttcaatctcatcgatacttttcctcttcgaaaagaggaaatggtcctccaggcagagatgtcacaaacttgtaacacatag

SEQ ID NO: 66826 - DNA, 1335 bp, Artificial Sequence
  derived and/or modified sequence
atgggttctcctgctcaccgaccagctttgttgcttctgttgccccctctcctgctcctcttattgctcagggtaccgccctcccgatccttccccgacaccccatggtgttcacccattaaagtcaaatacggcgacgtgtattgccgggcaccccaaggtgggtactataagactgccctagggacccgatgcgacattcgatgtcaaaaaggatacgaattgcacggctcttcattgttaatctgtcagagcaacaagaggtggtccgacaaggtgatatgcaagcagaagcggtgcccgaccctagctatgcctgcaaacggcggtttcaagtgtgtagatggcgcttacttcaacagtcgatgtgaatattattgttcaccagggtatactttaaaaggcgaacgtaccgtgacatgcatggataataaggcctggtccggtaggcccgcatcttgcgtcgacatggagccccctcgcataaagtgtcccagcgtcaaagagagaatcgctgaaccaaataagctgactgtacgtgtgtcctgggagacacccgaaggtagggatactgccgatggtattcttactgacgtgatcctgaaggggttaccaccggggtctaatttccccgagggcgaccataagatccagtataccgtgtatgacagagctgaaaataagggcacttgcaaattcagagtaaaggtgcgcgtgaagagatgtgggaagctgaacgctccagagaacgggtatatgaagtgttcctctgatggcgacaactacggcgctacctgcgaattttcctgcattggtggctacgagctgcaggggtccccagctagggtgtgccagtcaaatctggcgtggagtgggacggaacccacgtgtgccgcaatgaatgttaacgtcggcgtacgaacagccgctgcccttcttgatcagttctatgaaaaacggagattgcttatagtttccactccaacagcccgcaatttactgtatcgactacagcttggtatgctccaacaggcccagtgtggactcgatctgcgacatattaccgtagtggaacttgtgggtgtgtttcctacactgatcggcaggataggcgcgaagattatgccaccagcattagccctgcagctgcggctgctgttacgcatccccctttattctttcagtatggttcttgtcgacaagcacggcatggataaggaacgttatgtgagcttggtgatgcccgtagcgctgttcaacctgatagatacgttccccctgagaaaggaagagatggtcctgcaggcggaaatgtcacagacatgtaatacatag

SEQ ID NO: 66827 - DNA, 1356 bp, Artificial Sequence
  derived and/or modified sequence
atggactttgatgtgggccgcaccacccacctgagcagcagcccctgcagcgccagcaatggaggagagagcggccaggtgtccaagaggcgctgcctgattggagagagcggccatgacaccccctggtgcagccccatcaaggtgaagtatggagatgtgtactgccgggccccccagggcggctactacaagacagccctgggcacccgctgtgacatccgctgccagaagggctatgagctgcacggcagcagcctgctgatctgccagagcaacaagcgctggagcgacaaggtgatctgcaagcagaagcgctgccccaccctggccatgcctgccaatggaggcttcaagtgtgtggatggagcctacttcaacagccgctgtgagtactactgcagccctggctacaccctgaagggggagaggacagtgacctgcatggacaacaaggcctggagcggccggcctgccagctgtgtggacatggagcccccacgcatcaagtgccccagcgtgaaggagagaattgctgagcccaacaagctgactgtgcgggtgtcctgggagaccccagagggccgggacacagcagatggcatcctgacagatgtgatcctgaagggcctgcccccaggcagcaacttccctgagggggaccacaagatccagtacacagtgtatgacagagcagaaaataaaggcacctgcaagttccgggtgaaggtgcgggtgaagagatgtgggaagctgaatgccccagaaaatggctacatgaagtgcagcagtgatggagacaactatggagccacctgtgagttcagctgcatcggcggctatgagctgcagggcagccctgcccgggtgtgccagagcaacctggcctggagcggcacagagcccacctgtgccgccatgaatgtgaatgtgggcgtgaggacagctgctgccctgctggaccagttctatgagaagaggcggctgctgattgtgtccacccccacagccaggaacctgctgtaccgcctgcagctgggcatgctgcagcaggcccagtgtggcctggacctgcggcacatcaccgtggtggagctggtgggcgtcttccccaccctcatcggcagaattggagccaagatcatgcccccagccctggccctgcagctgcggctgctgctgcgcatccccctgtacagcttctccatggtgctggtggacaagcacggcatggacaaggagcgctacgtgtccctggtgatgcctgtggccctcttcaacctgattgacaccttccccctgaggaaggaggagatggtgctgcaggccgagatgagccagacctgcaacacctag

SEQ ID NO: 66828 - DNA, 1335 bp, Artificial Sequence
  derived and/or modified sequence
atgggcagccctgcccacaggcctgccctgctgctgctgctgccccccctgctgctgctgctgctgctgcgggtgccccccagccgctccttcccagacaccccctggtgcagccccatcaaggtgaagtatggagatgtgtactgccgggccccccagggcggctactacaagacagccctgggcacccgctgtgacatccgctgccagaagggctatgagctgcacggcagcagcctgctgatctgccagagcaacaagcgctggagcgacaaggtgatctgcaagcagaagcgctgccccaccctggccatgcctgccaacggcggcttcaagtgtgtggatggagcctacttcaacagccgctgtgagtactactgcagccctggctacaccctgaagggggagaggacagtgacctgcatggacaacaaggcctggagcggccgcccagccagctgtgtggacatggagcccccacgcatcaagtgccccagcgtgaaggagagaattgctgagcccaacaagctgactgtgcgggtgtcctgggagaccccagagggccgggacacagcagatggcatcctgacagatgtgatcctgaagggcctgcccccaggcagcaacttccctgagggggaccacaagatccagtacacagtgtatgacagagctgagaacaagggcacctgcaagttccgggtgaaggtgcgggtgaagagatgtgggaagctgaatgccccagaaaatggctacatgaagtgcagcagtgatggagacaactacggggccacctgtgagttcagctgcattggaggctatgagctgcagggcagccctgcccgggtgtgccagagcaacctggcctggagcggcacagagcccacctgtgccgccatgaatgtgaatgtgggcgtgaggacagctgctgccctgctggaccagttctatgagaagaggcggctgctgattgtgtccacccccacagccaggaacctgctgtaccgcctgcagctgggcatgctgcagcaggcccagtgtggcctggacctgcggcacatcaccgtggtggagctggtgggcgtcttccccaccctgattggccgcatcggggccaagatcatgcccccagccctggccctgcagctgcggctgctgctgcgcatccccctgtacagcttctccatggtgctggtggacaagcacggcatggacaaggagagatatgtgtccctggtgatgcctgtggccctcttcaacctgattgacaccttccccctgaggaaggaggagatggtgctgcaggccgagatgagccagacctgcaacacctag

SEQ ID NO: 66829 - DNA, 1356 bp, Artificial Sequence
  derived and/or modified sequence
atggacttcgacgtgggccggaccacccacctgagcagcagcccctgctccgcctcgaatggcggagagtctggacaggtcagcaagcgccgatgtctgattggagagagcggccacgacacaccatggtgttcccctatcaaagtaaagtacggcgatgtttattgcagagccccacaaggcggttactacaagactgccctgggcaccagatgtgacattcgctgccagaagggatatgaattacacggttcttccctgctcatctgccagagcaacaaaaggtggtctgacaaggtgatttgcaagcagaaacgatgtccaactctggcaatgcccgcgaacggggggtttaaatgtgtggacggggcttatttcaactcccgttgcgagtactactgctcccccggatataccctgaaaggcgagcgcactgtgacctgcatggacaacaaggcttggagcggacgtccagcttcttgcgtggatatggaaccacccaggataaagtgcccatccgtgaaagaacgtattgctgaacctaacaagctgaccgtgagggtgagttgggaaaccccagaggggagggacacggccgacggcatcctgacggatgtgattctcaaaggtttaccgccagggtcaaatttccccgagggggatcacaagatccaatataccgtttatgatagagctgagaacaaaggcacgtgtaagttccgcgtaaaggtgagggtaaagcggtgtggcaaactgaacgcccccgagaatggctacatgaagtgctcctccgatggagataattacggggctacctgtgagttctcctgtatcggtggatacgaactccagggatcaccagcccgcgtgtgtcagtccaacctggcctggagtggaacagagccgacctgtgccgccatgaatgtgaatgttggagtaagaaccgcagctgcattgcttgaccagttttatgaaaaacgcaggttactgattgtgtctactccgacggcaagaaatcttttgtatcgtctgcagctggggatgttgcagcaagcacagtgcggcctcgacttgagacatattaccgtcgtagagctggttggtgtcttccctactctcattgggcggataggcgctaaaataatgcctcccgccctagctctccagctgcggttgctgttgagaataccgctgtacagcttctctatggttctcgtagataagcatggcatggataaggaacggtatgtgagtctggtcatgccggtcgctttgttcaacctgatcgatacttttcccctgagaaaagaagaaatggtgttacaggcagaaatgagccagacttgcaatacatag

SEQ ID NO: 66830 - DNA, 1335 bp, Artificial Sequence
  derived and/or modified sequence
atgggcagccccgcccaccggcccgccctgctgctgctgctgccccccttacttttgctcctcctgctccgtgttcctccttcccgttcctttcccgatacgccctggtgttctccaataaaagtgaaatacggggacgtttactgccgcgccccccagggtgggtattacaaaaccgccttaggaaccagatgtgatataaggtgccaaaaaggctatgagctccatggttcttctttactgatttgccagagcaacaaacgttggtctgacaaagtgatttgcaagcagaaacgatgtcccactctcgctatgccagcgaacggcggctttaagtgtgtcgatggagcctatttcaactcgaggtgtgagtattattgctcccccgggtataccctcaagggagaacgcacagtgacctgtatggacaataaggcttggtctgggcgccctgcgtcttgtgtcgacatggagccacccaggatcaagtgccctagcgtgaaggaacggatcgccgaacccaataagcttacagtccgtgtgtcatgggagacaccggagggccgagacaccgccgatggcattttgaccgatgtcatcttaaaaggactcccaccagggagtaacttcccagagggagatcataaaattcagtataccgtttacgaccgggctgagaataagggcacatgtaagttcagagtgaaggtccgcgtgaaaagatgtggcaaactcaacgcgccggagaacggctatatgaaatgttcgagcgacggggacaattacggagccacctgcgagttctcgtgcataggagggtacgagctgcagggatcgcctgctagagtgtgccagtcaaacctggcttggagcggaaccgagccaacctgcgccgctatgaatgtgaacgtgggggtgcgtacagccgcagcgctgcttgaccagttctacgaaaagcgtcgcctgttgatagtgagtacaccgacagcccggaatctgctgtacagactccaactgggcatgctgcagcaggcccagtgtgggctggacctgcgacacattactgtcgtggagctggttggcgtcttcccaacactcatcggacgcatcggagccaaaattatgccaccagctctggccctgcagctccgcctgctgctgcgtatccccctgtattccttcagcatggtcctggtagacaaacacggcatggacaaggagcggtacgtcagcctggtaatgcccgtggcgctgtttaatctcatcgatacattccctctccgaaaagaggagatggtgcttcaggccgaaatgagccaaacttgcaatacgtag

SEQ ID NO: 66831 - DNA, 1356 bp, Artificial Sequence
  derived and/or modified sequence
atggatttcgatgtcgggcgtacaacacacctgagctcaagcccttgcagtgcatctaatggaggggagtcaggccaagtcagcaagcggcgatgtctaattggtgagtctggtcacgacaccccgtggtgttccccaatcaaggttaaatacggagacgtttactgccgagcacctcagggtggttactacaagacagctctcggtaccagatgtgacattcgctgccagaagggttacgagctgcatggcagcagcttgctgatctgccagagcaacaagagatggagcgacaaggtaatatgcaagcaaaaacgatgtcccacactagccatgcccgcaaacggaggattcaaatgcgtggacggcgcttacttcaacagccgctgtgagtactattgcagcccaggatacacattgaaaggtgaaaggacagttacgtgcatggataataaggcctggtctggccgaccagcatcttgtgtggatatggagccgccacggatcaaatgtcctagcgtgaaggagcgcatcgcagagcccaacaaactgacagtgcgcgtgagttgggagactcctgagggccgtgatactgcagacggcatattgacagatgtgattctaaagggcctcccaccgggatctaatttcccggaaggagatcacaagatccagtacacagtgtacgatcgcgctgagaataaaggaacttgtaaatttagggtgaaggtgagagtgaagcgctgcgggaagcttaacgcccctgagaacggttacatgaagtgctcttcggacggcgataattacggagcaacctgtgaattttcatgcatcggcggatatgagttgcagggctcaccagctagggtttgccagtcgaaccttgcttggagtgggacagaaccgacctgcgccgcaatgaatgttaacgttggcgtacgaaccgccgctgccctgctggaccagttttacgaaaagagaagactgctgatcgtgtcaacacctactgcacgcaacttgctgtaccggctgcagctgggcatgttacagcaggcccagtgcggactcgaccttaggcatattactgttgtggagctggttggcgtcttccccaccctcatcggccgtatcggcgctaagatcatgccaccggctctggctttgcagctccgcttgctgctgagaatccccctctactcattcagcatggttctggtcgacaaacatgggatggacaaagagcgatatgtctcactggtgatgccagttgcgctttttaatttaatcgacacctttccactacgcaaggaagagatggtactccaggcagaaatgtcgcagacctgcaacacctag

SEQ ID NO: 66832 - DNA, 1335 bp, Artificial Sequence
  derived and/or modified sequence
atgggtagccccgcacacagacctgccctgctgctgcttttaccacccctgttgcttttgctcctcctgcgagtccccccaagtagatcctttcctgatacaccttggtgcagccctattaaggtgaagtacggtgatgtgtactgccgggcaccacagggcggatactacaaaacggcactgggtactcggtgtgatataaggtgccagaagggatacgaactgcatggctcttctctgttaatctgccagtcgaataaaaggtggtccgacaaggtgatatgtaagcagaagcgttgccccacgctggctatgcccgcaaatggcggatttaagtgcgtggatggggcttacttcaactcgaggtgtgagtactattgctccccaggatacaccctgaaaggcgagagaacagtaacctgtatggacaataaggcttggtcaggccgaccggcatcctgtgtcgacatggaaccacccaggattaaatgcccctcagtaaaagaacgcatcgctgagcccaataagttgaccgttcgggtgtcttgggaaacaccagaagggcgtgacaccgccgatggcatcctcacagacgtgattttgaaaggcctgccccctggctcaaactttcccgagggcgatcacaagattcagtataccgtgtacgaccgagctgagaataagggtacctgcaagttcagagttaaagtcagggttaagagatgcggaaaactcaacgcacctgagaacggctatatgaagtgtagctccgacggcgacaactatggagctacctgcgagtttagttgcattggcggatatgaacttcagggaagtcctgctagggtctgtcaaagcaacttagcttggtccggaacagagccaacatgtgcagctatgaatgtcaacgtgggcgtgagaaccgctgcagcgctgctagaccaattctacgagaaaagacggttactgatagtctcaacacccaccgcgaggaacctactgtacaggctacagctgggcatgctccagcaggcccaatgcggcttggatctgcggcacatcaccgtagtggaactcgtcggagttttcccaacgctgatcggacgaatcggcgcaaaaatcatgccacccgctctggccctgcaactccgcctgttgctgcgcatacccctgtatagcttcagtatggttctggttgacaagcacgggatggataaagaacggtacgtttccttggtgatgcccgttgcactttttaacctgatcgacacatttcctctcaggaaagaggaaatggtcctccaggccgagatgagccagacttgcaatacatag

SEQ ID NO: 66833 - DNA, 1725 bp, Artificial Sequence
  derived and/or modified sequence
atggactttgacgtcggcagaactacacacctaagttccagtccctgctctgccagtaacgggggtgaatctgggcaagtttctaagcgtcggtgtcttattggagaaagtggacatgataccccgtggtgctcccccatcaaggtgaagtatggggatgtgtactgcagggcccctcaaggaggatactacaaaacagccctgggaaccaggtgcgacattcgctgccagaagggctacgagctgcatggctcttccctactgatctgccagtcaaacaaacgatggtctgacaaggtcatctgcaaacaaaagcgatgtcctacccttgccatgccagcaaatggagggtttaagtgtgtagatggtgcctactttaactcccggtgtgagtattattgttcaccaggatacacgttgaaaggggagcggaccgtcacatgtatggacaacaaggcctggagcggccggccagcctcctgtgtggatatggaacctcctagaatcaagtgcccaagtgtgaaggaacgcattgcagaacccaacaaactgacagtccgggtgtcctgggagacacccgaaggaagagacacagcagatggaattcttactgatgtcattctaaaaggcctccccccaggctccaactttccagaaggagaccacaagatccagtacacagtctatgacagagctgagaataagggcacttgcaaatttcgagttaaagtaagagtcaaacgctgtggcaaactcaatgccccagagaatggttacatgaagtgctccagcgacggtgataattatggagccacctgtgagttctcctgcatcggcggctatgagctccagggtagccctgcccgagtatgtcaatccaacctggcttggtctggcacggagcccacctgtgcagccatgaacgtcaatgtgggtgtcagaacggcagctgcacttctggatcagttttatgagaaaaggagactcctcattgtgtccacacccacagcccgaaacctcctttaccggctccagctaggaatgctgcagcaagcacagtgtggccttgatcttcgacacatcaccgtggtggagctggtgggtgtgttcccgactctcattggcaggataggagcaaagattatgcctccagccctagcgctgcagctcaggctgttgctgcgaatcccactctactccttcagtatggtgctagtggataagcatggcatggacaaagagcgctatgtctccctggtgatgcctgtggccctgttcaacctgattgacacttttcccttgagaaaagaagagatggtcctacaagccgaaatgagccagacctgtaacacctgacatgatggttcctctcttggcaattcctcttcattgtctacatagtgacatgcacacgggaaagccttaaaaatatccttgatgtacagattttatttgtaattttaaaagtctattttattatgagctttctttgcacttaaaaattagcatgctgctttttgtacttggaagtgtttcaaaaaattatatgaccatatttactctttctaactttctttactccatcatggctgcttgattttgtagagaaattagaacccataaccatacacaggctatcaacatgttattcaatgtgacacctaactcttttctattttgttttttaagtaagacttttattaataaaacaaaatgttttggagc

SEQ ID NO: 66834 - DNA, 1842 bp, Artificial Sequence
  derived and/or modified sequence
agaggcgagaggaggagttttccagcccggccttcgcccgcccgctagcacgcagtcccttggtctcttcggtctcctgccgcccccgggaagcgcgctgcgctgccgaggcgagctaagcgcccgctcgccatggggagccccgcacatcggcccgcgctgctgctgctgctgccgcctctgctgctgctgctgctgctgcgcgtcccgcccagccgcagcttcccagataccccgtggtgctcccccatcaaggtgaagtatggggatgtgtactgcagggcccctcaaggaggatactacaaaacagccctgggaaccaggtgcgacattcgctgccagaagggctacgagctgcatggctcttccctactgatctgccagtcaaacaaacgatggtctgacaaggtcatctgcaaacaaaagcgatgtcctacccttgccatgccagcaaatggagggtttaagtgtgtagatggtgcctactttaactcccggtgtgagtattattgttcaccaggatacacgttgaaaggggagcggaccgtcacatgtatggacaacaaggcctggagcggccggccagcctcctgtgtggatatggaacctcctagaatcaagtgcccaagtgtgaaggaacgcattgcagaacccaacaaactgacagtccgggtgtcctgggagacacccgaaggaagagacacagcagatggaattcttactgatgtcattctaaaaggcctccccccaggctccaactttccagaaggagaccacaagatccagtacacagtctatgacagagctgagaataagggcacttgcaaatttcgagttaaagtaagagtcaaacgctgtggcaaactcaatgccccagagaatggttacatgaagtgctccagcgacggtgataattatggagccacctgtgagttctcctgcatcggcggctatgagctccagggtagccctgcccgagtatgtcaatccaacctggcttggtctggcacggagcccacctgtgcagccatgaacgtcaatgtgggtgtcagaacggcagctgcacttctggatcagttttatgagaaaaggagactcctcattgtgtccacacccacagcccgaaacctcctttaccggctccagctaggaatgctgcagcaagcacagtgtggccttgatcttcgacacatcaccgtggtggagctggtgggtgtgttcccgactctcattggcaggataggagcaaagattatgcctccagccctagcgctgcagctcaggctgttgctgcgaatcccactctactccttcagtatggtgctagtggataagcatggcatggacaaagagcgctatgtctccctggtgatgcctgtggccctgttcaacctgattgacacttttcccttgagaaaagaagagatggtcctacaagccgaaatgagccagacctgtaacacctgacatgatggttcctctcttggcaattcctcttcattgtctacatagtgacatgcacacgggaaagccttaaaaatatccttgatgtacagattttatttgtaattttaaaagtctattttattatgagctttctttgcacttaaaaattagcatgctgctttttgtacttggaagtgtttcaaaaaattatatgaccatatttactctttctaactttctttactccatcatggctgcttgattttgtagagaaattagaacccataaccatacacaggctatcaacatgttattcaatgtgacacctaactcttttctattttgttttttaagtaagacttttattaataaaacaaaatgttttggagcaaattt

SEQ ID NO: 66835 - protein, 405 aa, Artificial Sequence
  derived and/or modified sequence
MGSPAHRPALLLLLPPLLLLLLLRVPPSRSFPGSGDSPLEDDEVGYSHPRYKDTPWCSPIKVKYGDVYCRAPQGGYYKTALGTRCDIRCQKGYELHGSSLLICQSNKRWSDKVICKHMEPPRIKCPSVKERIAEPNKLTVRVSWETPEGRDTADGILTDVILKGLPPGSNFPEGDHKIQYTVYDRAENKGTCKFRVKVRVKRCGKLNAPENGYMKCSSDGDNYGATCEFSCIGGYELQGSPARVCQSNLAWSGTEPTCAAMNVNVGVRTAAALLDQFYEKRRLLIVSTPTARNLLYRLQLGMLQQAQCGLDLRHITVVELVGVFPTLIGRIGAKIMPPALALQLRLLLRIPLYSFSMVLVDKHGMDKERYVSLVMPVALFNLIDTFPLRKEEMVLQAEMSQTCNT

SEQ ID NO: 66836 - DNA, 1218 bp, Artificial Sequence
  derived and/or modified sequence
atgggcagccccgcccacagacccgccctgctgctgctgctgccccccctgctgctgctgctgctgctgagagtgccccccagcagaagcttccccggcagcggcgacagccccctggaggacgacgaggtgggctacagccaccccagatacaaggacaccccctggtgcagccccatcaaggtgaagtacggcgacgtgtactgcagagccccccagggcggctactacaagaccgccctgggcaccagatgcgacatcagatgccagaagggctacgagctgcacggcagcagcctgctgatctgccagagcaacaagagatggagcgacaaggtgatctgcaagcacatggagccccccagaatcaagtgccccagcgtgaaggagagaatcgccgagcccaacaagctgaccgtgagagtgagctgggagacccccgagggcagagacaccgccgacggcatcctgaccgacgtgatcctgaagggcctgccccccggcagcaacttccccgagggcgaccacaagatccagtacaccgtgtacgacagagccgagaacaagggcacctgcaagttcagagtgaaggtgagagtgaagagatgcggcaagctgaacgcccccgagaacggctacatgaagtgcagcagcgacggcgacaactacggcgccacctgcgagttcagctgcatcggcggctacgagctgcagggcagccccgccagagtgtgccagagcaacctggcctggagcggcaccgagcccacctgcgccgccatgaacgtgaacgtgggcgtgagaaccgccgccgccctgctggaccagttctacgagaagagaagactgctgatcgtgagcacccccaccgccagaaacctgctgtacagactgcagctgggcatgctgcagcaggcccagtgcggcctggacctgagacacatcaccgtggtggagctggtgggcgtgttccccaccctgatcggcagaatcggcgccaagatcatgccccccgccctggccctgcagctgagactgctgctgagaatccccctgtacagcttcagcatggtgctggtggacaagcacggcatggacaaggagagatacgtgagcctggtgatgcccgtggccctgttcaacctgatcgacaccttccccctgagaaaggaggagatggtgctgcaggccgagatgagccagacctgcaacacctag

SEQ ID NO: 66837 - DNA, 1218 bp, Artificial Sequence
  derived and/or modified sequence
atggggtccccagcccacagacccgccctcctcctccttcttcccccacttctgctgcttttattgttgagggtgccgccatctcgcagctttcctgggtccggggattcaccactggaagacgatgaagtgggctactcccatcctcgatacaaagataccccctggtgttcaccaataaaggtgaaatatggtgacgtatactgccgggctccccaaggaggctactacaagaccgccctgggaaccaggtgtgatattagatgtcagaagggttacgagctacatggaagctccctgctaatctgtcagagcaacaaaagatggagcgataaagtgatttgcaagcatatggaacctccacgcattaaatgcccgagcgttaaagaaaggatcgccgaaccaaacaagctcactgtgcgtgtaagctgggagacgcccgaaggtcgcgatactgctgacgggattctaacggacgtgatcctgaaaggacttcccccgggctcaaacttcccagagggagatcataagatacaatacaccgtctacgacagggcagagaacaagggaacctgcaagtttagggttaaggtaagggtgaagcggtgcgggaagctcaacgcaccagaaaacgggtacatgaaatgctcctctgatggcgacaattacggcgccacctgcgagttcagttgcataggaggttacgagctacagggctctccagcccgcgtgtgtcagagcaacttggcgtggagcggcaccgagcctacatgtgcagctatgaatgtaaacgtgggagtccgcactgccgcagcactcctggaccagttctatgagaaacgcaggttgctgatcgtgtctacgcctaccgctagaaatttgctgtaccgactccagcttggcatgttgcaacaggcccaatgcggacttgacctgcgacacatcacggttgtcgaactcgtaggggtcttccccactctgattggccggatcggagcaaaaattatgccacccgcactggcattgcagctgaggctgctactccgaattccactttatagcttcagcatggtcctggtcgataaacatggaatggataaggagcgctatgtcagcctcgtgatgcccgtggctctttttaacctgatcgacacgtttcccctgcggaaagaagaaatggtcctccaggccgaaatgagccaaacatgtaatacctag

SEQ ID NO: 66838 - DNA, 1218 bp, Artificial Sequence
  derived and/or modified sequence
atgggcagccctgcccacaggcctgccctgctgctgctgctgccccccctgctgctgctgctgctgctgcgggtgccccccagccgctccttccctggcagcggggacagccccctggaggatgatgaggtgggctacagccacccccgctacaaggacaccccctggtgcagccccatcaaggtgaagtatggagatgtgtactgccgggccccccagggcggctactacaagacagccctgggcacccgctgtgacatccgctgccagaagggctatgagctgcacggcagcagcctgctgatctgccagagcaacaagcgctggagcgacaaggtgatctgcaagcacatggagcccccacgcatcaagtgccccagcgtgaaggagagaattgctgagcccaacaagctgactgtgcgggtgtcctgggagaccccagagggccgggacacagcagatggcatcctgacagatgtgatcctgaagggcctgcccccaggcagcaacttccctgagggggaccacaagatccagtacacagtgtatgacagagcagaaaataaaggcacctgcaagttccgggtgaaggtgcgggtgaagagatgtgggaagctgaatgccccagaaaatggctacatgaagtgcagcagtgatggagacaactatggagccacctgtgagttcagctgcatcggcggctatgagctgcagggcagccctgcccgggtgtgccagagcaacctggcctggagcggcacagagcccacctgtgccgccatgaatgtgaatgtgggcgtgaggacagctgctgccctgctggaccagttctatgagaagaggcggctgctgattgtgtccacccccacagccaggaacctgctgtaccgcctgcagctgggcatgctgcagcaggcccagtgtggcctggacctgcggcacatcaccgtggtggagctggtgggcgtcttccccaccctcatcggcagaattggagccaagatcatgcccccagccctggccctgcagctgcggctgctgctgcgcatccccctgtacagcttctccatggtgctggtggacaagcacggcatggacaaggagcgctacgtgtccctggtgatgcctgtggccctcttcaacctgattgacaccttccccctgaggaaggaggagatggtgctgcaggccgagatgagccagacctgcaacacctag

SEQ ID NO: 66839 - DNA, 1218 bp, Artificial Sequence
  derived and/or modified sequence
atgggcagccccgcccaccggcccgccctgctgctgctgctgccccccctgctcctcctgctgctgctccgtgtgcctccatctaggtcgttccctggctctggagattccccgctcgaagacgatgaggtgggctattcccaccctaggtacaaggatactccatggtgctcaccaattaaggtcaaatacggggatgtatactgcagggccccccaaggaggatactacaaaactgccctcggcacaagatgtgacatccgctgccagaaaggctatgaactgcatggctcctcccttctcatctgccagagtaacaagcgctggagcgacaaagtgatatgtaagcacatggagcctccacgcatcaagtgcccatcagtgaaagagcgcatcgcagaaccgaataagctcacggtccgagttagttgggaaacccccgaggggagagatacagcggatggcatcctaacagacgtcattctgaaaggactgccacccggaagcaacttcccagagggggaccacaagattcaatataccgtctatgatcgcgcagagaataagggtacatgcaagtttcgggtaaaggtcagggtgaaacgatgcgggaaactcaatgctcctgagaacggctacatgaaatgtagcagcgatggcgacaactatggagcgacctgcgaatttagttgtattggagggtatgaactgcagggctctccggcgcgcgtgtgccaaagtaaccttgcttggtctggcactgagcccacctgtgccgccatgaacgttaacgtgggcgtgagaactgcggctgcattactggatcagttttatgaaaaacggcgtctgctcatcgtatcgacccccactgcgagaaacctcctgtacaggctccaactgggcatgctgcagcaggctcagtgtggactagacctcagacatataacagtcgttgaactagttggggtgttccctaccctgattgggagaatcggcgctaaaatcatgcccccggctctagccctgcagttgagattactccttcggattcccctgtactccttctctatggtcctagtcgacaagcacggcatggacaaagaaagatatgtctctctggtcatgccggtggccctgtttaacctgatcgatacattccctctgcggaaagaggaaatggttctccaggccgagatgtcccaaacctgcaacacctag

SEQ ID NO: 66840 - DNA, 1218 bp, Artificial Sequence
  derived and/or modified sequence
atgggaagcccggctcacaggcctgccctcttactcctgctgcccccactgttgcttctgttgctgctgcgagtccccccatcacgctccttcccgggttcgggagattctcctctggaagacgatgaggtgggctactctcacccacgctataaggacactccttggtgctccccaatcaaagtgaaatatggcgacgtgtattgccgtgcccctcagggaggctactataagaccgctctaggaactagatgcgatataagatgtcaaaaagggtacgaattgcacggatcatcgctgttaatctgccagagtaacaagcggtggagcgataaggtaatctgcaaacacatggagcctccccgaatcaagtgccccagcgttaaagagcgcattgctgagcctaataagttaaccgtgagggttagctgggagactcccgaaggacgagataccgccgacgggattctcacagatgtcattctgaagggtctccctccagggtccaattttccggaaggggaccacaaaattcaatataccgtgtacgacagagccgaaaacaaaggaacatgtaagttccgggttaaggtccgagtgaagcgctgcggcaaactgaatgcccctgaaaacggatatatgaaatgctcctccgacggggacaactatggagccacctgtgagttctcttgtatcgggggatatgagctgcaagggtcaccagctcgcgtgtgccagtcaaatctggcttggagtggaacggagccaacttgcgctgccatgaatgtgaacgttggcgtgagaacagctgcagctttactcgatcagttctatgaaaagcggagactgctgatcgtctctacccccacagctcggaacttattgtatcggctacagttgggaatgctgcagcaggcccaatgcggtctggatctgcgtcatatcacggtcgtcgagttagttggcgttttccctacactgattggcaggattggcgcaaagattatgcctcctgcattagcattgcagctgaggctgctgctgcgcattccgctctacagctttagcatggtgctggtggacaagcatggcatggataaggaaagatacgttagcctggttatgcccgttgcccttttcaacctgatagacacatttcctctgagaaaagaggaaatggtgctccaggccgaaatgtctcaaacgtgtaatacttag

SEQ ID NO: 66841 - DNA, 1725 bp, Artificial Sequence
  derived and/or modified sequence
agaggcgagaggaggagttttccagcccggccttcgcccgcccgctagcacgcagtcccttggtctcttcggtctcctgccgcccccgggaagcgcgctgcgctgccgaggcgagctaagcgcccgctcgccatggggagccccgcacatcggcccgcgctgctgctgctgctgccgcctctgctgctgctgctgctgctgcgcgtcccgcccagccgcagcttcccaggatcgggagactcaccactagaagacgatgaagtcgggtattcacaccctagatataaagataccccgtggtgctcccccatcaaggtgaagtatggggatgtgtactgcagggcccctcaaggaggatactacaaaacagccctgggaaccaggtgcgacattcgctgccagaagggctacgagctgcatggctcttccctactgatctgccagtcaaacaaacgatggtctgacaaggtcatctgcaaacatatggaacctcctagaatcaagtgcccaagtgtgaaggaacgcattgcagaacccaacaaactgacagtccgggtgtcctgggagacacccgaaggaagagacacagcagatggaattcttactgatgtcattctaaaaggcctccccccaggctccaactttccagaaggagaccacaagatccagtacacagtctatgacagagctgagaataagggcacttgcaaatttcgagttaaagtaagagtcaaacgctgtggcaaactcaatgccccagagaatggttacatgaagtgctccagcgacggtgataattatggagccacctgtgagttctcctgcatcggcggctatgagctccagggtagccctgcccgagtatgtcaatccaacctggcttggtctggcacggagcccacctgtgcagccatgaacgtcaatgtgggtgtcagaacggcagctgcacttctggatcagttttatgagaaaaggagactcctcattgtgtccacacccacagcccgaaacctcctttaccggctccagctaggaatgctgcagcaagcacagtgtggccttgatcttcgacacatcaccgtggtggagctggtgggtgtgttcccgactctcattggcaggataggagcaaagattatgcctccagccctagcgctgcagctcaggctgttgctgcgaatcccactctactccttcagtatggtgctagtggataagcatggcatggacaaagagcgctatgtctccctggtgatgcctgtggccctgttcaacctgattgacacttttcccttgagaaaagaagagatggtcctacaagccgaaatgagccagacctgtaacacctgacatgatggttcctctcttggcaattcctcttcattgtctacatagtgacatgcacacgggaaagccttaaaaatatccttgatgtacagattttatttgtaattttaaaagtctattttattatgagctttctttgcacttaaaaattagcatgctgctttttgtacttggaagtgtttcaaaaaattatatgaccatatttactctttctaactttctttactccatcatggctgcttgattttgtagagaaattagaacccataaccatacacaggctatcaacatgttattcaatgtgacacctaactcttttctattttgttttttaagtaagacttttattaataaaacaaaatgttttggagcaaattt

SEQ ID NO: 66842 - protein, 379 aa, Artificial Sequence
  derived and/or modified sequence
MGSPAHRPALLLLLPPLLLLLLLRVPPSRSFPGSGDSPLEDDEVGYSHPRYKDTPWCSPIKVKYGDVYCRAPQGGYYKTALGTRCDIRCQKGYELHGSSLLICQSNKRWSDKVICKQKRCPTLAMPANGGFKCVDGAYFNSRCEYYCSPGYTLKGERTVTCMDNKAWSGRPASCVDMEPPRIKCPSVKERIAEPNKLTVRVSWETPEGRDTADGILTDVILKGLPPGSNFPEGDHKIQYTVYDRAENKGTCKFRVKVRVKRCGKLNAPENGYMKCSSDGDNYGATCEFSCIGGYELQGSPARVCQSNLAWSGTEPTCAAMNVNVGVRTAAALLDQFYEKRRLLIVSTPTARNLLYRLQLGMLQAVAANPTLLLQYGASG

SEQ ID NO: 66843 - DNA, 1140 bp, Artificial Sequence
  derived and/or modified sequence
atgggcagccccgcccacagacccgccctgctgctgctgctgccccccctgctgctgctgctgctgctgagagtgccccccagcagaagcttccccggcagcggcgacagccccctggaggacgacgaggtgggctacagccaccccagatacaaggacaccccctggtgcagccccatcaaggtgaagtacggcgacgtgtactgcagagccccccagggcggctactacaagaccgccctgggcaccagatgcgacatcagatgccagaagggctacgagctgcacggcagcagcctgctgatctgccagagcaacaagagatggagcgacaaggtgatctgcaagcagaagagatgccccaccctggccatgcccgccaacggcggcttcaagtgcgtggacggcgcctacttcaacagcagatgcgagtactactgcagccccggctacaccctgaagggcgagagaaccgtgacctgcatggacaacaaggcctggagcggcagacccgccagctgcgtggacatggagccccccagaatcaagtgccccagcgtgaaggagagaatcgccgagcccaacaagctgaccgtgagagtgagctgggagacccccgagggcagagacaccgccgacggcatcctgaccgacgtgatcctgaagggcctgccccccggcagcaacttccccgagggcgaccacaagatccagtacaccgtgtacgacagagccgagaacaagggcacctgcaagttcagagtgaaggtgagagtgaagagatgcggcaagctgaacgcccccgagaacggctacatgaagtgcagcagcgacggcgacaactacggcgccacctgcgagttcagctgcatcggcggctacgagctgcagggcagccccgccagagtgtgccagagcaacctggcctggagcggcaccgagcccacctgcgccgccatgaacgtgaacgtgggcgtgagaaccgccgccgccctgctggaccagttctacgagaagagaagactgctgatcgtgagcacccccaccgccagaaacctgctgtacagactgcagctgggcatgctgcaggccgtggccgccaaccccaccctgctgctgcagtacggcgccagcggctag

SEQ ID NO: 66844 - DNA, 1140 bp, Artificial Sequence
  derived and/or modified sequence
atgggttcacctgctcacaggcctgcgctgttactgctcttaccaccgctcctgttgcttctattactgcgcgtcccaccaagccggagcttccccggcagcggggattccccccttgaagatgacgaggtggggtactcccacccaaggtacaaggacaccccgtggtgctctccaatcaaagtgaagtacggtgacgtctactgtagagctccccagggcggatactataaaactgctctgggcacgagatgtgacataaggtgtcagaaggggtacgagctgcacgggagcagcctgctaatctgccagtctaacaaacggtggtcagacaaagttatttgcaagcaaaagaggtgccccacacttgcaatgccagcaaatggcggctttaagtgtgtagacggggcatacttcaacagccgctgtgagtattattgtagtccgggatacacccttaagggagaaaggaccgtcacatgtatggacaacaaagcctggagtggaaggcctgcgtcatgcgtcgatatggagcctccgcggatcaagtgtcctagtgtgaaggagagaatcgctgaacctaacaagctgactgtgagggttagctgggagactccagaaggccgggataccgcggatggtattctaactgatgtcattctgaaaggccttccgccgggatcgaacttcccggaaggagatcataagatccagtacaccgtctatgaccgggccgaaaacaagggtacctgcaagtttcgcgtgaaggtgcgcgtgaaacgctgcggcaagctcaacgcgcccgagaatggctacatgaagtgcagctccgatggagataattatggcgccacttgcgagtttagttgtatcggcggttatgaactgcaagggagccctgcccgcgtgtgccagtcgaatcttgcgtggagcgggactgagcctacgtgtgcagccatgaatgtgaacgtcggcgtgcgcaccgcagccgcattgctcgatcaattctatgagaagcgtcgactattgatcgtgtcaacgcccaccgcacgaaacctgctgtaccgcctgcagctgggtatgttgcaagctgtagcagccaaccccacactcctgctgcagtatggcgctagtggctag

SEQ ID NO: 66845 - DNA, 1140 bp, Artificial Sequence
  derived and/or modified sequence
atgggcagccctgcccacaggcctgccctgctgctgctgctgccccccctgctgctgctgctgctgctgcgggtgccccccagccgctccttccctggcagcggggacagccccctggaggatgatgaggtgggctacagccacccccgctacaaggacaccccctggtgcagccccatcaaggtgaagtatggagatgtgtactgccgggccccccagggcggctactacaagacagccctgggcacccgctgtgacatccgctgccagaagggctatgagctgcacggcagcagcctgctgatctgccagagcaacaagcgctggagcgacaaggtgatctgcaagcagaagcgctgccccaccctggccatgcctgccaacggcggcttcaagtgtgtggatggagcctacttcaacagccgctgtgagtactactgcagccctggctacaccctgaagggggagaggacagtgacctgcatggacaacaaggcctggagcggccgcccagccagctgtgtggacatggagcccccacgcatcaagtgccccagcgtgaaggagagaattgctgagcccaacaagctgactgtgcgggtgtcctgggagaccccagagggccgggacacagcagatggcatcctgacagatgtgatcctgaagggcctgcccccaggcagcaacttccctgagggggaccacaagatccagtacacagtgtatgacagagctgagaacaagggcacctgcaagttccgggtgaaggtgcgggtgaagagatgtgggaagctgaatgccccagaaaatggctacatgaagtgcagcagtgatggagacaactacggggccacctgtgagttcagctgcattggaggctatgagctgcagggcagccctgcccgggtgtgccagagcaacctggcctggagcggcacagagcccacctgtgccgccatgaatgtgaatgtgggcgtgaggacagctgctgccctgctggaccagttctatgagaagaggcggctgctgattgtgtccacccccacagccaggaacctgctgtaccgcctgcagctgggcatgctgcaggccgtggccgccaaccccaccctgctgctgcagtatggagccagcggctag

SEQ ID NO: 66846 - DNA, 1140 bp, Artificial Sequence
  derived and/or modified sequence
atgggcagccccgcccaccggcccgccctgctgctgctgctgccccccctgctccttctgctcctgctacgggtacccccctccaggtccttccctggatccggcgatagccccctggaagacgatgaggtgggctattcacacccccgctataaggacaccccatggtgtagccctatcaaggttaaatacggagatgtgtactgcagggcaccccagggaggctactacaagactgccctgggaacacggtgtgatatcaggtgccagaaagggtatgaactacatgggagtagtcttctcatttgtcagagtaacaaaaggtggagcgacaaggtcatttgtaagcagaagcgatgccccacactggccatgcccgcgaacggtggatttaagtgcgtggatggagcatacttcaattcccgctgtgagtattactgttcgccagggtacactctgaagggtgaaagaacggtcacctgcatggataataaggcttggtctggtaggcccgcctcgtgcgtcgacatggaacctccacgcatcaaatgtccttcagtcaaggagaggattgccgaaccaaacaaactcaccgttagagtctcatgggaaacacccgaagggagagacaccgcagatggtattctgactgatgtgattctgaagggtcttccccccgggtctaacttcccggagggtgatcataagatacaatacaccgtctatgatcgggccgagaataagggcacctgcaaattccgtgttaaagttagagtgaaaagatgtggcaaactgaatgctccagagaacggatacatgaaatgcagtagtgatggggataattatggtgccacctgcgagtttagctgtattggcggttatgaactacaaggcagccctgcccgggtctgtcagagcaacctggcttggtccggcactgagccgacttgtgcagccatgaacgtgaatgttggggtacgaacagctgccgccctgctggaccagttttatgaaaagagacgcttgctgatcgtgagcacacccaccgcaagaaatctgctttaccgtctccagctgggtatgctccaggccgtcgccgctaatccaactttgctcctgcaatacggtgcgagcggctag

SEQ ID NO: 66847 - DNA, 1140 bp, Artificial Sequence
  derived and/or modified sequence
atgggaagccccgctcaccgcccagcactgctcttactgcttcctcccctattgctcctgctcctgctaagggtgcccccatctagatcttttcctgggagcggagactctccacttgaggatgacgaggttgggtactcccaccctcgctataaggacaccccctggtgttctcccatcaaagtcaaatatggggatgtgtattgccgggctcctcagggcggttactacaaaacagccctcggaaccagatgtgacattcggtgccagaaggggtacgaattacatgggagtagcctccttatttgtcagtcaaataagagatggtcggacaaagtgatttgcaaacaaaagcggtgtccgacattagctatgcccgcaaacggcggtttcaagtgcgtggacggtgcctatttcaacagtcgatgtgagtactactgttcccctgggtacacactgaaaggcgaacggacagtcacctgcatggataataaggcctggtccggtcggcctgcctcatgtgtagatatggaacctccccgtataaaatgcccctccgtgaaagagagaattgctgaacccaacaagctaactgtgcgcgtgagctgggaaacccccgagggtcgcgatactgcagatggaattctgactgatgtgattttaaaggggttacctccaggatctaatttcccagagggggaccacaagatccaatacacagtgtatgatagagcagagaacaaggggacatgtaagtttcgggtgaaagtgagagtcaaacgttgtggaaagctcaacgccccagagaacggctacatgaagtgcagttcggatggagataattatggtgctacctgcgaattcagctgtatcggaggctacgagctgcagggtagcccagccagggtatgccagagcaacctggcatggagtggcaccgagcccacatgtgccgcaatgaacgtaaacgtcggtgtgcgcacagccgcagctctgttagatcagttctacgagaagcggcgactcctgattgtgagcacacctaccgccaggaatctgctttataggttgcagctaggtatgcttcaggcagtggcagccaacccaacgctgctgctccagtacggggcaagcggctag

SEQ ID NO: 66848 - DNA, 1780 bp, Artificial Sequence
  derived and/or modified sequence
agaggcgagaggaggagttttccagcccggccttcgcccgcccgctagcacgcagtcccttggtctcttcggtctcctgccgcccccgggaagcgcgctgcgctgccgaggcgagctaagcgcccgctcgccatggggagccccgcacatcggcccgcgctgctgctgctgctgccgcctctgctgctgctgctgctgctgcgcgtcccgcccagccgcagcttcccaggatcgggagactcaccactagaagacgatgaagtcgggtattcacaccctagatataaagataccccgtggtgctcccccatcaaggtgaagtatggggatgtgtactgcagggcccctcaaggaggatactacaaaacagccctgggaaccaggtgcgacattcgctgccagaagggctacgagctgcatggctcttccctactgatctgccagtcaaacaaacgatggtctgacaaggtcatctgcaaacaaaagcgatgtcctacccttgccatgccagcaaatggagggtttaagtgtgtagatggtgcctactttaactcccggtgtgagtattattgttcaccaggatacacgttgaaaggggagcggaccgtcacatgtatggacaacaaggcctggagcggccggccagcctcctgtgtggatatggaacctcctagaatcaagtgcccaagtgtgaaggaacgcattgcagaacccaacaaactgacagtccgggtgtcctgggagacacccgaaggaagagacacagcagatggaattcttactgatgtcattctaaaaggcctccccccaggctccaactttccagaaggagaccacaagatccagtacacagtctatgacagagctgagaataagggcacttgcaaatttcgagttaaagtaagagtcaaacgctgtggcaaactcaatgccccagagaatggttacatgaagtgctccagcgacggtgataattatggagccacctgtgagttctcctgcatcggcggctatgagctccagggtagccctgcccgagtatgtcaatccaacctggcttggtctggcacggagcccacctgtgcagccatgaacgtcaatgtgggtgtcagaacggcagctgcacttctggatcagttttatgagaaaaggagactcctcattgtgtccacacccacagcccgaaacctcctttaccggctccagctaggaatgctgcaggctgttgctgcgaatcccactctactccttcagtatggtgctagtggataagcatggcatggacaaagagcgctatgtctccctggtgatgcctgtggccctgttcaacctgattgacacttttcccttgagaaaagaagagatggtcctacaagccgaaatgagccagacctgtaacacctgacatgatggttcctctcttggcaattcctcttcattgtctacatagtgacatgcacacgggaaagccttaaaaatatccttgatgtacagattttatttgtaattttaaaagtctattttattatgagctttctttgcacttaaaaattagcatgctgctttttgtacttggaagtgtttcaaaaaattatatgaccatatttactctttctaactttctttactccatcatggctgcttgattttgtagagaaattagaacccataaccatacacaggctatcaacatgttattcaatgtgacacctaactcttttctattttgttttttaagtaagacttttattaataaaacaaaatgttttggagcaaattt

SEQ ID NO: 66849 - protein, 406 aa, Artificial Sequence
  derived and/or modified sequence
MQRMIQQFAAEYTSKNSSTQDPSQPNSTKNQSLPKASPVTTSPTAATTQNPVLSKLLMADQDSPLDLTVRKSQSEPSEQDGVLDLSTKKSPCAGSTSLSHSPGCSSTQGNGRPGRPSQYRPDGLRSGDGVPPRSLQDGTREGFGHSTSLKVPLARSLQISEELLSRNQLSTAASLGPSGLQNHGQHLILSREASWAKPHYEFNLSRMKFRGNGALSNISDLPFLAENSAFPKMALQAKQDGKKDVSHSSPVDLKIPQVRGMDLSWESRTGDQYSYSSLVMGSQTESALSKKLRAILPKQSRKSMLDAGPDSWGSDAEQSTSGQPYPTSDQEGDPGSKQPRKKRGRYRQYNSEILEEAISVVMSGKMSVSKAQSIYGIPHSTLEYKVKERLGTLKNPPKKKMKLMSG

SEQ ID NO: 66850 - DNA, 1221 bp, Artificial Sequence
  derived and/or modified sequence
atgcagcgtatgatccagcagtttgcagccgaatacacaagcaaaaacagctccacacaggatccttcccaacctaatagtaccaaaaatcagagtctgccaaaagccagtcctgtcactaccagtccaaccgctgcaaccacacagaatcccgtattgagtaaactcctgatggccgatcaggactcaccactcgacctgactgtgcgcaagagccagagcgaaccatctgagcaggatggcgtcctggacctttcgacaaaaaaatccccatgcgccgggagcacctccctctcacattcgccaggttgttcatcaactcaaggcaatggtcgccccgggcgcccctctcagtaccggcccgacggactccgctccggagacggcgtcccaccgcgaagcctccaggacgggacccgggaagggttcggccacagcacctccttgaaagtgccactggcgagatctcttcagatttccgaggagctgttatctagaaatcagctttcaacagcagcttccttgggaccctcaggcctgcagaatcacggccagcacctaatcttatcccgggaggcctcgtgggcaaagccacattacgaattcaacctctcccgtatgaagttccgggggaatggcgccctcagtaatatttctgacctacctttcctggctgaaaactcagcgtttcctaagatggctctgcaagccaagcaggatgggaagaaggatgtcagccactcctcccccgtcgacctgaaaatccctcaggtgagggggatggatttgtcctgggagagtcgtactggagaccagtactcatattcaagtttagttatgggttcacaaacagaaagtgcattgagcaaaaaactgagagcaattctgccaaaacagagccgaaaaagtatgctggacgccggtcctgatagctggggatccgacgccgagcagagcacctctggccagccctatcccacatcagatcaagagggcgaccccggttccaaacagccccggaaaaagcgaggtcggtacagacagtacaacagtgagatcctcgaagaggcaatctccgtggtgatgtccggcaagatgtctgtttctaaagcccaatcaatatatggtatccctcactctaccctggagtacaaggtgaaggagcgactaggtacattgaaaaacccccccaaaaagaagatgaagctcatgagtggatag

SEQ ID NO: 66851 - DNA, 1221 bp, Artificial Sequence
  derived and/or modified sequence
atgcagaggatgatccagcagtttgctgctgagtacaccagcaagaacagcagcacccaggaccccagccagcccaacagcaccaagaaccagagcctgcccaaggccagccctgtgaccaccagccccacagctgccaccacccagaaccctgtgctgagcaagctgctgatggctgaccaggacagccccctggacctgactgtgaggaagagccagagcgagcccagcgagcaggatggagtgctggacctgagcaccaagaagagcccctgtgccggcagcaccagcctgagccacagccctggctgcagcagcacccagggcaatggccggcccggccggcccagccagtacagaccagatggcctgcggtctggagatggagtgcccccaagaagcctgcaggacggcacccgggagggcttcggccacagcaccagcctgaaggtgcccctggcccggagcctgcagatcagcgaggagctgctgagcaggaaccagctgagcacagctgccagcctgggccccagcggcctgcagaaccacggccagcacctgatcctgagccgggaggcctcctgggccaagccccactatgagttcaacctgagcaggatgaagttcagaggaaatggagccctgagcaacatcagtgacctgcccttcctggccgagaacagcgccttccccaagatggccctgcaggccaagcaggacggcaagaaggatgtgagccacagcagccctgtggacctgaagatcccccaggtgcggggcatggacctgtcctgggagagcaggactggagaccagtacagctacagcagcctggtgatgggcagccagacagagagcgccctgagcaagaagctgcgggccatcctgcccaagcagagcaggaagtccatgctggatgctggccctgacagctggggcagtgatgctgagcagagcaccagcggccagccctaccccaccagtgaccaggagggggaccccggcagcaagcagcccaggaagaagaggggccgctaccggcagtacaacagcgagatcctggaggaggccatctctgtggtgatgtctgggaagatgtctgtgtccaaggcccagagcatctacggcatcccccacagcaccctggagtacaaggtgaaggagcggctgggcaccctgaagaacccccccaagaagaagatgaagctgatgtctggatag

SEQ ID NO: 66852 - DNA, 1221 bp, Artificial Sequence
  derived and/or modified sequence
atgcagcggatgatccagcagttcgccgccgagtacaccagcaagaactcaagcacacaggaccctagccagcctaattccacaaagaatcagagtctgccaaaggcatcacccgtgaccacgagccctaccgccgctacaacacagaatccagtcttgtctaaactgctgatggctgatcaggactcacctctggacctcacagtgagaaaaagccagtctgaaccttcagaacaggacggagtgctcgatctttctaccaaaaagtccccctgcgctgggagcacgtcattgtctcacagcccaggctgcagttcaactcagggcaatggccgcccaggccgcccttctcaataccggccagacggcttaagatcgggggatggggtgcctccaagatctctgcaggatggtaccagggaaggctttggacacagtacctccctgaaagtccccttagcccgttcactccagataagcgaggagctgctcagccgaaaccagttgtccacagcagcctccttaggtccttctggactgcagaatcacggccagcacctgattctttcccgggaagcttcctgggccaaacctcactacgagttcaatctcagccgcatgaagtttagggggaacggagctctgagtaacatctccgatctgcctttcctcgctgaaaactccgcattccccaagatggccctccaggctaaacaggacggcaagaaagatgtgtcccactcttcacccgtcgatctgaagatccctcaagtcaggggtatggatctgtcttgggagagccggaccggggaccagtattcctatagctccttggtgatgggctcccagacagagagcgctttatcaaaaaagctcagagctatcttgccaaagcagtctaggaagtcaatgctggacgccggcccagacagctggggatcagacgccgaacagtctacatccggccagccttacccgacgtcagaccaggaaggcgatccaggatctaaacagccccggaagaaaagaggcagataccggcagtacaacagcgaaattctcgaggaggccatctcagttgtaatgagcggtaagatgtctgtgtcaaaagcacaaagcatctatgggattcctcattcaaccctggagtataaggttaaggagagattgggtaccttgaagaacccccctaaaaaaaaaatgaagctgatgtcagggtag

SEQ ID NO: 66853 - DNA, 1221 bp, Artificial Sequence
  derived and/or modified sequence
atgcagcgcatgatccaacaatttgccgctgagtacacctcgaagaactcctccactcaggatccttcacagccgaatagtaccaagaatcaaagcctgccaaaggcctcccccgtgacgacgagtcctactgccgctactactcaaaatcctgtgttaagtaaattattgatggctgatcaagacagtccactagacttaaccgttcgcaaatcacagtccgaaccttcagagcaggacggcgtgctggacctgtccacaaagaagtccccttgtgccggatctacaagtctgtcccattctcctgggtgttcatccacacagggaaacgggcgaccaggtagaccatcacagtaccgtccggatggtctgagaagcggggatggggttcctccgaggagcttacaggatggcaccagggaggggtttggacacagtaccagtctgaaagttcctctggctcgatcactccagatctctgaggagctgttgtcaagaaatcagctgtcaaccgcagcaagcctgggaccctccgggctgcagaaccatggacagcacctcattttgtcccgggaggcgtcatgggctaagcctcactacgagttcaacctctctcggatgaagttcaggggcaatggagccttaagtaacattagcgacctgccttttctcgccgagaactctgccttccccaagatggccttgcaagcaaagcaggacggcaaaaaggatgtgagtcactctagccccgtggatctaaaaattccccaggtgaggggtatggacctgtcgtgggaatctaggaccggtgaccaatacagctattcatccctggtcatgggaagtcagacagagtcagcgctctcaaaaaaactcagagccattctaccgaaacaatcaagaaaaagcatgctagatgccggtcccgacagctggggaagcgacgcagagcaatccacatcaggtcagccgtatcccacgtcagatcaggagggcgaccctgggtccaagcagccaaggaaaaagcggggacgctaccgccagtataattctgaaattctggaggaagctattagcgttgttatgtccggcaaaatgagcgtgtctaaagctcaatcaatctacgggattcctcattctacgctggagtataaggtcaaagaacgcctgggcactctgaagaatcctcccaaaaagaagatgaagctgatgtcaggatag

SEQ ID NO: 66854 - DNA, 1221 bp, Artificial Sequence
  derived and/or modified sequence
atgcagagaatgatccagcagttcgccgccgagtacaccagcaagaacagcagcacccaggaccccagccagcccaacagcaccaagaaccagagcctgcccaaggccagccccgtgaccaccagccccaccgccgccaccacccagaaccccgtgctgagcaagctgctgatggccgaccaggacagccccctggacctgaccgtgagaaagagccagagcgagcccagcgagcaggacggcgtgctggacctgagcaccaagaagagcccctgcgccggcagcaccagcctgagccacagccccggctgcagcagcacccagggcaacggcagacccggcagacccagccagtacagacccgacggcctgagaagcggcgacggcgtgccccccagaagcctgcaggacggcaccagagagggcttcggccacagcaccagcctgaaggtgcccctggccagaagcctgcagatcagcgaggagctgctgagcagaaaccagctgagcaccgccgccagcctgggccccagcggcctgcagaaccacggccagcacctgatcctgagcagagaggccagctgggccaagccccactacgagttcaacctgagcagaatgaagttcagaggcaacggcgccctgagcaacatcagcgacctgcccttcctggccgagaacagcgccttccccaagatggccctgcaggccaagcaggacggcaagaaggacgtgagccacagcagccccgtggacctgaagatcccccaggtgagaggcatggacctgagctgggagagcagaaccggcgaccagtacagctacagcagcctggtgatgggcagccagaccgagagcgccctgagcaagaagctgagagccatcctgcccaagcagagcagaaagagcatgctggacgccggccccgacagctggggcagcgacgccgagcagagcaccagcggccagccctaccccaccagcgaccaggagggcgaccccggcagcaagcagcccagaaagaagagaggcagatacagacagtacaacagcgagatcctggaggaggccatcagcgtggtgatgagcggcaagatgagcgtgagcaaggcccagagcatctacggcatcccccacagcaccctggagtacaaggtgaaggagagactgggcaccctgaagaacccccccaagaagaagatgaagctgatgagcggctag

SEQ ID NO: 66855 - protein, 410 aa, Artificial Sequence
  derived and/or modified sequence
MPYSTNKELILGIMVGTAGISLLLLWYHKVRKPGIAMKLPEFLSLGNTFNSITLQDEIHDDQGTTVIFQERQLQILEKLNELLTNMEELKEEIRFLKEAIPKLEEYIQDELGGKITVHKISPQHRARKRRLPTIQSSATSNSSEEAESEGGYITANTDTEEQSFPVPKAFNTRVEELNLDVLLQKVDHLRMSESGKSESFELLRDHKEKFRDEIEFMWRFARAYGDMYELSTNTQEKKHYANIGKTLSERAINRAPMNGHCHLWYAVLCGYVSEFEGLQNKINYGHLFKEHLDIAIKLLPEEPFLYYLKGRYCYTVSKLSWIEKKMAATLFGKIPSSTVQEALHNFLKAEELCPGYSNPNYMYLAKCYTDLEENQNALKFCNLALLLPTVTKEDKEAQKEMQKIMTSLKR

SEQ ID NO: 66856 - protein, 175 aa, Artificial Sequence
  derived and/or modified sequence
MPYSTNKELILGIMVGTAGISLLLLWYHKVRKPGIAMKLPEFLSLGNTFNSITLQDEIHDDQGTTVIFQERQLQILEKLNELLTNMEELKEEIRFLKEAIPKLEEYIQDELGGKITVHKISPQHRARKRRLPTIQSSATSNSSEEAESEGGYITANTDTEEQSFPVPKAFNTRVE

SEQ ID NO: 66857 - DNA, 1381 bp, Artificial Sequence
  derived and/or modified sequence
gaccttaggacccgcgggctccagggctactgtccgtccgccactgcgcgccagcaggtcctggtctccgctctccaacagctgaaaggccggcgcagtgaacacagaaacgaaaaccaagaaatgccttattccacaaacaaagagttgatacttggcatcatggtgggcactgctggaatcagcttgctgctcttgtggtaccacaaggtccgtaaaccagggatagcaatgaagttacctgaatttctttctctgggtaatacatttaattcaataactttgcaagatgaaatacatgatgaccaaggaacaacagtaatctttcaagaaaggcaacttcagatactggagaagttaaacgaattactgacaaatatggaagaactcaaagaggaaatcagatttcttaaagaagctattccaaagctggaggaatatatacaagatgaacttggagggaaaataactgttcataagataagccctcagcacagagcgagaaaaagaagactccccacaattcaaagttcagcaacaagtaatagttcagaggaagcagaaagtgaaggagggtatattacagctaatactgacacagaagaacagagttttccagtccctaaggcatttaacacacgtgtagaggaattaaatttagatgtccttcttcagaaggtagatcatttacgtatgagtgagtctggcaagtcggagagttttgaactacttcgtgaccacaaagaaaagtttagagatgaaatagagtttatgtggcgatttgctcgtgcttatggagacatgtatgaactatctacaaacacacaagaaaagaaacattatgctaatattggaaaaactttaagtgaaagagctattaatagagcacccatgaatggacattgtcatctgtggtatgcagttttgtgtggctatgtatctgagtttgagggtttacaaaacaaaatcaactatgggcacctcttcaaggaacatctagatatagcaatcaaacttttaccagaggaaccctttctatattacctcaaagggagatactgctatactgtctcaaaactgagctggattgagaaaaaaatggctgctactctgtttggaaaaataccatcttcaactgtacaagaagctttacacaatttccttaaggctgaagaactatgccctggttattctaatcccaattacatgtacttagcaaagtgttatactgatcttgaggaaaaccagaatgctttgaagttctgtaatttggctttattgcttcctactgttaccaaagaggataaagaggcacagaaagagatgcaaaaaataatgacttccttgaagaggtaaataaacgaatttactcttcaacaaa

SEQ ID NO: 66858 - DNA, 1932 bp, Artificial Sequence
  derived and/or modified sequence
tacttcatcaatttttcttttctttttatggactcttttctgttggcaaaaaaaacctgttatttcttgatcttttggcaccattttcgcacttaataatggcgtaatttctcttctatttgttttctatttgcccatctgttcttttttctccttttcctgccttcttttggaccaaaaacgaaaaccaagaaatgccttattccacaaacaaagagttgatacttggcatcatggtgggcactgctggaatcagcttgctgctcttgtggtaccacaaggtccgtaaaccagggatagcaatgaagttacctgaatttctttctctgggtaatacatttaattcaataactttgcaagatgaaatacatgatgaccaaggaacaacagtaatctttcaagaaaggcaacttcagatactggagaagttaaacgaattactgacaaatatggaagaactcaaagaggaaatcagatttcttaaagaagctattccaaagctggaggaatatatacaagatgaacttggagggaaaataactgttcataagataagccctcagcacagagcgagaaaaagaagactccccacaattcaaagttcagcaacaagtaatagttcagaggaagcagaaagtgaaggagggtatattacagctaatactgacacagaagaacagagttttccagtccctaaggcatttaacacacgtgtagaggaattaaatttagatgtccttcttcagaaggtagatcatttacgtatgagtgagtctggcaagtcggagagttttgaactacttcgtgaccacaaagaaaagtttagagatgaaatagagtttatgtggcgatttgctcgtgcttatggagacatgtatgaactatctacaaacacacaagaaaagaaacattatgctaatattggaaaaactttaagtgaaagagctattaatagagcacccatgaatggacattgtcatctgtggtatgcagttttgtgtggctatgtatctgagtttgagggtttacaaaacaaaatcaactatgggcacctcttcaaggaacatctagatatagcaatcaaacttttaccagaggaaccctttctatattacctcaaagggagatactgctatactgtctcaaaactgagctggattgagaaaaaaatggctgctactctgtttggaaaaataccatcttcaactgtacaagaagctttacacaatttccttaaggctgaagaactatgccctggttattctaatcccaattacatgtacttagcaaagtgttatactgatcttgaggaaaaccagaatgctttgaagttctgtaatttggctttattgcttcctactgttaccaaagaggataaagaggcacagaaagagatgcaaaaaataatgacttccttgaagaggtaaataaacgaatttactcttcaacaaatcagatgtggtctaccaaaatttaaatgaatcaaagttgtgcttttattatccttcatttttgatgtaagggtattgtgcttagatttgaaggtaaagccatgtttctgcagaatgcattccactagtagcactacaaaattaattatgttatttggagaatctatatactataatgtcaatacataatctataaacatgtatgctttatatttttcttatcaataaactgcagccttaagaatatttctttaaataaaatatttaaatccaataaaatgaattctcatgaatattttattgtttcaatggagacttcgtaagacaaaataatttcattaatgtggatgaaaaatggaaaactcagcaaaggacatgaacaagttgttggcagaagaggaaaaacaaacaaatgtagtattgtaactggtaatcaaaagatgtgaataaaattacaataaaatactgttttaccatcaaa

SEQ ID NO: 66859 - DNA, 724 bp, Artificial Sequence
  derived and/or modified sequence
agttacagctttgccaaggtcaatggttgtcactgtccctgagtttctacctttcagataatttttactcatcaaggaatagaaacaaatgtattggaaaggagcaagtgtgacatagtctatgtcctgaacctgaagatcaagtcagtatcagctgccatcttcctcttggaatagactgaaacgaaaaccaagaaatgccttattccacaaacaaagagttgatacttggcatcatggtgggcactgctggaatcagcttgctgctcttgtggtaccacaaggtccgtaaaccagggatagcaatgaagttacctgaatttctttctctgggtaatacatttaattcaataactttgcaagatgaaatacatgatgaccaaggaacaacagtaatctttcaagaaaggcaacttcagatactggagaagttaaacgaattactgacaaatatggaagaactcaaagaggaaatcagatttcttaaagaagctattccaaagctggaggaatatatacaagatgaacttggagggaaaataactgttcataagataagccctcagcacagagcgagaaaaagaagactccccacaattcaaagttcagcaacaagtaatagttcagaggaagcagaaagtgaaggagggtatattacagctaatactgacacagaagaacagagttttccagtccctaaggcatttaacacacgtgtagagga

SEQ ID NO: 66860 - DNA, 1233 bp, Artificial Sequence
  derived and/or modified sequence
atgccgtactctactaacaaggaactcattctgggcattatggtcggaacggccggcatttccctcctgctcttatggtaccacaaggtgagaaaaccgggaatagccatgaaactgcccgaattcctgtccctgggcaatacatttaattctatcacactgcaggatgaaattcatgatgaccagggaacaaccgtcatattccaggaacgacagttgcagatactcgagaagttgaacgagctgttgacaaatatggaggaattgaaggaagagatcagattcctcaaagaagccattcccaagcttgaggaatatattcaagatgaactaggagggaaaatcaccgtccataagattagcccccaacacagggcaaggaagcgtagactgcccacaatccaaagctctgcaacaagtaattcctccgaagaggcagagtctgaaggtggatacatcactgcaaacactgacacagaggaacagtcttttcccgtacctaaggcctttaacactcgagttgaggaactgaatctggacgtgttactccagaaagtcgatcacctgcgcatgtccgaatccggcaaaagcgaatcctttgagctcctgagagatcacaaagagaaattccgagatgagatcgaattcatgtggcgttttgcccgggcctacggggacatgtatgaattgtccaccaacactcaggagaaaaaacattatgctaacattgggaagacgttatccgagcgtgccattaatagggcacccatgaatggccactgccacctgtggtatgcggtactctgcgggtacgtgagcgagttcgagggactacaaaacaagatcaactacggccacctctttaaggagcatcttgacatcgccattaaacttctccctgaagaacctttcctgtattacctgaaaggccgttattgttacactgtcagcaagttgagttggattgaaaagaagatggccgccactctgtttgggaaaattcctagctcaactgtccaggaggcgcttcacaactttctgaaggccgaagagctttgtccaggatatagcaacccgaattacatgtatttagctaagtgctatacagatttagaggaaaatcagaacgccctgaagttttgtaatctggctcttctgctcccaactgtcaccaaagaagataaagaggctcagaaggaaatgcagaagattatgacatctttaaaaagatag

SEQ ID NO: 66861 - DNA, 1233 bp, Artificial Sequence
  derived and/or modified sequence
atgccctattcgacgaacaaagagctgatcttgggtatcatggttgggaccgctggtatcagcctcctgttgttgtggtatcacaaggtccggaaacctggtatagccatgaaattgcccgagttcttatccctagggaacacattcaacagtatcactctgcaagatgagattcatgacgatcagggaactacagtcatttttcaagaaagacaactgcagattctcgagaagttaaatgaactgcttactaatatggaggagctaaaagaggagatcagatttctgaaagaggccatcccgaagctagaagaatacatccaggatgaacttgggggcaagattacagtgcacaagatttctcctcagcatagggcaagaaaaaggcggctcccaactatccagtcatcagcaacttctaacagctcagaggaggctgagtcagagggcgggtacattaccgccaatacagacactgaggagcagagcttccctgtacctaaagcttttaatacaagagttgaagaactgaatctcgatgtcttactgcagaaagtagatcatctgaggatgtcagaatcaggaaagtcagaatcgtttgagctcctgcgagaccataaagaaaagttccgagacgaaatcgaattcatgtggcgtttcgcccgcgcctatggggatatgtatgagctctccaccaacacacaggaaaagaaacattatgctaatatcgggaaaacactctctgaacgtgcaattaatcgagcgccaatgaacggccactgccacctatggtacgctgttctgtgcggatatgtgtcagagtttgagggactgcaaaacaagatcaattatggacatctgtttaaggagcatcttgacatcgcaatcaaacttctgccagaggagcccttcctttactatctgaagggccgatactgctataccgtgtctaaacttagctggattgagaagaagatggcagcaacacttttcggcaaaataccatcctctacagtacaggaggcgctccataacttccttaaggctgaggagctatgcccaggttacagcaaccctaactatatgtacctcgccaagtgctacacagacctcgaagagaaccagaatgctttgaagttctgtaatctggcacttttgcttcccacagttaccaaggaagataaggaggcacagaaagagatgcagaaaattatgacctcgctcaagcggtag

SEQ ID NO: 66862 - DNA, 528 bp, Artificial Sequence
  derived and/or modified sequence
atgccctattcaaccaacaaagaattaatcctggggatcatggtcggcaccgccgggattagcctcctgctgctttggtatcacaaggttaggaagcctggcatcgctatgaagcttccagaattcctcagccttggcaacaccttcaacagcattaccctacaggatgaaatccatgacgaccaggggacgaccgtgatctttcaggagcggcagctgcagatcctcgagaagctaaacgaacttctcactaacatggaggaactcaaggaagaaattcgtttcctaaaggaggccatccccaaactagaggagtatatacaggacgaacttggcggcaaaataaccgtgcacaagataagcccccagcaccgcgcaagaaaacgacggctcccaaccatccagagttctgccactagtaacagttctgaagaggccgagtctgaaggaggttatattacagctaacacagatactgaggaacagtcatttcccgtccctaaggcattcaatacccgggttgagtag

SEQ ID NO: 66863 - DNA, 1233 bp, Artificial Sequence
  derived and/or modified sequence
atgccctacagcaccaacaaggagctgatcctgggcatcatggtgggcacagctggcatcagcctgctgctgctgtggtaccacaaggtgaggaagccaggcatcgccatgaagctgcctgagttcctgagcctgggcaacaccttcaacagcatcaccctgcaggatgagatccatgatgaccagggcaccaccgtcatcttccaggagcggcagctgcagatcctggagaagctgaatgagctgctgaccaacatggaggagctgaaggaggagatccgcttcctgaaggaggccatccccaagctggaggagtacatccaggatgagctgggcggcaagatcaccgtgcacaagatcagcccccagcaccgggccaggaagaggcggctgcccaccatccagagcagcgccaccagcaacagcagcgaggaggccgagagcgagggcggctacatcacagccaacacagacacagaggagcagagcttccctgtgcccaaggccttcaacaccagggtggaggagctgaacctggatgtgctgctgcagaaggtggaccacctgaggatgtctgagagcggcaagtctgagagctttgagctgctgcgggaccacaaggagaagttcagagatgaaattgagttcatgtggaggtttgcccgggcctacggggacatgtatgagctgagcaccaacacccaggagaagaagcactacgccaacatcggcaagaccctgtctgagcgggccatcaacagagcccccatgaatggccactgccacctgtggtatgctgtgctgtgtggctacgtgtctgaatttgagggcctgcagaacaagatcaactacggccacctgttcaaggagcacctggacatcgccatcaagctgctgcctgaggagcccttcctgtactacctgaagggccgctactgctacacagtgtccaagctgtcctggattgagaagaagatggccgccaccctgtttgggaagatccccagcagcacagtgcaggaggccctgcacaacttcctgaaggccgaggagctgtgccccggctacagcaaccccaactacatgtacctggccaagtgctacacagacctggaggagaaccagaatgccctgaagttctgcaacctggccctgctgctgcccaccgtgaccaaggaggacaaggaggcccagaaggagatgcagaagatcatgaccagcctgaagaggtag

SEQ ID NO: 66864 - DNA, 528 bp, Artificial Sequence
  derived and/or modified sequence
atgccctacagcaccaacaaggagctgatcctgggcatcatggtgggcacagctggcatcagcctgctgctgctgtggtaccacaaggtgaggaagccaggcatcgccatgaagctgcctgagttcctgagcctgggcaacaccttcaacagcatcaccctgcaggatgagatccatgatgaccagggcaccaccgtcatcttccaggagcggcagctgcagatcctggagaagctgaatgagctgctgaccaacatggaggagctgaaggaggagatccgcttcctgaaggaggccatccccaagctggaggagtacatccaggatgagctgggcggcaagatcaccgtgcacaagatcagcccccagcaccgggccaggaagaggcggctgcccaccatccagagcagcgccaccagcaacagcagcgaggaggccgagagcgagggcggctacatcacagccaacacagacacagaggagcagagcttccctgtgcccaaggccttcaacaccagggtggagtag

SEQ ID NO: 66865 - DNA, 1233 bp, Artificial Sequence
  derived and/or modified sequence
atgccctacagcaccaacaaggagctgatcctgggcatcatggtggggaccgctgggataagtctcttgttgctgtggtaccacaaggtgcgcaaaccaggtattgccatgaagctgcctgaatttttatccctgggaaatacttttaactctatcactctgcaagacgagattcacgatgatcaaggcacaactgtcattttccaggagcgccagctccaaatattggagaagttaaatgagctactgaccaatatggaggaattgaaggaggaaataagattcctaaaggaggcaatccctaagctggaagagtatattcaagacgaacttggtgggaagatcacagtccataaaatcagccctcagcaccgtgcacggaaacgtagactaccaaccatccagtcctccgcaacctctaactccagtgaggaggctgagtctgagggagggtacatcacggcgaacacagacacggaggaacagtcattcccagtgccaaaggcgtttaatacaagggtcgaagagttaaaccttgatgtgctgttgcagaaagttgatcatctcagaatgagcgagtccggcaaaagcgagagcttcgaacttttaagggaccacaaggaaaaatttcgcgatgagattgaattcatgtggaggtttgcaagagcctatggagatatgtacgagctgtccaccaacacccaggagaagaagcactacgctaacatagggaagacgctgagtgagagagctataaacagagctcccatgaatgggcattgccacctgtggtacgccgtcctgtgtggatatgtgtctgagttcgaagggctacagaacaagattaactacggtcacttgttcaaggaacaccttgacatcgctataaagcttctacctgaagaacctttcttgtactacttgaaaggacggtactgctacaccgtgtccaaactgtcctggatcgagaagaagatggctgcaaccttgttcgggaaaattcctagttccacagttcaggaggctctccacaattttcttaaagccgaagagctgtgcccaggctactctaatcccaactacatgtacctcgccaaatgctacacagatctggaagagaatcagaacgccttaaaattctgcaatcttgccctactgctccctaccgtgaccaaagaggacaaagaggcccaaaaggagatgcagaagataatgacgagcctgaagcgctag

SEQ ID NO: 66866 - DNA, 1233 bp, Artificial Sequence
  derived and/or modified sequence
atgccctacagcaccaacaaggagctgatcctgggcatcatggtggggactgcaggtatttcactgttgctgctttggtaccacaaggtgcggaagcccgggattgctatgaagctccctgagtttctgagcctgggaaataccttcaactctattacccttcaggatgaaattcacgacgaccaaggtactactgtgatttttcaggagagacagctccagatcctggagaagctcaacgagctgctaacgaacatggaagaactgaaggaggaaatccgattcctgaaagaggctatcccaaaactggaggaatacattcaagatgaattaggcggcaagatcacagtgcacaagatttccccccaacatagggcgcggaagcgccgcctccccactattcagagttctgccacttccaactcaagcgaagaggcagagtccgaggggggctacattaccgcgaacacagatacagaggagcagagcttccctgtacctaaggcgttcaatacccgagttgaggaactaaatctagatgtgctcttgcagaaggttgatcaccttcggatgtccgaatcaggtaagtccgagtcatttgaattgttaagagaccacaaagagaagttccgagacgaaattgagtttatgtggcgtttcgccagagcttatggcgacatgtatgagttaagcaccaacacccaggagaagaaacactacgcaaatatcggcaagacgctgtccgaaagagccataaaccgcgcccctatgaacggccactgtcatctgtggtacgctgttctctgcgggtacgtttccgaattcgagggtctgcaaaataagatcaactatggccacctcttcaaagagcatctggacatcgctatcaaactcctgccggaagaacctttcttatactacctgaagggacgatactgttacactgtcagcaaattatcttggattgaaaagaaaatggcagcaaccctgttcggcaaaatccccagttcaacagtgcaggaggcactgcataattttcttaaggccgaggaactgtgcccggggtatagcaatccaaattacatgtacctggcaaaatgctacactgacctggaagagaaccaaaacgcactgaaattctgtaatctcgcccttttgttgcccacagtgactaaggaggacaaggaggcgcagaaggaaatgcaaaaaatcatgactagtcttaagagatag

SEQ ID NO: 66867 - DNA, 528 bp, Artificial Sequence
  derived and/or modified sequence
atgccctacagcaccaacaaggagctgatcctgggcatcatggtggggacggccggaatctctctcttacttctgtggtaccacaaggtacggaagccggggattgccatgaagcttcctgaattcctgagcctgggcaatacgttcaactctatcactctccaggacgagatacacgacgaccaaggcacgacagttatatttcaggagcgccaattgcagatcctggagaagctgaatgagcttttaactaatatggaggagctcaaggaggagatcagattcctgaaggaggcaatccccaagttagaagaatacatccaagacgagctgggcgggaagattaccgtgcacaagatttctccccaacatcgagcaagaaaaagacgccttcctactatacagtccagcgctaccagcaactccagcgaggaagctgagtcggaaggcggttacattactgcaaataccgacacagaggagcagagcttccctgtcccaaaggctttcaacacacgtgtggagtag

SEQ ID NO: 66868 - DNA, 1233 bp, Artificial Sequence
  derived and/or modified sequence
atgccgtatagcacaaacaaggagttaattctcggcataatggtgggaacagcgggtatttccctgctgctgctatggtatcacaaggttaggaagcccggtatcgcgatgaagcttccggagttcctgagcttagggaatacctttaattccataacactgcaggacgagattcacgacgaccagggcacaacagtcatctttcaggagagacagctgcagatactggaaaagttaaacgagctgctgacaaacatggaagagctgaaggaagagatcaggttcctgaaggaggccattccaaaactggaagaatacattcaggatgaactgggaggtaaaattacagttcacaaaattagtcctcaacaccgagccaggaagcgtcgactgcccaccattcagtcctcggctacctctaattcttctgaagaggctgagagcgagggcggttacatcaccgctaacaccgataccgaagagcagagctttcccgtgccgaaagcttttaacactcgcgtagaggaactcaacctggatgtcctcctgcaaaaagtggaccatcttagaatgtctgaaagcgggaaaagcgagagcttcgagttgctgagagaccacaaggagaaattccgcgacgagatagagttcatgtggaggttcgccagagcatacggcgacatgtacgagctctctacgaacactcaagagaaaaagcactatgccaacatcggcaaaacgctgagtgaacgcgctattaatagagcacctatgaatggacactgtcatctgtggtatgctgtgttgtgtggatacgtgagtgagttcgaaggacttcagaacaaaattaactacggacacctgttcaaagagcatctcgacattgctattaaacttttgcctgaggagcccttcttatactatctcaaaggaaggtactgctacactgtgagtaaattgagttggatcgagaagaaaatggccgcaacactgttcggcaagattcctagctcaaccgtgcaggaggcgctgcacaactttctgaaggcagaagaactttgcccagggtactctaatcccaactatatgtatctggctaaatgctataccgacttagaggagaaccagaatgctctgaaattctgcaatctggccctgctcctgcctactgtgacaaaagaggacaaagaggcgcaaaaggagatgcagaagatcatgacatctctcaagagatag

SEQ ID NO: 66869 - DNA, 1233 bp, Artificial Sequence
  derived and/or modified sequence
atgccatactccacgaataaagaactaattctcggaattatggtagggacggccggaatctcactgcttttactctggtatcacaaggtgaggaaacctgggatcgcgatgaagctgccagaatttctgagcctgggcaatactttcaatagtataacccttcaggacgagatccacgatgaccagggcacaacagtcattttccaagaacgtcagctgcagatactcgagaaactcaatgaattgcttacaaacatggaagagctcaaagaagaaatccggttcctcaaggaggccatcccaaaattagaagagtatattcaggatgagctgggagggaaaatcacagtgcataaaatttcacctcagcatagagccagaaaaagaagactccccactatacagagcagcgcaacctcaaatagtagtgaagaagctgagtccgaaggaggctatatcactgcaaataccgacaccgaggagcagagcttccctgtgcctaaagccttcaacacgagagtggaggagttgaatctggatgtgctgctgcagaaagtggaccatcttagaatgagtgaaagcgggaagagcgagtcctttgaacttttaagagaccataaggaaaaatttagggatgagatcgaattcatgtggcgatttgcacgcgcttacggcgacatgtatgaattaagtactaatacccaggaaaaaaaacactacgcaaacataggcaaaacactgtctgaacgagctatcaatagggcccctatgaatgggcactgccacttgtggtatgccgtcctatgtggctacgtatctgaattcgagggactccaaaataaaatcaactacgggcacctattcaaggaacatctggacatagctataaagctgctccctgaagagccttttctctactacctcaagggtaggtactgctataccgtatccaagctctcgtggatcgagaaaaagatggcagcaacgctatttggtaagatccctagtagcacagtgcaagaggctctccacaacttcctgaaagccgaggaattatgccccggatacagtaacccaaattacatgtacctggccaaatgctatactgacctggaggaaaatcagaacgcactcaagttttgcaacttggccctgctccttcccactgtcacgaaagaggataaggaggcccaaaaggaaatgcagaaaatcatgacatccctgaaacggtag

SEQ ID NO: 66870 - DNA, 528 bp, Artificial Sequence
  derived and/or modified sequence
atgccctacagcactaacaaagagcttatccttgggattatggtggggactgccggaatatctttgctgctgctgtggtatcacaaggtgaggaaacccggaatcgctatgaaactccctgagttcctttccctagggaatacttttaactctataactctacaagatgagatccacgacgaccagggaaccactgttatcttccaggagaggcaactccaaatactcgagaaactcaacgaactgttgacaaatatggaggaattgaaagaagagatcagatttctcaaagaagctattcctaaactggaagaatatattcaagacgaactggggggtaaaataacagtgcacaaaatctcaccacagcatagggccaggaagcgacgactgcctactatacaatccagcgctacttccaattcatctgaggaggccgagagcgagggtggctatatcacagcaaacacagatactgaggaacagagcttccccgtgccaaaagcttttaacacaagggtcgagtag

SEQ ID NO: 66871 - DNA, 1233 bp, Artificial Sequence
  derived and/or modified sequence
atgccctacagcaccaacaaggagctgatcctgggcatcatggtgggcaccgccggcatcagcctgctgctgctgtggtaccacaaggtgagaaagcccggcatcgccatgaagctgcccgagttcctgagcctgggcaacaccttcaacagcatcaccctgcaggacgagatccacgacgaccagggcaccaccgtgatcttccaggagagacagctgcagatcctggagaagctgaacgagctgctgaccaacatggaggagctgaaggaggagatcagattcctgaaggaggccatccccaagctggaggagtacatccaggacgagctgggcggcaagatcaccgtgcacaagatcagcccccagcacagagccagaaagagaagactgcccaccatccagagcagcgccaccagcaacagcagcgaggaggccgagagcgagggcggctacatcaccgccaacaccgacaccgaggagcagagcttccccgtgcccaaggccttcaacaccagagtggaggagctgaacctggacgtgctgctgcagaaggtggaccacctgagaatgagcgagagcggcaagagcgagagcttcgagctgctgagagaccacaaggagaagttcagagacgagatcgagttcatgtggagattcgccagagcctacggcgacatgtacgagctgagcaccaacacccaggagaagaagcactacgccaacatcggcaagaccctgagcgagagagccatcaacagagcccccatgaacggccactgccacctgtggtacgccgtgctgtgcggctacgtgagcgagttcgagggcctgcagaacaagatcaactacggccacctgttcaaggagcacctggacatcgccatcaagctgctgcccgaggagcccttcctgtactacctgaagggcagatactgctacaccgtgagcaagctgagctggatcgagaagaagatggccgccaccctgttcggcaagatccccagcagcaccgtgcaggaggccctgcacaacttcctgaaggccgaggagctgtgccccggctacagcaaccccaactacatgtacctggccaagtgctacaccgacctggaggagaaccagaacgccctgaagttctgcaacctggccctgctgctgcccaccgtgaccaaggaggacaaggaggcccagaaggagatgcagaagatcatgaccagcctgaagagatag

SEQ ID NO: 66872 - DNA, 528 bp, Artificial Sequence
  derived and/or modified sequence
atgccctacagcaccaacaaggagctgatcctgggcatcatggtgggcaccgccggcatcagcctgctgctgctgtggtaccacaaggtgagaaagcccggcatcgccatgaagctgcccgagttcctgagcctgggcaacaccttcaacagcatcaccctgcaggacgagatccacgacgaccagggcaccaccgtgatcttccaggagagacagctgcagatcctggagaagctgaacgagctgctgaccaacatggaggagctgaaggaggagatcagattcctgaaggaggccatccccaagctggaggagtacatccaggacgagctgggcggcaagatcaccgtgcacaagatcagcccccagcacagagccagaaagagaagactgcccaccatccagagcagcgccaccagcaacagcagcgaggaggccgagagcgagggcggctacatcaccgccaacaccgacaccgaggagcagagcttccccgtgcccaaggccttcaacaccagagtggagtag

SEQ ID NO: 66873 - protein, 265 aa, Artificial Sequence
  derived and/or modified sequence
MGKCLRYITANTDTEEQSFPVPKAFNTRVEELNLDVLLQKVDHLRMSESGKSESFELLRDHKEKFRDEIEFMWRFARAYGDMYELSTNTQEKKHYANIGKTLSERAINRAPMNGHCHLWYAVLCGYVSEFEGLQNKINYGHLFKEHLDIAIKLLPEEPFLYYLKGRYCYTVSKLSWIEKKMAATLFGKIPSSTVQEALHNFLKAEELCPGYSNPNYMYLAKCYTDLEENQNALKFCNLALLLPTVTKEDKEAQKEMQKIMTSLKR

SEQ ID NO: 66874 - protein, 238 aa, Artificial Sequence
  derived and/or modified sequence
MGKCLRYITANTDTEEQSFPVPKAFNTRVEELNLDVLLQKVDHLRMSESGKSESFELLRDHKEKFRDEIEFMWRFARAYGDMYELSTNTQEKKHYANIGKTLSERAINRAPMNGHCHLWYAVLCGYVSEFEGLQNKINYGHLFKEHLDIAIKLLPEEPFLYYLKGRYCYTVSKLSWIEKKMAATLFGKIPSSTVQEALHNFLKAEELCPGYSNPNYMYLAKCYTDLEENQNALKFCNL

SEQ ID NO: 66875 - DNA, 1426 bp, Artificial Sequence
  derived and/or modified sequence
atgttaactccacatgcagcttgagcattcagtcttctgacctgttccacctctacagggcattttatggcttaaggatgacggcctagaagggaagggagagacttactttggattaaatttacaatgggaaagtgcttaaggtatattacagctaatactgacacagaagaacagagttttccagtccctaaggcatttaacacacgtgtagaggaattaaatttagatgtccttcttcagaaggtagatcatttacgtatgagtgagtctggcaagtcggagagttttgaactacttcgtgaccacaaagaaaagtttagagatgaaatagagtttatgtggcgatttgctcgtgcttatggagacatgtatgaactatctacaaacacacaagaaaagaaacattatgctaatattggaaaaactttaagtgaaagagctattaatagagcacccatgaatggacattgtcatctgtggtatgcagttttgtgtggctatgtatctgagtttgagggtttacaaaacaaaatcaactatgggcacctcttcaaggaacatctagatatagcaatcaaacttttaccagaggaaccctttctatattacctcaaagggagatactgctatactgtctcaaaactgagctggattgagaaaaaaatggctgctactctgtttggaaaaataccatcttcaactgtacaagaagctttacacaatttccttaaggctgaagaactatgccctggttattctaatcccaattacatgtacttagcaaagtgttatactgatcttgaggaaaaccagaatgctttgaagttctgtaatttggctttattgcttcctactgttaccaaagaggataaagaggcacagaaagagatgcaaaaaataatgacttccttgaagaggtaaataaacgaatttactcttcaacaaatcagatgtggtctaccaaaatttaaatgaatcaaagttgtgcttttattatccttcatttttgatgtaagggtattgtgcttagatttgaaggtaaagccatgtttctgcagaatgcattccactagtagcactacaaaattaattatgttatttggagaatctatatactataatgtcaatacataatctataaacatgtatgctttatatttttcttatcaataaactgcagccttaagaatatttctttaaataaaatatttaaatccaataaaatgaattctcatgaatattttattgtttcaatggagacttcgtaagacaaaataatttcattaatgtggatgaaaaatggaaaactcagcaaaggacatgaacaagttgttggcagaagaggaaaaacaaacaaatgtagtattgtaactggtaatcaaaagatgtgaataaaattacaataaaatactgttttaccatc

SEQ ID NO: 66876 - DNA, 582 bp, Artificial Sequence
  derived and/or modified sequence
agttttgtgtggctatgtatctgagtttgagggtttacaaaacaaaatcaactatgggcacctcttcaaggaacatctagatatagcaatcaaacttttaccagaggaaccctttctatattacctcaaagggagatactgctatactgtctcaaaactgagctggattgagaaaaaaatggctgctactctgtttggaaaaataccatcttcaactgtacaagaagctttacacaatttccttaaggctgaagaactatgccctggttattctaatcccaattacatgtacttagcaaagtgttatactgatcttgaggaaaaccagaatgctttgaagttctgtaatttggctttattgcttcctactgttaccaaagaggataaagaggcacagaaagagatgcaaaaaataatgacttccttgaagagacttcgtaagacaaaataatttcattaatgtggatgaaaaatggaaaactcagcaaaggacatgaacaagttgttggcagaagaggaaaaacaaacaaatgtagtattgtaactggtaatcaaaagatgtgaataaaattacaataaaat

SEQ ID NO: 66877 - DNA, 830 bp, Artificial Sequence
  derived and/or modified sequence
acatgcagcttgagcattcagtcttctgacctgttccacctctacagggcattttatggcttaaggatgacggcctagaagggaagggagagacttactttggattaaatttacaatgggaaagtgcttaaggtatattacagctaatactgacacagaagaacagagttttccagtccctaaggcatttaacacacgtgtagaggaattaaatttagatgtccttcttcagaaggtagatcatttacgtatgagtgagtctggcaagtcggagagttttgaactacttcgtgaccacaaagaaaagtttagagatgaaatagagtttatgtggcgatttgctcgtgcttatggagacatgtatgaactatctacaaacacacaagaaaagaaacattatgctaatattggaaaaactttaagtgaaagagctattaatagagcacccatgaatggacattgtcatctgtggtatgcagttttgtgtggctatgtatctgagtttgagggtttacaaaacaaaatcaactatgggcacctcttcaaggaacatctagatatagcaatcaaacttttaccagaggaaccctttctatattacctcaaagggagatactgctatactgtctcaaaactgagctggattgagaaaaaaatggctgctactctgtttggaaaaataccatcttcaactgtacaagaagctttacacaatttccttaaggctgaagaactatgccctggttattctaatcccaattacatgtacttagcaaagtgttatactgatcttgaggaaaaccagaatgctttgaagttctgtaatttgg

SEQ ID NO: 66878 - DNA, 798 bp, Artificial Sequence
  derived and/or modified sequence
atgggaaagtgcttgaggtacataactgccaacactgacaccgaggagcagagctttcccgtgcccaaagcctttaatacacgcgtcgaagagttgaacctagacgtgctcttgcaaaaagtcgaccatctacggatgtcagagtctggtaagtctgagtcatttgagctgctgagggaccataaggaaaagtttcgagacgaaatcgaatttatgtggcgattcgcccgggcctatggcgatatgtatgaacttagtactaatacccaggagaagaagcattacgcaaacatcgggaagacgttgtctgagcgagcaataaatcgcgctcctatgaatggccattgccacctgtggtatgctgtcctctgcggctatgtgtctgaattcgagggactccagaataagatcaattacgggcatttatttaaggagcacctggatatcgccattaaactactccccgaggagcccttcctttactatttaaaaggccggtactgctacacagtgagcaagctgtcttggattgaaaagaagatggccgctacactattcggcaaaataccaagctctacggtccaggaggccctgcacaatttcctgaaggcagaggagctttgccccggatatagcaatcctaactatatgtacttggcgaagtgttacacagacctggaggaaaaccagaatgccctgaagttctgtaacctggctttgctgctgcccaccgtgacaaaagaggataaagaagctcagaaggagatgcaaaagatcatgaccagtcttaagaggtag

SEQ ID NO: 66879 - DNA, 453 bp, Artificial Sequence
  derived and/or modified sequence
tgagtcctgtgcgggtacgtctccgagtttgaaggcctccagaacaagatcaattatggccacctctttaaggaacaccttgatatagctatcaagctcttgccagaggagcccttcctttattacctaaaggggagatattgctacacagtgtctaagttatcttggattgagaaaaagatggcagcaacgctgttcggcaagattcccagtagtaccgtgcaagaagcactacataatttcctgaaagcagaagagttatgcccaggctattctaatccgaattacatgtacctagccaagtgttacacagatctcgaggaaaatcaaaacgcacttaaattttgcaatctcgctctccttctgcctacagtgacgaaagaggataaagaggctcaaaaagagatgcagaaaataatgacctctcttaagcggctcagaaaaacaaaatag

SEQ ID NO: 66880 - DNA, 717 bp, Artificial Sequence
  derived and/or modified sequence
atggggaagtgtctcaggtacatcaccgcaaataccgacacagaagagcagtcttttcctgttccgaaagcattcaacaccagagtcgaggagcttaacctcgacgttctcctgcagaaggttgaccatcttcgcatgagcgaaagcggaaagagcgagtccttcgagctcctgagagaccacaaggagaagtttagggacgagatagagttcatgtggcgtttcgcccgcgcctatggtgacatgtacgaactctccactaatacgcaggagaagaaacattatgccaatatcggcaagaccctgagtgaacgggccattaatagggcccccatgaacggacattgccatctgtggtatgccgtgctgtgcggctacgtttcagagttcgaaggactgcagaacaaaatcaactacggccacctgtttaaggagcacctggatatcgctatcaagctcttgccagaggaaccctttctctattacctcaaagggcgatattgttatacggttagcaaactctcatggattgagaaaaagatggctgcaacactctttggcaagataccctcatccacagtgcaggaagctctgcacaattttctgaaagccgaagaactgtgtcctggctacagtaatccgaattatatgtatttggccaaatgctatactgatctggaagaaaaccagaacgctctgaaattttgcaacttgtag

SEQ ID NO: 66881 - DNA, 798 bp, Artificial Sequence
  derived and/or modified sequence
atgggcaagtgcctgcgctacatcacagccaacacagacacagaggagcagagcttccctgtgcccaaggccttcaacaccagggtggaggagctgaacctggatgtgctgctgcagaaggtggaccacctgaggatgtctgagagcggcaagtctgagagctttgagctgctgcgggaccacaaggagaagttcagagatgaaattgagttcatgtggaggtttgcccgggcctatggagacatgtatgagctgagcaccaacacccaggagaagaagcactacgccaacatcggcaagaccctgtctgagcgggccatcaacagagcccccatgaatggccactgccacctgtggtatgctgtgctgtgtggctacgtgtctgaatttgagggcctgcagaacaagatcaactacggccacctgttcaaggagcacctggacatcgccatcaagctgctgcctgaggagcccttcctgtactacctgaagggccgctactgctacacagtgtccaagctgtcctggattgagaagaagatggccgccaccctgtttgggaagatccccagcagcacagtgcaggaggccctgcacaacttcctgaaggccgaggagctgtgccccggctacagcaaccccaactacatgtacctggccaagtgctacacagacctggaggagaaccagaatgccctgaagttctgcaacctggccctgctgctgcccaccgtgaccaaggaggacaaggaggcccagaaggagatgcagaagatcatgaccagcctgaagaggtag

SEQ ID NO: 66882 - DNA, 453 bp, Artificial Sequence
  derived and/or modified sequence
tgagtgctgtgtggctacgtgtctgaatttgagggcctgcagaacaagatcaactacggccacctgttcaaggagcacctggacatcgccatcaagctgctgcctgaggagcccttcctgtactacctgaagggccgctactgctacacagtgtccaagctgtcctggattgagaagaagatggccgccaccctgtttgggaagatccccagcagcacagtgcaggaggccctgcacaacttcctgaaggccgaggagctgtgccccggctacagcaaccccaactacatgtacctggccaagtgctacacagacctggaggagaaccagaatgccctgaagttctgcaacctggccctgctgctgcccaccgtgaccaaggaggacaaggaggcccagaaggagatgcagaagatcatgaccagcctgaagaggctgaggaagaccaagtag

SEQ ID NO: 66883 - DNA, 717 bp, Artificial Sequence
  derived and/or modified sequence
atgggcaagtgcctgcgctacatcacagccaacacagacacagaggagcagagcttccctgtgcccaaggccttcaacaccagggtggaggagctgaacctggatgtgctgctgcagaaggtggaccacctgaggatgtctgagagcggcaagtctgagagctttgagctgctgcgggaccacaaggagaagttcagagatgaaattgagttcatgtggaggtttgcccgggcctatggagacatgtatgagctgagcaccaacacccaggagaagaagcactacgccaacatcggcaagaccctgtctgagcgggccatcaacagagcccccatgaatggccactgccacctgtggtatgctgtgctgtgtggctacgtgtctgaatttgagggcctgcagaacaagatcaactacggccacctgttcaaggagcacctggacatcgccatcaagctgctgcctgaggagcccttcctgtactacctgaagggccgctactgctacacagtgtccaagctgtcctggattgagaagaagatggccgccaccctgtttgggaagatccccagcagcacagtgcaggaggccctgcacaacttcctgaaggccgaggagctgtgccccggctacagcaaccccaactacatgtacctggccaagtgctacacagacctggaggagaaccagaatgccctgaagttctgcaacctgtag

SEQ ID NO: 66884 - DNA, 798 bp, Artificial Sequence
  derived and/or modified sequence
atgggcaagtgcctgcggtacatcaccgccaacaccgacaccgaggaacaatccttcccagtacctaaagcgtttaacacacgggtcgaagagctcaatctcgatgtcctgctccagaaagtagatcacctcaggatgagtgagtccggcaagtcagagtcctttgagcttctgcgggatcataaagagaagtttagggatgagatcgaattcatgtggcgcttcgccagggcctatggggatatgtatgaactcagtacgaacactcaagagaaaaaacattacgccaatatcggaaagaccctgagtgagcgggccattaaccgcgcacccatgaatggacactgccatctctggtatgccgtgttgtgtgggtacgtgtccgaatttgagggcttacaaaataagatcaactatggtcacctgttcaaggaacacttggatatagcaatcaagttgctgcccgaggaaccattcctatactacctcaagggtagatactgttacactgtgtcgaagctatcttggattgaaaagaagatggcagccaccctcttcgggaagatcccaagtagcacagtacaagaagccctgcataactttctaaaagccgaagaactgtgtcctggttattctaaccccaattacatgtatctggctaaatgttacacagacctggaggagaatcagaacgcactgaaattttgcaatctggcactgcttctcccgacagttaccaaggaagataaagaagcacagaaagaaatgcagaagattatgacctcgctgaaaaggtag

SEQ ID NO: 66885 - DNA, 453 bp, Artificial Sequence
  derived and/or modified sequence
tgagtgctgtgcggctacgtgagcgagttcgagggcctgcagaacaaaatcaactacggacatctgttcaaagaacacttagacatagccattaaactgctgccagaagaaccattcctctattacttgaagggacgctattgttacaccgtcagcaaactctcatggatcgagaaaaagatggcggccactctgttcggtaaaataccgtccagcacggttcaggaagccctgcacaattttctcaaagctgaagaactctgtcctggttacagcaatccaaactacatgtacctcgctaaatgttacacagacctggaggaaaaccagaatgccctgaaattttgcaatctggctttactgctccccaccgtgacaaaagaggataaagaagcccagaaggaaatgcagaagataatgacaagcttgaaacgcctccggaagactaaatag

SEQ ID NO: 66886 - DNA, 717 bp, Artificial Sequence
  derived and/or modified sequence
atgggcaagtgcctgcggtacatcaccgccaacaccgacaccgaggagcagagtttccctgtccccaaggcattcaacacccgggtagaagagctgaatctggacgtactcctgcagaaggtggaccatttaagaatgtcagaaagtggcaagtctgaatccttcgagctgctcagagatcataaggagaagttccgggacgagattgaatttatgtggagattcgctagggcctacggagatatgtatgagctgtccaccaatactcaggagaagaaacactatgcaaatatcggaaaaacactgagtgagagggctattaacagggctcctatgaacgggcattgccacctctggtacgccgtgctctgcgggtatgttagcgagttcgagggccttcaaaataagatcaattacgggcatttatttaaggagcaccttgatattgctataaagttacttcccgaagaacctttcctgtactacctcaagggaagatattgctatacagttagcaaactttcttggatcgaaaagaagatggccgcaacactgtttgggaaaattccctcgtcgacagtccaggaggcactgcacaacttcctaaaggccgaggagctgtgccctggttatagcaatcccaattatatgtatctcgccaagtgttataccgacctggaagaaaaccaaaacgcacttaagttctgcaacttatag

SEQ ID NO: 66887 - DNA, 798 bp, Artificial Sequence
  derived and/or modified sequence
atgggcaaatgtcttcgctatatcaccgctaacaccgatactgaggaacagagctttcctgtgccaaaggccttcaacacccgggtagaagaactgaacttagatgtcctgcttcagaaagtggatcatctgagaatgtctgagagtggtaagagcgaatcgtttgaactattacgagatcataaggaaaagttcagagatgagattgagttcatgtggcgctttgccagagcttacggcgatatgtatgaactcagcaccaatacacaagagaaaaagcattatgctaacataggaaagaccctgagcgagcgggcaatcaaccgtgcacctatgaatgggcactgccatttatggtacgctgttctttgcggatacgtttctgaatttgagggactccagaataagataaactatggtcacctttttaaggaacacttagatatcgcaattaaactgctgcctgaggaacccttcctgtattatcttaagggcagatactgctatacagttagcaagctgagttggatcgaaaagaaaatggctgctaccttgtttggtaagattcctagttcaacagttcaggaggcactgcacaactttctgaaagcagaagaactctgccccggatattctaatcccaactatatgtatctggcgaagtgttacacagaccttgaggaaaatcagaacgctttgaaattttgcaatctggccctcctgctgccgaccgtgacaaaggaggataaggaagcccagaaagaaatgcagaaaatcatgactagcctgaagaggtag

SEQ ID NO: 66888 - DNA, 453 bp, Artificial Sequence
  derived and/or modified sequence
tgagtgctgtgcgggtacgtgtctgagtttgagggtctgcagaacaagatcaactatgggcacctcttcaaggagcatttggatatcgctatcaaactgctgccagaggaacccttcctctactatttgaaagggagatattgctacactgtcagtaaattgtcatggatcgaaaagaaaatggcagcaacgctcttcgggaaaattccaagctcgacggtgcaggaagccttacacaactttcttaaagcagaagaactgtgcccgggatattctaacccaaactatatgtatctggcaaaatgttacaccgacttggaagagaatcaaaacgccttgaagttctgcaacctggccctccttttgcccaccgtgaccaaagaggataaggaagcccagaaggagatgcagaaaatcatgacttcgctgaaacgcctaagaaaaacaaagtag

SEQ ID NO: 66889 - DNA, 717 bp, Artificial Sequence
  derived and/or modified sequence
atgggtaagtgcttgcgatacatcactgcaaacacggacacagaggagcaatcctttcctgtgccgaaggccttcaacacacgcgtagaggagctgaatctggacgtgttgttgcagaaggtcgaccacttaaggatgtctgaaagcggtaagagcgagagtttcgagttgcttagggatcataaagagaagttcagagacgagatcgaatttatgtggagatttgctcgggcatacggcgatatgtatgagttgagcacgaacacacaggagaagaaacactatgctaacatcggcaaaacattaagtgaacgagcgatcaaccgagccccaatgaatggacactgtcacttatggtatgctgttctgtgtggctacgtctccgagttcgagggacttcagaataaaattaactacggtcacctgtttaaggagcatttggatatcgctataaaacttctgcccgaagagccattcctgtattaccttaagggtagatactgctacacagtctccaagctgtcatggatcgaaaagaaaatggcagcaaccttgttcgggaagattccgtcttccactgttcaggaagctctgcacaacttcctgaaagccgaggaactctgtccaggctacagcaatccaaattacatgtacctggcgaaatgctataccgatcttgaagagaatcaaaacgccctcaaattctgtaacttatag

SEQ ID NO: 66890 - DNA, 798 bp, Artificial Sequence
  derived and/or modified sequence
atgggcaagtgcctgagatacatcaccgccaacaccgacaccgaggagcagagcttccccgtgcccaaggccttcaacaccagagtggaggagctgaacctggacgtgctgctgcagaaggtggaccacctgagaatgagcgagagcggcaagagcgagagcttcgagctgctgagagaccacaaggagaagttcagagacgagatcgagttcatgtggagattcgccagagcctacggcgacatgtacgagctgagcaccaacacccaggagaagaagcactacgccaacatcggcaagaccctgagcgagagagccatcaacagagcccccatgaacggccactgccacctgtggtacgccgtgctgtgcggctacgtgagcgagttcgagggcctgcagaacaagatcaactacggccacctgttcaaggagcacctggacatcgccatcaagctgctgcccgaggagcccttcctgtactacctgaagggcagatactgctacaccgtgagcaagctgagctggatcgagaagaagatggccgccaccctgttcggcaagatccccagcagcaccgtgcaggaggccctgcacaacttcctgaaggccgaggagctgtgccccggctacagcaaccccaactacatgtacctggccaagtgctacaccgacctggaggagaaccagaacgccctgaagttctgcaacctggccctgctgctgcccaccgtgaccaaggaggacaaggaggcccagaaggagatgcagaagatcatgaccagcctgaagagatag

SEQ ID NO: 66891 - DNA, 453 bp, Artificial Sequence
  derived and/or modified sequence
tgagtgctgtgcggctacgtgagcgagttcgagggcctgcagaacaagatcaactacggccacctgttcaaggagcacctggacatcgccatcaagctgctgcccgaggagcccttcctgtactacctgaagggcagatactgctacaccgtgagcaagctgagctggatcgagaagaagatggccgccaccctgttcggcaagatccccagcagcaccgtgcaggaggccctgcacaacttcctgaaggccgaggagctgtgccccggctacagcaaccccaactacatgtacctggccaagtgctacaccgacctggaggagaaccagaacgccctgaagttctgcaacctggccctgctgctgcccaccgtgaccaaggaggacaaggaggcccagaaggagatgcagaagatcatgaccagcctgaagagactgagaaagaccaagtag

SEQ ID NO: 66892 - DNA, 717 bp, Artificial Sequence
  derived and/or modified sequence
atgggcaagtgcctgagatacatcaccgccaacaccgacaccgaggagcagagcttccccgtgcccaaggccttcaacaccagagtggaggagctgaacctggacgtgctgctgcagaaggtggaccacctgagaatgagcgagagcggcaagagcgagagcttcgagctgctgagagaccacaaggagaagttcagagacgagatcgagttcatgtggagattcgccagagcctacggcgacatgtacgagctgagcaccaacacccaggagaagaagcactacgccaacatcggcaagaccctgagcgagagagccatcaacagagcccccatgaacggccactgccacctgtggtacgccgtgctgtgcggctacgtgagcgagttcgagggcctgcagaacaagatcaactacggccacctgttcaaggagcacctggacatcgccatcaagctgctgcccgaggagcccttcctgtactacctgaagggcagatactgctacaccgtgagcaagctgagctggatcgagaagaagatggccgccaccctgttcggcaagatccccagcagcaccgtgcaggaggccctgcacaacttcctgaaggccgaggagctgtgccccggctacagcaaccccaactacatgtacctggccaagtgctacaccgacctggaggagaaccagaacgccctgaagttctgcaacctgtag

SEQ ID NO: 66893 - DNA, 612 bp, Artificial Sequence
  derived and/or modified sequence
gtcagattgagaagtctctgcagaaagcataataaataagttcgaatagtgatcttcagagatgaggaccttccctgtgcgatatctggtactgaaagtgtcgggagctgattcggcgcaggactctggaggaagagatggcatctcctagcctagcctgttacaagggtgggacacgagccgtttatccatttatcggccccgtgttagaggaattctggaaacgtgtactggcagttaattcttgatcgccgtttgttcttttcttggcttttctttctggagttctaatgtttctttctcttctgcagatatgcacccaatgtccagggagcgtgcaaaatttgtcaaaagtggccttttattgtaaaacgacacgagagctaatgctgcatgcccgttgctgcctgaatcagaagggcaccatcttggggctggatctccagaactgttctctggaggaccctggtccaaactttcatcaggcacataccactgtcatcatagacctgcaagcaaaccccctcaaaggtgacttggccaacaccttccgtggctttactcagctccagactctgatactgccacaacatgtcaactgtcctggaggaa

SEQ ID NO: 66894 - DNA, 1949 bp, Artificial Sequence
  derived and/or modified sequence
aggggcaaggcgagtgtgtgtccttatcctagcaattggggcgcgggcctgtgagccagttggagttgcggcggcgggaacgattgggctgagcagaggacgacatgttgcttttcgtggagcaggtagcatctaaaggaactggtttaaatcctaatgccaaagtatggcaagaaattgctcctggaaatactgatgccaccccagtaactcatggaactgaaagctcttggcatgaaatagcagctacatcaggtgctcatcctgagggtaatgcagagctctcagaagatatatgtaaagaatatgaagtaatgtattcttcatcttgtgaaaccacaagaaatactacaggcattgaagaatcaactgatgggatgattttaggaccagaagatctgagttaccaaatatatgatgtttccggagaaagcaattcagcagtttctacagaagacctaaaagaatgtctgaagaaacaattagaattctgtttttcacgagaaaatttgtcaaaggatctttacttgatatctcaaatggatagtgatcagttcatcccaatttggacagttgccaacatggaagaaataaaaaagttgactacagaccctgatctaattcttgaagtgttaagatcttctcccatggtacaagttgatgagaagggtgagaaagtgagaccaagtcataagcgttgtattgtaattcttagagagattcctgaaacaacaccaatagaggaagtgaaaggtttgttcaaaagtgaaaactgccccaaagtgataagctgtgagtttgcacacaatagcaactggtatatcactttccagtcagacacagatgcacaacaggcttttatacttaagagaagaagttaaaacatttcagggcaagccaattatggctccctttcccaatggtagttttgtgaatggctttaattcgccaggatcttataaaacaaatgctgctgctatgaatatgggtcgaccattccaaaaaaatcggagaactctcttcagaggtcgaagacgacgagaagatgacaggatctcaagacctcatccttcaacagctgaatcaaaggctccaacaccaaagtttgacttattagcctcaaattttccacctttacctggaagttcatcaagaatgccaggtgaactcgttttggagaataggatgtctgatgttgttaaaggtgtctacaaagaaaaggataatgaagagttgacaattagttgcccagtgcctgcagatgagcagacagaatgcacttctgcccagcaactcaatatgagtaccagttctccatgtgctgctgagcttactgcattaagcacaactcagcaagaaaaggatctaatagaagattcctctgttcagaaggatggtctcaatcagacaactataccagtttctcctccaagtactacaaagccatcgagggcaagtactgcttcaccatgtaataataacataaatgcagctacagctgtggctctacaggaaccccgaaagttaagttatgctgaagtgtgccagaagccccctaaagagccatcttcagttcttgtgcagccactacgggaacttcgctccaatgtggtgtctcccaccaaaaatgaagacaatggagctcctgagaactccgttgagaaaccacatgagaagccagaagcaagggctagtaaggattattctggcttccgaggcaatataatccccaggggagcagcaggaaaaatcagggaacagagacgccagtttagccatagggctatacctcagggagtgactcgacgtaatggcaaagagcaatatgtgccacccagatcaccaaagtaaaaaacaacaaaactattcaaaaacttcactctcttcccattaaacttgaactgtggctatattgaactgttttggaggggagggggtagccaggaagg

SEQ ID NO: 66895 - DNA, 1338 bp, Artificial Sequence
  derived and/or modified sequence
atgctgctgttcgtggagcaggtggccagcaagggcaccggcctgaaccccaacgccaaggtgtggcaggagatcgcccccggcaacaccgacgccacccccgtgacccacggcaccgagagcagctggcacgagatcgccgccaccagcggcgcccaccccgagggcaacgccgagctgagcgaggacatctgcaaggagtacgaggtgatgtacagcagcagctgcgagaccaccagaaacaccaccggcatcgaggagagcaccgacggcatgatcctgggccccgaggacctgagctaccagatctacgacgtgagcggcgagagcaacagcgccgtgagcaccgaggacctgaaggagtgcctgaagaagcagctggagttctgcttcagcagagagaacctgagcaaggacctgtacctgatcagccagatggacagcgaccagttcatccccatctggaccgtggccaacatggaggagatcaagaagctgaccaccgaccccgacctgatcctggaggtgctgagaagcagccccatggtgcaggtggacgagaagggcgagaaggtgagacccagccacaagagatgcatcgtgatcctgagagagatccccgagaccacccccatcgaggaggtgaagggcctgttcaagagcgagaactgccccaaggtgatcagctgcgagttcgcccacaacagcaactggtacatcaccttccagagcgacaccgacgcccagcaggccttcaagtacctgagagaggaggtgaagaccttccagggcaagcccatcatggccagaatcaaggccatcaacaccttcttcgccaagaacggctacagactgatggacagcagcatctacagccaccccatccagacccaggcccagtacgccagccccgtgttcatgcagcccgtgtacaacccccaccagcagtacagcgtgtacagcatcgtgccccagagctggagccccaaccccaccccctacttcgagacccccctggcccccttccccaacggcagcttcgtgaacggcttcaacagccccggcagctacaagaccaacgccgccgccatgaacatgggcagacccttccagaagaacagagtgaagccccagttcagaagcagcggcggcagcgagcacagcaccgagggcagcgtgagcctgggcgacggccagctgaacagatacagcagcagaaacttccccgccgagagacacaaccccaccgtgaccggccaccaggagcagacctacctgcagaaggagaccagcaccctgcaggtggagcagaacggcgactacggcagaggcagatag

SEQ ID NO: 66896 - DNA, 1125 bp, Artificial Sequence
  derived and/or modified sequence
atgctgctgttcgtggagcaggtggccagcaagggcaccggcctgaaccccaacgccaaggtgtggcaggagatcgcccccggcaacaccgacgccacccccgtgacccacggcaccgagagcagctggcacgagatcgccgccaccagcggcgcccaccccgagggcaacgccgagctgagcgaggacatctgcaaggagtacgaggtgatgtacagcagcagctgcgagaccaccagaaacaccaccggcatcgaggagagcaccgacggcatgatcctgggccccgaggacctgagctaccagatctacgacgtgagcggcgagagcaacagcgccgtgagcaccgaggacctgaaggagtgcctgaagaagcagctggagttctgcttcagcagagagaacctgagcaaggacctgtacctgatcagccagatggacagcgaccagttcatccccatctggaccgtggccaacatggaggagatcaagaagctgaccaccgaccccgacctgatcctggaggtgctgagaagcagccccatggtgcaggtggacgagaagggcgagaaggtgagacccagccacaagagatgcatcgtgatcctgagagagatccccgagaccacccccatcgaggaggtgaagggcctgttcaagagcgagaactgccccaaggtgatcagctgcgagttcgcccacaacagcaactggtacatcaccttccagagcgacaccgacgcccagcaggccttcaagtacctgagagaggaggtgaagaccttccagggcaagcccatcatggccagaatcaaggccatcaacaccttcttcgccaagaacggctacagactgatggacagcagcatctacagccaccccatccagacccaggcccagtacgccagccccgtgttcatgcagcccgtgtacaacccccaccagcagtacagcgtgtacagcatcgtgccccagagctggagccccaaccccaccccctacttcgagacccccctggcccccttccccaacggcagcttcgtgaacggcttcaacagccccggcagctacaagaccaacgccgccgccatgaacatgggcagacccttccagaagatcgtgtag

SEQ ID NO: 66897 - DNA, 1338 bp, Artificial Sequence
  derived and/or modified sequence
atgttgctattcgtcgagcaagtagcgagcaagggtaccggacttaatcccaatgccaaggtgtggcaagagattgcgcccggcaacaccgatgccactccagtcacccacggtaccgagtcttcctggcatgaaatagcggcaacctctggcgcacacccagaaggcaatgccgagctatcggaggacatctgcaaggaatatgaggtgatgtattctagttcgtgtgaaaccactagaaataccaccgggatagaagagtccactgatgggatgattcttggaccggaggatttgagttaccaaatctatgatgtgagcggcgagtctaactccgccgtctctaccgaggatctgaaagaatgtctgaagaagcagttagaattctgcttcagtagagaaaatctctccaaggatctgtacctcattagccaaatggactctgatcagtttatccccatttggaccgtggctaatatggaggaaatcaaaaagctgaccacagacccagatctgatcctagaggtactgaggtcctcccctatggtacaggtggatgaaaagggcgaaaaggttcgcccaagccataaacgctgcattgttattctgcgggagattccagagaccactcccattgaagaagtgaagggcctatttaaatctgaaaactgtccaaaagtcatttcctgtgagttcgcccataacagcaactggtatattacatttcaatctgacacagatgcccagcaggcgtttaagtacttgagagaagaggtgaagacctttcaggggaaacccataatggcgagaatcaaggctataaatacgttttttgcaaagaatggctacaggctgatggattcctcgatctattcacatcccatacaaacacaagcccaatacgcgtctcctgtgttcatgcagcccgtgtataaccctcatcagcagtactcagtctactccatcgtgcctcagagttggtccccgaaccccaccccttatttcgagactccacttgcaccctttcctaacggctcgttcgtaaacggttttaactctcctggctcctataaaactaatgccgccgcaatgaacatgggtaggccgtttcaaaagaacagggtgaaacctcagtttcgatcatctggcgggagcgaacacagcactgaggggtcagtaagccttggtgatggtcaattgaatcgatatagctcgaggaacttccctgctgaaagacacaaccccacagtgaccggtcatcaggaacagacctacctccagaaagaaacatcgaccctgcaggtggaacagaacggggactatggccgtggcagatag

SEQ ID NO: 66898 - DNA, 1125 bp, Artificial Sequence
  derived and/or modified sequence
atgctcctgttcgtggaacaggtggcatcgaaagggacggggctgaaccctaacgcgaaagtatggcaggagatagctccaggtaacactgacgccactccagtgacccacggaactgaaagctcatggcacgagatcgctgctacttctggcgctcaccctgaggggaatgctgaactgtctgaggacatatgcaaggaatatgaggtgatgtacagctcaagctgtgagactacaagaaacaccacgggaatcgaagagtcgactgatggaatgatcctggggccggaggacttaagttaccagatttacgatgtgagtggcgaatccaattccgctgtttccaccgaggaccttaaggagtgcctcaaaaagcagctcgaattttgtttctctcgggaaaatctgagcaaggatctgtatctcatctctcagatggattccgatcagtttattcctatctggacagtggctaatatggaagagattaagaaactgaccacagatccggacctgatactggaggttttgcgctccagccccatggttcaggtggatgagaaaggcgagaaagtacggcctagccacaaaagatgcattgtgatccttcgagagattccagagaccactcctattgaggaggtgaaggggctattcaaatcagagaattgcccgaaggtgatttcttgtgagtttgctcacaactccaactggtacattaccttccagtccgacacagacgctcagcaagcctttaagtatctcagagaggaggtgaaaacctttcaggggaagcccatcatggcccggatcaaagctatcaacaccttctttgctaaaaacggatatcggctaatggattccagcatttatagtcatccaattcagacacaggcacaatatgcgtctcctgtgtttatgcaacccgtgtataaccctcaccagcagtactcagtgtattccatcgtgccccagtcctggtcccccaacccaacaccatatttcgagacaccactagcaccattcccaaatgggtccttcgtgaatggttttaactccccaggcagctataaaaccaacgctgctgcgatgaacatgggtagacctttccagaaaatcgtgtag

SEQ ID NO: 66899 - DNA, 1338 bp, Artificial Sequence
  derived and/or modified sequence
atgctgctgtttgtggagcaggtggccagcaaaggaacaggcctgaaccccaatgccaaggtgtggcaggagatcgcccctggcaacacagatgccacccctgtgacccatggaacagagagctcctggcatgaaattgctgccaccagcggggcccaccctgagggcaatgctgagctgtctgaggacatctgcaaggagtatgaggtgatgtacagcagcagctgtgagaccaccaggaacaccactggaattgaggagagcacagatggcatgatcctgggccctgaggacctgagctaccagatctatgatgtgtctggagagagcaacagcgctgtgtccacagaggacctgaaggaatgtctgaagaagcagctggagttctgcttcagccgggagaacctgagcaaggacctgtacctgatcagccagatggacagcgaccagttcatccccatctggacagtggccaacatggaggagatcaagaagctgaccacagatcctgacctgatcctggaggtgctgcggagcagccccatggtgcaggtggatgagaagggggagaaggtgcggcccagccacaagcgctgcatcgtcatcctgcgggagatccctgagaccacccccatcgaggaggtgaagggcctcttcaagtctgagaactgccccaaggtgatcagctgtgaatttgcccacaacagcaactggtacatcaccttccagagcgacacagatgcccagcaggccttcaagtacctgcgggaggaggtgaagaccttccagggcaagcccatcatggcccgcatcaaggccatcaacaccttctttgccaagaatggctaccgcctgatggacagcagcatctacagccaccccatccagacccaggcccagtatgccagccctgtgttcatgcagcctgtgtacaacccccaccagcagtacagcgtgtacagcatcgtgccccagagctggagccccaaccccaccccctactttgagacccccctggcccccttccccaacggcagctttgtgaatggcttcaacagccctggcagctacaagaccaatgctgctgccatgaacatgggccggcccttccagaagaacagagtgaagccccagttccgcagcagcggcggcagcgagcacagcacagagggctctgtgtccctgggagatggccagctgaaccgctacagcagcaggaacttccctgctgagcggcacaaccccaccgtgacaggccaccaggagcagacctacctgcagaaggagaccagcaccctgcaggtggagcagaatggagactatggccggggccgctag

SEQ ID NO: 66900 - DNA, 1125 bp, Artificial Sequence
  derived and/or modified sequence
atgctgctgtttgtggagcaggtggccagcaaaggaacaggcctgaaccccaatgccaaggtgtggcaggagatcgcccctggcaacacagatgccacccctgtgacccatggaacagagagctcctggcatgaaattgctgccaccagcggggcccaccctgagggcaatgctgagctgtctgaggacatctgcaaggagtatgaggtgatgtacagcagcagctgtgagaccaccaggaacaccactggaattgaggagagcacagatggcatgatcctgggccctgaggacctgagctaccagatctatgatgtgtctggagagagcaacagcgctgtgtccacagaggacctgaaggaatgtctgaagaagcagctggagttctgcttcagccgggagaacctgagcaaggacctgtacctgatcagccagatggacagcgaccagttcatccccatctggacagtggccaacatggaggagatcaagaagctgaccacagatcctgacctgatcctggaggtgctgcggagcagccccatggtgcaggtggatgagaagggggagaaggtgcggcccagccacaagcgctgcatcgtcatcctgcgggagatccctgagaccacccccatcgaggaggtgaagggcctcttcaagtctgagaactgccccaaggtgatcagctgtgaatttgcccacaacagcaactggtacatcaccttccagagcgacacagatgcccagcaggccttcaagtacctgcgggaggaggtgaagaccttccagggcaagcccatcatggcccgcatcaaggccatcaacaccttctttgccaagaatggctaccgcctgatggacagcagcatctacagccaccccatccagacccaggcccagtatgccagccctgtgttcatgcagcctgtgtacaacccccaccagcagtacagcgtgtacagcatcgtgccccagagctggagccccaaccccaccccctactttgagacccccctggcccccttccccaacggcagctttgtgaatggcttcaacagccctggcagctacaagaccaatgctgctgccatgaacatgggccggcccttccagaagatcgtgtag

SEQ ID NO: 66901 - DNA, 1577 bp, Artificial Sequence
  derived and/or modified sequence
ggggcaaggcgagtgtgtgtccttatcctagcaattggggcgcgggcctgtgagccagttggagttgcggcggcgggaacgattgggctgagcagaggacgacatgttgcttttcgtggagcaggtagcatctaaaggaactggtttaaatcctaatgccaaagtatggcaagaaattgctcctggaaatactgatgccaccccagtaactcatggaactgaaagctcttggcatgaaatagcagctacatcaggtgctcatcctgagggtaatgcagagctctcagaagatatatgtaaagaatatgaagtaatgtattcttcatcttgtgaaaccacaagaaatactacaggcattgaagaatcaactgatgggatgattttaggaccagaagatctgagttaccaaatatatgatgtttccggagaaagcaattcagcagtttctacagaagacctaaaagaatgtctgaagaaacaattagaattctgtttttcacgagaaaatttgtcaaaggatctttacttgatatctcaaatggatagtgatcagttcatcccaatttggacagttgccaacatggaagaaataaaaaagttgactacagaccctgatctaattcttgaagtgttaagatcttctcccatggtacaagttgatgagaagggtgagaaagtgagaccaagtcataagcgttgtattgtaattcttagagagattcctgaaacaacaccaatagaggaagtgaaaggtttgttcaaaagtgaaaactgccccaaagtgataagctgtgagtttgcacacaatagcaactggtatatcactttccagtcagacacagatgcacaacaggcttttaaatacttaagagaagaagttaaaacatttcagggcaagccaattatggcaaggataaaagccatcaatacattttttgctaagaatggttatcgattaatggattctagtatctatagtcaccccattcaaactcaagcacagtatgcctccccagtctttatgcagcctgtatataatcctcaccaacagtactcggtctatagtattgtgcctcagtcttggtctccaaatcctacaccttactttgaaacaccactggctccctttcccaatggtagttttgtgaatggctttaattcgccaggatcttataaaacaaatgctgctgctatgaatatgggtcgaccattccaaaaaaatcgtgtgaagcctcagtttaggtcatctggtggttcagaacactcaacagagggctctgtatccttgggggatggacagttgaacagatatagttcaagaaactttccagctgaacggcataaccccacagtaactgggcatcaggagcaaacttaccttcagaaggagacttccactttgcaggtggaacagaatggggactatggtaggggcaggtaagaaaataaagtacctgaaaacctttgataataatgtgatcatcctgaataattgaagaacatgatcttcataataattaaatgagcatttaattattggtatatggttatattaaataaatacgttattttcagaa

SEQ ID NO: 66902 - DNA, 1572 bp, Artificial Sequence
  derived and/or modified sequence
ggggcaaggcgagtgtgtgtccttatcctagcaattggggcgcgggcctgtgagccagttggagttgcggcggcgggaacgattgggctgagcagaggacgacatgttgcttttcgtggagcaggtagcatctaaaggaactggtttaaatcctaatgccaaagtatggcaagaaattgctcctggaaatactgatgccaccccagtaactcatggaactgaaagctcttggcatgaaatagcagctacatcaggtgctcatcctgagggtaatgcagagctctcagaagatatatgtaaagaatatgaagtaatgtattcttcatcttgtgaaaccacaagaaatactacaggcattgaagaatcaactgatgggatgattttaggaccagaagatctgagttaccaaatatatgatgtttccggagaaagcaattcagcagtttctacagaagacctaaaagaatgtctgaagaaacaattagaattctgtttttcacgagaaaatttgtcaaaggatctttacttgatatctcaaatggatagtgatcagttcatcccaatttggacagttgccaacatggaagaaataaaaaagttgactacagaccctgatctaattcttgaagtgttaagatcttctcccatggtacaagttgatgagaagggtgagaaagtgagaccaagtcataagcgttgtattgtaattcttagagagattcctgaaacaacaccaatagaggaagtgaaaggtttgttcaaaagtgaaaactgccccaaagtgataagctgtgagtttgcacacaatagcaactggtatatcactttccagtcagacacagatgcacaacaggcttttaaatacttaagagaagaagttaaaacatttcagggcaagccaattatggcaaggataaaagccatcaatacattttttgctaagaatggttatcgattaatggattctagtatctatagtcaccccattcaaactcaagcacagtatgcctccccagtctttatgcagcctgtatataatcctcaccaacagtactcggtctatagtattgtgcctcagtcttggtctccaaatcctacaccttactttgaaacaccactggctccctttcccaatggtagttttgtgaatggctttaattcgccaggatcttataaaacaaatgctgctgctatgaatatgggtcgaccattccaaaaaatcgtgtgaagcctcagtttaggtcatctggtggttcagaacactcaacagagggctctgtatccttgggggatggacagttgaacagatatagttcaagaaactttccagctgaacggcataaccccacagtaactgggcatcaggagcaaacttaccttcagaaggagacttccactttgcaggtggaacagaatggggactatggtaggggcaggtaagaaaataaagtacctgaaaacctttgataataatgtgatcatcctgaataattgaagaacatgatcttcataataattaaatgagcatttaattattggtatatggttatattaaataaatacgttattttc

SEQ ID NO: 66903 - DNA, 1338 bp, Artificial Sequence
  derived and/or modified sequence
atgctgctgttcgtggagcaggtggccagcaagggcaccggcctgaatcctaacgccaaagtatggcaggagatcgccccgggcaacacggacgcgacccctgtcactcacggcaccgaatcttcctggcacgaaattgctgcaacgtctggggcccaccctgaggggaatgctgaactaagtgaggacatctgtaaagagtatgaggttatgtatagctcctcctgcgaaactaccaggaacacaactggtattgaggagtctacggacggcatgatcctcgggcctgaagatctaagctaccagatctatgatgtttcaggcgaatctaatagtgcagtgagtacggaggatctgaaggagtgcctaaagaaacagttggagttctgcttcagtcgtgaaaatctgtctaaggatctgtatttgatcagccagatggacagtgaccagtttatcccaatatggacggtggctaatatggaggaaataaaaaaactcaccaccgatcccgatctgatactagaagtgctcaggagctcacccatggtccaggtggacgaaaagggagagaaggtcagaccctcccataaacggtgcattgtcatcctgcgggagatcccggagaccacaccaatcgaggaggttaaaggcctattcaagtccgagaactgcccaaaagtgattagctgtgagttcgcccataactctaattggtacatcacattccagtcagacactgacgcccaacaggcttttaaatacctgcgcgaggaagtcaagactttccaaggcaagcctattatggccaggatcaaggcaattaataccttcttcgctaaaaacgggtaccgtctaatggactcaagtatttattctcatcccatccagacccaggcccagtacgccagcccggtgtttatgcagcctgtgtataatccgcaccagcaatatagcgtgtactctatcgtcccgcagtcttggtccccaaacccaacaccctactttgaaaccccactggcaccgtttccaaatggcagctttgtcaatggctttaattcccccggttcctataagaccaatgccgcagccatgaatatgggacgaccttttcagaaaaaccgggtgaaaccccagttccgatcatctggagggagcgaacacagcacagaaggctctgtgagtctgggcgacgggcaacttaatcgatattccagtcgcaatttccctgctgagcgacacaatccaaccgtgacagggcaccaagagcagacctatctgcagaaagaaacttccaccctccaggtggaacagaatggagactatggccgaggcaggtag

SEQ ID NO: 66904 - DNA, 1125 bp, Artificial Sequence
  derived and/or modified sequence
atgctgctgttcgtggagcaggtggccagcaagggcaccggcctgaatcctaatgcaaaagtctggcaggagatcgcccctggaaacaccgacgccacgcccgtaactcacggcacggagagctcctggcacgagattgcagcaactagcggcgcccatcccgaaggtaatgcagaactcagtgaagacatctgtaaggaatacgaggtcatgtacagctcgtcttgcgagaccaccaggaacaccaccgggatcgaggaatcaacagatggaatgatactcggccccgaagatttatcatatcagatctacgacgtgagcggagagagtaatagcgctgtctccacagaggacctgaaagagtgtttaaaaaagcagcttgagttttgtttctccagggagaacttatctaaagatttgtatctgattagccagatggactccgatcagttcattcctatctggaccgtagccaacatggaggagatcaagaaactgaccacagacccggatttaatactggaggtgctgcggtccagtccaatggtccaggttgacgagaaaggcgagaaggtccggccgtcacacaaacgctgcatcgttattctcagggagatacccgagacgacccccatcgaggaagtcaaaggactgttcaagtccgaaaattgcccaaaggttatatcctgcgagttcgcccacaatagtaattggtacataactttccagagcgacacagatgcccaacaggcgtttaagtatctgcgcgaagaggtgaaaactttccagggcaagccaatcatggctcggattaaggccatcaatactttctttgctaagaacggctaccgtctgatggactcctcaatctacagccaccccatccagactcaggcccagtatgcttctccagttttcatgcagccagtgtataaccctcatcagcaatatagcgtttactctatcgtaccccaaagctggagtccgaatcctactccatatttcgaaacccccttggcaccattcccaaacggctcctttgtgaacgggttcaacagccccggatcatataaaacgaacgccgctgctatgaacatggggaggccattccagaagatcgtctag

SEQ ID NO: 66905 - DNA, 1338 bp, Artificial Sequence
  derived and/or modified sequence
atgttgctgttcgtggagcaggtggcctcaaaggggacgggcctgaaccccaacgccaaggtctggcaggaaatcgccccaggcaacacagacgccacccctgtgacccacggcactgagtcctcatggcacgaaattgccgctaccagcggcgctcatcctgaagggaatgccgagctgagtgaagacatctgcaaagagtacgaggtgatgtattcgtctagttgcgagaccacaagaaatacaaccgggatagaggagagcactgatggtatgattcttggcccagaggacctgtcttatcagatatacgacgttagtggtgaatccaactccgccgtctccaccgaagacctgaaagagtgtctgaagaagcagctagagttttgcttctcaagggagaacctgtccaaggacctgtatctgatcagtcagatggactctgatcagttcattccgatttggaccgttgcaaatatggaggagatcaagaagctgactactgaccccgacctgatcctggaagtcctccgtagcagccctatggtccaggtggatgaaaagggcgagaaggtcaggccttcccacaagcgatgtatcgttatacttcgggaaatccccgagaccactcctatcgaagaggtgaagggattgttcaaatccgagaactgtccaaaagtaatctcatgcgagttcgcccataattcaaactggtacataacatttcagagcgatactgacgcccaacaagcattcaagtatctgagagaggaggtcaaaacctttcagggaaagcctatcatggcacgcataaaagccatcaacacatttttcgcgaaaaacggatacaggctgatggactcttcaatctactcgcaccccatccagacccaagctcagtatgcctcccctgtgttcatgcagcccgtttacaacccccatcagcaatatagcgtgtattcgattgtgccacagtcctggtcgccaaaccccacaccatatttcgaaacccccctggcgccattccctaatggttccttcgttaacggctttaactctccaggcagctacaagactaatgctgctgcgatgaatatgggacgacctttccaaaagaatcgagtcaagccacagttccggagctctgggggatccgaacacagtactgaaggtagcgtgtctcttggcgacggccaattgaaccgctacagctcccggaattttccggctgagcgacacaacccaacagtgaccggacatcaggaacagacatatttgcagaaggagactagcaccttacaggtggagcagaacggagattatggtcgaggtaggtag

SEQ ID NO: 66906 - DNA, 1125 bp, Artificial Sequence
  derived and/or modified sequence
atgctcctatttgtagaacaggtggcatctaagggcacggggctaaaccccaacgccaaagtttggcaggaaatcgctcccggtaataccgacgccacgcctgtcactcacggcaccgaaagtagctggcatgagattgcagccacctcgggggcacatcctgagggaaatgctgaactgagcgaggacatctgcaaggaatatgaagtcatgtatagcagctcctgcgaaaccacgaggaacaccactggaatcgaggagtcaaccgacggaatgatcctcggaccggaggacttatcataccagatttacgatgtctccggcgagtccaattctgccgtgtccaccgaggacctcaaagagtgcctgaagaagcagctagaattttgctttagtcgcgagaacttatccaaggacctgtatcttatctcacagatggactccgatcaatttatccccatctggacggtcgccaatatggaggagatcaagaagctgaccactgaccccgaccttatcctggaagttctgaggtctagccctatggttcaggttgacgagaaaggagagaaagtgcgcccttcccataaacgctgcatagttattctgcgagagatccccgaaacaacccctatagaagaggtaaaaggtctgttcaagagcgagaactgcccaaaagtgatttcctgtgagtttgcacataattccaattggtacatcactttccagagtgacaccgacgcacagcaagcgtttaagtacctgcgcgaggaggtgaagacatttcaaggcaagcccatcatggcaaggattaaggcaatcaatacgttttttgctaaaaatggctaccgactgatggatagttcaatctacagccatccgatccagacccaggctcagtatgcgtcccctgtctttatgcagcccgtctacaatccgcaccagcagtactcagtctactcaatcgttccacaaagctggagcccaaatccaactccctattttgagacccctttggcaccgttccctaacgggtccttcgtgaacggtttcaatagccctgggtcctacaagactaacgctgccgcaatgaacatgggcaggcctttccagaaaattgtttag

SEQ ID NO: 66907 - protein, 56 aa, Artificial Sequence
  derived and/or modified sequence
MGCSSSALNKAGDSSRFPSGETGEKVETDMENEKVSEGAETKEEETGEVVDLSAAT

SEQ ID NO: 66908 - DNA, 171 bp, Artificial Sequence
  derived and/or modified sequence
atgggctgcagcagcagcgccctgaacaaggccggcgacagcagcagattccccagcggcgagaccggcgagaaggtggagaccgacatggagaacgagaaggtgagcgagggcgccgagaccaaggaggaggagaccggcgaggtggtggacctgagcgccgccacctag

SEQ ID NO: 66909 - DNA, 596 bp, Artificial Sequence
  derived and/or modified sequence
agccccgctgcgcgcttgcgctctacgcccaagggagccgggctgcagagctggagaaacttccgcggctacgggtgcagttgccttcggttcccggttccgggccgacacccgcgcagggctgagacaggtgtctgcgctccccgcaatgggctgctccagcagcgccctcaacaaggccggcgacagcagcaggttccccagcggtgagacaggggaaaaggtggaaacagacatggagaatgagaaagtgagtgaaggggctgaaaccaaagaagaagaaacaggagaagtggtggacctttcagcagccacatagatagaagagtgaaccgacacagtgtgttatcatagaggagacaaaaatggtagtgaagcttgtggttatgtatcttatctttctacatttacatgttttctgtaaggagtgtggttatagagagactgttggaaccatgagaaggatgtttctgtgttcttgattatattgttctgcaaaactgctaagccatgaacagttttcttagctacttagaatggttatacatttaaaagtataaaaaccaaagccaataaaaatgatgtgattatttaag

SEQ ID NO: 66910 - DNA, 171 bp, Artificial Sequence
  derived and/or modified sequence
atgggttgttcaagcagcgccttgaataaggccggtgattcctcaagatttcctagcggagaaactggcgagaaggttgagactgatatggagaacgagaaggttagtgagggggccgaaactaaagaggaggagaccggggaggttgtggatttgtcagcagccacttag

SEQ ID NO: 66911 - DNA, 171 bp, Artificial Sequence
  derived and/or modified sequence
atgggctgcagcagcagcgccctgaacaaggccggggacagcagccgcttccccagcggggagaccggggagaaggtggagacagacatggagaatgagaaggtgtctgagggcgctgagaccaaggaggaggagaccggggaggtggtggacctgtctgctgccacctag

SEQ ID NO: 66912 - DNA, 171 bp, Artificial Sequence
  derived and/or modified sequence
atgggctgcagcagcagcgccctgaacaaggccggcgacagcagccgcttccctagtggggagacaggtgaaaaggtcgagaccgacatggagaatgaaaaggtttctgagggagctgagacaaaggaagaagaaactggggaagtggtggacttaagcgctgcaacctag

SEQ ID NO: 66913 - DNA, 171 bp, Artificial Sequence
  derived and/or modified sequence
atgggctgttcttcatctgccttgaataaggcaggtgacagttcacgctttccgagcggtgaaacgggagaaaaggtggaaacagatatggagaatgagaaggtgagcgaaggggcagaaacgaaagaggaggaaacgggtgaagtggtcgacttgtccgccgctacctag

SEQ ID NO: 66914 - protein, 653 aa, Artificial Sequence
  derived and/or modified sequence
MLLFVEQVASKGTGLNPNAKVWQEIAPGNTDATPVTHGTESSWHEIAATSGAHPEGNAELSEDICKEYEVMYSSSCETTRNTTGIEESTDGMILGPEDLSYQIYDVSGESNSAVSTEDLKECLKKQLEFCFSRENLSKDLYLISQMDSDQFIPIWTVANMEEIKKLTTDPDLILEVLRSSPMVQVDEKGEKVRPSHKRCIVILREIPETTPIEEVKGLFKSENCPKVISCEFAHNSNWYITFQSDTDAQQAFKYLREEVKTFQGKPIMARIKAINTFFAKNGYRLMDSSIYSHPIQTQAQYASPVFMQPVYNPHQQYSVYSIVPQSWSPNPTPYFETPLAPFPNGSFVNGFNSPGSYKTNAAAMNMGRPFQKNRRTLFRGRRRREDDRISRPHPSTAESKAPTPKFDLLASNFPPLPGSSSRMPGELVLENRMSDVVKGVYKEKDNEELTISCPVPADEQTECTSAQQLNMSTSSPCAAELTALSTTQQEKDLIEDSSVQKDGLNQTTIPVSPPSTTKPSRASTASPCNNNINAATAVALQEPRKLSYAEVCQKPPKEPSSVLVQPLRELRSNVVSPTKNEDNGAPENSVEKPHEKPEARASKDYSGFRGNIIPRGAAGKIREQRRQFSHRAIPQGVTRRNGKEQYVPPRSPK

SEQ ID NO: 66915 - DNA, 1962 bp, Artificial Sequence
  derived and/or modified sequence
atgctgctgttcgtggagcaggtggccagcaagggcaccggcctgaaccccaacgccaaggtgtggcaggagatcgcccccggcaacaccgacgccacccccgtgacccacggcaccgagagcagctggcacgagatcgccgccaccagcggcgcccaccccgagggcaacgccgagctgagcgaggacatctgcaaggagtacgaggtgatgtacagcagcagctgcgagaccaccagaaacaccaccggcatcgaggagagcaccgacggcatgatcctgggccccgaggacctgagctaccagatctacgacgtgagcggcgagagcaacagcgccgtgagcaccgaggacctgaaggagtgcctgaagaagcagctggagttctgcttcagcagagagaacctgagcaaggacctgtacctgatcagccagatggacagcgaccagttcatccccatctggaccgtggccaacatggaggagatcaagaagctgaccaccgaccccgacctgatcctggaggtgctgagaagcagccccatggtgcaggtggacgagaagggcgagaaggtgagacccagccacaagagatgcatcgtgatcctgagagagatccccgagaccacccccatcgaggaggtgaagggcctgttcaagagcgagaactgccccaaggtgatcagctgcgagttcgcccacaacagcaactggtacatcaccttccagagcgacaccgacgcccagcaggccttcaagtacctgagagaggaggtgaagaccttccagggcaagcccatcatggccagaatcaaggccatcaacaccttcttcgccaagaacggctacagactgatggacagcagcatctacagccaccccatccagacccaggcccagtacgccagccccgtgttcatgcagcccgtgtacaacccccaccagcagtacagcgtgtacagcatcgtgccccagagctggagccccaaccccaccccctacttcgagacccccctggcccccttccccaacggcagcttcgtgaacggcttcaacagccccggcagctacaagaccaacgccgccgccatgaacatgggcagacccttccagaagaacagaagaaccctgttcagaggcagaagaagaagagaggacgacagaatcagcagaccccaccccagcaccgccgagagcaaggcccccacccccaagttcgacctgctggccagcaacttcccccccctgcccggcagcagcagcagaatgcccggcgagctggtgctggagaacagaatgagcgacgtggtgaagggcgtgtacaaggagaaggacaacgaggagctgaccatcagctgccccgtgcccgccgacgagcagaccgagtgcaccagcgcccagcagctgaacatgagcaccagcagcccctgcgccgccgagctgaccgccctgagcaccacccagcaggagaaggacctgatcgaggacagcagcgtgcagaaggacggcctgaaccagaccaccatccccgtgagcccccccagcaccaccaagcccagcagagccagcaccgccagcccctgcaacaacaacatcaacgccgccaccgccgtggccctgcaggagcccagaaagctgagctacgccgaggtgtgccagaagccccccaaggagcccagcagcgtgctggtgcagcccctgagagagctgagaagcaacgtggtgagccccaccaagaacgaggacaacggcgcccccgagaacagcgtggagaagccccacgagaagcccgaggccagagccagcaaggactacagcggcttcagaggcaacatcatccccagaggcgccgccggcaagatcagagagcagagaagacagttcagccacagagccatcccccagggcgtgaccagaagaaacggcaaggagcagtacgtgccccccagaagccccaagtag

SEQ ID NO: 66916 - DNA, 1962 bp, Artificial Sequence
  derived and/or modified sequence
atgctgcttttcgtcgaacaagttgctagtaaaggcacagggctgaaccctaatgcaaaagtttggcaggaaattgctcccggtaatacggacgcaaccccagttacacatggcaccgagtcctcctggcatgagatcgccgccacaagtggagcccaccccgaggggaacgccgaactgagtgaagacatctgtaaagagtatgaagtgatgtattcgtcgagttgtgaaacaacacgtaataccacggggattgaggaatctactgatggaatgatccttggcccagaggatctgagttaccagatttacgatgtatctggagaaagcaactccgccgtatccaccgaagacctaaaggagtgtctgaaaaagcagctggaattttgcttctctagggagaatctgagcaaggacctctatctgattagccagatggactctgatcaatttattcccatttggaccgtcgccaacatggaggagataaaaaagctgacaacggatccggatttgatcctcgaggttcttcgctctagccccatggtgcaggttgatgaaaagggtgagaaagtacgaccgtctcacaagcgttgtattgttattctgagggagatacctgaaacaaccccaatcgaggaagttaaaggcctgttcaagagcgagaactgtccaaaagtaatctcttgtgagttcgcacataactcgaattggtatatcacattccaaagtgacaccgacgcacagcaggctttcaaatacctccgagaagaagtgaagaccttccagggaaaacccatcatggctcggatcaaagctattaacaccttctttgccaagaatggctatcggcttatggacagctcaatctattctcaccccatccagactcaggcccagtatgcttcacccgtcttcatgcaacctgtgtacaatccccaccagcagtattcagtctactccattgtgccgcagagctggtctcccaatcccactccttattttgaaactccccttgcacctttccccaacgggagcttcgtgaatggctttaattctcctggatcttacaagaccaacgccgctgcaatgaacatgggcaggccatttcagaagaatcgccgcacattatttcgcggacgccgtagacgcgaggacgaccgtatcagccgcccacacccgagcacggccgagagtaaggcccccactccgaagttcgaccttctggcgtcgaactttcctcctctgcctggcagtagcagtcgaatgcctggagaattagtacttgaaaacaggatgtcggacgtggtaaaaggagtatacaaggaaaaagataatgaagaattgactatttcttgtcccgtccctgcagatgagcagacagagtgcactagtgcccaacagctgaatatgagcacttcttcaccgtgcgccgctgagctgaccgccctcagcaccacgcagcaagagaaggaccttatagaagatagctcagttcagaaggacgggctgaatcagacaactattcctgtaagtcccccatcaaccacaaagccgagtcgcgccagtaccgcctctccctgcaataataatattaatgcagccaccgcagtcgccctgcaggagccgcgcaagttgtcctatgcagaggtttgtcagaaaccgccaaaggaaccaagttcggttttggtccagcccctccgagagcttcggtctaacgtcgtttccccgacaaagaatgaggacaatggcgctccggagaacagcgtagagaaaccgcacgagaagccagaggcgcgagctagtaaagactattccgggtttcggggaaatattattccaagaggcgccgctggcaagatcagggagcagaggagacagttcagccacagggccatcccccagggagtgacccggcgcaacggcaaggagcagtacgtcccaccgcgcagccccaaatag

SEQ ID NO: 66917 - DNA, 1962 bp, Artificial Sequence
  derived and/or modified sequence
atgctgctgtttgtggagcaggtggccagcaaaggaacaggcctgaaccccaatgccaaggtgtggcaggagatcgcccctggcaacacagatgccacccctgtgacccatggaacagagagctcctggcatgaaattgctgccaccagcggggcccaccctgagggcaatgctgagctgtctgaggacatctgcaaggagtatgaggtgatgtacagcagcagctgtgagaccaccaggaacaccactggaattgaggagagcacagatggcatgatcctgggccctgaggacctgagctaccagatctatgatgtgtctggagagagcaacagcgctgtgtccacagaggacctgaaggaatgtctgaagaagcagctggagttctgcttcagccgggagaacctgagcaaggacctgtacctgatcagccagatggacagcgaccagttcatccccatctggacagtggccaacatggaggagatcaagaagctgaccacagatcctgacctgatcctggaggtgctgcggagcagccccatggtgcaggtggatgagaagggggagaaggtgcggcccagccacaagcgctgcatcgtcatcctgcgggagatccctgagaccacccccatcgaggaggtgaagggcctcttcaagtctgagaactgccccaaggtgatcagctgtgaatttgcccacaacagcaactggtacatcaccttccagagcgacacagatgcccagcaggccttcaagtacctgcgggaggaggtgaagaccttccagggcaagcccatcatggcccgcatcaaggccatcaacaccttctttgccaagaatggctaccgcctgatggacagcagcatctacagccaccccatccagacccaggcccagtatgccagccctgtgttcatgcagcctgtgtacaacccccaccagcagtacagcgtgtacagcatcgtgccccagagctggagccccaaccccaccccctactttgagacccccctggcccccttccccaacggcagctttgtgaatggcttcaacagccctggcagctacaagaccaatgctgctgccatgaacatgggccggcccttccagaagaacagaaggaccctcttccggggcagaagaagaagagaagatgaccgcatcagccggccccaccccagcacagctgagagcaaggcccccacccccaagtttgacctgctggccagcaacttcccccccctgcccggcagcagcagcaggatgcctggagagctggtgctggagaacaggatgtctgatgtggtgaagggcgtgtacaaggagaaggacaatgaggagctgaccatcagctgccctgtgcctgcagatgagcagacagagtgcaccagcgcccagcagctgaacatgagcaccagcagcccctgtgccgctgagctgacagccctgagcaccacccagcaggagaaggacctgattgaggacagctctgtgcagaaggatggcctgaaccagaccaccatccctgtgtccccacccagcaccaccaagcccagccgggccagcacagccagcccctgcaacaacaacatcaatgctgccacagctgtggccctgcaggagcccaggaagctgtcctatgcagaggtgtgccagaagccacccaaggagcccagctctgtgctggtgcagcccctgcgggagctgcggagcaatgtggtgagccccaccaagaatgaagataatggagccccagaaaattctgtggagaagccccatgagaagccagaggcccgggccagcaaggactacagcggcttccggggcaacatcatccccagaggagctgctgggaagatccgggagcagaggcggcagttcagccaccgggccatcccccagggcgtgaccaggagaaatggcaaggagcagtatgtgccccccaggagccccaagtag

SEQ ID NO: 66918 - DNA, 6296 bp, Artificial Sequence
  derived and/or modified sequence
agacccggaagcagttgttgtttcaagggaggtgggactgggcgggtcaggccgcagcggctgacggcaggggaggagccgggtccactgccgggtggaggggcaaggcgagtgtgtgtccttatcctagcaattggggcgcgggcctgtgagccagttggagttgcggcggcgggaacgattgggctgagcagaggacgacatgttgcttttcgtggagcaggtagcatctaaaggaactggtttaaatcctaatgccaaagtatggcaagaaattgctcctggaaatactgatgccaccccagtaactcatggaactgaaagctcttggcatgaaatagcagctacatcaggtgctcatcctgagggtaatgcagagctctcagaagatatatgtaaagaatatgaagtaatgtattcttcatcttgtgaaaccacaagaaatactacaggcattgaagaatcaactgatgggatgattttaggaccagaagatctgagttaccaaatatatgatgtttccggagaaagcaattcagcagtttctacagaagacctaaaagaatgtctgaagaaacaattagaattctgtttttcacgagaaaatttgtcaaaggatctttacttgatatctcaaatggatagtgatcagttcatcccaatttggacagttgccaacatggaagaaataaaaaagttgactacagaccctgatctaattcttgaagtgttaagatcttctcccatggtacaagttgatgagaagggtgagaaagtgagaccaagtcataagcgttgtattgtaattcttagagagattcctgaaacaacaccaatagaggaagtgaaaggtttgttcaaaagtgaaaactgccccaaagtgataagctgtgagtttgcacacaatagcaactggtatatcactttccagtcagacacagatgcacaacaggcttttaaatacttaagagaagaagttaaaacatttcagggcaagccaattatggcaaggataaaagccatcaatacattttttgctaagaatggttatcgattaatggattctagtatctatagtcaccccattcaaactcaagcacagtatgcctccccagtctttatgcagcctgtatataatcctcaccaacagtactcggtctatagtattgtgcctcagtcttggtctccaaatcctacaccttactttgaaacaccactggctccctttcccaatggtagttttgtgaatggctttaattcgccaggatcttataaaacaaatgctgctgctatgaatatgggtcgaccattccaaaaaaatcggagaactctcttcagaggtcgaagacgacgagaagatgacaggatctcaagacctcatccttcaacagctgaatcaaaggctccaacaccaaagtttgacttattagcctcaaattttccacctttacctggaagttcatcaagaatgccaggtgaactcgttttggagaataggatgtctgatgttgttaaaggtgtctacaaagaaaaggataatgaagagttgacaattagttgcccagtgcctgcagatgagcagacagaatgcacttctgcccagcaactcaatatgagtaccagttctccatgtgctgctgagcttactgcattaagcacaactcagcaagaaaaggatctaatagaagattcctctgttcagaaggatggtctcaatcagacaactataccagtttctcctccaagtactacaaagccatcgagggcaagtactgcttcaccatgtaataataacataaatgcagctacagctgtggctctacaggaaccccgaaagttaagttatgctgaagtgtgccagaagccccctaaagagccatcttcagttcttgtgcagccactacgggaacttcgctccaatgtggtgtctcccaccaaaaatgaagacaatggagctcctgagaactccgttgagaaaccacatgagaagccagaagcaagggctagtaaggattattctggcttccgaggcaatataatccccaggggagcagcaggaaaaatcagggaacagagacgccagtttagccatagggctatacctcagggagtgactcgacgtaatggcaaagagcaatatgtgccacccagatcaccaaagtaaaaaacaacaaaactattcaaaaacttcactctcttcccattaaacttgaactgtggctatattgaactgttttggaggggagggggtagccaggaaggaaacaagagaaagtacgtccatttcattatggattttggagttgtgagtgataggatcccaaaattcatctctaatgtggtttttaaatgctggaggattccaatcaatataaatatatatatatatatacacacacatatataaaaagtataatttttctatttttgtttttggttttaatttgcagagatttgctgccaggaatcaattttgagggttcagatttagcttggaagaaaaaaaagaaacatacatccttcagtataggagatgagggaatgagagaaaatattttttgaagaagcatttctgtaaaattagaaattactttttttaatctatttaaagtttggcttgaagaatgccatctctgactatatggccttgtattgcaaagcggatcagtggctggggtgcctgttgtgggtgtgagtgtgtacaagagcgattgaagccaaatctgttgtcatgttagtaaatgatttgaaaactgaatgtaatacttgagtagatttttttttctagtttgaaatttagtctgtctttttgaccttactaatatttcatttaacaagttgtaaaactctgattgtacttagagatgtgactaccaatcagtttgatactcaaggaaagggggttattcaagaaattgaaaatttcatcttggacctcagtgcataggtcaaatggatttcagaggtttaaacttccctgtgattcccccgaatacccccaaaatgagaaacaaaattttttttcttactccatttgttactctctgttctttgactgcccacccacagaaaagcaaaataaccaactacctactcaattgtgtgtttgtaattgctttgagcagtctagtcaaatcatataaattgttctaaatttcagaattgaacattgaagtattaactcttctgttcacacatttagaattttagctcccaagatggtagggcagactgaccgtacagtaatttatttgtcgttagtgttaaagattaagcatagtaactgactcttaagtgttaaataatgtagaagtaaaaaaattttttttaaaggcttaatttgggaggggggacttatttctgtttacagtgtattaccttccttccctcctcttctccccccacacccaacaaaatacagtttggaattcactgaaacagtaccagcaagtcatgagattttttagtaaagatgagaaagatggttgaagaaaattagtgcataatttctcagtgaataaagttgtagctctcatatactaaatagacaagtttacatgctgttatttagaaaatgactaaaatattaaaaaccgtgttgtgttaatctgttttaagtcataccatgttcagagttctatgtaaggtgggttttatttttcttttaagggatagtttgtaatagtaagaactgtcccatatgttagtaaattacatatgtacaaattgaaactgtaaattgtgaacactggaaagcaccattgtgacatagagtaaacatcttagtaatatattaaagtgaatgtaaatggtggttaaaattacattactgtgaaattcatcttccaactctaagttaagctttggagatacatgttagtggttaactgttaagagctttgaaaacactgcacatatctgtacaagccagaattactatttctttgacttattattagcttggcagttgcttttgatttgattgttttatgacatggtatactactatatttactcagtttgaaactattcatttctacacactatttttaaaaattgcctactaggtgaaacataacaataaaactacctgtgctgaaatttgggggaagtttaggtcctttaaaaaaacatattaatcattgactacatctatgataaaagtgcttattttggtttactaagataatgcagttggtggaaatgataaacgttttaagtgttaacatcctttgaatgcgttggatttcagagaataaacattttgtaaaaatcacttggtaaggattataaacttaattactgcacttaaaatgaaacattactttttttaaacaatgtgtcacaaatgtaggtctgtattacttgtatgcttgtgtgacttactgttagtccagctctaaaaatttaaaggttgtaattgaaatacaagaaaagagccttcttttagaagaaagcaagtatatttttgcttttacttcaaatgttatttaaagtagaaatttaatttgtagatataacctttaaaaattttctcattaagacaatgtttttaatttaatttgcctcattacatctaatagttcccatttgatggcatgtatagggaagagtgagagagtgtgtgtgtgtgtatgtgtgtgtaatatttatatatattcacagtatgtatttagcatttattttattacagcagatttaaagtttgtatctaaataatgcctatgagttgtgtgaagctcttggcttttttccaacgttactttgtaactaatgagggtggatgttcattgtagtttatttatttggttctttagatggaggaatttaaaaaatcaaatttttctcttcacctttatgacttgacatttccttgatctgttggaggctaaaagtaggtataaatgatattgaatgttgggtatagtgatactctgccatagttcttactgcatgaagagaacaagagtcacacaagttcaccactttgcacttcatagagaaggtacatagagacattgcaaaacctgtctccatttgctatcctgataattaaggttttcataatacctagggcctgtctctgagtaattttaattttgccaaatacactgacatttaaaatagtgatccatctaaatttttttcagctgggttttgaggaatataagagctttcaatgataaaggtttgttgtagttgtcttatgtgctgaatttgcagatgatcagatgctgtgcagaattctgatttatttttgtttcctaaaattaagatagcttgaatattatttcacattcctttttcttttttaaataaacaggtttgctttggaaaggcttaatgatggaatgttagcatcttcactagggtaaagaagaacaaaaagaatgttgctggaacgtaaaatagtatttaaaagttaatgaacacttctctagttttcttagttatggccttaataattagtctcttggcttaaatgtccactggttttactttgacacagttgaacaacactggggttaagtctctggtatttaggctggcaatatatatattaaccatattttaaaagtaccaattttgtttttacagaaaagataaaactcaaaagagaacagtgtattccttctgaggggcttttataaattattaactataatatatgatggattttttcctaattttttatatttccttacaattttggtggccattaatttaactttaggcttttgggcatatgctagtctgagcttccgaaaagatacatatatgtttcccttttcattagctgaatgaggatattttaagaagttgaaagagaatttattttcaagttgtgagtaaatcctcctttgaaattcacctgattattagataacttaaagtttatttttaaaagctgacaactttttatgaatcttcgagttgacagttcctaaaagcgtaactcagatattaatgggctgtgtattaaatggttttattttcagttttgcagcacagaacactgttgaaatatccatatcaacttgatttttttaacctaattcaggtgtcctttgcatctcttaaatgttgggggtgggggtcagagccagttatccggcttctgttttgtcgattgcttagatttgttcctgttgtcaaaactgttacccccaaaattggtgtgacacatgctcatgcataaaatgttaaaatgagtacatccttgtatttgtatttgttttcaacatcgccaaggtgctatgggaaattaacaaaattagaaaaaaaataaaattatt

SEQ ID NO: 66919 - DNA, 1962 bp, Artificial Sequence
  derived and/or modified sequence
atgctgctgttcgtggagcaggtggccagcaagggcaccggcctgaacccgaatgctaaggtgtggcaggagattgcaccagggaacacggacgcaacccccgtcacacatggcaccgagagttcatggcatgaaatcgcggccaccagcggggcacacccagaaggtaacgcagagctatccgaggacatctgtaaagagtacgaagtaatgtattcaagctcctgcgagacaactcgtaacacgaccgggattgaggagtctacagatggcatgattctgggacccgaagatctctcctaccagatatatgatgtgagtggagagtcgaacagtgctgtgtccacggaggatttgaaagaatgcctgaaaaaacagctagaattttgcttttctagagaaaacctctcgaaagatctctacctcatttcacagatggactcagatcagttcatccccatttggacggtggcaaatatggaagaaatcaagaagctgacgacagatccagatctcattcttgaagtcttgagatctagtccaatggtgcaggtggacgaaaagggcgaaaaagtgagacctagccataagaggtgtattgttatacttcgggagatcccggagaccacccctatagaggaagtgaagggactatttaaaagtgagaattgtcctaaggtcatttcttgtgagttcgcacacaactctaactggtacattacttttcaaagtgataccgacgcccagcaggccttcaaatatctacgcgaggaagtgaagactttccaaggtaagcctattatggccaggatcaaagccattaataccttttttgcaaaaaacggatataggttgatggactcgagcatttacagtcatcctatccaaactcaggcgcagtatgcttcacctgtcttcatgcagcctgtatacaaccctcaccagcagtattctgtgtacagtatcgtgccccaaagctggagcccaaacccgactccatatttcgagactccactcgcccctttccccaacggttcctttgtcaacggctttaattctccggggtcttacaaaaccaatgccgcagctatgaatatgggaagaccttttcagaaaaacagacgcaccctgttccgggggaggagacgccgtgaggacgaccgcatcagccggccgcatccaagcaccgccgagtctaaggcgcccaccccaaagttcgacctactcgctagcaactttcctccccttcctggaagttcatcccggatgccaggtgaattagtcctggagaataggatgtcagatgtggtaaagggtgtgtacaaagagaaggataatgaagaattgaccatcagttgcccagtgcctgctgacgaacaaactgaatgcacaagtgctcagcaattgaacatgtcgacctcttcaccttgtgctgccgagctaacggctttgagtaccacccagcaagagaaggacctgatagaggatagtagtgttcagaaagacggcctcaaccaaacgacgatccctgtctctccgccttccactaccaagccctctcgggcctcaaccgcctccccttgcaacaataacatcaacgcagctacagccgttgctctccaggagcctcgcaaattgtcatacgctgaggtatgtcagaaaccacctaaggaaccttcaagtgtgctcgtgcagccgttgagggagttgaggtcaaacgtcgtgtcgccaaccaaaaatgaggacaacggggctcccgaaaatagcgtcgaaaagccccacgagaagccagaggcccgcgctagtaaagactattccggttttcgtggtaacatcatcccccgaggggctgctggtaagatcagagagcagcgaaggcagttctcccatcgggcaattccgcaaggggtgacacgtaggaacggaaaggagcagtatgttcctcctaggagccctaaatag

SEQ ID NO: 66920 - DNA, 1962 bp, Artificial Sequence
  derived and/or modified sequence
atgttgctgtttgtggaacaggttgctagtaaaggaacaggcctgaacccgaatgccaaagtctggcaagagattgccccagggaatacggatgccactccagtcacacatggaaccgaaagctcctggcatgagatcgccgctacctccggcgcacatcctgaggggaatgccgaattgagtgaagacatatgtaaggagtatgaggtgatgtattcgtcatcatgtgaaaccaccaggaatacaactggcattgaagaatctaccgacggaatgatccttgggccagaggatctgtcctaccaaatctacgacgtgtccggtgaaagcaattccgccgtcagtaccgaggacttgaaagaatgcctgaagaaacagctcgagttctgtttttcacgggaaaatctctcaaaggacctgtatctgatcagccaaatggatagcgaccagttcatcccaatttggaccgttgcaaatatggaagagattaagaagttgaccaccgacccagacctaatccttgaagtgctgaggtccagtcctatggtccaggtcgacgagaaaggggaaaaggtaaggccatcccataaaagatgcattgtcatactgagagaaattcccgagactaccccaattgaagaagtcaagggcctgtttaaaagcgagaactgtccgaaggtgatttcctgtgaatttgcacacaattctaattggtatatcacatttcagagcgatacagacgctcagcaggcctttaagtatctgcgagaagaggttaagacctttcagggtaaacccatcatggcaaggattaaggccataaacacttttttcgctaaaaacggatacaggttgatggacagcagcatttactctcaccccatccagacccaagctcaatacgcgagccctgtatttatgcagcctgtctataatccacatcagcaatattccgtgtacagtattgtgccgcagagttggagtccaaaccctacaccctacttcgagacccccctggccccttttccaaatgggtcattcgtcaatggattcaactcccccggatcttacaagactaatgccgcagccatgaacatgggcagaccctttcagaaaaatagacgcaccctgttccggggaaggcgcagaagggaggatgatcggatttctcgtcctcatccgagcactgccgaaagcaaggcccctacccccaagtttgatctccttgccagcaacttcccgcctctgcccggttcaagtagcaggatgccaggggagctggttttagaaaaccggatgtcagacgtcgtgaaaggtgtgtataaagagaaggacaatgaggagctgactatctcatgtccagtgcctgccgatgagcaaacggagtgtacttctgcacagcagctgaatatgagtacgtcaagcccgtgcgcagcagagctgacggccctgtccactacacagcaggaaaaagatctgatcgaggatagttccgtgcagaaagatggtttgaaccagaccacaatccccgtgagccccccttcgaccacaaagccctcccgcgcttcaacggcctccccctgcaacaataacattaacgccgctactgcagttgccctacaggaaccacgaaagttatcgtacgccgaagtgtgtcagaaaccaccaaaagaaccttctagcgttcttgtacagcctcttcgagaactacgatctaatgtggtttctccaacaaaaaatgaggataacggggcacctgaaaacagcgtggagaagcctcacgagaagcccgaagctcgtgcttccaaggattatagcggattcagggggaacatcattcctcggggtgctgccggtaagattcgagagcagaggcggcagttctcccatcgggcaattccccagggggtaaccaggcggaacggaaaggagcagtacgttcctcccaggtctcctaagtag

SEQ ID NO: 66921 - protein, 450 aa, Artificial Sequence
  derived and/or modified sequence
MDPGNENSATEAAAIIDLDPDFEPQSRPRSCTWPLPRPEIANQPSEPPEVEPDLGEKAIESAPEKRLTLAQIYEWMVRTVPYFKDKGDSNSSAGWKNSIRHNLSLHSKFIKVHNEATGKSSWWMLNPEGGKSGKAPRRRAASMDSSSKLLRGRSKAPKKKPSVLPAPPEGATPTSPVGHFAKWSGSPCSRNREEADMWTTFRPRSSSNASSVSTRLSPLRPESEVLAEEIPASVSSYAGGVPPTLNEGLELLDGLNLTSSHSLLSRSGLSGFSLQHPGVTGPLHTYSSSLFSPAEGPLSAGEGCFSSSQALEALLTSDTPPPPADVLMTQVDPILSQAPTLLLLGGLPSSSKLATGVGLCPKPLEAPGPSSLVPTLSMIAPPPVMASAPIPKALGTPVLTPPTEAASQDRMPQDLDLDMYMENLECDMDNIISDLMDEGEGLDFNFEPDP

SEQ ID NO: 66922 - DNA, 1353 bp, Artificial Sequence
  derived and/or modified sequence
atggaccccggcaacgagaacagcgccaccgaggccgccgccatcatcgacctggaccccgacttcgagccccagagcagacccagaagctgcacctggcccctgcccagacccgagatcgccaaccagcccagcgagccccccgaggtggagcccgacctgggcgagaaggccatcgagagcgcccccgagaagagactgaccctggcccagatctacgagtggatggtgagaaccgtgccctacttcaaggacaagggcgacagcaacagcagcgccggctggaagaacagcatcagacacaacctgagcctgcacagcaagttcatcaaggtgcacaacgaggccaccggcaagagcagctggtggatgctgaaccccgagggcggcaagagcggcaaggcccccagaagaagagccgccagcatggacagcagcagcaagctgctgagaggcagaagcaaggcccccaagaagaagcccagcgtgctgcccgccccccccgagggcgccacccccaccagccccgtgggccacttcgccaagtggagcggcagcccctgcagcagaaacagagaggaggccgacatgtggaccaccttcagacccagaagcagcagcaacgccagcagcgtgagcaccagactgagccccctgagacccgagagcgaggtgctggccgaggagatccccgccagcgtgagcagctacgccggcggcgtgccccccaccctgaacgagggcctggagctgctggacggcctgaacctgaccagcagccacagcctgctgagcagaagcggcctgagcggcttcagcctgcagcaccccggcgtgaccggccccctgcacacctacagcagcagcctgttcagccccgccgagggccccctgagcgccggcgagggctgcttcagcagcagccaggccctggaggccctgctgaccagcgacaccccccccccccccgccgacgtgctgatgacccaggtggaccccatcctgagccaggcccccaccctgctgctgctgggcggcctgcccagcagcagcaagctggccaccggcgtgggcctgtgccccaagcccctggaggcccccggccccagcagcctggtgcccaccctgagcatgatcgcccccccccccgtgatggccagcgcccccatccccaaggccctgggcacccccgtgctgaccccccccaccgaggccgccagccaggacagaatgccccaggacctggacctggacatgtacatggagaacctggagtgcgacatggacaacatcatcagcgacctgatggacgagggcgagggcctggacttcaacttcgagcccgacccctag

SEQ ID NO: 66923 - DNA, 1353 bp, Artificial Sequence
  derived and/or modified sequence
atggatccggggaatgagaattcagccacagaggctgccgcgatcatagacctagatcccgacttcgaaccccagagccgtccccgctcctgcacctggccccttccccgaccagagatcgctaaccagccgtccgagccgcccgaggtggagccagatctgggggaaaaggccattgaaagcgccccggagaagcgactgacacttgcccagatctacgagtggatggtccgtactgtaccctacttcaaggacaagggtgacagcaacagctcagcaggatggaagaactcgatccgccacaacctgtccctgcacagcaagttcatcaaggttcacaacgaggccaccggcaaaagctcttggtggatgctgaaccctgagggaggcaagagcggcaaagccccccgccgccgggccgcctccatggatagcagcagcaagctgctccggggccgcagtaaagcccccaagaagaaaccatctgtgctgccagctccacccgaaggtgccactccaacgagccctgtcggccactttgccaagtggtcaggcagcccttgctctcgaaaccgtgaagaagccgatatgtggaccaccttccgtccacgaagcagttcaaatgccagcagtgtcagcacccggctgtcccccttgaggccagagtctgaggtgctggcggaggaaataccagcttcagtcagcagttatgcagggggtgtccctcccaccctcaatgaaggtctagagctgttagatgggctcaatctcacctcttcccattccctgctatctcggagtggtctctctggcttctctttgcagcatcctggggttaccggccccttacacacctacagcagctcccttttcagcccagcagaggggcccctgtcagcaggagaagggtgcttctccagctcccaggctctggaggccctgctcacctctgatacgccaccaccccctgctgacgtcctcatgacccaggtagatcccattctgtcccaggctccgactcttctgttgctgggggggcttccttcctccagtaagctggccacgggcgtcggcctgtgtcccaagcccctagaggctccaggccccagcagtctggttcccaccctttctatgatagcaccacctccagtcatggcaagtgcccccatccccaaggctctggggactcctgtgctcacaccccctactgaagctgcaagccaagacagaatgcctcaggatctagatcttgatatgtatatggagaacctggagtgtgacatggataacatcatcagtgacctcatggatgagggcgagggactggacttcaactttgagccagatccctga

SEQ ID NO: 66924 - DNA, 1353 bp, Artificial Sequence
  derived and/or modified sequence
atggaccccggaaatgagaattctgcaaccgaggctgccgctattattgatctagatccggatttcgagcctcagtcccggccacgaagttgcacgtggcccctgcccagacctgagattgcaaaccagcctagtgagccacctgaggtggagcctgacctgggtgaaaaagctattgagtcagccccagagaagcgactaacattggcccaaatctacgaatggatggttagaacagttccatatttcaaggacaagggagactccaattctagcgcaggatggaaaaacagcataagacataacctgagcctgcactccaagttcattaaggtccacaacgaggcaacgggcaaaagtagttggtggatgctcaatcctgagggcggtaagtctggaaaagcccccaggaggcgagcagcctctatggactcttctagcaagctgttaaggggacgctcgaaggcacccaaaaaaaagccctcagtacttccagctcccccagaaggtgccacccccacctcacccgtgggacatttcgccaaatggtctgggagcccctgcagcaggaatagagaggaagccgatatgtggacaacatttcggccccggtcctcctctaatgcttcctccgtgtctacccggttgtcccccctgcggccggagagcgaagtcttagccgaggagattccagcctccgtttctagctacgcaggaggggtcccccctaccctgaacgaggggctcgagctgctcgacggattaaacttgacatcaagtcactctctcttgagcagatctggcttatcaggattcagcctgcaacaccctggtgtcactggacccctacatacctacagctcgtccctgttttcccctgcggagggccccttgtcagccggtgaggggtgtttcagttcctctcaagcgctggaagctcttctgaccagcgacacacctccaccccctgccgatgtgttgatgacccaggtcgatcctatcttgtcacaggccccaacgcttttacttctgggcggtctgccatcctcgagtaaactggccacgggcgttggcttgtgcccgaagcccctcgaagccccaggcccatccagcctggtcccaacactttctatgatcgcaccaccgcccgtgatggcgtctgccccaattccgaaagctctcgggactcccgtgctgacaccacccaccgaggctgcgtcacaagaccggatgccccaggacttggatcttgatatgtacatggaaaatttggagtgtgacatggataacattatttccgaccttatggacgagggagaaggcctcgatttcaatttcgaacccgacccttag

SEQ ID NO: 66925 - DNA, 1353 bp, Artificial Sequence
  derived and/or modified sequence
atggaccctggaaatgaaaacagcgccacagaggccgccgccatcatcgacctggaccctgactttgagccccagagccggcccaggagctgcacctggcccctgcccaggcctgagatcgccaaccagcccagcgagcccccagaggtggagccagacctgggggagaaggccattgaaagtgcccctgagaagaggctgaccctggcccagatctatgagtggatggtgaggacagtgccctacttcaaggacaagggggacagcaacagcagcgctggctggaagaacagcatccgccacaacctgagcctgcacagcaagttcatcaaggtgcacaatgaggccaccgggaagagctcctggtggatgctgaaccctgagggcggcaagagcggcaaggccccccggcggcgggccgcctccatggacagcagcagcaagctgctgcggggccgcagcaaggcccccaagaagaagcccagcgtgctgcctgcccctcctgagggcgccacccccaccagccctgtgggccactttgccaagtggagcggcagcccctgcagcaggaaccgggaggaggccgacatgtggaccaccttccggcccaggagcagcagcaatgccagctctgtgtccacccggctgagccccctgcggcctgagagcgaggtgctggccgaggagatcccagcctctgtgagcagctatgctgggggcgtgccccccaccctgaatgaaggcctggagctgctggatggcctgaacctgaccagcagccacagcctgctgagccgcagcggcctgagcggcttcagcctgcagcaccctggggtgacaggccccctgcacacctacagcagcagcctcttctccccagctgagggccccctgtctgctggggagggctgcttcagcagcagccaggccctggaggccctgctgaccagtgacaccccacctcctccagcagatgtgctgatgacccaggtggaccccatcctgagccaggcccccaccctgctgctgctgggcggcctgcccagcagcagcaagctggccactggagtgggcctgtgccccaagcccctggaggcccctggccccagcagcctggtgcccaccctgtccatgattgcccctcctcctgtgatggccagcgcccccatccccaaggccctgggcacccctgtgctgaccccacccacagaagctgccagccaggacaggatgccccaggacctggacctggacatgtacatggagaacctggagtgtgacatggacaacatcatcagtgacctgatggatgaaggagagggcctggacttcaactttgagccagacccctag

SEQ ID NO: 66926 - DNA, 1353 bp, Artificial Sequence
  derived and/or modified sequence
atggaccccggcaacgagaacagcgccaccgaggccgccgccatcattgatctggaccctgactttgagcctcagtccagaccccgctcctgcacttggcccttgcctaggcccgagattgctaaccagccttccgagccccccgaagtggagcccgaccttggcgagaaagcaatcgagagcgcccctgagaagaggctaaccctagcacagatttacgagtggatggtgcgcaccgttccatacttcaaggacaagggagactcaaactcctccgcaggctggaaaaactccatccggcacaacctcagcctgcactcgaagtttatcaaggtccacaacgaagcgaccggtaaatcatcttggtggatgcttaatccagagggaggcaagtccggaaaagcacctagaagacgagcagcctccatggattccagttctaagctcctcagaggccgtagcaaggctcctaaaaagaagccatctgtgctgccagctccgcctgaaggggccacccctacctcacccgtcgggcatttcgctaaatggagtggaagcccgtgttcccgtaacagagaagaagctgacatgtggaccacgtttagaccccgtagcagctcgaatgcgagttctgtctccactcgactctcacctctgcgcccagagtctgaagtgctcgcagaggaaatccccgcctctgtgtccagttatgcaggaggcgtgccccccaccctcaacgaaggactggaactactcgatggactgaacctcacgtcttctcattccttactctcccgatccggattgagcggcttttcacttcagcacccaggagtgactgggcctctacacacctattcaagctccttattttctccggctgagggccctctgtctgctggtgagggctgttttagtagttctcaggctctggaggctctgctcactagcgacactccccccccgccagcggacgtgctgatgacccaggttgatccaattctgagccaggctccaaccctactactcctgggaggcctgccgtcctcctccaagctggccaccggggtgggactgtgccccaaaccacttgaagctccaggacccagcagtttagtccccactctctcaatgatagctcctcccccagttatggcgtctgcccccattccgaaagcccttgggacccccgtgctgaccccacctacggaagcagcgagtcaggatagaatgccacaagatctggacctggacatgtacatggagaaccttgagtgtgacatggataatattattagcgatctaatggatgagggcgaaggtttggactttaattttgaacctgatccctag

SEQ ID NO: 66927 - DNA, 1353 bp, Artificial Sequence
  derived and/or modified sequence
atggacccgggaaatgaaaactccgccaccgaagccgcagccatcatcgacttggacccggattttgaaccacagtcccggcctagatcctgtacatggcctcttcctaggcctgagatcgctaaccaacctagcgaaccgcctgaagtcgagcccgacctcggcgagaaagccatcgaaagtgcccctgaaaagaggctcactcttgcccagatatatgagtggatggtgcgcaccgtgccgtatttcaaagataagggagacagcaacagtagcgccggatggaaaaattctattaggcataacctttccctgcatagcaagttcatcaaagttcataatgaggccactggaaagtcgtcatggtggatgctgaacccggagggcggtaaatctggtaaggctcctcgcagaagagctgccagcatggactccagttcaaaacttctgcgcggacgttcgaaggctcccaagaaaaagccttcagtactccccgcacctccagagggcgctacccctacaagcccagtggggcattttgcaaagtggagcggatcaccatgcagtagaaatcgggaggaggctgatatgtggaccacattcagaccaagatcttctagtaacgccagcagtgtgagtaccagactctcccctcttaggcccgaatcagaggtcctcgcggaagaaatccccgctagtgtgagttcatacgccggtggggttcctcctactctcaatgagggactggagctgttagacggacttaacctgactagcagccatagtctcctcagccgctctgggctgtctggattttctcttcaacatcctggggtgacaggccctctgcacacatattcttcctctctctttagtccggcagaggggcctctcagtgccggagaggggtgtttcagcagcagccaggcactagaggccctgttgacaagtgatacccctccacccccagcagatgttctgatgacccaggttgatcctatcctttctcaggcgccaactctgttgctgctggggggtctgccatctagctccaagctggctactggtgttgggctctgtccaaaaccccttgaagctccgggtccgagttctcttgtccctacgctcagcatgatcgccccacccccagtgatggcatccgccccaattcctaaagccctcgggacacctgtcttaactccccctactgaggcagcaagccaggacagaatgcctcaggatcttgatctggacatgtatatggagaatctcgagtgcgacatggacaacatcattagcgacctgatggacgagggagagggcttggattttaacttcgagcccgacccctag

SEQ ID NO: 66928 - DNA, 2040 bp, Artificial Sequence
  derived and/or modified sequence
gcaggaggcggggctgctcagtcctccaggcgtcggtactcagcggtgttggaacttcgttgcttgcttgcctgtgcgcgcgtgcgcggacatggcctcaaacgattatacccaacaagcaacccaaagctatggggcctaccccacccagcccgggcagggctattcccagcagagcagtcagccctacggacagcagagttacagtggttatagccagtccacggacacttcaggctatggccagagcagctattcttcttatggccagagccagaacacaggctatggaactcagtcaactccccagggatatggctcgactggcggctatggcagtagccagagctcccaatcgtcttacgggcagcagtcctcctaccctggctatggccagcagccagctcccagcagcacctcgggaagttacggtagcagttctcagagcagcagctatgggcagccccagagtgggagctacagccagcagcctagctatggtggacagcagcaaagctatggacagcagcaaagctataatccccctcagggctatggacagcagaaccagtacaacagcagcagtggtggtggaggtggaggtggaggtggaggtaactatggccaagatcaatcctccatgagtagtggtggtggcagtggtggcggttatggcaatcaagaccagagtggtggaggtggcagcggtggctatggacagcaggaccgtggaggccgcggcaggggtggcagtggtggcggcggcggcggcggcggtggtggttacaaccgcagcagtggtggctatgaacccagaggtcgtggaggtggccgtggaggcagaggtggcatgggcggaagtgaccgtggtggcttcaataaatttggtggccctcgggaccaaggatcacgtcatgactccgaacaggataattcagacaacaacaccatctttgtgcaaggcctgggtgagaatgttacaattgagtctgtggctgattacttcaagcagattggtattattaagacaaacaagaaaacgggacagcccatgattaatttgtacacagacagggaaactggcaagctgaagggagaggcaacggtctcttttgatgacccaccttcagctaaagcagctattgactggtttgatggtaaagaattctccggaaatcctatcaaggtctcatttgctactcgccgggcagactttaatcggggtggtggcaatggtcgtggaggccgagggcgaggaggacccatgggccgtggaggctatggaggtggtggcagtggtggtggtggccgaggaggatttcccagtggaggtggtggcggtggaggacagcagcgagctggtgactggaagtgtcctaatcccacctgtgagaatatgaacttctcttggaggaatgaatgcaaccagtgtaaggcccctaaaccagatggcccaggagggggaccaggtggctctcacatggggggtaactacggggatgatcgtcgtggtggcagaggaggctatgatcgaggcggctaccggggccgcggcggggaccgtggaggcttccgagggggccggggtggtggggacagaggtggctttggccctggcaagatggattccaggggtgagcacagacaggatcgcagggagaggccgtattaattagcctggctccccaggttctggaacagctttttgtcctgtacccagtgttaccctcgttattttgtaaccttccaattcctgatcacccaagggtttttttgtgtcggactatgtaattgtaactatacctctggttcccattaaaagtgaccattttagttaaattttgttcctcttcccccttttcactttcctggaagatcgatgtcccgatcaggaaggtagagagttttcctgttcagattaccctgcccagcaggaactggaatacagtgttcggggagaaggccaaatgatatccttgagagcagagattaaacttttctgtcatggggaaagttggtgtataaatgagaaatgaagaa

SEQ ID NO: 66929 - DNA, 1528 bp, Artificial Sequence
  derived and/or modified sequence
tcagtcctccaggcgtcggtactcagcggtgttggaacttcgttgcttgcttgcctgtgcgcgcgtgcgcggacatggcctcaaacgattatacccaacaagcaacccaaagctatggggcctaccccacccagcccgggcagggctattcccagcagagcagtcagccctacggacagcagagttacagtggttatagccagtccacggacacttcaggctatggccagagcagctattcttcttatggccagagccagaacacaggctatggaactcagtcaactccccagggatatggctcgactggcggctatggcagtagccagagctcccaatcgtcttacgggcagcagtcctcctaccctggctatggccagcagccagctcccagcagcacctcgggaagttacggtagcagttctcagagcagcagctatgggcagccccagagtgggagctacagccagcagcctagctatggtggacagcagcaaagctatggacagcagcaaagctataatccccctcagggctatggacagcagaaccagtacaacagcagcagtggtggctatgaacccagaggtcgtggaggtggccgtggaggcagaggtggcatgggcggaagtgaccgtggtggcttcaataaatttggtggccctcgggaccaaggatcacgtcatgactccgaacaggataattcagacaacaacaccatctttgtgcaaggcctgggtgagaatgttacaattgagtctgtggctgattacttcaagcagattggtattattaagacaaacaagaaaacgggacagcccatgattaatttgtacacagacagggaaactggcaagctgaagggagaggcaacggtctcttttgatgacccaccttcagctaaagcagctattgactggtttgatggtaaagaattctccggaaatcctatcaaggtctcatttgctactcgccgggcagactttaatcggggtggtggcaatggtcgtggaggccgagggcgaggaggacccatgggccgtggaggctatggaggtggtggcagtggtggtggtggccgaggaggatttcccagtggaggtggtggcggtggaggacagcagcgagctggtgactggaagtgtcctaatcccacctgtgagaatatgaacttctcttggaggaatgaatgcaaccagtgtaaggcccctaaaccagatggcccaggagggggaccaggtggctctcacatggggggtaactacggggatgatcgtcgtggtggggacagaggtggctttggccctggcaagatggattccaggggtgagcacagacaggatcgcagggagaggccgtattaattagcctggctccccaggttctggaacagctttttgtcctgtacccagtgttaccctcgttattttgtaaccttccaattcctgatcacccaagggtttttttgtgtcggactatgtaattgtaactatacctctggttcccattaaaagtgaccattttagtt

SEQ ID NO: 66930 - DNA, 1581 bp, Artificial Sequence
  derived and/or modified sequence
atggcctcaaacgactacacacagcaggctacccaaagctacggggcataccccacccagcctggtcaaggatattcccaacagtcatctcagccctacggacagcagagctattcaggatacagccagtctaccgacacctccggatacggccagagttcttattcctcatacggacagtcacaaaacaccgggtacggtacccagtccacaccccagggttacggatctacaggggggtacggctcgtcccagtcgagccagagcagttacgggcagcagagttcctatccaggttatggacagcagccagcccccagttccacatcaggctcatacggatcttcatctcagagctcttcctacggtcaacctcagtcaggctcttactcccagcagccgtcctacggaggccagcagcagagctatgggcagcagcagtcatataaccctccccagggttacggacagcaaaatcagtataactcttctagcggtggagggggggggggaggcggtggaggcaattatggacaagatcagtcctcgatgagcagtggaggaggtagcggtggtgggtacggcaaccaggaccaatcagggggcggaggtagtggtgggtacggacaacaggataggggtggaagaggccgcggcgggtcggggggcggcggggggggcggagggggcggctataataggagcagcggcgggtacgaaccacggggacgcgggggtggacgaggaggccgcggtggaatgggaggaagtgacagaggaggcttcaataaatttggtggacctcgcgatcaaggaagccgacatgactcagaacaggataattctgataacaacactatcttcgtgcaggggctgggagagaacgtgactattgaatccgtggccgactacttcaagcagataggcataattaaaacaaataagaaaacaggtcagccgatgatcaatctgtataccgaccgagagaccggcaaactaaagggagaggccactgtctcttttgacgacccaccgtcagccaaagccgctattgattggttcgacggcaaagagttttcaggcaaccctatcaaagtcagttttgccacgcgacgggctgattttaatcgcggggggggcaatgggaggggaggtagaggccgcggagggccaatgggtcgaggcggatatggcggggggggtagtggtggcggtggccggggcggttttccttccggaggaggaggggggggcggccagcagagggccggtgattggaagtgcccgaatccaacctgcgagaacatgaatttctcctggcgcaatgaatgcaaccaatgcaaggctccaaaacccgatggccctggtggtggacccggtgggtcacatatgggcggcaattatggagacgatcgtagaggaggtagaggcggatatgatcgagggggttacagaggccgagggggagatcggggtggttttcgtggtggacgaggaggcggagacagaggggggttcggaccgggaaagatggactcccgcggcgaacacagacaggacaggcgggagcgcccttattag

SEQ ID NO: 66931 - DNA, 1290 bp, Artificial Sequence
  derived and/or modified sequence
atggcatcgaacgactatacccagcaagcaacacaatcctatggagcttatccaacccaacctggtcagggatattctcaacagtcaagtcagccttacggacagcaatcgtattccggatatagccagagcactgatacgagtgggtacggccaaagttcctactccagttacggccaaagtcagaatacagggtacggaacccaatcgacccctcagggctacggctcaacaggaggatacggatcatcccaatcgtcccagagctcgtacggccagcagagcagttatccaggatatggtcagcaaccagccccaagctctacctctggctcctacggatcttccagccagtcctcatcctacggacagccacagagcggctcttattctcaacagccctcctatggtgggcaacagcagagctatggacagcagcagtcctacaaccctcctcagggctacggacagcagaatcaatacaatagcagctcgggcggatacgaaccaagaggccgggggggaggccggggaggtcggggtggaatgggcgggtcagaccggggcggttttaacaaatttggcggtccaagagatcagggcagtcgtcatgacagcgaacaagacaactctgataacaacaccatcttcgtgcaaggtctgggcgagaatgtcaccattgagagcgttgccgactatttcaagcagatcgggattattaaaaccaataaaaagacaggacagcctatgatcaatctgtataccgacagggagaccggcaaactcaagggtgaggccacggtctcctttgatgaccccccaagtgcaaaggctgccattgactggtttgatggcaaagaattctctggaaatcctataaaagtgagcttcgcaacccgccgtgccgatttcaacagaggcgggggcaacggacgcgggggaaggggaagaggagggcccatggggaggggcgggtacgggggaggtggctccgggggaggagggcggggcgggtttccttcaggaggcgggggggggggtggtcagcaacgggcaggagattggaagtgtccaaatcccacctgtgaaaacatgaatttttcttggcgtaatgagtgtaatcaatgtaaggcccctaaaccagacggtcctggcggaggcccaggtggaagccacatgggaggcaattacggagacgaccgaagaggcggcgatcggggtgggttcgggcctggcaagatggatagcagaggtgaacaccgccaggacaggagagagcgcccctattag

SEQ ID NO: 66932 - DNA, 1581 bp, Artificial Sequence
  derived and/or modified sequence
atggccagcaatgactacacccagcaggccacccagagctatggagcctaccccacccagcccggccagggctacagccagcagagcagccagccctacggccagcagagctacagcggctacagccagagcacagacaccagcggctacggccagagcagctacagcagctatggccagagccagaacacaggctacggcacccagagcaccccccagggctacggcagcactggaggctacggcagcagccagagcagccagagcagctatggccagcagagcagctacccaggctacggccagcagcctgcccccagcagcaccagcggcagctatggcagcagcagccagagcagcagctatggccagccccagagcggcagctacagccagcagcccagctatggaggccagcagcagagctatggccagcagcagagctacaaccccccccagggctacggccagcagaaccagtacaacagcagcagcggcggcggcggcggcggcggcggcggcggcaactacggccaggaccagagctccatgagcagcggcggcggcagcggcggcggctacggcaaccaggaccagagcggcggcggcggcagcggcggctacggccagcaggaccggggcggccggggccggggcggcagcggcggcggcggcggcggcggcggcggcggctacaacagaagcagcggcggctatgagccccggggccggggcggcggccggggcggccggggcggcatgggcggcagtgaccggggcggcttcaacaagtttggaggcccccgggaccagggcagcagacatgattctgagcaggacaacagcgacaacaacaccatctttgtgcagggcctgggggagaatgtgaccatcgagagcgtggccgactacttcaagcagatcggcatcatcaagaccaacaagaagacaggccagcccatgatcaacctgtacacagaccgggagaccgggaagctgaagggggaggccaccgtgtcctttgatgacccccccagcgccaaggccgccatcgactggtttgatggcaaggagttcagcggcaaccccatcaaggtgtcctttgccaccaggagagctgacttcaacagaggaggcggcaatggccggggcggccggggccggggcggccccatgggccggggcggctatggaggcggcggcagcggcggcggcggccggggcggcttccccagcggcggcggcggcggcggcggccagcagagagctggggactggaagtgccccaaccccacctgtgagaacatgaacttctcctggagaaatgaatgcaaccagtgcaaggcccccaagccagatggccctgggggcggccctgggggcagccacatgggcggcaactatggagatgaccggcggggcggccggggcggctatgaccggggcggctaccggggccggggcggggaccggggcggcttccggggcggccggggcggcggggaccggggcggcttcggccctgggaagatggacagcagaggagagcaccggcaggacagaagagagcggccctactag

SEQ ID NO: 66933 - DNA, 1290 bp, Artificial Sequence
  derived and/or modified sequence
atggccagcaatgactacacccagcaggccacccagagctatggagcctaccccacccagcccggccagggctacagccagcagagcagccagccctacggccagcagagctacagcggctacagccagagcacagacaccagcggctacggccagagcagctacagcagctatggccagagccagaacacaggctacggcacccagagcaccccccagggctacggcagcactggaggctacggcagcagccagagcagccagagcagctatggccagcagagcagctacccaggctacggccagcagcctgcccccagcagcaccagcggcagctatggcagcagcagccagagcagcagctatggccagccccagagcggcagctacagccagcagcccagctatggaggccagcagcagagctatggccagcagcagagctacaaccccccccagggctacggccagcagaaccagtacaacagcagcagcggcggctatgagccccggggccggggcggcggccggggcggccggggcggcatgggcggcagtgacagaggaggcttcaacaagtttggaggcccccgggaccagggcagcagacatgacagcgagcaggacaacagcgacaacaacaccatctttgtgcagggcctgggagaaaatgtgaccattgaatctgtggccgactacttcaagcagatcggcatcatcaagaccaacaagaagacaggccagcccatgatcaacctgtacacagaccgggagaccgggaagctgaagggggaggccaccgtgtcctttgatgatcctccttctgccaaggccgccatcgactggtttgatggcaaggagttcagcggcaaccccatcaaggtgtcctttgccacccggcgggctgacttcaacagaggaggcggcaatggccggggcggccggggccggggcggccccatgggccggggcggctacggcggcggcggcagcggcggcggcggccggggcggcttccccagcggcggcggcggcggcggcggccagcagagagctggggactggaagtgccccaaccccacctgtgagaacatgaacttctcctggagaaatgaatgcaaccagtgcaaggcccccaagccagatggccctgggggcggccctgggggcagccacatgggcggcaactatggagatgacagaagaggaggagacagaggaggctttggacctgggaagatggacagcagaggagagcaccggcaggaccggcgggagcggccctactag

SEQ ID NO: 66934 - DNA, 1581 bp, Artificial Sequence
  derived and/or modified sequence
atggccagcaacgactacacccagcaggccacccagagctacggcgcctaccctacccagcccggccaggggtattctcaacagtcttctcagccctacggacagcagtcttactccggctactcacagagcactgacacgagcggctatggccagtcttcctacagttcctacggccaatctcagaacaccggctatggcacccagtctacacctcagggttacggatcaacaggaggatatggctcctcccagagttcccagagtagctatggtcaacagtcatcttacccaggctacgggcagcagcccgccccttcctctacgtccggttcctatggatcttcttcccagagttcatcatacgggcaaccccagagcggctcctattcccagcagccaagctacggcggacaacagcaaagttacggccagcagcagagctataacccaccacagggatacgggcagcaaaaccagtataattcatcatccggaggcgggggagggggcggcggaggagggaactacggacaggaccagtcaagcatgtcttctggaggcggctcggggggggggtatggcaatcaagatcagagcggcggcgggggtagcggaggttatggacagcaggaccggggaggtagaggcagagggggatcggggggcgggggcggcggtggggggggaggttacaatcgttcctctggaggctatgaaccgaggggcagaggtggtggcagggggggccgaggaggaatgggtggatcagatagaggcggattcaacaaattcggggggcctagggaccaaggatcccgacacgacagcgagcaggacaatagtgacaataacactatttttgtccagggcctgggtgagaatgttactattgagagcgttgcagattattttaaacaaatcggcatcatcaagacaaataagaagacaggacagccgatgattaatctctatacagaccgcgagacaggcaagctcaaaggcgaggcgacagtgtccttcgatgacccaccctcagctaaggccgcgattgattggtttgacggtaaggagtttagcggaaatccgatcaaagtctctttcgccactaggagagctgactttaacaggggtgggggcaacggcagaggcggccgaggcaggggaggccctatgggtcgggggggctacggcggcggcggtagcggcggcggaggacgcggcggcttcccaagcgggggcggtggtggcggaggtcagcagagggcaggggattggaaatgccctaatccaacctgcgaaaacatgaatttctcatggcgtaacgagtgcaaccaatgtaaagctccgaagcccgacggccctggagggggcccaggtgggtcccatatgggcggcaactatggcgacgatcgccgaggaggtcgggggggctatgatagaggtgggtacaggggccgcgggggcgataggggcgggttcaggggtggtcgcggtgggggcgacagaggcggttttggacccggaaaaatggattcacgcggtgagcaccgtcaagaccggagggagcgcccttactag

SEQ ID NO: 66935 - DNA, 1290 bp, Artificial Sequence
  derived and/or modified sequence
atggccagcaacgactacacccagcaggccacccagagctacggcgcttaccctacccagcctgggcaagggtacagccagcagtccagccaaccatacggccagcaatcctattcaggttatagccagtccacagacacatccgggtacggccagagctcctactccagctatggccagagtcagaatacgggatatggcacccagagcaccccccagggatatggctctaccggcggctacggcagctctcagagtagtcagtcctcctacgggcaacagtccagttatccggggtacgggcagcagccagctccatccagcactagcggatcatacggctcaagctcacagtccagcagttatggacagccccagtcaggaagctacagccagcagccctcctacggcggccagcagcagtcgtatggacagcagcaatcctacaaccccccccagggctacgggcagcagaatcagtataactcttcaagcggaggatatgaacccaggggacggggaggagggagaggcggacgcggtggtatggggggctcagaccgcggggggtttaataagttcggtgggcccagagaccaaggcagccgccacgacagcgagcaggacaatagcgacaataacacaatattcgtgcagggcctcggcgagaatgtcacgatcgagtcagtcgctgattattttaagcagattgggatcatcaagaccaacaaaaaaacaggacagcccatgattaacctgtacaccgacagagaaacaggcaagctcaaaggggaagccactgtgagctttgatgatccaccgtccgctaaggcagcaatcgactggttcgacgggaaggaattctccgggaatccaatcaaggtgtctttcgctaccaggcgggctgacttcaatcgcggaggtggtaacggacgtggcgggcgtggccggggaggcccaatgggaagggggggatacggagggggaggttctggcggaggcgggcgcggtggcttccccagcggaggtggcggaggcgggggccagcaaagggctggagactggaagtgccccaatcccacctgtgagaacatgaacttctcatggcgcaacgagtgtaatcagtgcaaggctcctaagccagatgggccggggggaggacccggcggctcgcatatgggcgggaactatggcgatgacaggagaggcggcgacaggggcgggttcggacctggtaagatggattcaagaggggaacataggcaagacaggcgcgagcggccatactag

SEQ ID NO: 66936 - DNA, 1581 bp, Artificial Sequence
  derived and/or modified sequence
atggcttccaacgattacacgcaacaggccacacagtcatatggcgcatatcccacccagcccggtcaaggatacagccagcaatccagtcagccttacgggcagcagagttattctggctactcccagtctactgacacctccggctacggacagagttcctacagctcttacgggcagtctcagaataccgggtacggtacgcagtctacgccacagggctacggatctacggggggatacggctctagtcagtcaagccagtcttcctacggacaacagagctcataccctggctatggacagcagcccgctcctagtagcacttccggcagttatgggtccagcagccagtctagcagttatggacagccacagagtgggtcctactcacagcagccttcatacggtgggcagcagcagtcttatggtcagcagcagtcttacaaccctccccaggggtatggtcagcagaaccagtacaattcaagtagcgggggaggaggaggcggtgggggaggcggaaattacggccaggatcagtcttcgatgagctccggcggtggatccggaggaggttacggtaaccaggatcaaagcggaggcggtggatcaggtggatacggacaacaggatcggggtggacgcggacgagggggatcgggtgggggtggtggtggcggaggcggaggatacaacagatcctcaggtggctacgaacctagagggaggggtggagggagggggggacgcggtggaatgggtgggagtgaccggggtgggttcaacaagttcggcggtcccagggaccaggggtcaaggcacgactcagaacaggacaatagcgacaataatacgatctttgtgcagggcctaggtgaaaacgtgactatcgaatctgtggccgattattttaaacagattggtatcattaaaaccaacaagaagaccggacagccaatgattaacttatacacagaccgagagaccgggaaactgaagggggaagcaacagtgtcattcgacgatccaccttcagccaaagccgctattgattggtttgatggcaaggagttttcgggcaatcccatcaaggtgagcttcgcaaccaggcgggctgattttaaccgtggcggtggtaacggaagagggggacgcggacggggtggccctatgggcaggggtggatatgggggtggcggatctgggggtgggggaagaggtgggtttccgtctggcggaggaggtggtggcggacagcagcgtgccggtgattggaagtgcccaaatccgacatgcgaaaatatgaacttcagctggcgcaacgaatgtaaccagtgcaaggctccaaagcccgatgggcctgggggaggacccggaggcagtcacatgggcggaaactatggcgacgaccggagaggagggcgaggtggctatgacagaggaggttatcgcggacggggtggcgacagaggcggattcagagggggacgcggtggcggagataggggcggtttcggtccaggcaagatggactctcggggagaacacagacaggatagacgggaaaggccatattag

SEQ ID NO: 66937 - DNA, 1290 bp, Artificial Sequence
  derived and/or modified sequence
atggctagtaatgactacactcaacaagctacccagtcctatggagcatatcctactcaaccgggacagggttatagccagcaaagtagtcaaccatacgggcagcagtcttatagtggctactcccagtctacggatacctccggctatggccagtcttcatactcctcttacggccagtctcaaaacacaggatacggtacccaatcgactccacagggttatgggagtacaggcggttatggttcgagtcaaagcagtcagtcatcctacggacagcagtccagctaccctggctacggacaacagccggcaccctcatctacatccgggtcctacggctccagtagccagtcttcctcttatggacaaccacagtccggtagctatagccagcaaccgagttacggaggacaacagcagtcctatggtcagcaacagtcttacaacccacctcaaggatacggtcaacagaaccagtacaacagttctagtggtggatacgagcccagagggaggggcggaggaaggggtggacggggtggaatgggcggatccgatcgcggtggattcaataaattcggcggacctagagaccaaggcagtagacacgactccgaacaggataacagcgacaacaacaccatttttgtgcagggactgggcgagaacgtgacgatagagtctgtcgctgactatttcaagcaaattggaataatcaagacaaacaaaaaaaccggacagccgatgataaacttatatactgatagggaaactggaaagctcaaaggcgaggcgaccgtgtcctttgacgatccccctagcgctaaggctgcaatagactggttcgatggtaaggaattcagcgggaatcccataaaagtgagttttgcaaccaggcgggctgattttaatcggggaggaggaaacgggcgaggcggacgcggaagaggaggccctatggggcgaggcggttatggcggtggaggatcaggagggggaggacgtggagggtttccctccggaggcggaggcggaggcggacagcagagggcgggagattggaagtgccccaatcccacatgcgaaaacatgaatttctcttggcggaacgaatgtaaccagtgtaaggcacccaaacctgacgggccagggggaggtcctggaggctcgcacatgggcggaaactacggagatgacagacggggaggagacagaggcggattcggacccggaaagatggatagccgaggtgagcatcgccaggatcgcagggagcgcccttactag

SEQ ID NO: 66938 - DNA, 1581 bp, Artificial Sequence
  derived and/or modified sequence
atggccagcaacgactacacccagcaggccacccagagctacggcgcctaccccacccagcccggccagggctacagccagcagagcagccagccctacggccagcagagctacagcggctacagccagagcaccgacaccagcggctacggccagagcagctacagcagctacggccagagccagaacaccggctacggcacccagagcaccccccagggctacggcagcaccggcggctacggcagcagccagagcagccagagcagctacggccagcagagcagctaccccggctacggccagcagcccgcccccagcagcaccagcggcagctacggcagcagcagccagagcagcagctacggccagccccagagcggcagctacagccagcagcccagctacggcggccagcagcagagctacggccagcagcagagctacaaccccccccagggctacggccagcagaaccagtacaacagcagcagcggcggcggcggcggcggcggcggcggcggcaactacggccaggaccagagcagcatgagcagcggcggcggcagcggcggcggctacggcaaccaggaccagagcggcggcggcggcagcggcggctacggccagcaggacagaggcggcagaggcagaggcggcagcggcggcggcggcggcggcggcggcggcggctacaacagaagcagcggcggctacgagcccagaggcagaggcggcggcagaggcggcagaggcggcatgggcggcagcgacagaggcggcttcaacaagttcggcggccccagagaccagggcagcagacacgacagcgagcaggacaacagcgacaacaacaccatcttcgtgcagggcctgggcgagaacgtgaccatcgagagcgtggccgactacttcaagcagatcggcatcatcaagaccaacaagaagaccggccagcccatgatcaacctgtacaccgacagagagaccggcaagctgaagggcgaggccaccgtgagcttcgacgacccccccagcgccaaggccgccatcgactggttcgacggcaaggagttcagcggcaaccccatcaaggtgagcttcgccaccagaagagccgacttcaacagaggcggcggcaacggcagaggcggcagaggcagaggcggccccatgggcagaggcggctacggcggcggcggcagcggcggcggcggcagaggcggcttccccagcggcggcggcggcggcggcggccagcagagagccggcgactggaagtgccccaaccccacctgcgagaacatgaacttcagctggagaaacgagtgcaaccagtgcaaggcccccaagcccgacggccccggcggcggccccggcggcagccacatgggcggcaactacggcgacgacagaagaggcggcagaggcggctacgacagaggcggctacagaggcagaggcggcgacagaggcggcttcagaggcggcagaggcggcggcgacagaggcggcttcggccccggcaagatggacagcagaggcgagcacagacaggacagaagagagagaccctactag

SEQ ID NO: 66939 - DNA, 1290 bp, Artificial Sequence
  derived and/or modified sequence
atggccagcaacgactacacccagcaggccacccagagctacggcgcctaccccacccagcccggccagggctacagccagcagagcagccagccctacggccagcagagctacagcggctacagccagagcaccgacaccagcggctacggccagagcagctacagcagctacggccagagccagaacaccggctacggcacccagagcaccccccagggctacggcagcaccggcggctacggcagcagccagagcagccagagcagctacggccagcagagcagctaccccggctacggccagcagcccgcccccagcagcaccagcggcagctacggcagcagcagccagagcagcagctacggccagccccagagcggcagctacagccagcagcccagctacggcggccagcagcagagctacggccagcagcagagctacaaccccccccagggctacggccagcagaaccagtacaacagcagcagcggcggctacgagcccagaggcagaggcggcggcagaggcggcagaggcggcatgggcggcagcgacagaggcggcttcaacaagttcggcggccccagagaccagggcagcagacacgacagcgagcaggacaacagcgacaacaacaccatcttcgtgcagggcctgggcgagaacgtgaccatcgagagcgtggccgactacttcaagcagatcggcatcatcaagaccaacaagaagaccggccagcccatgatcaacctgtacaccgacagagagaccggcaagctgaagggcgaggccaccgtgagcttcgacgacccccccagcgccaaggccgccatcgactggttcgacggcaaggagttcagcggcaaccccatcaaggtgagcttcgccaccagaagagccgacttcaacagaggcggcggcaacggcagaggcggcagaggcagaggcggccccatgggcagaggcggctacggcggcggcggcagcggcggcggcggcagaggcggcttccccagcggcggcggcggcggcggcggccagcagagagccggcgactggaagtgccccaaccccacctgcgagaacatgaacttcagctggagaaacgagtgcaaccagtgcaaggcccccaagcccgacggccccggcggcggccccggcggcagccacatgggcggcaactacggcgacgacagaagaggcggcgacagaggcggcttcggccccggcaagatggacagcagaggcgagcacagacaggacagaagagagagaccctactag

SEQ ID NO: 66940 - protein, 504 aa, Artificial Sequence
  derived and/or modified sequence
MEAAAQFFVESPDVVYGPEAIEAQYEYRTTRVSREGGVLKEANYYGSLTQAGTVSLGLDAEGQEVFVPFSAVLPMVAPNDLVFDGWDISSLNLAEAMRRAKVLDWGLQEQLWPHMEALRPRPSVYIPEFIAANQSARADNLIPGSRAQQLEQIRRDIRDFRSSAGLDKVIVLWTANTERFCEVIPGLNDTAENLLRTIELGLEVSPSTLFAVASILEGCAFLNGSPQNTLVPGALELAWQHRVFVGGDDFKSGQTKVKSVLVDFLIGSGLKTMSIVSYNHLGNNDGENLSAPLQFRSKEVSKSNVVDDMVQSNPVLYTPGEEPDHCVVIKYVPYVGDSKRALDEYTSELMLGGTNTLVLHNTCEDSLLAAPIMLDLALLTELCQRVSFCTDMDPEPQTFHPVLSLLSFLFKAPLVPPGSPVVNALFRQRSCIENILRACVGLPPQNHMLLEHKMERPGPSLKRVGPVAATYPMLNKKGPVPAATNGCTGDANGHLQEEPPMPTT

SEQ ID NO: 66941 - protein, 408 aa, Artificial Sequence
  derived and/or modified sequence
MRRAKVLDWGLQEQLWPHMEALRPRPSVYIPEFIAANQSARADNLIPGSRAQQLEQIRRDIRDFRSSAGLDKVIVLWTANTERFCEVIPGLNDTAENLLRTIELGLEVSPSTLFAVASILEGCAFLNGSPQNTLVPGALELAWQHRVFVGGDDFKSGQTKVKSVLVDFLIGSGLKTMSIVSYNHLGNNDGENLSAPLQFRSKEVSKSNVVDDMVQSNPVLYTPGEEPDHCVVIKYVPYVGDSKRALDEYTSELMLGGTNTLVLHNTCEDSLLAAPIMLDLALLTELCQRVSFCTDMDPEPQTFHPVLSLLSFLFKAPLVPPGSPVVNALFRQRSCIENILRACVGLPPQNHMLLEHKMERPGPSLKRVGPVAATYPMLNKKGPVPAATNGCTGDANGHLQEEPPMPTT

SEQ ID NO: 66942 - DNA, 1515 bp, Artificial Sequence
  derived and/or modified sequence
atggaggcagccgcccagtttttcgtggagtctcccgatgttgtgtatgggccggaggcaatcgaagcccaatatgaataccgaaccactagggtgtctagggaaggtggcgtgctgaaggaagctaattactacggttccctgactcaggcgggcaccgtctctctcggcctggacgccgagggacaagaggtcttcgttcctttctccgccgtgctacccatggttgcccccaatgacctggtattcgacgggtgggacatcagctctctgaatttggccgaggccatgcgccgcgcaaaagtactcgattgggggctgcaggaacagctctggccccatatggaggcactgaggccgagaccttccgtatacatccccgaattcattgctgccaatcagtctgcccgggcagacaatctaatacccgggtctagagctcaacaactggaacagatccgccgagacattagagacttccgtagttccgcaggactagacaaagtaattgtgctctggaccgcaaacacagagagattttgcgaggtcattccgggtctgaacgataccgcggagaacttgcttagaaccatagaacttggcctggaggtgtctccgtctaccttgtttgccgttgccagtattctggagggctgtgcatttctcaacgggagtccacagaacaccctggtgcccggggccttagagctggcttggcaacatcgggtattcgtggggggcgatgactttaaatccggtcagaccaaggtgaaaagcgtcctcgtggattttctcatcgggtctggtctgaagacaatgagtattgtgtcgtataatcaccttggtaacaatgatggcgaaaatttgtccgcccccctccagtttagaagcaaggaagtctcaaagtcaaacgtagtcgacgacatggtgcagtcaaatcctgtgctctatacgccaggtgaggaaccagaccactgtgttgtcatcaaatacgtcccctatgtcggggactctaagagagcattggatgagtatacatctgagcttatgcttggagggacaaacaccttggtgctgcataatacctgcgaagacagcctgctggccgctcctatcatgttggacctcgctttgctcactgagctgtgtcaacgagtctcattctgtaccgacatggacccagagcctcagacctttcatcccgtactcagtcttctgtcttttctattcaaggcacctttagttccccccgggtcaccggtggtcaacgcactttttcgacagaggagctgcatagagaacatcttgcgggcctgtgtaggactgccacctcaaaatcacatgctgctcgaacacaagatggaaagacctggcccctctctgaaacgggttggtcccgttgctgcaacctatcccatgctcaataagaaaggccccgtgcctgcagcaacaaacggatgcacaggtgatgctaacggccaccttcaagaggagccacccatgcccaccacttag

SEQ ID NO: 66943 - DNA, 2258 bp, Artificial Sequence
  derived and/or modified sequence
acttccgccaggcggggacccgatggccacggtggctctgggttgtcgggcctcgaaccgggtctccagacgttgggcccctccctcccagcgcgggagaggcggggaagggggcggggcgggggaggggccgcagcgcttttctccggaggtcgcgcgcccgagagcccgcgctgtccgccgccgctgcctgagtcgactctgcgccgcccgccgcgatggaggccgccgcccagttcttcgtcgagagcccggacgtggtctacggccccgaggccatcgaggcgcaatacgagtaccggacgacgcgcgtcagccgcgagggtggcgttctcaaggaggccaactactacggctcgctgactcaggcgggcaccgtgagcctgggcctggacgccgagggccaggaggtgttcgtacccttcagcgcggtgctgcccatggtggcgcccaacgacctcgtgttcgatggctgggacatctcgtcgctgaacctggccgaggcgatgcggcgcgcgaaggtgctggactgggggctgcaggagcaactgtggccgcacatggaggccctgcggccccggccttctgtttacatccccgaattcatcgcggccaaccagagcgcgcgcgcggacaacctcatcccaggctcgcgtgcgcagcagctggagcagatccgcagggacatccgagacttccggtctagcgcggggctggacaaagtcatagtgctgtggacggcgaacacggagcgcttctgtgaggtgattccaggcctcaacgacacagccgagaacctgctgcgcaccattgagctcggtctggaggtgtcgccctccacgctcttcgccgtggccagcatcctggagggctgtgccttcctcaatgggtctccgcagaacaccctggtgcccggagctcttgagctcgcgtggcagcaccgggtttttgtgggcggagatgacttcaagtcaggccagaccaaagtcaagtccgtgcttgtggacttcctcattggctccggcctcaagaccatgtccatcgtgagttacaaccacctgggcaacaacgatggggagaacctatcggcgccattgcagttccgctctaaggaggtgtccaagagcaacgtggtggacgacatggtgcagagcaacccagtgctctatacgcccggcgaagagcctgaccactgcgtggtcatcaagtatgtgccgtacgtgggtgacagcaagcgcgcgctggatgagtatacctcggagctgatgctgggcggaaccaacacactggtgctgcacaacacgtgtgaggactcgctgctggccgcacccatcatgctggacctagcgctgctgaccgagctgtgccagcgcgtgagcttctgcactgacatggaccccgagccgcagaccttccaccccgtgctgtccctgctcagcttcctcttcaaggcgccactagtgccgcccggcagcccggtggtcaatgcgcttttccgccagcgcagctgcatcgagaacatcctcagggcctgcgtggggctcccgccacagaaccacatgctcctggaacacaaaatggagcgcccagggcccagcctcaagcgagttggacccgtggctgccacctaccctatgttgaacaagaaaggaccggtacccgctgccaccaatggctgcaccggtgatgccaatgggcatctgcaagaggagcccccaatgcccaccacctgaggccccggtcacacagtttctcggctcttcctccccgctgccccccacgaccctaccttgaaggcccccacaaataaaggcgctgccactcagccctccttccacctggggttcttggggcctgtgacctgactctgcctccctctacttccccgactcttgagcgcccagcttcagtcccatcccctctgcccatggtcatcaccccaactcccagggagagcccagaacctggagcctcgctctgcccccagttctcaaaggtggggctagatgggggcggggacggaacaagaccacagggtggagagtgtggtggcagaaggccaaagagggaatctgagacaagctaccaaaaaccaaaaccagcttccatttatttatgggccccaccccctgacgtcctggggagaggggccccccaaagagcctttctctctgggacaaaatacaaatggcaggaagggtccatacagaaaagaacgtctctgaggtccttgcgtttttaataaaatggtaagagtc

SEQ ID NO: 66944 - DNA, 1515 bp, Artificial Sequence
  derived and/or modified sequence
atggaggccgccgcccagttctttgtggagagcccagatgtggtgtatggccctgaggccatcgaggcccagtatgagtaccgcaccaccagggtgtcccgggagggcggcgtgctgaaggaggccaactactacggcagcctgacccaggccggcaccgtgtccctgggcctggatgctgagggccaggaggtgtttgtgcccttctctgctgtgctgcccatggtggccccaaatgacctggtgtttgatggctgggacatcagcagcctgaacctggccgaggccatgaggcgggccaaggtgctggactggggcctgcaggagcagctgtggccccacatggaggccctgcggccccggcccagcgtgtacatccctgagttcatcgccgccaaccagagcgcccgggctgacaacctgatccctggcagccgggcccagcagctggagcagatccggcgggacatccgggacttccgcagcagcgctggcctggacaaggtgattgtgctgtggacagccaacacagagcgcttctgtgaggtgattcctggcctgaatgacacagctgagaacctgctgcggaccatcgagctgggcctggaggtgagccccagcaccctgtttgctgtggccagcatcctggagggctgtgccttcctgaatggcagcccccagaacaccctggtgcctggggccctggagctggcctggcagcaccgggtgtttgtgggcggagatgacttcaagagcggccagaccaaggtgaagtctgtgctggtggacttcctgattggcagcggcctgaagaccatgagcatcgtgtcctacaaccacctgggcaacaatgatggagagaacctgagcgcccccctgcagttccgcagcaaggaggtgtccaagagcaatgtggtggatgacatggtgcagagcaaccctgtgctgtacaccccaggagaggagccagaccactgtgtggtgatcaagtatgtgccctacgtgggggacagcaagagggccctggatgagtacaccagcgagctgatgctgggcggcaccaacaccctggtgctgcacaacacctgtgaggacagcctgctggccgcccccatcatgctggacctggccctgctgacagagctgtgccagagggtgtccttctgcacagacatggaccctgagccccagaccttccaccctgtgctgagcctgctgtccttcctgttcaaggcccccctggtgcccccaggcagccctgtggtgaatgccctcttccggcagaggagctgcatcgagaacatcctgcgggcctgtgtgggcctgcccccccagaaccacatgctgctggagcacaagatggagaggcctggccccagcctgaagagggtgggccctgtggccgccacctaccccatgctgaacaagaagggccctgtgcctgctgccaccaacggctgcacaggagatgccaacggccacctgcaggaggagccccccatgcccaccacctag

SEQ ID NO: 66945 - DNA, 1515 bp, Artificial Sequence
  derived and/or modified sequence
atggaggccgccgcccagttcttcgtggagagccccgacgtggtgtatggtcccgaagctatcgaggcccagtatgagtatcggacaacaagagtgagcagagaaggtggggtgctgaaggaggcaaactactatgggtccctgacacaagcgggcacggtgtccctggggcttgacgcagaaggacaggaggtattcgtccccttctcggccgtcttaccaatggtggcccccaatgacctggtttttgatggatgggatatctcttcactaaatctggccgaggccatgagacgggccaaggtgctggactgggggctccaggaacagctgtggccgcacatggaggctctgaggccacgtcccagcgtctacatccccgaattcattgccgccaatcagtctgctcgggccgacaatctgatccctggctccagagcccaacaacttgagcagattcgccgagacatccgagatttccgcagttccgctggtctggacaaggtcattgttttgtggacagctaatactgagcgtttttgtgaggtgattccaggtttaaatgacactgctgagaacctgttaagaacgatcgaattggggctcgaagtgtctcccagcacgctgttcgccgtggcctctatcttagaaggttgcgccttcctgaacggcagcccccagaacaccttagtacccggagccttggaactcgcttggcaacatcgggtttttgttggtggtgacgatttcaagagcggccagaccaaggtgaagtccgtgctggtcgattttttaattggaagcgggctgaaaacaatgagcattgttagttataaccatttgggcaacaacgacggcgagaaccttagtgcccccctgcaatttcgctccaaagaggtcagtaagtctaatgtggtggatgatatggtacaaagcaatcctgtcttgtacacgccaggagaagagccggaccattgtgtggtaattaaatacgtgccctatgtgggcgactctaagcgagcccttgatgaatacacctctgaactgatgctcgggggtacaaacacactggtactgcataacacttgtgaggattccctactcgccgcccctattatgttagatcttgcactgctgactgaactctgtcagcgcgtttctttttgtaccgatatggatccggaaccccagacctttcaccccgttctatcccttctctcattcctcttcaaggcgccgttagtgccgcctggctccccggttgtgaacgccctattcaggcagcgatcttgtattgagaatattctcagggcctgcgtggggctgcccccgcagaatcatatgctcctggaacacaaaatggagaggccaggtcctagtctcaagagggtgggcccagtagccgcaacttatcctatgctgaacaagaaaggtccagtgcccgccgccaccaatggttgtacaggggatgctaacgggcacctccaagaagagccccccatgcctacgacatag

SEQ ID NO: 66946 - DNA, 1515 bp, Artificial Sequence
  derived and/or modified sequence
atggaggccgctgctcagttctttgtggagtcaccagatgtcgtttacgggccagaggccatagaggcccaatatgagtatagaacgacaagggtgagtagggaaggaggggtccttaaggaggctaactattatggatctctgacccaggccggtacggtttccttgggacttgatgcggagggccaagaggtgttcgtacctttttctgcagtgctcccgatggtggctcctaatgacttggtgtttgatggctgggacattagttctctgaatctcgccgaagcaatgcgcagggccaaagtgctggattggggcctacaagaacagctctggccccatatggaggcgttgcgaccccgtccttctgtgtacatcccggaatttattgccgctaaccagtctgctagggctgacaatctgatccctggatccagggcccagcagctggagcagatccgaagggacataagggactttcggtcaagcgctggcctcgacaaagtgatcgtgctgtggacggcaaacacggagaggttttgcgaggtgattccgggactaaacgatacagccgagaatctgctgcgtacaatagaacttggtctggaggttagcccatcaactctctttgctgtggcttcgattttggagggttgtgcgttccttaacggcagtcctcaaaatactttggttcctggcgcattagagctggcctggcagcatcgtgttttcgtggggggtgacgattttaaaagtggccagaccaaggtgaaaagtgtcctggttgactttctgattggctccggattaaagacgatgtcaatcgtcagctataatcacctcgggaacaatgatggtgagaacttgagcgctcccctgcagttccgctctaaggaggtcagcaagagcaacgtagtcgacgatatggtgcaaagcaacccagtgttgtacactccaggagaggagccggaccattgtgttgtcatcaaatacgtcccttacgtcggagattctaagcgggctctggacgagtatacgtcggagctcatgctggggggaaccaatactctggtgttgcataacacgtgcgaggactcactgctggccgcacctattatgctagatttggctctgctgaccgagctgtgtcagagagtgagtttttgtaccgacatggatcctgaacctcagacgttccatccagttctttcccttctgtcctttcttttcaaggcaccactagtgccgccaggatccccagttgtaaatgcactgtttcgtcagagatcatgcatagagaacattctgagagcttgcgttggcctgcctcctcagaaccacatgctgctagagcataaaatggaacgtcccggaccaagcctcaaacgggtcggccctgtggcggctacttaccccatgttgaataagaagggccctgtccctgccgctaccaacggctgtactggcgatgccaacggccaccttcaggaggagccacccatgcctaccacttag

SEQ ID NO: 66947 - DNA, 1515 bp, Artificial Sequence
  derived and/or modified sequence
atggaggccgccgcccagttcttcgtggagagccccgacgtggtgtacggccccgaggccatcgaggcccagtacgagtacagaaccaccagagtgagcagagagggcggcgtgctgaaggaggccaactactacggcagcctgacccaggccggcaccgtgagcctgggcctggacgccgagggccaggaggtgttcgtgcccttcagcgccgtgctgcccatggtggcccccaacgacctggtgttcgacggctgggacatcagcagcctgaacctggccgaggccatgagaagagccaaggtgctggactggggcctgcaggagcagctgtggccccacatggaggccctgagacccagacccagcgtgtacatccccgagttcatcgccgccaaccagagcgccagagccgacaacctgatccccggcagcagagcccagcagctggagcagatcagaagagacatcagagacttcagaagcagcgccggcctggacaaggtgatcgtgctgtggaccgccaacaccgagagattctgcgaggtgatccccggcctgaacgacaccgccgagaacctgctgagaaccatcgagctgggcctggaggtgagccccagcaccctgttcgccgtggccagcatcctggagggctgcgccttcctgaacggcagcccccagaacaccctggtgcccggcgccctggagctggcctggcagcacagagtgttcgtgggcggcgacgacttcaagagcggccagaccaaggtgaagagcgtgctggtggacttcctgatcggcagcggcctgaagaccatgagcatcgtgagctacaaccacctgggcaacaacgacggcgagaacctgagcgcccccctgcagttcagaagcaaggaggtgagcaagagcaacgtggtggacgacatggtgcagagcaaccccgtgctgtacacccccggcgaggagcccgaccactgcgtggtgatcaagtacgtgccctacgtgggcgacagcaagagagccctggacgagtacaccagcgagctgatgctgggcggcaccaacaccctggtgctgcacaacacctgcgaggacagcctgctggccgcccccatcatgctggacctggccctgctgaccgagctgtgccagagagtgagcttctgcaccgacatggaccccgagccccagaccttccaccccgtgctgagcctgctgagcttcctgttcaaggcccccctggtgccccccggcagccccgtggtgaacgccctgttcagacagagaagctgcatcgagaacatcctgagagcctgcgtgggcctgcccccccagaaccacatgctgctggagcacaagatggagagacccggccccagcctgaagagagtgggccccgtggccgccacctaccccatgctgaacaagaagggccccgtgcccgccgccaccaacggctgcaccggcgacgccaacggccacctgcaggaggagccccccatgcccaccacctag

SEQ ID NO: 66948 - protein, 1341 aa, Artificial Sequence
  derived and/or modified sequence
MTLDRPGEGATMLKTFTVLLFCIRMSLGMTSIVMDPQPELWIESNYPQAPWENITLWCRSPSRISSKFLLLKDKTQMTWIRPSHKTFQVSFLIGALTESNAGLYRCCYWKETGWSKPSKVLELEAPGQLPKPIFWIQAETPALPGCNVNILCHGWLQDLVFMLFKEGYAEPVDYQVPTGTMAIFSIDNLTPEDEGVYICRTHIQMLPTLWSEPSNPLKLVVAGLYPKPTLTAHPGPIMAPGESLNLRCQGPIYGMTFALMRVEDLEKSFYHKKTIKNEANFFFQSLKIQDTGHYLCFYYDASYRGSLLSDVLKIWVTDTFPKTWLLARPSAVVQMGQNVSLRCRGPVDGVGLALYKKGEDKPLQFLDATSIDDNTSFFLNNVTYSDTGIYSCHYLLTWKTSIRMPSHNTVELMVVDKPPKPSLSAWPSTVFKLGKAITLQCRVSHPVLEFSLEWEERETFQKFSVNGDFIISNVDGKGTGTYSCSYRVETHPNIWSHRSEPLKLMGPAGYLTWNYVLNEAIRLSLIMQLVALLLVVLWIRWKCRRLRIREAWLLGTAQGVTMLFIVTALLCCAISFAGLCNGVLIEETEIVMPTPKPELWAETNFPLAPWKNLTLWCRSPSGSTKEFVLLKDGTGWIATRPASEQVRAAFPLGALTQSHTGSYHCHSWEEMAVSEPSEALELVGTDILPKPVISASPTIRGQELQLRCKGWLAGMGFALYKEGEQEPVQQLGAVGREAFFTIQRMEDKDEGNYSCRTHTEKRPFKWSEPSEPLELVIKEMYPKPFFKTWASPVVTPGARVTFNCSTPHQHMSFILYKDGSEIASSDRSWASPGASAAHFLIISVGIGDGGNYSCRYYDFSIWSEPSDPVELVVTEFYPKPTLLAQPGPVVFPGKSVILRCQGTFQGMRFALLQEGAHVPLQFRSVSGNSADFLLHTVGAEDSGNYSCIYYETTMSNRGSYLSMPLMIWVTDTFPKPWLFAEPSSVVPMGQNVTLWCRGPVHGVGYILHKEGEATSMQLWGSTSNDGAFPITNISGTSMGRYSCCYHPDWTSSIKIQPSNTLELLVTGLLPKPSLLAQPGPMVAPGENMTLQCQGELPDSTFVLLKEGAQEPLEQQRPSGYRADFWMPAVRGEDSGIYSCVYYLDSTPFAASNHSDSLEIWVTDKPPKPSLSAWPSTMFKLGKDITLQCRGPLPGVEFVLEHDGEEAPQQFSEDGDFVINNVEGKGIGNYSCSYRLQAYPDIWSEPSDPLELVGAAGPVAQECTVGNIVRSSLIVVVVVALGVVLAIEWKKWPRLRTRGSETDGRDQTIALEECNQEGEPGTPANSPSSTSQRISVELPVPI

SEQ ID NO: 66949 - DNA, 4026 bp, Artificial Sequence
  derived and/or modified sequence
atgacgctggacagaccaggagaaggggccaccatgttgaagactttcactgtcctactcttctgcatcagaatgtctctcggaatgacaagcattgtcatggacccgcaaccagaactttggatagagtcgaactacccccaggctccttgggaaaatatcacgttatggtgccgctcaccctcacgaatctctagtaaatttctcctgctcaaggacaagacgcagatgacgtggattaggcccagccacaaaacatttcaggtttccttcttaataggggcacttacagagtcaaacgctggcctgtatcgttgctgctactggaaggagactgggtggagcaaaccctctaaagtgctcgaactagaagcccccggccaactccctaaaccgatcttctggatccaagccgagacacctgccctcccaggctgtaacgtcaacattctatgccatggctggttgcaggatctggtgttcatgcttttcaaggaagggtacgctgagcctgttgactatcaggtgcccactggcaccatggctatctttagcatcgataacctcacgcctgaggacgagggtgtgtatatctgtaggacacacatacaaatgctgccaacgttgtggtctgaaccctccaaccctcttaagctcgttgtggctggcctgtacccaaaacctacactgactgcacatccaggtcctatcatggcccccggcgaatctctgaacctgagatgtcaggggccaatctacggaatgacatttgcgttgatgcgggtggaggacctcgaaaagagtttctaccacaaaaagacaatcaagaatgaggcaaatttcttctttcagtcgctaaagatccaagacactgggcattatctgtgtttttattacgatgccagctatcggggtagtctgctatcggatgtgctcaaaatctgggtcaccgacaccttccccaagacatggctgttggccagaccctctgcagtggtccagatggggcagaacgtgtctctccgctgtcggggaccagtggacggtgtggggttggctctgtacaaaaagggtgaggacaaacccctccagttcttggacgcaactagtatagatgacaatacttctttcttcttgaacaacgttacatattctgacaccgggatctactcctgccactacctcctaacctggaagacttccatacggatgcccagtcacaacaccgtagagctgatggtggttgataagccccccaagccctccctttccgcctggcccagcaccgttttcaagctcggcaaggcaatcactctacaatgcagggtgtcacatcccgtgctcgagttcagcctggagtgggaggaacgtgagacatttcaaaaattttctgtgaatggtgacttcatcatctcaaacgtggatggaaaaggaactggaacgtattcttgcagctaccgcgtcgagactcaccccaatatatggagtcacagatcagaaccactaaagttgatgggccctgccggttatctgacatggaactatgtcctcaatgaggcaattcgcctgtctctgattatgcagctggttgccttgctacttgtggtgctgtggatccgctggaagtgtcgcagactgaggattcgggaggcttggctgctgggtacggcccagggggtgacgatgcttttcattgtcacggccttactctgctgtgctatttccttcgctggattatgcaacggagtgctcatagaagaaacagaaatcgttatgccgacccctaagcctgaactctgggcagagactaacttcccgctcgcgccttggaagaacctcacgctgtggtgccgctctccctcaggtagcacaaaggagtttgtcctcctgaaggatggtacagggtggatcgcaacccggcctgcttccgaacaggtacgtgccgctttcccactgggcgcactgactcaaagccacacggggtcatatcactgccactcctgggaagaaatggcagtttcggagccctcagaagcacttgagctcgtcgggactgatattttacccaaacctgtaatttctgcctcgccaacgattcgcggccaagaactgcaactgagatgcaaaggttggctggcggggatggggtttgctctgtacaaagagggtgaacaagagcccgtgcagcagctcggtgctgtgggcagggaggcattctttacaatccaaaggatggaggacaaagacgagggcaattactcatgccggactcatactgaaaaaaggccattcaagtggtcagagccctctgaacccctcgaactcgtgatcaaggaaatgtacccgaagcccttcttcaagacctgggcctcccccgtcgtgacaccgggagcaagagtcactttcaattgctctactccccatcagcatatgtcgtttatcctttacaaagatgggtcagaaatagctagtagtgaccgatcatgggcctcaccaggggcctctgccgcacacttcctgatcatttcggtgggaattggagatgggggtaattatagctgccgatattacgacttctccatctggtccgagccctcagaccctgtggagctggtggtaacagaattttacccgaagcccacactgctggctcagccaggaccagtcgtgtttccaggaaagtccgtgatcctgcgttgtcagggcaccttccagggaatgcggttcgcactgcttcaggaaggtgcacacgtgccgctccagtttcgttcagtctccgggaatagcgccgatttcctgctccatacggtcggagccgaagacagcggaaattattcatgtatctactatgagacaacaatgagcaacagggggtcatacctcagcatgccacttatgatttgggttacggacaccttcccgaaaccatggttatttgccgaacccagttccgtggtaccgatgggccagaatgttaccttgtggtgtagaggccccgtgcatggcgtgggatacatactgcacaaagaaggtgaggcaacttccatgcagctctgggggtcaacaagcaacgacggggctttcccaattaccaatattagcgggactagtatggggaggtactcctgctgctaccaccctgactggacgagtagtattaagatccagccgagcaacactctggagctcttggtgacgggtctgcttcccaagccgagcctgcttgcccagcccgggccaatggtcgcccccggagagaatatgactctccaatgtcagggcgagctcccggactcaacattcgtcctccttaaggagggtgcccaggagcctctcgagcagcagcgcccttccgggtacagggcggacttttggatgcctgccgtcagaggagaggactccggtatatacagttgtgtgtactacctggatagcactcccttcgccgcttcaaatcattccgactcactagagatttgggtcacagataaacccccgaaaccaagtctatctgcctggccaagcactatgtttaagctgggtaaggatataactctgcaatgtagagggccactgcccggtgtggagtttgttctcgaacacgacggagaagaagctccccagcagttttccgaggacggtgatttcgtaatcaacaacgtcgaggggaagggaatcggcaactattcctgcagttaccgtctccaggcctacccagatatttggagtgagccatccgaccccttagagctggtgggtgcagccggacccgtggcacaagagtgtactgtggggaacattgtgcgcagctccttgatcgtggtagtggtcgttgccctaggtgtagtcctcgcaatcgagtggaaaaaatggccgagactgcgtaccagaggctccgaaacagacggaagggaccagaccattgccctcgaggagtgtaatcaggagggggagccaggaacaccagcgaactcgccctcttccacctcccagcgcatttccgttgaactgccagttcccatttag

SEQ ID NO: 66950 - DNA, 4594 bp, Artificial Sequence
  derived and/or modified sequence
aggtgccaggcagagttggtgtaggtgggctccccgagcccggcgcagggaggggaggaggttggggcgggccggcaggcgggcgggggagagaggaaggcggggctcagagccgaagaggctgtccttagacagctcttctcatgccgggcagtttgctgcatctggaggagctcactggagaatctccaacatcggagcgggccttcaactaccatcccaccacctgctgaggagaaaaattcttcaagactcagagcacacagccagcaccagaggccccatgaccctggacagaccaggggagggggccaccatgctgaagacattcactgttttgctcttttgcattcggatgagtctgggtatgacatcaatagtgatggaccctcaaccagagttgtggatagagtccaactacccccaggccccttgggagaacatcacgctttggtgccgaagcccctctcggatatcaagcaagttcctgctgctgaaggataagacacagatgacctggatccgcccttcccacaagaccttccaagtttcattccttataggtgcccttactgagtccaatgcaggtctttaccggtgctgctactggaaggagacaggctggtcaaagcccagtaaagttctagagttggaggcaccaggccaactgcccaagcccatcttctggattcaggctgagacccccgctcttcctgggtgtaatgttaacatcctctgccatggctggctgcaggatttggtattcatgctgtttaaagagggatatgcagagcctgtggattaccaagtcccaactgggacaatggccatattctccattgacaacctgacacctgaggatgaaggggtttacatctgccgcactcatatccagatgctccccaccctgtggtcagagcccagcaaccccctgaagctggttgtagcaggactctaccccaaaccaactttgacagcccatcctgggcccatcatggcacctggagaaagcctgaatctcaggtgccaagggccaatctatggaatgacctttgctctaatgagggttgaagacttggagaagtccttttaccacaagaagacaataaaaaatgaggcaaatttcttcttccagtctttgaagatccaagatactggacattacctctgtttttactatgacgcatcatatagaggttcactccttagtgatgtcctgaaaatctgggtgactgacactttccccaagacctggctacttgctcggcccagtgctgtggtccaaatgggtcagaatgtgagcctacggtgtcgaggaccagtggatggagtgggtcttgcactctataagaaaggagaagacaaaccacttcaatttttggatgccaccagcatcgatgacaacacatcattcttcctcaacaatgtaacctacagtgatactggcatctatagctgccactatcttctcacctggaagacctccattaggatgccatcacacaacactgtggagcttatggttgtagataagccccccaaaccctccctgtcagcttggccaagcactgtgttcaagctaggaaaggccatcacccttcagtgccgagtatctcatccagtactggaattttctctggaatgggaagaaagagaaacattccaaaaattctcagtaaacggagacttcatcatcagtaatgttgacgggaaaggcacagggacctacagttgcagctatcgcgtagagacacatcctaacatctggtcacatcgcagtgagcccctgaagctgatggggccagcaggctatctcacctggaattacgttctgaatgaagctatcaggttgtctctaatcatgcagcttgttgccttgctgttggtagtgctgtggataaggtggaagtgtcggagactcagaatcagagaagcctggttgctgggaacagctcaaggggtcaccatgctcttcatagtcacggcccttctctgctgtgcaatttcttttgcaggactgtgcaatggggtattgatagaagagactgaaatagtcatgccaacccctaagcctgagctgtgggcagagaccaactttcctctggccccgtggaagaacttaaccctctggtgcagaagcccttctggctcaactaaggagtttgtgttgctgaaggatgggaccgggtggatcgccactcgcccggcctcagagcaggtccgggctgccttcccccttggcgccctgacccagagccacaccgggagctaccactgccattcatgggaggagatggctgtatcggagcccagtgaggcacttgagctggtggggacagacatcctccccaaacctgtcatttctgcttcccccacaatccggggccaggaactacaactccggtgcaaaggatggctggcaggcatggggtttgctctgtataaggagggagagcaagaacctgtccagcaacttggtgctgttggaagagaagccttctttacaatccagagaatggaggataaagacgaaggcaattacagctgccgcactcacactgaaaaacgccccttcaagtggtctgagcccagtgagccgctggagcttgtcataaaagaaatgtaccctaagcccttcttcaagacatgggccagccctgtggtcacccctggtgcccgagtgactttcaattgctccaccccccaccagcatatgagctttattctttacaaagatggaagtgaaatagcatccagtgacaggtcctgggcaagtccgggggccagtgcagctcactttctaatcatttcggtgggcattggtgatggagggaattacagctgccgatattatgacttttctatctggtctgagcccagcgaccctgtggagctcgtggtgacagaattctaccccaaacccactctcctggcacagccaggtcctgtggtgtttcctgggaagagtgtgatcctgcgctgccaagggactttccagggcatgaggttcgccctcttgcaggagggagcccatgttcccttacagtttcggagtgtctcagggaactcagctgacttccttctccacactgttggagcagaggactctgggaactatagctgtatctactatgagacaaccatgtcaaacagggggtcatatctcagtatgccccttatgatctgggtgactgacacattccctaagccatggttgtttgctgagcccagttctgtggttcccatggggcagaatgttactctctggtgccgagggccggtccatggagtaggatacattctgcacaaagaaggagaagccacttcaatgcagctctggggatccaccagtaatgacggggcattccccatcaccaatatatctggtactagcatggggcgttacagctgctgctaccaccctgactggaccagttctatcaagatacaacctagcaacaccctggaactcctagtcacaggcttactccccaaacccagcctattagcccagcctggtcccatggtggcccctggcgaaaatatgactcttcagtgtcaaggggaactgccagactcaacatttgtcctgttgaaggagggggctcaggagcctttagagcaacagaggccaagtgggtacagggctgacttctggatgccagcagtgagaggtgaagactctgggatctatagctgtgtttattatttggactctactccctttgcagcttcaaatcacagtgactccctggagatctgggtgactgataagccccctaaaccctctctgtcagcctggcccagcaccatgttcaagttagggaaggacatcacccttcagtgccgaggacccctgccaggtgttgaatttgtcctagaacatgatggagaagaagcacctcagcagttttcagaggatggagactttgtcatcaacaacgtagaaggaaaaggcattggaaactacagctgcagctaccgcctccaggcctaccctgatatctggtcagagcctagtgatcccctggagctggtgggggcagcagggcctgttgctcaggagtgcactgtagggaacattgtccgaagtagcctaatcgtggtggttgttgtagccttgggggtagtgctagccatagagtggaagaagtggcctcgactgcgaaccagaggctcagagacagacggaagagaccagaccattgcccttgaagagtgtaaccaagaaggagaaccaggcacccctgccaattctccttcatcaacctctcagagaatctctgtggaactgcccgttccaatataataatctcctcctttacaagagctttcctctcctctctcttgctctcagagacctataaatccaaccagttaccctgcaagtcagccccatctgctgttccttggtctctaatcacctgagctgggtaaaggggattctgggagttgagagctctgccagggtgagatgtttcctgaagagaggttccccacccctgtaactcctcactgtactgatttactggcgcatgaaattctattaaaaatgcattcttctgaataaaaagagtattcactatttaacttc

SEQ ID NO: 66951 - DNA, 4026 bp, Artificial Sequence
  derived and/or modified sequence
atgaccctggacaggcctggagagggcgccaccatgctgaagaccttcaccgtgctgctcttctgcatccgcatgagcctgggcatgaccagcatcgtgatggacccccagcctgagctgtggattgagagcaactacccccaggccccctgggagaacatcaccctgtggtgccgcagccccagccgcatcagcagcaagttcctgctgctgaaggacaagacccagatgacctggatccggcccagccacaagaccttccaggtgtccttcctgattggagccctgacagagagcaatgccggcctgtaccgctgctgctactggaaggagaccggctggagcaagcccagcaaggtgctggagctggaggcccctggccagctgcccaagcccatcttctggatccaggccgagaccccagccctgcccggctgcaatgtgaacatcctgtgccacggctggctgcaggacctggtgttcatgctgttcaaggagggctatgcagagcctgtggactaccaggtgcccaccggcaccatggccatcttcagcattgacaacctgaccccagaagatgaaggagtgtacatctgcaggacccacatccagatgctgcccaccctgtggagcgagcccagcaaccccctgaagctggtggtggccggcctgtaccccaagcccaccctgacagcccaccctggccccatcatggcccctggagagagcctgaacctgcgctgccagggccccatctacggcatgacctttgccctgatgagggtggaggacctggagaagagcttctaccacaagaagaccatcaagaatgaggccaacttcttcttccagagcctgaagatccaggacaccggccactacctgtgcttctactatgatgccagctaccggggcagcctgctgagtgatgtgctgaagatctgggtgacagacaccttccccaagacctggctgctggcccggcccagcgctgtggtgcagatgggccagaatgtgtccctgcgctgccggggccctgtggatggagtgggcctggccctgtacaagaagggggaggacaagcccctgcagttcctggatgccaccagcattgatgacaacaccagcttcttcctgaacaacgtgacctacagcgacaccggcatctacagctgccactacctgctgacctggaagaccagcatccgcatgcccagccacaacacagtggagctgatggtggtggacaagccacccaagcccagcctgagcgcctggcccagcacagtgttcaagctgggcaaggccatcaccctgcagtgccgggtgagccaccctgtgctggagttcagcctggagtgggaggagcgggagaccttccagaagttctctgtgaatggagacttcatcatcagcaatgtggatggaaaaggaacaggcacctacagctgcagctacagagtggagacccaccccaacatctggagccacaggtctgagcccctgaagctgatgggccctgctggctacctgacctggaactacgtgctgaatgaggccatccggctgagcctcatcatgcagctggtggccctgctgctggtggtgctgtggatccgctggaagtgccggcggctgcgcatccgggaggcctggctgctgggcacagcccagggcgtgaccatgctgttcatcgtgacagccctgctgtgctgtgccatcagctttgctggcctgtgcaatggagtgctgattgaggagacagagatcgtgatgcccacccccaagccagagctgtgggccgagaccaacttccccctggccccctggaagaacctgaccctgtggtgccgcagccccagcggcagcaccaaggagtttgtgctgctgaaggatggcaccggctggatcgccaccaggcctgccagcgagcaggtgcgggccgccttccccctgggcgccctgacccagagccacacaggcagctaccactgccacagctgggaggagatggctgtgtctgagcccagcgaggccctggagctggtgggcacagacatcctgcccaagcctgtgatcagcgccagccccaccatccggggccaggagctgcagctgcgctgcaagggctggctggccggcatgggctttgccctgtacaaggagggggagcaggagcctgtgcagcagctgggcgctgtgggccgggaggccttcttcaccatccagaggatggaggacaaggatgagggcaactacagctgcaggacccacacagagaagaggcccttcaagtggagcgagcccagcgagcccctggagctggtgatcaaggagatgtaccccaagcccttcttcaagacctgggccagccctgtggtgacccctggggcccgggtgaccttcaactgcagcaccccccaccagcacatgtccttcatcctgtacaaggatggcagcgagatcgccagcagtgaccgctcctgggccagccctggggccagcgctgcccacttcctgatcatctctgtgggcattggagatggcggcaactacagctgccgctactatgacttcagcatctggagcgagcccagcgaccctgtggagctggtggtgacagagttctaccccaagcccaccctgctggcccagcccggccctgtggtgtttcctgggaagagcgtcatcctgcgctgccagggcaccttccagggcatgagatttgccctgctgcaggagggcgcccacgtgcccctgcagttccgctctgtgtctggcaacagcgctgacttcctgctgcacacagtgggcgctgaggacagcggcaactacagctgcatctactatgagaccaccatgagcaacagaggcagctacctgtccatgcccctgatgatctgggtgacagacaccttccccaagccctggctgtttgctgagcccagctctgtggtgcccatgggccagaatgtgaccctgtggtgccggggccctgtgcatggagtgggctacatcctgcacaaggagggggaggccacctccatgcagctgtggggcagcaccagcaatgatggagccttccccatcaccaacatcagcggcacctccatgggccgctacagctgctgctaccacccagactggaccagcagcatcaagatccagcccagcaacaccctggagctgctggtgacaggcctgctgcccaagcccagcctgctggcccagcccggccccatggtggcccctggagagaacatgaccctgcagtgccagggcgagctgcctgacagcacctttgtgctgctgaaggagggcgcccaggagcccctggagcagcagaggcccagcggctacagagctgacttctggatgcctgctgtgcggggggaggacagcggcatctacagctgtgtgtactacctggacagcaccccatttgctgccagcaaccacagcgacagcctggagatctgggtgacagacaagccacccaagcccagcctgagcgcctggcccagcaccatgttcaagctgggcaaggacatcaccctgcagtgccggggccccctgcccggggtggagtttgtgctggagcatgatggagaggaggccccccagcagttctctgaagatggagactttgtgatcaacaacgtggagggcaagggcatcggcaactacagctgcagctaccgcctgcaggcctacccagacatctggagcgagcccagcgaccccctggagctggtgggcgctgctggccctgtggcccaggagtgcaccgtgggcaacatcgtgcgcagcagcctgattgtggtggtggtggtggccctgggcgtggtgctggccatcgagtggaagaagtggccccggctgcggacccggggcagcgagacagatggccgggaccagaccatcgccctggaggagtgcaaccaggagggggagcccggcaccccagccaacagccccagcagcaccagccagaggatctctgtggagctgcctgtgcccatctag

SEQ ID NO: 66952 - DNA, 4026 bp, Artificial Sequence
  derived and/or modified sequence
atgaccctggaccggcccggcgagggcgccaccatgctgaagacctttactgtgttactgttttgcatcagaatgagccttggaatgacctccatcgtgatggaccctcaacccgagctctggattgagagcaattacccacaggccccgtgggagaacatcactctttggtgtaggtcaccttccagaatctcttcgaagtttctcttactgaaagataaaactcagatgacatggattaggcctagtcataagacttttcaggtctcctttctcatcggggccctgacagaaagtaatgcaggcttgtataggtgctgctactggaaagagacgggttggtccaagccttctaaagtgctggagctggaggcccctggtcagttaccaaagcctatattctggattcaagccgagacgccagcacttccagggtgtaacgtgaacatcctatgtcatggctggctccaggatctagtattcatgctgttcaaagaaggctatgcagagcccgtggactatcaggttcctacgggaacaatggctatcttttccattgacaatcttactcctgaagacgaaggcgtctatatttgccgcacccatatccagatgcttcccacattatggtcggagccatctaacccattgaaactggtagtagcgggactgtatcctaaacctaccctcacagcgcaccctggaccaataatggcccccggtgaatcgctaaatctgcggtgtcaaggtccaatctacgggatgacttttgccctgatgagggtcgaggaccttgagaaatccttttatcataagaagacaatcaaaaatgaagccaatttcttctttcagagccttaaaatacaggatacaggacattacctgtgtttttactacgacgcctcctataggggctctctgctcagcgatgtattaaagatctgggtcactgacactttccccaagacctggctattagctcggcccagcgccgttgtgcagatggggcaaaacgtcagcctgcgctgtagaggtccagtggatggggtggggctggctctctacaagaagggcgaggataagcctctgcagtttctggatgccacctctatcgacgataataccagcttttttctgaataacgtcacatattcagacacggggatctattcctgtcattacctgctgacctggaagacaagcatccggatgccctcccacaataccgtggaactcatggtcgtagacaagcctccaaagccctctttaagcgcgtggcctagcactgtatttaagcttggaaaagctataacactccagtgtcgggtgtcacatccggtgctcgagttctcacttgaatgggaagagcgagagacctttcaaaaatttagtgtcaatggtgattttatcatttccaacgtcgatggaaaagggactgggacctattcctgttcatatcgggtcgaaactcaccccaatatatggagccaccggtccgagcccctcaagctgatgggccccgccgggtatttgacatggaactatgttttgaacgaagccatccggctgtcgctgatcatgcagctggtggctcttcttctggtggtgctgtggattcggtggaagtgcagaagactgagaatcagagaggcgtggctactaggaacggcacaaggtgtgacaatgctgtttatcgtaacggcgttactgtgttgtgccatctccttcgccggactctgtaacggagtactgattgaagagactgagattgtgatgccgacgccaaaaccagagctatgggcagaaaccaatttccccctggctccgtggaagaacctaaccctgtggtgcaggagcccctcaggcagcactaaggagttcgtgctgctcaaagatggcacaggctggattgctactcggccagcctctgagcaggttagagctgccttcccactgggtgccctgacacagtctcacactggtagttaccattgtcattcatgggaagagatggcagtgtctgagccctccgaggccctggagctggtgggaaccgatatcctacccaagcctgtaatcagtgctagtcccactataagaggacaagaactgcagctgcgctgcaagggctggctggctggcatgggcttcgcactgtataaggagggcgagcaggagcccgtgcaacagctgggggccgtcggcagggaggcctttttcactatccagcgtatggaagacaaagatgaggggaactatagttgtcgcactcatacagaaaagcgcccttttaaatggtccgagccaagcgagcccctggagctggtgatcaaggagatgtatccaaaacctttttttaagacctgggccagtcctgtggtgacacctggcgcccgggtaacgttcaactgctcaaccccccatcagcacatgtcgtttatcttatataaggacggaagtgagatcgcaagcagtgatcgaagctgggcttcccccggcgcaagcgctgcgcatttcttgattatctccgtgggcattggagacggcggcaactattcttgccgttactatgatttcagtatctggagcgagccttctgatccagttgaactggtggtgactgagttttatcccaagcctaccctgctcgcccagcctggaccggttgtgttccccgggaagagcgtcatcctacgctgtcagggtacctttcagggaatgcgctttgcgcttttacaggaaggggcacatgtccccctacagttccgatccgtatctggcaactctgccgatttcctgttgcacaccgtgggagctgaggacagcgggaattactcatgcatatactacgaaaccactatgagtaatagaggaagctacctgtcaatgccattgatgatttgggtaaccgacacctttcctaaaccctggctattcgcagagccctcctcagtcgtgcccatgggtcagaatgtgacactgtggtgtaggggtccagtgcacggcgtgggctacattttacacaaggagggagaagcaacgtccatgcagctttggggatctactagtaatgacggagccttccctatcacaaatatcagcggcacctccatgggcagatattcatgttgttaccaccccgattggacatccagcatcaagattcaacctagcaatacgcttgagctgctggttacgggtctgcttcccaagccttctcttctggcccagcctggacccatggtggccccgggcgagaatatgaccctgcaatgtcagggggagctaccagactctacctttgtcttgctaaaggagggtgctcaggaacctctggagcagcagagaccgtctggataccgggccgacttctggatgcccgctgtcaggggcgaagatagtggaatttacagctgtgtatactatctcgacagcactcctttcgccgcttcaaaccattcagactctctcgagatttgggtaaccgacaagccccctaagccaagcctgtcagcctggccctccacaatgttcaagttagggaaagacattacactgcaatgtcggggaccactacccggcgtggagttcgtgttggaacatgacggcgaggaggcccctcaacagttctccgaggacggggattttgtcattaataacgtggagggaaaaggcatcggcaactattcatgcagctataggcttcaagcttatcccgacatttggtcggaaccatctgatcctttggaactcgtcggcgctgcgggccctgtggcccaggaatgcactgtaggtaatatagtccggtcttcactaattgtggtagtcgtcgttgcattgggggtggttctggcaattgagtggaagaaatggccccggcttcggaccagagggagtgaaacagatggccgggaccagactattgcactagaggaatgcaaccaggaaggtgagcctggtacgcctgctaattccccatccagcactagccagcggatcagcgtggagctgcccgtgccaatttag

SEQ ID NO: 66953 - DNA, 4026 bp, Artificial Sequence
  derived and/or modified sequence
atgaccctggatagacctggcgaaggcgcaacaatgctcaaaactttcacagtgcttttgttttgcatccggatgtctctcggcatgacctccatcgtgatggacccgcagccggaactatggatcgagagtaattacccacaggcgccttgggagaatattactctgtggtgccggtcaccgtccagaatatccagcaagtttctgttgcttaaggacaagacacagatgacttggatccgcccttctcataagacctttcaggtcagcttcctgattggtgcccttacagagtccaatgccggattgtaccgatgctgttactggaaggagactggatggtctaaaccaagcaaggtgctagagttggaggccccagggcagctccctaaacccattttctggatccaggctgagactcccgcattacccggatgcaatgttaatatcctgtgccacggatggctgcaggatttggtgttcatgctcttcaaagaggggtacgcagaaccagtggattatcaggttccgaccgggaccatggcaattttctccatcgataatttgaccccagaggacgagggcgtttatatctgcaggacccatatacagatgctgcccaccttgtggtccgaacccagcaatccactgaagctggttgtggccggactgtacccaaaacccactttaacggcacatcccggacccattatggcacccggagagagcctcaatctacggtgccagggcccaatatatgggatgactttcgccttgatgagagtagaggacctggagaaaagtttttatcacaagaagacgatcaagaatgaagccaatttttttttccagagcctgaaaatacaagataccggacattatctttgtttctactatgacgcctcctaccgcggatccctgctgagtgatgtgttgaagatctgggtgacagatacctttcccaaaacctggctgttggctcgtcctagcgcggtcgtccagatgggacagaacgtttctttgaggtgtcgtggacctgttgacggcgtaggactagccttatataaaaaaggcgaggacaaacccctgcaatttcttgacgccacatcaatcgacgataatacctccttcttcctgaacaacgtcacctacagcgatacagggatctatagttgccactatctcctgacgtggaagactagcattcgcatgcccagccacaacaccgttgagctgatggtggtagacaagccacctaagccctcactcagcgcttggccttccacagtatttaaattgggcaaggctattactttgcagtgtcgggtctcccacccggtgctggaattttccctcgagtgggaggaacgagagacctttcagaaatttagcgttaacggcgattttattatctccaacgtggacggcaaaggcacaggaacctatagttgttcttacagggtggagacccacccaaacatctggagtcaccgaagcgagcctcttaaactgatgggaccggctggctatctgacatggaactacgttctgaacgaggccataaggctgtccctaatcatgcaactagtcgctcttctgttggtggtattgtggatcaggtggaaatgcaggagactccgaattcgggaggcatggttattgggcaccgcgcagggggtcaccatgctgtttattgtgacggcactactttgctgtgccatcagctttgctggactgtgcaacggagttcttatcgaagaaaccgagatcgtgatgcccacacccaaacccgagctctgggcagaaacaaattttcctctggctccatggaagaatctgacactctggtgcaggtcgccatcaggatccaccaaggagttcgtcctactgaaggacgggacaggatggatagcaacaaggccagcatcagaacaggtgcgcgcagccttcccattaggggcattgacgcagagccataccggctcataccactgtcacagttgggaagaaatggcagtgagtgaaccatcagaggccctggaactggtgggtacagatatcctccccaaacctgttattagtgcctctccaactatcagaggacaggaactgcagctgcgatgcaaggggtggctggcaggaatggggttcgcactgtacaaggaaggcgaacaggagccagtccagcagctgggagcagtcggcagagaggcatttttcacaatccagagaatggaggataaggacgaaggaaactattcatgtcgaacgcacaccgagaaacgccctttcaagtggtcggagcctagcgagcccctggagctcgtgatcaaggagatgtatcctaaacccttttttaagacttgggccagccctgttgtcactcctggggctagggtaacctttaactgcagcactccccaccaacatatgtcattcattttgtacaaggatggaagcgagatagcatcctcagaccgtagttgggcctcacctggggctagcgcagcccacttcttaattataagtgtgggtattggcgacggtggcaattatagttgccgctactatgactttagcatctggagcgagcccagtgatccggttgagttggtcgtcaccgagttttacccaaagcctacccttcttgctcagcctggccctgtggtttttccaggcaagtcagtgatcctacgctgtcaaggtaccttccaggggatgagattcgctttgttacaggagggcgctcacgtgcccctccaatttcgaagcgtcagcggcaactcagccgactttctgctgcacacagttggagcagaggactctggaaactatagttgtatttactacgagaccacaatgtccaacaggggttcttacttgagtatgcccctcatgatatgggtgaccgacacttttccaaaaccgtggctgtttgcggaaccatcgagcgtagtgcccatgggtcagaatgtgacgctttggtgtaggggccctgtccacggcgtcggatacatcctgcacaaggagggcgaggcaactagtatgcagctgtggggctccacctcgaacgatggcgcttttcctataactaacatctctggcactagcatgggcaggtactcctgctgttaccaccccgactggacctcatcaatcaagatacaaccctccaatacactcgaactcctggtgacaggcttactgccaaaaccatccctgctggctcagcctgggcctatggtggcgcctggagagaatatgacactccagtgccaaggggaactgcccgacagtacgttcgtgcttttaaaagagggggctcaggagccattggagcaacaacgtccgtccggctatcgagccgacttctggatgccagctgtgcgcggtgaggactctgggatctactcctgcgtttattaccttgactccaccccattcgctgcgtcaaaccatagcgactcgcttgagatttgggtcacggacaaacccccaaaaccatctttaagcgcgtggccatccactatgtttaagctgggaaaggatataactctgcagtgtcggggacctcttcctggtgttgagttcgtcttggaacatgatggtgaggaggctccacaacagttctccgaagatggagactttgtaataaacaatgtggagggcaagggcatcgggaattattcatgctcctatcggttacaggcatacccagacatctggtcggaaccatctgaccctctggaactggttggggctgccggtcccgtcgcgcaggaatgtactgtcggcaacatagtgcgatcttcgttgattgtggtggtagtggtagcgctgggggtggtcttggctattgagtggaaaaagtggcccagattgagaacacggggatccgagaccgatggcagagaccagactatcgccctggaggagtgcaatcaggaaggagaaccaggcacccctgccaatagcccctcttccacaagccagagaatcagcgttgagttaccagtacccatatag

SEQ ID NO: 66954 - DNA, 4026 bp, Artificial Sequence
  derived and/or modified sequence
atgaccctggacagacccggcgagggcgccaccatgctgaagaccttcaccgtgctgctgttctgcatcagaatgagcctgggcatgaccagcatcgtgatggacccccagcccgagctgtggatcgagagcaactacccccaggccccctgggagaacatcaccctgtggtgcagaagccccagcagaatcagcagcaagttcctgctgctgaaggacaagacccagatgacctggatcagacccagccacaagaccttccaggtgagcttcctgatcggcgccctgaccgagagcaacgccggcctgtacagatgctgctactggaaggagaccggctggagcaagcccagcaaggtgctggagctggaggcccccggccagctgcccaagcccatcttctggatccaggccgagacccccgccctgcccggctgcaacgtgaacatcctgtgccacggctggctgcaggacctggtgttcatgctgttcaaggagggctacgccgagcccgtggactaccaggtgcccaccggcaccatggccatcttcagcatcgacaacctgacccccgaggacgagggcgtgtacatctgcagaacccacatccagatgctgcccaccctgtggagcgagcccagcaaccccctgaagctggtggtggccggcctgtaccccaagcccaccctgaccgcccaccccggccccatcatggcccccggcgagagcctgaacctgagatgccagggccccatctacggcatgaccttcgccctgatgagagtggaggacctggagaagagcttctaccacaagaagaccatcaagaacgaggccaacttcttcttccagagcctgaagatccaggacaccggccactacctgtgcttctactacgacgccagctacagaggcagcctgctgagcgacgtgctgaagatctgggtgaccgacaccttccccaagacctggctgctggccagacccagcgccgtggtgcagatgggccagaacgtgagcctgagatgcagaggccccgtggacggcgtgggcctggccctgtacaagaagggcgaggacaagcccctgcagttcctggacgccaccagcatcgacgacaacaccagcttcttcctgaacaacgtgacctacagcgacaccggcatctacagctgccactacctgctgacctggaagaccagcatcagaatgcccagccacaacaccgtggagctgatggtggtggacaagccccccaagcccagcctgagcgcctggcccagcaccgtgttcaagctgggcaaggccatcaccctgcagtgcagagtgagccaccccgtgctggagttcagcctggagtgggaggagagagagaccttccagaagttcagcgtgaacggcgacttcatcatcagcaacgtggacggcaagggcaccggcacctacagctgcagctacagagtggagacccaccccaacatctggagccacagaagcgagcccctgaagctgatgggccccgccggctacctgacctggaactacgtgctgaacgaggccatcagactgagcctgatcatgcagctggtggccctgctgctggtggtgctgtggatcagatggaagtgcagaagactgagaatcagagaggcctggctgctgggcaccgcccagggcgtgaccatgctgttcatcgtgaccgccctgctgtgctgcgccatcagcttcgccggcctgtgcaacggcgtgctgatcgaggagaccgagatcgtgatgcccacccccaagcccgagctgtgggccgagaccaacttccccctggccccctggaagaacctgaccctgtggtgcagaagccccagcggcagcaccaaggagttcgtgctgctgaaggacggcaccggctggatcgccaccagacccgccagcgagcaggtgagagccgccttccccctgggcgccctgacccagagccacaccggcagctaccactgccacagctgggaggagatggccgtgagcgagcccagcgaggccctggagctggtgggcaccgacatcctgcccaagcccgtgatcagcgccagccccaccatcagaggccaggagctgcagctgagatgcaagggctggctggccggcatgggcttcgccctgtacaaggagggcgagcaggagcccgtgcagcagctgggcgccgtgggcagagaggccttcttcaccatccagagaatggaggacaaggacgagggcaactacagctgcagaacccacaccgagaagagacccttcaagtggagcgagcccagcgagcccctggagctggtgatcaaggagatgtaccccaagcccttcttcaagacctgggccagccccgtggtgacccccggcgccagagtgaccttcaactgcagcaccccccaccagcacatgagcttcatcctgtacaaggacggcagcgagatcgccagcagcgacagaagctgggccagccccggcgccagcgccgcccacttcctgatcatcagcgtgggcatcggcgacggcggcaactacagctgcagatactacgacttcagcatctggagcgagcccagcgaccccgtggagctggtggtgaccgagttctaccccaagcccaccctgctggcccagcccggccccgtggtgttccccggcaagagcgtgatcctgagatgccagggcaccttccagggcatgagattcgccctgctgcaggagggcgcccacgtgcccctgcagttcagaagcgtgagcggcaacagcgccgacttcctgctgcacaccgtgggcgccgaggacagcggcaactacagctgcatctactacgagaccaccatgagcaacagaggcagctacctgagcatgcccctgatgatctgggtgaccgacaccttccccaagccctggctgttcgccgagcccagcagcgtggtgcccatgggccagaacgtgaccctgtggtgcagaggccccgtgcacggcgtgggctacatcctgcacaaggagggcgaggccaccagcatgcagctgtggggcagcaccagcaacgacggcgccttccccatcaccaacatcagcggcaccagcatgggcagatacagctgctgctaccaccccgactggaccagcagcatcaagatccagcccagcaacaccctggagctgctggtgaccggcctgctgcccaagcccagcctgctggcccagcccggccccatggtggcccccggcgagaacatgaccctgcagtgccagggcgagctgcccgacagcaccttcgtgctgctgaaggagggcgcccaggagcccctggagcagcagagacccagcggctacagagccgacttctggatgcccgccgtgagaggcgaggacagcggcatctacagctgcgtgtactacctggacagcacccccttcgccgccagcaaccacagcgacagcctggagatctgggtgaccgacaagccccccaagcccagcctgagcgcctggcccagcaccatgttcaagctgggcaaggacatcaccctgcagtgcagaggccccctgcccggcgtggagttcgtgctggagcacgacggcgaggaggccccccagcagttcagcgaggacggcgacttcgtgatcaacaacgtggagggcaagggcatcggcaactacagctgcagctacagactgcaggcctaccccgacatctggagcgagcccagcgaccccctggagctggtgggcgccgccggccccgtggcccaggagtgcaccgtgggcaacatcgtgagaagcagcctgatcgtggtggtggtggtggccctgggcgtggtgctggccatcgagtggaagaagtggcccagactgagaaccagaggcagcgagaccgacggcagagaccagaccatcgccctggaggagtgcaaccaggagggcgagcccggcacccccgccaacagccccagcagcaccagccagagaatcagcgtggagctgcccgtgcccatctag

SEQ ID NO: 66955 - protein, 1327 aa, Artificial Sequence
  derived and/or modified sequence
MTLDRPGEGATMLKTFTVLLFCILMDPQPELWIESNYPQAPWENITLWCRSPSRISSKFLLLKDKTQMTWIRPSHKTFQVSFLIGALTESNAGLYRCCYWKETGWSKPSKVLELEAPGQLPKPIFWIQAETPALPGCNVNILCHGWLQDLVFMLFKEGYAEPVDYQVPTGTMAIFSIDNLTPEDEGVYICRTHIQMLPTLWSEPSNPLKLVVAGLYPKPTLTAHPGPIMAPGESLNLRCQGPIYGMTFALMRVEDLEKSFYHKKTIKNEANFFFQSLKIQDTGHYLCFYYDASYRGSLLSDVLKIWVTDTFPKTWLLARPSAVVQMGQNVSLRCRGPVDGVGLALYKKGEDKPLQFLDATSIDDNTSFFLNNVTYSDTGIYSCHYLLTWKTSIRMPSHNTVELMVVDKPPKPSLSAWPSTVFKLGKAITLQCRVSHPVLEFSLEWEERETFQKFSVNGDFIISNVDGKGTGTYSCSYRVETHPNIWSHRSEPLKLMGPAGYLTWNYVLNEAIRLSLIMQLVALLLVVLWIRWKCRRLRIREAWLLGTAQGVTMLFIVTALLCCGLCNGVLIEETEIVMPTPKPELWAETNFPLAPWKNLTLWCRSPSGSTKEFVLLKDGTGWIATRPASEQVRAAFPLGALTQSHTGSYHCHSWEEMAVSEPSEALELVGTDILPKPVISASPTIRGQELQLRCKGWLAGMGFALYKEGEQEPVQQLGAVGREAFFTIQRMEDKDEGNYSCRTHTEKRPFKWSEPSEPLELVIKEMYPKPFFKTWASPVVTPGARVTFNCSTPHQHMSFILYKDGSEIASSDRSWASPGASAAHFLIISVGIGDGGNYSCRYYDFSIWSEPSDPVELVVTEFYPKPTLLAQPGPVVFPGKSVILRCQGTFQGMRFALLQEGAHVPLQFRSVSGNSADFLLHTVGAEDSGNYSCIYYETTMSNRGSYLSMPLMIWVTDTFPKPWLFAEPSSVVPMGQNVTLWCRGPVHGVGYILHKEGEATSMQLWGSTSNDGAFPITNISGTSMGRYSCCYHPDWTSSIKIQPSNTLELLVTGLLPKPSLLAQPGPMVAPGENMTLQCQGELPDSTFVLLKEGAQEPLEQQRPSGYRADFWMPAVRGEDSGIYSCVYYLDSTPFAASNHSDSLEIWVTDKPPKPSLSAWPSTMFKLGKDITLQCRGPLPGVEFVLEHDGEEAPQQFSEDGDFVINNVEGKGIGNYSCSYRLQAYPDIWSEPSDPLELVGAAGPVAQECTVGNIVRSSLIVVVVVALGVVLAIEWKKWPRLRTRGSETDGRDQTIALEECNQEGEPGTPANSPSSTSQRISVELPVPI

SEQ ID NO: 66956 - DNA, 3984 bp, Artificial Sequence
  derived and/or modified sequence
atgacgcttgataggcctggcgagggagccacgatgctcaaaacatttaccgtgctgttgttctgcattctgatggatcctcaaccagagctgtggattgagtccaactatccccaggccccttgggagaatattacactgtggtgccgttcaccttcacgcatctcaagcaagtttctgctgcttaaggacaagacccagatgacatggatccgtcctagtcacaagacattccaggtttccttcctgattggagctctgaccgagagtaatgccggactctacagatgttgttattggaaggagacaggttggtcaaagccatctaaagtgcttgagttagaggccccagggcaactgcccaaaccaattttctggatccaagcggagactcccgccttgcctgggtgcaacgttaacatcctctgtcacggctggctgcaggacttggtgttcatgttgtttaaggaggggtatgctgagccagtggactaccaggttccaacaggcaccatggcaatcttctcaattgataatctgacccccgaagacgaaggggtgtacatctgtcggacacatatccagatgttgcccacattgtggtctgaaccgtcgaaccctctgaagttggtcgtagccggactctatcctaagcccaccttaactgcacatccagggcctataatggcgcctggagagtcattaaacctccggtgccaaggccccatctatggaatgaccttcgcacttatgcgggtagaggatctggagaaaagcttctatcacaagaagacgataaagaatgaggcgaattttttcttccagagcctgaaaattcaagacacaggtcattacctttgtttttattacgatgccagttatcggggcagtctgctgagtgatgtgctgaagatctgggtgacagacacatttccaaagacgtggctgctagctcgcccatcagccgttgtgcaaatggggcagaacgtatctttgaggtgtaggggcccagtggatggagtgggtctcgcgctgtataagaagggagaagataaacccctgcagtttttggacgctacatccatcgacgacaacacatccttcttcctcaacaatgttacctacagcgacacaggaatttactcctgtcactatctactgacctggaaaacatccatccggatgcccagccacaatacggtggaattaatggtggtggataaacctccaaagcctagtctgtccgcgtggccttccaccgtcttcaaacttgggaaagccatcaccctgcagtgccgggtatctcatcctgtgctggaattctcgctcgagtgggaggaaagggaaaccttccagaaattctcggttaacggcgactttatcatcagtaacgtggacggcaagggcacaggaacctacagttgctcttaccgggtggaaacccaccccaatatctggtctcaccggtcggaaccccttaagctgatgggacccgctggatatttaacctggaactacgtgcttaacgaagcgatacgcttgtcattaattatgcagctggttgctttgttgctggtggttctgtggatacgatggaagtgccgtagactccgaattcgcgaggcctggctcctgggcactgctcagggagtgaccatgctgttcattgtgaccgccctgctgtgctgcgggctgtgcaacggtgtgctcatcgaagaaactgagatcgtgatgcctacgcctaagcccgaactgtgggcagagaccaactttcccttagccccttggaaaaacctgacgctttggtgtcgatctccaagcggttccactaaggagttcgtacttcttaaggacggcaccgggtggatcgccacacgccccgcgtccgaacaggtacgggccgcctttcctctaggcgcactgactcagtcccacactgggtcctaccactgtcattcctgggaagagatggcggttagtgagccctccgaggcacttgaactcgtaggtaccgatattctccccaagcccgtgataagcgcttcccctacaatcaggggccaggagctgcagctgagatgtaaggggtggttggctggtatgggattcgcactatataaagagggtgagcaggaacccgtacagcagctgggggccgttggccgcgaggcgtttttcacaattcagcggatggaagataaagacgagggaaactattcctgtagaacacacacagagaagcgaccttttaaatggtcagagccttccgaacctttagaactagtgataaaggagatgtaccccaaacctttcttcaaaacatgggcctccccagttgtgactccaggtgctagggtcacgttcaactgcagcaccccgcaccagcatatgagcttcatactgtataaggatgggtccgagatcgcatctagcgacagatcctgggcgtcgcctggggcttcagccgcccacttcttgataatttccgtcggcattggggatggtggtaattattcctgccgatactacgacttctctatatggagcgaaccctcagatcccgtggaactggtcgtgactgagttctatcctaaaccaacgctgctggcccaacctgggccagtcgtattccccggcaaaagtgtcattctgaggtgccagggtacttttcagggaatgcggttcgcattgctccaggagggtgcgcacgtacccctgcagttcagatctgtgagcgggaatagtgcggatttccttttgcacactgtcggcgcagaggacagtgggaactactcctgcatctactatgagactactatgagcaatagggggtcttatcttagtatgcctcttatgatctgggttaccgatacttttcctaagccctggttatttgcggagccaagtagcgtggtgcctatgggccagaacgtgacactgtggtgtagaggcccagtccacggagtcggatacatccttcacaaagaaggcgaagccacttcaatgcagctctggggctcaacgtctaacgatggagctttccctattactaacatctctggcacttcgatggggaggtattcctgctgttatcaccccgactggacatcttcgattaagatccagccatcaaacaccctcgagctgcttgtgaccggtctgctccccaagcctagcttgctagctcaacccggaccaatggtagcccctggagagaacatgacactgcaatgccagggggagctccccgactctaccttcgtactcctcaaggaaggtgctcaagagcctcttgagcagcagcgcccttccggctatcgagccgacttttggatgcctgccgtccgaggcgaagatagcggcatttacagctgcgtgtactacctcgattccacaccttttgccgcaagcaatcattccgacagcttggagatctgggtgaccgacaaaccccctaaaccatcactgagtgcgtggccgtctacaatgttcaagcttggtaaagatatcactctccagtgtagggggcctctgccaggcgtcgagtttgttcttgaacatgacggcgaagaggctccgcagcagttcagcgaagatggcgatttcgtcattaacaatgtagaaggcaaagggattggcaactacagttgctcttaccggttgcaagcctaccctgatatttggtctgaaccttcagaccccctggagttggtaggtgccgccggaccagtagctcaggaatgcacagtggggaatatcgtgcgctcctccctcatcgtggtggttgtggtggcgctaggtgtagttcttgccatcgagtggaagaaatggcctagactgagaacacgaggctccgaaactgatggcagggaccagactatcgctctggaggagtgcaatcaagaaggagagccggggactccagctaattcaccaagcagcactagtcaacgaatttccgtcgaattaccagtaccgatctag

SEQ ID NO: 66957 - DNA, 3984 bp, Artificial Sequence
  derived and/or modified sequence
atgacgttggaccgtcccggtgagggagcaactatgttgaaaacctttaccgttctgctgttttgtattttaatggatcctcaacccgaactgtggatcgaatccaactacccgcaagcaccctgggaaaacattacactgtggtgccgctctccctcccggatcagcagcaagtttctcctcctgaaggataagactcagatgacttggatccgccctagtcacaaaacttttcaggtctctttcctgataggggccctaaccgagtccaacgccggactctatcggtgctgctactggaaggaaaccggttggagcaagcccagcaaagttttagagttggaagcccctggccagttaccaaagcctatcttttggattcaagcagagacccctgctttgcctggttgcaatgtgaatatcttgtgtcatggttggctccaggacttggtctttatgttgtttaaagagggctatgcggagccagtagattatcaggtccctacaggaactatggctatcttctcaatcgacaatctgacccccgaagacgaaggagtatacatttgcaggacacacatccagatgctacccacactgtggtccgaacccagcaatcccttgaagctagtcgttgctggcttgtatcctaaacctacccttaccgctcatccgggacccatcatggctccaggggaaagtttgaatctgcgctgtcaaggccccatatacgggatgacctttgccctcatgcgggtagaggacttggagaagagcttctatcataagaagacgatcaagaacgaggctaacttttttttccaaagcttaaaaatccaggatacaggacattatctgtgcttctactacgatgcatcgtatcgagggtctctcctgtccgacgtgcttaagatctgggtgaccgacaccttccccaaaacatggctgctggcacgcccctccgcagtggttcagatgggtcagaacgtgtcattgcggtgtcgaggaccagtcgatggggtgggactggcattgtacaagaaaggtgaggacaagcccctgcagttcctggatgctacgtcaatcgacgacaatacttccttcttcctcaataacgttacatacagcgacactggaatttactcttgccattacctcctgacttggaagaccagcatccgcatgccctcccacaataccgtggaactgatggtcgtagacaagcctcccaaacctagcctgagcgcttggccatccaccgtgttcaaactagggaaagcaattactctccagtgtcgagtgtctcatcctgtcctggaattctcactcgagtgggaggaacgcgagacatttcagaagttttctgtgaatggggacttcataatttccaacgtggatggaaaaggcacaggcacctacagctgttcttatagggtggaaacacacccaaacatctggtcccaccgcagcgagccgttaaagctgatgggcccggccgggtatctgacctggaattatgtgttgaacgaagctattaggctcagcttaattatgcagctggttgcgctactgctggtggtactttggattaggtggaaatgcaggcgcctccgcatccgcgaggcgtggcttctgggcacagcccagggcgtgacgatgttgttcatagtgactgccttgctctgctgcggactgtgcaacggagtgctcatcgaggagaccgagatcgttatgccaaccccgaaaccggaactatgggcagagaccaactttcccctcgctccttggaagaacttaaccttatggtgtcggtcaccgtccggctcaaccaaagagtttgtgctgctgaaggacggaacaggctggattgccacccgccctgcaagtgagcaggttagggccgccttccccctgggggctctgacccagtcacacaccgggtcctaccactgccactcttgggaagaaatggccgtttctgaacctagcgaagccttggagttggtcggcaccgatatcttgccaaagcccgtgatatctgccagtcccaccatccgcggacaggaattgcagctccggtgcaagggctggcttgccggtatgggatttgccctttataaagagggagaacaggagcccgtgcagcagcttggggcagtgggccgcgaggcgttttttaccatccagcgcatggaggataaggatgagggcaattactcttgtcggacgcacacagagaagcgtccattcaaatggtcggaaccgagtgaaccactcgaactggttattaaggagatgtacccaaagcccttttttaagacctgggcttccccagtggtaacacccggcgctcgtgtaacttttaactgctctactccccaccagcacatgagctttatactgtataaggatggatcagaaattgcatctagcgatcggtcgtgggcgtcaccaggcgcaagcgccgcccactttctgataatctcggtgggcatcggagatggggggaactactcttgtcgctactacgacttctcaatttggtccgaaccctccgatcctgtggagctggtggtcacagaattttaccccaagcccacactcctcgcccagcctggcccagtggtctttcccggcaagagcgttatcttaagatgccaggggacctttcaggggatgcgctttgctctcttgcaagagggcgcccatgtgccactacaattcagatctgtaagcggcaactcggctgacttcctactccatacagttggggccgaggactccggtaattattcatgcatttactacgagactacaatgagcaataggggatcctacctgagcatgccacttatgatctgggtgacagatactttccccaaaccgtggctgtttgccgagccaagttccgttgtgccaatggggcagaacgtgacactgtggtgtaggggtcccgtccacggagtaggctatattttgcacaaagagggagaggccacatcgatgcagctctggggatccacttcgaatgacggagcttttcctattacaaatatttcgggcacaagcatgggacgatactcttgttgttatcaccccgactggacgtcatctattaaaattcagccttcaaatacgctagagttactggtcacaggcctgctgcccaaaccttccctgctggcccagcccggacccatggtcgcccccggggagaacatgacccttcaatgtcagggtgaactgcccgattccacctttgtcctccttaaagaaggcgcccaggaacccctcgagcagcagaggccatcaggctacagggctgacttctggatgcctgctgtccgcggtgaggacagcggtatatactcctgcgtctattacctggattccaccccctttgctgcctccaaccattctgacagtctggagatttgggtgacagataagccccctaagccgtccctgtccgcatggcctagcaccatgttcaagcttggaaaggatatcactttgcaatgccgaggccctctgcccggcgtggaattcgtcctggagcacgacggggaggaggccccccagcagttctctgaggatggtgactttgttatcaacaatgtggagggcaaaggaattggtaactattcgtgttcgtaccggctccaggcttacccagacatttggagtgaacctagcgatccactagaactcgtaggtgcagccgggcccgtagcccaggagtgtaccgtgggaaatatcgtccgatcgtcactcattgtggtagttgtagtcgcactcggagtggtcctggcaatcgagtggaagaaatggcctcgccttcggacaaggggctcggagactgacggccgcgaccaaactattgccttagaggaatgcaaccaggagggagagcctggaacccctgccaactccccctctagtacttcccagcgcatttctgtagagttacccgtcccaatttag

SEQ ID NO: 66958 - DNA, 5180 bp, Artificial Sequence
  derived and/or modified sequence
atacaagtgatgccttcaaatttgagctcagtttcttatggtcgtttaggagcatgagggtttctgcaataatctaccagtgaaatgatgatcaagatcttggaaagcactctactggtcaagcagaatagttcctgtcatctccattaagaatcagcttattggccgggcgcagtggctcatgcctgtaatcccagcactttgggaggctgaggcgggtggatcacgaggtcaggagatcgagaccatcctgtctaacaaggaatcctttctggcactcaagagttttcaattcaatcctgatgaatgaatcattatttgataccagcctaagtgaagactctgcctggtgacttttgcaaggtggtttctggctgcaacatgggaagatttgggatcagtgagatggaagagatttttctggctactagcgttcctaagaaagagctttagtgtttatccagctattggtatgcagacaactatacccttatgagaaacactagcagagaagaagagttcttgactgggtctgggccatgaaactgaccggataaaagtgggagaagaagagatgttgaaggaggagtttgctgttttctcagtctcctgagaaattccagatatcttctttctacacacatcctggagaggggaaagaaagcctctctctgtcacccaggctggaatgcactggtgccatctccactcactgcagcttcaacctcctgggttcaagtgatcctcctgcctctcagccttccgagtagctgggactacagtttgctgcatctggaggagctcactggagaatctccaacatcggagcgggccttcaactaccatcccaccacctgctgaggagaaaaattcttcaagactcagagcacacagccagcaccagaggccccatgaccctggacagaccaggggagggggccaccatgctgaagacattcactgttttgctcttttgcattctgatggaccctcaaccagagttgtggatagagtccaactacccccaggccccttgggagaacatcacgctttggtgccgaagcccctctcggatatcaagcaagttcctgctgctgaaggataagacacagatgacctggatccgcccttcccacaagaccttccaagtttcattccttataggtgcccttactgagtccaatgcaggtctttaccggtgctgctactggaaggagacaggctggtcaaagcccagtaaagttctagagttggaggcaccaggccaactgcccaagcccatcttctggattcaggctgagacccccgctcttcctgggtgtaatgttaacatcctctgccatggctggctgcaggatttggtattcatgctgtttaaagagggatatgcagagcctgtggattaccaagtcccaactgggacaatggccatattctccattgacaacctgacacctgaggatgaaggggtttacatctgccgcactcatatccagatgctccccaccctgtggtcagagcccagcaaccccctgaagctggttgtagcaggactctaccccaaaccaactttgacagcccatcctgggcccatcatggcacctggagaaagcctgaatctcaggtgccaagggccaatctatggaatgacctttgctctaatgagggttgaagacttggagaagtccttttaccacaagaagacaataaaaaatgaggcaaatttcttcttccagtctttgaagatccaagatactggacattacctctgtttttactatgacgcatcatatagaggttcactccttagtgatgtcctgaaaatctgggtgactgacactttccccaagacctggctacttgctcggcccagtgctgtggtccaaatgggtcagaatgtgagcctacggtgtcgaggaccagtggatggagtgggtcttgcactctataagaaaggagaagacaaaccacttcaatttttggatgccaccagcatcgatgacaacacatcattcttcctcaacaatgtaacctacagtgatactggcatctatagctgccactatcttctcacctggaagacctccattaggatgccatcacacaacactgtggagcttatggttgtagataagccccccaaaccctccctgtcagcttggccaagcactgtgttcaagctaggaaaggccatcacccttcagtgccgagtatctcatccagtactggaattttctctggaatgggaagaaagagaaacattccaaaaattctcagtaaacggagacttcatcatcagtaatgttgacgggaaaggcacagggacctacagttgcagctatcgcgtagagacacatcctaacatctggtcacatcgcagtgagcccctgaagctgatggggccagcaggctatctcacctggaattacgttctgaatgaagctatcaggttgtctctaatcatgcagcttgttgccttgctgttggtagtgctgtggataaggtggaagtgtcggagactcagaatcagagaagcctggttgctgggaacagctcaaggggtcaccatgctcttcatagtcacggcccttctctgctgtggactgtgcaatggggtattgatagaagagactgaaatagtcatgccaacccctaagcctgagctgtgggcagagaccaactttcctctggccccgtggaagaacttaaccctctggtgcagaagcccttctggctcaactaaggagtttgtgttgctgaaggatgggaccgggtggatcgccactcgcccggcctcagagcaggtccgggctgccttcccccttggcgccctgacccagagccacaccgggagctaccactgccattcatgggaggagatggctgtatcggagcccagtgaggcacttgagctggtggggacagacatcctccccaaacctgtcatttctgcttcccccacaatccggggccaggaactacaactccggtgcaaaggatggctggcaggcatggggtttgctctgtataaggagggagagcaagaacctgtccagcaacttggtgctgttggaagagaagccttctttacaatccagagaatggaggataaagacgaaggcaattacagctgccgcactcacactgaaaaacgccccttcaagtggtctgagcccagtgagccgctggagcttgtcataaaagaaatgtaccctaagcccttcttcaagacatgggccagccctgtggtcacccctggtgcccgagtgactttcaattgctccaccccccaccagcatatgagctttattctttacaaagatggaagtgaaatagcatccagtgacaggtcctgggcaagtccgggggccagtgcagctcactttctaatcatttcggtgggcattggtgatggagggaattacagctgccgatattatgacttttctatctggtctgagcccagcgaccctgtggagctcgtggtgacagaattctaccccaaacccactctcctggcacagccaggtcctgtggtgtttcctgggaagagtgtgatcctgcgctgccaagggactttccagggcatgaggttcgccctcttgcaggagggagcccatgttcccttacagtttcggagtgtctcagggaactcagctgacttccttctccacactgttggagcagaggactctgggaactatagctgtatctactatgagacaaccatgtcaaacagggggtcatatctcagtatgccccttatgatctgggtgactgacacattccctaagccatggttgtttgctgagcccagttctgtggttcccatggggcagaatgttactctctggtgccgagggccggtccatggagtaggatacattctgcacaaagaaggagaagccacttcaatgcagctctggggatccaccagtaatgacggggcattccccatcaccaatatatctggtactagcatggggcgttacagctgctgctaccaccctgactggaccagttctatcaagatacaacctagcaacaccctggaactcctagtcacaggcttactccccaaacccagcctattagcccagcctggtcccatggtggcccctggcgaaaatatgactcttcagtgtcaaggggaactgccagactcaacatttgtcctgttgaaggagggggctcaggagcctttagagcaacagaggccaagtgggtacagggctgacttctggatgccagcagtgagaggtgaagactctgggatctatagctgtgtttattatttggactctactccctttgcagcttcaaatcacagtgactccctggagatctgggtgactgataagccccctaaaccctctctgtcagcctggcccagcaccatgttcaagttagggaaggacatcacccttcagtgccgaggacccctgccaggtgttgaatttgtcctagaacatgatggagaagaagcacctcagcagttttcagaggatggagactttgtcatcaacaacgtagaaggaaaaggcattggaaactacagctgcagctaccgcctccaggcctaccctgatatctggtcagagcctagtgatcccctggagctggtgggggcagcagggcctgttgctcaggagtgcactgtagggaacattgtccgaagtagcctaatcgtggtggttgttgtagccttgggggtagtgctagccatagagtggaagaagtggcctcgactgcgaaccagaggctcagagacagacggaagagaccagaccattgcccttgaagagtgtaaccaagaaggagaaccaggcacccctgccaattctccttcatcaacctctcagagaatctctgtggaactgcccgttccaatataataatctcctcctttacaagagctttcctctcctctctcttgctctcagagacctataaatccaaccagttaccctgcaagtcagccccatctgctgttccttggtctctaatcacctgagctgggtaaaggggattctgggagttgagagctctgccagggtgagatgtttcctgaagagaggttccccacccctgtaactcctcactgtactgatttactggcgcatgaaattctattaaaaatgcattcttctgaataaaaagagtattcactatttaacttc

SEQ ID NO: 66959 - DNA, 4406 bp, Artificial Sequence
  derived and/or modified sequence
cagtttgctgcatctggaggagctcactggagaatctccaacatcggagcgggccttcaactaccatcccaccacctgctgaggagaaaaattcttcaagactcagagcacacagccagcaccagaggccccatgaccctggacagaccaggggagggggccaccatgctgaagacattcactgttttgctcttttgcattctgatggaccctcaaccagagttgtggatagagtccaactacccccaggccccttgggagaacatcacgctttggtgccgaagcccctctcggatatcaagcaagttcctgctgctgaaggataagacacagatgacctggatccgcccttcccacaagaccttccaagtttcattccttataggtgcccttactgagtccaatgcaggtctttaccggtgctgctactggaaggagacaggctggtcaaagcccagtaaagttctagagttggaggcaccaggccaactgcccaagcccatcttctggattcaggctgagacccccgctcttcctgggtgtaatgttaacatcctctgccatggctggctgcaggatttggtattcatgctgtttaaagagggatatgcagagcctgtggattaccaagtcccaactgggacaatggccatattctccattgacaacctgacacctgaggatgaaggggtttacatctgccgcactcatatccagatgctccccaccctgtggtcagagcccagcaaccccctgaagctggttgtagcaggactctaccccaaaccaactttgacagcccatcctgggcccatcatggcacctggagaaagcctgaatctcaggtgccaagggccaatctatggaatgacctttgctctaatgagggttgaagacttggagaagtccttttaccacaagaagacaataaaaaatgaggcaaatttcttcttccagtctttgaagatccaagatactggacattacctctgtttttactatgacgcatcatatagaggttcactccttagtgatgtcctgaaaatctgggtgactgacactttccccaagacctggctacttgctcggcccagtgctgtggtccaaatgggtcagaatgtgagcctacggtgtcgaggaccagtggatggagtgggtcttgcactctataagaaaggagaagacaaaccacttcaatttttggatgccaccagcatcgatgacaacacatcattcttcctcaacaatgtaacctacagtgatactggcatctatagctgccactatcttctcacctggaagacctccattaggatgccatcacacaacactgtggagcttatggttgtagataagccccccaaaccctccctgtcagcttggccaagcactgtgttcaagctaggaaaggccatcacccttcagtgccgagtatctcatccagtactggaattttctctggaatgggaagaaagagaaacattccaaaaattctcagtaaacggagacttcatcatcagtaatgttgacgggaaaggcacagggacctacagttgcagctatcgcgtagagacacatcctaacatctggtcacatcgcagtgagcccctgaagctgatggggccagcaggctatctcacctggaattacgttctgaatgaagctatcaggttgtctctaatcatgcagcttgttgccttgctgttggtagtgctgtggataaggtggaagtgtcggagactcagaatcagagaagcctggttgctgggaacagctcaaggggtcaccatgctcttcatagtcacggcccttctctgctgtggactgtgcaatggggtattgatagaagagactgaaatagtcatgccaacccctaagcctgagctgtgggcagagaccaactttcctctggccccgtggaagaacttaaccctctggtgcagaagcccttctggctcaactaaggagtttgtgttgctgaaggatgggaccgggtggatcgccactcgcccggcctcagagcaggtccgggctgccttcccccttggcgccctgacccagagccacaccgggagctaccactgccattcatgggaggagatggctgtatcggagcccagtgaggcacttgagctggtggggacagacatcctccccaaacctgtcatttctgcttcccccacaatccggggccaggaactacaactccggtgcaaaggatggctggcaggcatggggtttgctctgtataaggagggagagcaagaacctgtccagcaacttggtgctgttggaagagaagccttctttacaatccagagaatggaggataaagacgaaggcaattacagctgccgcactcacactgaaaaacgccccttcaagtggtctgagcccagtgagccgctggagcttgtcataaaagaaatgtaccctaagcccttcttcaagacatgggccagccctgtggtcacccctggtgcccgagtgactttcaattgctccaccccccaccagcatatgagctttattctttacaaagatggaagtgaaatagcatccagtgacaggtcctgggcaagtccgggggccagtgcagctcactttctaatcatttcggtgggcattggtgatggagggaattacagctgccgatattatgacttttctatctggtctgagcccagcgaccctgtggagctcgtggtgacagaattctaccccaaacccactctcctggcacagccaggtcctgtggtgtttcctgggaagagtgtgatcctgcgctgccaagggactttccagggcatgaggttcgccctcttgcaggagggagcccatgttcccttacagtttcggagtgtctcagggaactcagctgacttccttctccacactgttggagcagaggactctgggaactatagctgtatctactatgagacaaccatgtcaaacagggggtcatatctcagtatgccccttatgatctgggtgactgacacattccctaagccatggttgtttgctgagcccagttctgtggttcccatggggcagaatgttactctctggtgccgagggccggtccatggagtaggatacattctgcacaaagaaggagaagccacttcaatgcagctctggggatccaccagtaatgacggggcattccccatcaccaatatatctggtactagcatggggcgttacagctgctgctaccaccctgactggaccagttctatcaagatacaacctagcaacaccctggaactcctagtcacaggcttactccccaaacccagcctattagcccagcctggtcccatggtggcccctggcgaaaatatgactcttcagtgtcaaggggaactgccagactcaacatttgtcctgttgaaggagggggctcaggagcctttagagcaacagaggccaagtgggtacagggctgacttctggatgccagcagtgagaggtgaagactctgggatctatagctgtgtttattatttggactctactccctttgcagcttcaaatcacagtgactccctggagatctgggtgactgataagccccctaaaccctctctgtcagcctggcccagcaccatgttcaagttagggaaggacatcacccttcagtgccgaggacccctgccaggtgttgaatttgtcctagaacatgatggagaagaagcacctcagcagttttcagaggatggagactttgtcatcaacaacgtagaaggaaaaggcattggaaactacagctgcagctaccgcctccaggcctaccctgatatctggtcagagcctagtgatcccctggagctggtgggggcagcagggcctgttgctcaggagtgcactgtagggaacattgtccgaagtagcctaatcgtggtggttgttgtagccttgggggtagtgctagccatagagtggaagaagtggcctcgactgcgaaccagaggctcagagacagacggaagagaccagaccattgcccttgaagagtgtaaccaagaaggagaaccaggcacccctgccaattctccttcatcaacctctcagagaatctctgtggaactgcccgttccaatataataatctcctcctttacaagagctttcctctcctctctcttgctctcagagacctataaatccaaccagttaccctgcaagtcagccccatctgctgttccttggtctctaatcacctgagctgggtaaaggggattctgggagttgagagctctgccagggtgagatgtttcctgaagagaggttccccacccctgtaactcctcactgtactgatttactggcgcatgaaattctattaaaaatgcattcttctgaataaaaagagtattcactatttaacttcaaaaa

SEQ ID NO: 66960 - DNA, 3984 bp, Artificial Sequence
  derived and/or modified sequence
atgaccctggacaggcctggagagggcgccaccatgctgaagaccttcaccgtgctgctcttctgcatcctgatggacccccagcctgagctgtggattgagagcaactacccccaggccccctgggagaacatcaccctgtggtgccgcagccccagccgcatcagcagcaagttcctgctgctgaaggacaagacccagatgacctggatccggcccagccacaagaccttccaggtgtccttcctgattggagccctgacagagagcaatgccggcctgtaccgctgctgctactggaaggagaccggctggagcaagcccagcaaggtgctggagctggaggcccctggccagctgcccaagcccatcttctggatccaggccgagaccccagccctgcccggctgcaatgtgaacatcctgtgccacggctggctgcaggacctggtgttcatgctgttcaaggagggctacgccgagcctgtggactaccaggtgcccaccggcaccatggccatcttcagcattgacaacctgaccccagaagatgagggcgtgtacatctgcaggacccacatccagatgctgcccaccctgtggagcgagcccagcaaccccctgaagctggtggtggccggcctgtaccccaagcccaccctgacagcccaccctggccccatcatggcccctggagagagcctgaacctgcgctgccagggccccatctacggcatgacctttgccctgatgagggtggaggacctggagaagagcttctaccacaagaagaccatcaagaatgaggccaacttcttcttccagagcctgaagatccaggacaccggccactacctgtgcttctactatgatgccagctaccggggcagcctgctgagtgatgtgctgaagatctgggtgacagacaccttccccaagacctggctgctggcccggcccagcgctgtggtgcagatgggccagaatgtgtccctgcgctgccggggccctgtggatggagtgggcctggccctgtacaagaagggggaggacaagcccctgcagttcctggatgccaccagcattgatgacaacaccagcttcttcctgaacaacgtgacctacagcgacaccggcatctacagctgccactacctgctgacctggaagaccagcatccgcatgcccagccacaacacagtggagctgatggtggtggacaagccacccaagcccagcctgagcgcctggcccagcaccgtcttcaagctgggcaaggccatcaccctgcagtgccgggtgagccaccctgtgctggagttcagcctggagtgggaggagcgggagaccttccagaagttctctgtgaatggagacttcatcatcagcaatgtggatggcaagggcaccggcacctacagctgcagctacagagtggagacccaccccaacatctggagccacaggtctgagcccctgaagctgatgggccctgctggctacctgacctggaactacgtgctgaatgaggccatccggctgagcctcatcatgcagctggtggccctgctgctggtggtgctgtggatccgctggaagtgccggcggctgcgcatccgggaggcctggctgctgggcacagcccagggcgtgaccatgctgttcatcgtgacagccctgctgtgctgcggcctgtgcaatggagtgctgattgaggagacagagatcgtgatgcccacccccaagccagagctgtgggccgagaccaacttccccctggccccctggaagaacctgaccctgtggtgccgcagccccagcggcagcaccaaggagtttgtgctgctgaaggatggcaccggctggatcgccaccaggcctgccagcgagcaggtgcgggccgccttccccctgggcgccctgacccagagccacacaggcagctaccactgccacagctgggaggagatggctgtgtctgagcccagcgaggccctggagctggtgggcacagacatcctgcccaagcctgtgatcagcgccagccccaccatccggggccaggagctgcagctgcgctgcaagggctggctggccggcatgggctttgccctgtacaaggagggggagcaggagcctgtgcagcagctgggcgctgtgggccgggaggccttcttcaccatccagaggatggaggacaaggatgagggcaactacagctgcaggacccacacagagaagaggcccttcaagtggagcgagcccagcgagcccctggagctggtgatcaaggagatgtaccccaagcccttcttcaagacctgggccagccctgtggtgacccctggggcccgggtgaccttcaactgcagcaccccccaccagcacatgtccttcatcctgtacaaggatggcagcgagatcgccagcagtgaccgctcctgggccagccctggggccagcgctgcccacttcctgatcatctctgtgggcattggagatggcggcaactacagctgccgctactatgacttcagcatctggagcgagcccagcgaccctgtggagctggtggtgacagagttctaccccaagcccaccctgctggcccagcccggccctgtggtgtttcctgggaagagcgtcatcctgcgctgccagggcaccttccagggcatgagatttgccctgctgcaggagggcgcccacgtgcccctgcagttccgctctgtgtctggcaacagcgctgacttcctgctgcacacagtgggcgctgaggacagcggcaactacagctgcatctactatgagaccaccatgagcaacagaggcagctacctgtccatgcccctgatgatctgggtgacagacaccttccccaagccctggctgtttgctgagcccagctctgtggtgcccatgggccagaatgtgaccctgtggtgccggggccctgtgcatggagtgggctacatcctgcacaaggagggggaggccacctccatgcagctgtggggcagcaccagcaatgatggagccttccccatcaccaacatcagcggcacctccatgggccgctacagctgctgctaccacccagactggaccagcagcatcaagatccagcccagcaacaccctggagctgctggtgacaggcctgctgcccaagcccagcctgctggcccagcccggccccatggtggcccctggagagaacatgaccctgcagtgccagggcgagctgcctgacagcacctttgtgctgctgaaggagggcgcccaggagcccctggagcagcagaggcccagcggctacagagctgacttctggatgcctgctgtgcggggggaggacagcggcatctacagctgtgtgtactacctggacagcaccccatttgctgccagcaaccacagcgacagcctggagatctgggtgacagacaagccacccaagcccagcctgagcgcctggcccagcaccatgttcaagctgggcaaggacatcaccctgcagtgccggggccccctgcccggggtggagtttgtgctggagcatgatggagaggaggccccccagcagttctctgaagatggagactttgtgatcaacaacgtggagggcaagggcatcggcaactacagctgcagctaccgcctgcaggcctacccagacatctggagcgagcccagcgaccccctggagctggtgggcgctgctggccctgtggcccaggagtgcaccgtgggcaacatcgtgcgcagcagcctgattgtggtggtggtggtggccctgggcgtggtgctggccatcgagtggaagaagtggccccggctgcggacccggggcagcgagacagatggccgggaccagaccatcgccctggaggagtgcaaccaggagggggagcccggcaccccagccaacagccccagcagcaccagccagaggatctctgtggagctgcctgtgcccatctag

SEQ ID NO: 66961 - DNA, 3984 bp, Artificial Sequence
  derived and/or modified sequence
atgaccctggaccggcccggcgagggcgccaccatgctgaagaccttcacggtcctcctcttttgtatactcatggacccacagcctgagctctggatagagtccaactacccccaggccccttgggaaaatatcacactgtggtgcagaagcccgagcaggataagcagtaaatttttactgcttaaggacaaaactcagatgacttggattcggccgtctcataaaacgtttcaagtcagttttctgattggtgccctgaccgagtccaatgcgggcttgtaccgctgctgttactggaaggaaaccggctggtcgaagccttcaaaagtcttagagctagaagctcccggtcagctccccaaacctattttctggatccaggccgagacaccagccctaccaggctgtaacgtgaatattctgtgccacggttggctccaggacctggtattcatgctctttaaggagggttacgcggagcctgtggactaccaggtgcccactgggacgatggcaatattttcaattgataacttgacccctgaggatgagggagtgtacatctgccggacgcacatccagatgctccccactctgtggagcgagccgtctaaccccttaaagcttgtggtggcgggactctacccaaagccgaccctaacagcacacccaggaccaatcatggcccccggtgaatcactcaacttaagatgtcaggggcctatctacggcatgacatttgcattgatgagggtggaggacctggaaaaatcattttatcacaaaaagacgattaagaatgaggccaatttttttttccagtccctgaagatacaagacacggggcattacctctgcttctattacgatgcttcttatcgcggatccttgctttccgacgtgttgaagatctgggttacagatacatttcctaagacgtggctactggcaagaccctctgctgtagttcagatgggtcagaacgtgtcactccgctgtcggggccctgttgacggtgttggtcttgcgctgtataaaaaaggcgaggacaagcctctgcagttccttgacgccacaagcatcgatgataacacatcctttttcctgaataacgtgacttactccgacactggaatttattcatgccattatctcctgacctggaagacaagcatccgaatgccgtctcacaataccgtagagttaatggtcgtggataaaccccctaagcccagcctttcagcctggccttccaccgtcttcaagctgggcaaagctatcacactccagtgtcgtgtcagccaccctgtccttgagttctctctagaatgggaggaacgcgaaaccttccaaaagttctctgttaatggcgattttataatctcgaacgtcgacggcaagggcacaggaacctactcctgctcctatcgcgttgagacacaccctaatatatggagccacaggtccgagcctttaaaactgatggggcctgcaggttacctaacctggaattacgtgctgaatgaggcgattcggctgagcctaatcatgcagcttgtggcgctcctcctcgtggtactgtggatcagatggaagtgcagacggcttcgtatcagggaggcgtggttacttggcacagcccagggggtcaccatgctgtttatcgtgactgctctgttgtgttgtggcttgtgcaatggtgttctgattgaagaaacagagattgtgatgcccacacctaaacccgaattatgggccgagaccaacttcccactcgccccttggaagaatcttaccctatggtgcaggagcccaagcggctccacaaaagaattcgtgctgctgaaagatggcaccggctggattgctactcgcccagcctctgagcaagtaagggccgcgttcccacttggcgctctgacccagtcccacacgggctcctatcactgccactcatgggaggaaatggcagtcagtgagcctagcgaggctctcgagcttgttgggactgatatactgcccaaacccgtgattagcgcctcccctacaatacggggacaagagctgcagctgaggtgcaaagggtggctcgctgggatgggattcgccctatacaaggagggtgaacaggaacccgtgcagcagttgggcgctgtgggcagggaggccttttttaccattcagcgcatggaggataaggacgagggcaattacagttgcagaactcacaccgagaaaagaccctttaaatggtcagagccaagtgagcctctggagctggtgattaaagaaatgtacccaaaacccttttttaaaacctgggccagtcctgtggtcaccccgggcgctagagtgacctttaattgctccactccccaccagcacatgtctttcatcctgtacaaggacggatccgaaattgcttcttcggacagaagctgggctagtcccggagccagcgcagctcattttttaattatttctgtaggaataggcgatggcggcaattattcttgccgttactatgacttttccatctggtccgaaccctccgatccagtggagctggtagtaacagaattttaccccaaaccaacactgcttgcacagccgggaccggtggtgtttcccgggaaatccgtgatactgcggtgtcaggggacctttcaggggatgcggttcgccctgctgcaggagggcgctcatgtccccctgcagtttcgttccgtgagtggcaactctgcggattttttgttgcacacagtcggggccgaggactctggcaactactcatgtatctactatgaaaccactatgtctaaccggggctcttaccttagcatgcctctgatgatttgggtgacagacaccttccccaaaccgtggttgtttgccgagcctagttctgtggttcctatggggcagaacgtgacactatggtgtagaggtccggtgcatggtgtgggttacattcttcacaaggaaggagaggcgaccagtatgcaattgtggggctccacatcgaacgacggcgctttccccattactaatatttcgggaacttcaatgggccgatattcctgttgttatcacccagactggacttcatcaataaaaatacagccgtcgaacaccctggaactgctggtgaccgggttgttgcctaagccgtcactcctcgcacagcccggcccgatggtggcaccgggcgaaaatatgaccctacagtgtcagggtgagcttcctgattcaacatttgtgctgctgaaggagggcgcccaggagcccctcgaacagcagagaccttcaggatatcgggctgatttctggatgccagccgtgcggggcgaggactctgggatttatagctgcgtctactatttggactcaactccatttgcagcttccaatcactcagacagtttagagatctgggtgacagacaagcctcccaagccatcgctgtccgcatggccatcaacgatgtttaaattagggaaggatatcacacttcagtgcaggggtccacttccaggagtcgagttcgtcctcgaacacgacggagaggaagcccctcagcagttttcagaagatggcgactttgtcattaataacgtggagggaaaaggcataggtaactactcatgcagctatagacttcaggcctatccggatatctggagcgaaccctcagacccactcgaactggtgggcgccgccgggccggtcgctcaagagtgcacagtagggaacatcgtcagatcaagcctaatagttgtggtggtggttgcactaggcgtagtgctcgctatagaatggaagaagtggccgcggctaaggacccggggcagcgaaaccgatgggagggaccagactattgcactggaggaatgcaaccaggagggagaacccgggaccccagccaactccccttcatctacgtcccagaggattagtgttgagctccctgtgccaatatag

SEQ ID NO: 66962 - DNA, 3984 bp, Artificial Sequence
  derived and/or modified sequence
atgaccctggaccggcccggcgagggcgccaccatgctgaagaccttcacagttctgttattctgtatactgatggacccccagcctgaactgtggatagagagtaattatcctcaagcaccatgggagaacatcactctgtggtgtcgctccccaagccgaatcagcagcaaattcctgctgttaaaggataagactcaaatgacgtggattaggcccagccataaaacatttcaggtttctttcttgatcggcgcactgactgagtctaatgcaggcctgtataggtgctgttattggaaggagacggggtggagcaaacccagtaaggttctcgaactggaggcacccggccagttacctaagccgatcttctggatccaggcagaaacccctgcgctcccaggatgtaacgtgaatatcttgtgccacggatggctccaagacctggtgttcatgcttttcaaagagggctacgccgaaccagtagattaccaggtgcccacaggaacaatggctatcttctccattgacaaccttacaccagaggatgagggggtttacatatgtcggacacacatccagatgctgccaacactgtggagcgagccctcaaaccccctcaagttggtggtcgcgggcctttacccgaagccgaccttgactgctcacccaggccccattatggcgcctggcgaaagcctcaaccttagatgtcaagggcccatctacggaatgacttttgccttaatgcgggtcgaagatctggagaagagcttctaccataagaagactattaagaatgaggcaaactttttctttcagtcgctgaaaatacaagacactgggcattatctgtgcttctattatgatgcaagttaccgcggaagtctgttaagtgatgttctgaagatctgggtgacagatacttttccaaagacttggttgctcgctcgcccttctgctgtagtccagatgggccagaatgtgagtttgcgctgccgcggccccgtggatggagtcggccttgcgctctacaaaaaaggtgaagacaagccactccagtttctcgacgctacctctatcgacgataacacatctttcttcttgaacaacgtcacgtactcggatactggaatatactcttgccactatctgttgacctggaagacttcgatccgtatgccctctcacaacaccgtcgagcttatggtggtcgacaaacctccaaagccatcacttagcgcttggccgagtaccgtatttaagttgggcaaggccatcacactgcagtgtcgtgtgtctcaccccgtcctggagttttccctcgaatgggaggagagagagaccttccagaagttctccgtgaatggcgatttcatcatttctaacgtcgacggaaaaggcaccggaacgtactcatgttcctacagagtcgaaactcatcccaatatttggagccacagaagcgaacctctgaaactaatgggacctgctggctatctgacctggaactatgtacttaatgaagcaatacggttgtccctcataatgcaactggtcgccctgctcctggtggtcctgtggataagatggaaatgtaggcggctccgaattcgggaggcctggctccttggcaccgcccagggagtgacaatgctgttcatcgtgactgccctactttgttgtggcttgtgtaacggcgtgttaatcgaagagactgaaatcgtgatgccgactccaaagccagagttgtgggcagagactaatttccccctcgcaccatggaaaaaccttaccctttggtgcagatctccatcagggtctacgaaggagtttgttcttttgaaagacggtactggttggatcgccacgaggcctgcgagtgaacaggtccgagccgccttcccattaggggcgcttacccaatcccacactgggtcctaccactgccacagttgggaagagatggcagtgtctgagcccagtgaagcccttgagctggtaggtaccgacatccttccaaaacctgttatatcagcgagccctactatccggggccaggagctgcagctacgttgtaaaggctggctcgccggcatgggcttcgcactctataaagagggcgagcaagaacccgtgcagcagttaggagctgttggaagagaagcatttttcacaattcagagaatggaagacaaggacgaaggtaattattcttgcagaacccatacggaaaagcgtccttttaagtggtcagagccatccgagccgctggagttggtgattaaagaaatgtaccctaaacctttttttaagacttgggcctcaccagttgtcacgcccggagcgcgagtgactttcaattgttctacccctcaccagcacatgtcctttatcctttacaaggacggcagcgaaatagcctcttctgatcgtagttgggccagcccaggtgcttcagcagcgcactttctcataattagcgtcggcatcggcgatgggggcaactacagctgtaggtactacgacttctctatttggtccgaacctagcgatccggtggagctggttgtgaccgaattttatcccaaacctacgctcttagcacagccaggaccagtggtatttcctgggaaaagtgtgattctgcggtgccaggggacatttcagggcatgagatttgcgctgctacaggagggggcccatgttcccctgcagttccgttcagtaagtggcaactccgccgatttcctgctgcatactgtgggtgccgaggacagcgggaactactcctgtatatactacgaaactactatgtccaatcgcggaagttacctgagcatgcccttgatgatttgggttaccgacacctttccaaagccctggctgttcgccgaacctagtagcgtcgttcccatgggccagaacgtgaccttatggtgtcggggacctgtgcatggggttgggtacatcctgcacaaggagggggaagctacatctatgcagctgtggggctcaacttctaacgacggtgcctttcctatcaccaacatttctggtacctctatgggacggtattcatgctgttatcacccggattggaccagtagcatcaaaatccaaccatccaataccctggaacttcttgttacaggactgcttcctaagccttcgctccttgcacaacctggccctatggtggctcccggggaaaatatgaccttgcagtgtcagggggaattgcccgatagcaccttcgtcttattaaaagagggtgcccaggagcctctagagcagcagaggccgagtggatatcgagcagatttctggatgcctgcagtgagaggagaagattcgggcatttattcttgtgtatattacctcgacagtacgccgtttgcagccagcaaccattctgattcactcgagatatgggttaccgacaagccccctaagcccagcctttcagcctggccgtctaccatgttcaaactggggaaggatataactctgcagtgccgcgggcccctgcccggtgtggaatttgtcctggagcacgacggtgaggaagccccccagcagtttagcgaggatggagacttcgtaattaacaatgtggagggcaaagggattggaaactattcttgctcgtataggttacaggcttacccagacatctggtctgagccctccgatcctctggagctcgtgggcgcggcgggacccgtagctcaagagtgtaccgtgggcaatattgtgagatcgtcactcatagtcgttgttgtagttgctctgggcgtcgtgctagctatagaatggaagaagtggcctaggctccgaacacgaggctccgagaccgacggtagagaccagacaatcgccttggaggagtgtaatcaggagggcgaacctgggactccagctaacagcccctcttcaacatcccaaagaatctccgtggagctcccagtgcccatttag

SEQ ID NO: 66963 - DNA, 3984 bp, Artificial Sequence
  derived and/or modified sequence
atgaccctggatagacccggagaaggggcaaccatgttgaagacctttactgtactcctgttttgtatactgatggatccacagcccgaactatggattgaatccaattacccgcaggctccatgggaaaatataacattatggtgccggagcccgagcagaattagtagtaaatttctgttgctcaaagacaaaacccagatgacatggattagaccaagtcacaaaacctttcaagtaagcttcttaatcggagcacttaccgagagtaacgccggtctttaccgctgctgctactggaaggagaccggatggtctaagccttctaaggtgctggagctcgaagcgcctggtcaattgcccaagcctatcttctggatccaggcagagaccccggctctgccagggtgcaacgttaatatactctgccacgggtggctgcaggacttggtgttcatgcttttcaaggaagggtacgcagagcctgttgactaccaggtgccgaccggtaccatggctatattcagcattgataacctgactcccgaggacgaaggtgtctacatttgccggacccacatccagatgctccctactctttggagcgaaccgtctaacccgctgaagctggtggttgccggactgtacccaaagcctacactgaccgcacaccctggccctataatggccccaggtgaatccctgaatctgcgctgccagggaccaatctatggaatgacattcgctttaatgcgggtcgaagacttagaaaagtctttctatcacaagaagacaatcaaaaatgaagccaacttcttctttcaaagtctgaagatccaggacactgggcattatctttgcttctactacgacgccagctatcgcggatctctgctgtcagacgttcttaagatttgggtcacagatacctttcccaagacatggttgctcgcgaggccgtcggcagttgtgcagatgggccagaatgttagtctgcgttgcagggggccagtcgacggggtgggattagccttgtacaagaagggtgaagataaaccactccaattcctcgacgcaacctccatcgatgataatacatcttttttcttgaacaatgtgacttattctgatacaggaatctactcctgccactacctactgacttggaagaccagcattagaatgccttctcataacacagtcgaactgatggtggtcgacaagcccccaaagccgagcctcagcgcatggccgtctacagtgtttaaactcggcaaggccattactctccagtgcagagtgtcccacccagtgctggagttttcactagaatgggaggagcgggaaaccttccagaagtttagcgtgaacggagatttcataatcagcaatgtggatgggaaagggactgggacctacagctgctcataccgcgtagaaacacaccctaacatctggtctcacagatctgagcccctgaaattaatgggacctgccggatacttgacctggaattacgtgcttaatgaagccatccgcctatctctgattatgcagctggtggccctcctcctggtagtgctgtggatcagatggaagtgcagacgacttcgaattcgggaagcttggcttctggggacagcccagggcgtcacaatgctcttcattgtcactgccctgctgtgctgcgggctctgcaacggcgttttgattgaggaaactgaaattgtgatgcccacacccaagcccgagttgtgggctgaaacaaatttcccgttggcaccgtggaagaaccttactctgtggtgtcgaagtccctctgggtctacaaaggagtttgtcctgctaaaagatgggactggctggatagcaacaaggccagccagtgagcaggtcagggccgcattcccgctgggggcactgacccagagccatacagggtcgtaccactgtcattcctgggaggaaatggcagttagcgagccctcagaagcgctggagctggtcggcacagatatcctgccaaaaccagttatcagtgcttctccgaccatccgcggtcaggaactacaattgcgctgtaaggggtggctagctggaatgggcttcgctctttataaggaaggcgagcaggagccagtacagcagctgggggcagtggggcgtgaggcatttttcactatccaacggatggaggataaggacgaagggaactactcttgcaggacccacacagagaaacgaccattcaagtggtctgaacctagcgagcctctcgaactggtcattaaggagatgtatccgaagcctttcttcaaaacatgggcatcccctgtggtcacccccggtgcccgagtcacttttaactgcagcacccctcatcagcatatgtctttcattttgtacaaagatggttctgaaatcgctagttcagaccgctcatgggcctctccaggggcaagtgctgctcattttctgataatctcagtagggatcggtgacggcggaaactactcctgtcggtactacgatttcagtatatggagcgaaccatccgatcccgtcgaattggttgtcaccgagttctatccaaagcccacccttctggcacagcccggacctgtagtgttcccgggaaagtcagtgatcttgagatgccaaggaactttccaggggatgagattcgccttattacaggagggggcacacgtaccgcttcaatttcgtagcgtgtctggtaatagcgctgatttcctcctccataccgtgggagctgaggattctggaaattactcatgtatatattatgagaccacaatgtccaacaggggctcttacctttcaatgcctctcatgatctgggtgacagatacctttcccaaaccttggctgttcgccgagccatctagcgtcgtgcccatggggcagaatgtgactttgtggtgcagagggcctgtccatggcgtagggtacatcctgcataaagagggtgaggctacatccatgcagctgtggggctccacaagcaatgacggcgcatttccgattacgaacatttccgggaccagcatgggtaggtattcctgctgctaccaccctgactggacttcaagtattaaaatccagccaagcaatactctcgagctgctcgtgactggactgctgccaaagccgtccttactggctcagccaggaccaatggtagcacctggagagaatatgacactgcaatgtcaaggtgagctccccgattcaaccttcgtactgctcaaagaaggcgcacaggaaccgttagaacagcaacgccctagcggctatcgggcagatttctggatgcctgccgtgcgcggagaggactctggaatctatagctgcgtgtattacttggattctactccgtttgccgcttctaatcactcggacagtctggaaatttgggtgaccgataaaccacctaagccatcgttgtccgcctggcctagtaccatgttcaaactggggaaagacattaccctccagtgcaggggacccttaccaggagtagaattcgtcctggagcatgacggcgaagaagccccacagcaattttctgaagatggggacttcgtgattaataatgtggagggaaaaggtatcgggaactatagttgcagttatcgactgcaggcctaccccgatatttggagtgagccatctgatcccctggagttggtcggggctgccggtcccgtggcccaagagtgtactgttgggaatatcgtacgtagctccttgatcgtggttgttgtggttgcccttggggttgtgctggccatagaatggaagaaatggcctcgactcaggacccggggttcagagacagatggcagggaccaaaccatcgctctggaagaatgtaaccaggagggcgaacccggaacgccagcaaacagcccctcatctacctctcaacggattagcgttgagttgcccgttcccatctag

SEQ ID NO: 66964 - DNA, 3984 bp, Artificial Sequence
  derived and/or modified sequence
atgacactcgaccgccctggcgaaggggctacaatgctgaaaaccttcaccgtgctgctgttctgcatcctgatggatccccaacccgagttatggattgagtctaactatccacaggcaccatgggaaaatattacactttggtgtaggtcccctagtcgtatttctagcaagtttttgctgcttaaagacaaaacccagatgacctggatcaggccatcgcacaagacttttcaggtgagtttcttgattggcgctctgacagagtccaatgcgggactgtaccgctgctgctattggaaagaaactggttggagcaagccaagcaaggtgctggaactcgaagctcccggtcagttgcccaagccgattttttggattcaggcggagacccccgcactgcctggctgcaacgtaaacatactgtgccatggctggctacaggatctagtgttcatgctgttcaaggaaggttatgcggaacctgtcgactaccaggtccccacgggcactatggcaattttttctatagacaatttgactcccgaagacgaaggcgtgtatatctgcagaacgcacattcagatgctgccgacactgtggtctgagccgtctaaccctcttaaattggtcgtggcaggcctgtaccctaaaccaactttaacagcccatccaggcccaatcatggcccctggagaaagtctgaatcttcggtgtcaagggcctatttacgggatgacatttgccctgatgcgggtggaggatctggaaaaatcattctaccacaaaaagacaattaaaaatgaggcaaacttctttttccagtctctcaaaattcaggatacgggccactacctttgtttctactacgatgcatcataccgcggtagcctcctgtcagatgttcttaagatatgggttacggataccttcccaaagacctggctgctggccaggccatccgccgttgtgcagatgggccagaacgtcagcctgagatgtagagggccagttgacggagttggattggctctatataaaaagggtgaagataagcctctgcaattcttggacgcgacaagcatcgacgataatacctcttttttcctgaataacgtgacgtacagcgataccggcatttacagctgccactatctgctcacctggaaaacatctatcagaatgccgtcacacaacacagtagaactgatggtcgttgacaagccgcctaagccaagcctgtcagcctggcccagcaccgtgttcaagctgggaaaagcgattaccctgcaatgtcgggtctctcacccagttttagagttcagtctagaatgggaagaacgcgagacgtttcaaaagttctctgtaaacggtgactttataatttcaaacgttgacggcaaggggaccggcacctacagctgttcgtacagagtggagacacatcccaacatctggtcccatagatccgagcccctgaaactgatgggccctgccggttacctcacctggaattatgtcctaaatgaggcaattcgtctgagcctgatcatgcagctcgttgctttgctcctcgtggtactatggatcagatggaaatgccgacgtctccgtattcgagaggcttggctcttggggacagcccagggtgtgaccatgctatttatcgtcaccgccctcctgtgttgcggactttgcaatggggtgttgatagaggaaactgagatcgtgatgcccacaccaaagcccgagctgtgggctgaaaccaactttcctttagcaccttggaaaaatctgaccctttggtgtagatctccgagcgggtccactaaggagttcgttttactcaaagacggtacaggatggattgctactaggcccgcaagcgaacaggtgcgggctgccttccccctgggcgctttgacccagtctcataccgggtcctaccactgccacagctgggaggaaatggcagttagtgagcccagcgaagccctggagctcgtgggaactgacatcttgcccaagcctgtgataagtgcatccccaacaattagaggccaggaactgcagctgagatgcaagggctggttagctggcatgggttttgccttgtacaaagaaggcgaacaggagcccgtacagcagctcggagcagtgggcagggaggccttctttaccatccagagaatggaggacaaagacgagggcaattacagctgtcggacccacaccgagaaaaggccgttcaagtggtccgagccctctgaaccacttgagcttgtcatcaaggaaatgtatcccaagccattcttcaagacctgggcctcccctgttgtgacccctggagccagagttacgttcaattgcagcactccgcatcagcacatgagtttcatcttgtacaaagacgggagcgagatcgcctcctctgaccgaagctgggccagtcctggtgcatcagctgcacactttttgatcatctccgttggaatcggggatggagggaactactcatgccgctactacgacttttccatctggagtgaaccttctgacccagtggaactggtagtgacagagttctatcccaagccaacgctcctcgcacagcctggtccagtggtgttcccgggaaagtccgtcatactgaggtgtcaaggaacattccagggtatgcggtttgcactcctgcaagaaggtgcccacgtgcctttacagtttcgctcggtcagcggcaattcggcagactttctcctgcatacggtgggagccgaggatagcggcaattattcatgcatatactatgaaacaaccatgagcaatcgcggtagttacttgtctatgcccctcatgatctgggtcactgatacgttccctaagccttggctctttgccgagccaagctctgtggtcccgatgggccaaaacgttactctgtggtgtagaggcccagtacatggtgtgggatacattcttcataaggaaggtgaagctacctctatgcagctgtggggaagcacctccaacgacggcgctttccccatcacaaatatctctggcacaagcatggggcgatactcctgttgttaccaccccgattggacctcttctatcaaaatacagccaagcaataccctcgaactcttagtgaccgggctacttccgaaaccatccctgttagctcagcctggccctatggtggccccaggcgagaacatgaccctgcagtgccagggtgaacttcccgatagcacctttgtccttctgaaggagggggctcaggagcctctggagcaacagcgaccatccggatatcgcgcagatttctggatgccagctgtgaggggagaggactcaggcatttacagctgcgtgtactatcttgactctaccccgttcgccgcatccaaccacagcgactcccttgagatctgggtcaccgacaagccaccaaagcctagcttgagtgcctggccgtctacaatgtttaagctggggaaagatataactttgcagtgccggggtccactgcccggtgttgaatttgtcctggaacacgacggcgaggaggcccctcaacagttttcagaggacggggactttgtaattaacaatgttgagggcaaggggatcgggaattatagttgtagctatcgcctacaagcttaccctgacatttggtctgaaccttcagatcctcttgagctagttggggctgctggccctgtggcccaggaatgtacggtcggcaatattgtgcgatcctctctcatagtggtggtagtggtagctctgggtgtggttctggctatagagtggaagaaatggcccaggctgagaacgcgcggatccgagaccgacggccgagaccagacaatagcactggaggagtgtaaccaagaaggggagcctgggactcccgctaacagtccatcctctacgtcacagcggatcagcgtcgagctgcctgtgccaatctag

SEQ ID NO: 66965 - DNA, 3984 bp, Artificial Sequence
  derived and/or modified sequence
atgaccctggacagacccggcgagggcgccaccatgctgaagaccttcaccgtgctgctgttctgcatcctgatggacccccagcccgagctgtggatcgagagcaactacccccaggccccctgggagaacatcaccctgtggtgcagaagccccagcagaatcagcagcaagttcctgctgctgaaggacaagacccagatgacctggatcagacccagccacaagaccttccaggtgagcttcctgatcggcgccctgaccgagagcaacgccggcctgtacagatgctgctactggaaggagaccggctggagcaagcccagcaaggtgctggagctggaggcccccggccagctgcccaagcccatcttctggatccaggccgagacccccgccctgcccggctgcaacgtgaacatcctgtgccacggctggctgcaggacctggtgttcatgctgttcaaggagggctacgccgagcccgtggactaccaggtgcccaccggcaccatggccatcttcagcatcgacaacctgacccccgaggacgagggcgtgtacatctgcagaacccacatccagatgctgcccaccctgtggagcgagcccagcaaccccctgaagctggtggtggccggcctgtaccccaagcccaccctgaccgcccaccccggccccatcatggcccccggcgagagcctgaacctgagatgccagggccccatctacggcatgaccttcgccctgatgagagtggaggacctggagaagagcttctaccacaagaagaccatcaagaacgaggccaacttcttcttccagagcctgaagatccaggacaccggccactacctgtgcttctactacgacgccagctacagaggcagcctgctgagcgacgtgctgaagatctgggtgaccgacaccttccccaagacctggctgctggccagacccagcgccgtggtgcagatgggccagaacgtgagcctgagatgcagaggccccgtggacggcgtgggcctggccctgtacaagaagggcgaggacaagcccctgcagttcctggacgccaccagcatcgacgacaacaccagcttcttcctgaacaacgtgacctacagcgacaccggcatctacagctgccactacctgctgacctggaagaccagcatcagaatgcccagccacaacaccgtggagctgatggtggtggacaagccccccaagcccagcctgagcgcctggcccagcaccgtgttcaagctgggcaaggccatcaccctgcagtgcagagtgagccaccccgtgctggagttcagcctggagtgggaggagagagagaccttccagaagttcagcgtgaacggcgacttcatcatcagcaacgtggacggcaagggcaccggcacctacagctgcagctacagagtggagacccaccccaacatctggagccacagaagcgagcccctgaagctgatgggccccgccggctacctgacctggaactacgtgctgaacgaggccatcagactgagcctgatcatgcagctggtggccctgctgctggtggtgctgtggatcagatggaagtgcagaagactgagaatcagagaggcctggctgctgggcaccgcccagggcgtgaccatgctgttcatcgtgaccgccctgctgtgctgcggcctgtgcaacggcgtgctgatcgaggagaccgagatcgtgatgcccacccccaagcccgagctgtgggccgagaccaacttccccctggccccctggaagaacctgaccctgtggtgcagaagccccagcggcagcaccaaggagttcgtgctgctgaaggacggcaccggctggatcgccaccagacccgccagcgagcaggtgagagccgccttccccctgggcgccctgacccagagccacaccggcagctaccactgccacagctgggaggagatggccgtgagcgagcccagcgaggccctggagctggtgggcaccgacatcctgcccaagcccgtgatcagcgccagccccaccatcagaggccaggagctgcagctgagatgcaagggctggctggccggcatgggcttcgccctgtacaaggagggcgagcaggagcccgtgcagcagctgggcgccgtgggcagagaggccttcttcaccatccagagaatggaggacaaggacgagggcaactacagctgcagaacccacaccgagaagagacccttcaagtggagcgagcccagcgagcccctggagctggtgatcaaggagatgtaccccaagcccttcttcaagacctgggccagccccgtggtgacccccggcgccagagtgaccttcaactgcagcaccccccaccagcacatgagcttcatcctgtacaaggacggcagcgagatcgccagcagcgacagaagctgggccagccccggcgccagcgccgcccacttcctgatcatcagcgtgggcatcggcgacggcggcaactacagctgcagatactacgacttcagcatctggagcgagcccagcgaccccgtggagctggtggtgaccgagttctaccccaagcccaccctgctggcccagcccggccccgtggtgttccccggcaagagcgtgatcctgagatgccagggcaccttccagggcatgagattcgccctgctgcaggagggcgcccacgtgcccctgcagttcagaagcgtgagcggcaacagcgccgacttcctgctgcacaccgtgggcgccgaggacagcggcaactacagctgcatctactacgagaccaccatgagcaacagaggcagctacctgagcatgcccctgatgatctgggtgaccgacaccttccccaagccctggctgttcgccgagcccagcagcgtggtgcccatgggccagaacgtgaccctgtggtgcagaggccccgtgcacggcgtgggctacatcctgcacaaggagggcgaggccaccagcatgcagctgtggggcagcaccagcaacgacggcgccttccccatcaccaacatcagcggcaccagcatgggcagatacagctgctgctaccaccccgactggaccagcagcatcaagatccagcccagcaacaccctggagctgctggtgaccggcctgctgcccaagcccagcctgctggcccagcccggccccatggtggcccccggcgagaacatgaccctgcagtgccagggcgagctgcccgacagcaccttcgtgctgctgaaggagggcgcccaggagcccctggagcagcagagacccagcggctacagagccgacttctggatgcccgccgtgagaggcgaggacagcggcatctacagctgcgtgtactacctggacagcacccccttcgccgccagcaaccacagcgacagcctggagatctgggtgaccgacaagccccccaagcccagcctgagcgcctggcccagcaccatgttcaagctgggcaaggacatcaccctgcagtgcagaggccccctgcccggcgtggagttcgtgctggagcacgacggcgaggaggccccccagcagttcagcgaggacggcgacttcgtgatcaacaacgtggagggcaagggcatcggcaactacagctgcagctacagactgcaggcctaccccgacatctggagcgagcccagcgaccccctggagctggtgggcgccgccggccccgtggcccaggagtgcaccgtgggcaacatcgtgagaagcagcctgatcgtggtggtggtggtggccctgggcgtggtgctggccatcgagtggaagaagtggcccagactgagaaccagaggcagcgagaccgacggcagagaccagaccatcgccctggaggagtgcaaccaggagggcgagcccggcacccccgccaacagccccagcagcaccagccagagaatcagcgtggagctgcccgtgcccatctag

SEQ ID NO: 66966 - protein, 1505 aa, Artificial Sequence
  derived and/or modified sequence
MVHVARLLLLLLTFFLRTDAETPPRFTRTPVDQTGVSGGVASFICQATGDPRPKIVWNKKGKKVSNQRFEVIEFDDGSGSVLRIQPLRTPRDEAIYECVASNNVGEISVSTRLTVLREDQIPRGFPTIDMGPQLKVVERTRTATMLCAASGNPDPEITWFKDFLPVDTSNNNGRIKQLRSESIGALQIEQSEESDQGKYECVATNSAGTRYSAPANLYVRVRRVPPRFSIPPTNHEIMPGGSVNITCVAVGSPMPYVKWMLGAEDLTPEDDMPIGRNVLELNDVRQSANYTCVAMSTLGVIEAIAQITVKALPKPPGTPVVTESTATSITLTWDSGNPEPVSYYIIQHKPKNSEELYKEIDGVATTRYSVAGLSPYSDYEFRVVAVNNIGRGPPSEPVLTQTSEQAPSSAPRDVQARMLSSTTILVQWKEPEEPNGQIQGYRVYYTMDPTQHVNNWMKHNVADSQITTIGNLVPQKTYSVKVLAFTSIGDGPLSSDIQVITQTGVPGQPLNFKAEPESETSILLSWTPPRSDTIANYELVYKDGEHGEEQRITIEPGTSYRLQGLKPNSLYYFRLAARSPQGLGASTAEISARTMQSMFAKNFHVKAVMKTSVLLSWEIPENYNSAMPFKILYDDGKMVEEVDGRATQKLIVNLKPEKSYSFVLTNRGNSAGGLQHRVTAKTAPDVLRTKPAFIGKTNLDGMITVQLPEVPANENIKGYYIIIVPLKKSRGKFIKPWESPDEMELDELLKEISRKRRSIRYGREVELKPYIAAHFDVLPTEFTLGDDKHYGGFTNKQLQSGQEYVFFVLAVMEHAESKMYATSPYSDPVVSMDLDPQPITDEEEGLIWVVGPVLAVVFIICIVIAILLYKRKRAESDSRKSSIPNNKEIPSHHPTDPVELRRLNFQTPGSDDSGYPGNLHSSSMASHPPIPILELADHIERLKANDNLKFSQEYESIDPGQQFTWEHSNLEVNKPKNRYANVIAYDHSRVLLSAIEGIPGSDYVNANYIDGYRKQNAYIATQGSLPETFGDFWRMIWEQRSATVVMMTKLEERSRVKCDQYWPSRGTETHGLVQVTLLDTVELATYCVRTFALYKNGSSEKREVRQFQFTAWPDHGVPEHPTPFLAFLRRVKTCNPPDAGPMVVHCSAGVGRTGCFIVIDAMLERIKHEKTVDIYGHVTLMRAQRNYMVQTEDQYIFIHDALLEAVTCGNTEVPARNLYAYIQKLTQIETGENVTGMELEFKRLASSKAHTSRFISANLPCNKFKNRLVNIMPYESTRVCLQPIRGVEGSDYINASFIDGYRQQKAYIATQGPLAETTEDFWRMLWEHNSTIVVMLTKLREMGREKCHQYWPAERSARYQYFVVDPMAEYNMPQYILREFKVTDARDGQSRTVRQFQFTDWPEQGVPKSGEGFIDFIGQVHKTKEQFGQDGPISVHCSAGVGRTGVFITLSIVLERMRYEGVVDIFQTVKMLRTQRPAMVQTEDQYQFSYRAALEYLGSFDHYAT

SEQ ID NO: 66967 - protein, 1505 aa, Artificial Sequence [sequence omitted]

SEQ ID NO: 66968 - DNA, 4518 bp, Artificial Sequence
  derived and/or modified sequence
atggtgcatgtggccaggctcctgctcttattgctgaccttttttctgcgcaccgacgccgaaacgccacccagattcacgcgcactcctgtggatcagaccggcgttagtgggggtgtagcgtcattcatatgccaggccacaggcgacccacggccaaaaatcgtttggaataaaaaagggaagaaggtcagtaaccagcgttttgaggtcatagaatttgacgacgggtcgggttcagtgcttcgcattcagccgctccgaactccccgagatgaggccatctatgaatgcgtagcatcaaataatgtcggcgaaattagcgtttcaacaagactgactgtgttacgtgaagaccagatcccacgcggatttccaacaattgacatgggcccccagctcaaggttgtagagcggacccgcacggcaacgatgctctgtgccgcgagtggcaacccagaccctgagattacctggttcaaggatttcctccccgtcgacaccagcaataacaatggcagaataaagcaactgaggagcgagtccattggagctttacaaattgaacagagcgaggagtccgaccagggaaaatacgagtgtgtcgccaccaatagtgctggcacgcgatatagcgccccggctaacctgtatgtccgtgtccgcagagtcccccctcgcttttctatcccccccacaaaccacgaaataatgcctggaggttctgtgaacatcacctgcgtggctgttggctccccgatgccgtacgttaagtggatgcttggggctgaagacctgaccccggaagatgacatgccaataggccgtaatgtactcgaactgaacgacgtgcggcaatccgcaaattatacctgtgtggctatgtccacactcggtgtgatagaagctatagcccaaatcaccgttaaagcactgcctaagccccccgggacccccgtagtgactgaaagcactgcgaccagtataactctgacctgggacagcggcaaccccgagccagtgagttactacataatccagcacaagcctaagaatagtgaagagttgtataaagagatagacggagtggcaaccacccgctattctgtggcggggttaagtccctatagcgactatgagttccgcgtcgtcgcagtaaacaacatcggccgaggtcccccttctgaaccagtgctgactcagacttccgaacaagctccaagctcggcaccgagagacgtacaggcacggatgttatccagtacaaccattcttgtgcaatggaaggaacctgaggagcctaacggccaaatacagggctaccgagtatattatacaatggatccaactcagcatgtgaataattggatgaaacataatgttgccgattcgcagataaccaccataggaaatctggtaccccaaaaaacctacagtgtgaaggtgctagctttcacctccattggggacggcccactatctagcgacatccaggtcatcacacagacaggcgtgccagggcagcctctgaacttcaaagctgaaccagaaagtgaaacatccatactgcttagttggactccaccccggtcagatactattgccaactatgagctcgtttataaggatggtgaacacggggaagagcagcgcatcactatcgaaccaggcactagttatcgacttcagggtctcaaaccaaatagtttgtactactttcgactggccgctcgttcacctcagggacttggcgcgtcaacggctgaaatcagtgctcggaccatgcagagtatgttcgccaagaatttccacgtgaaagccgtgatgaagacatcggtacttctcagctgggagattcctgagaattataactcggccatgccctttaagatcctctacgacgatggtaaaatggtcgaggaagtcgacggaagggccacacagaagttgatagttaacttgaagcctgagaagtcctacagtttcgtattgacaaatagagggaactctgctgggggcctgcagcatcgggttaccgcgaagaccgcccccgacgtgttgcggaccaagcccgcattcatcgggaagactaaccttgatggcatgattactgtgcagctgcctgaagttccggcaaacgagaatataaaaggttattacatcatcatagtgccgttgaaaaaaagccgcggaaagtttattaagccctgggaatcccccgacgagatggagctcgatgagctgttgaaggagatatctaggaaaagaaggtcaataaggtacgggcgcgaagtagagctgaagccatacatagcagctcatttcgatgtgctccctaccgagtttaccctgggggacgataagcattatggagggttcaccaacaagcagctgcaaagcgggcaggagtatgtgttcttcgtactagctgtgatggagcacgccgagtcaaaaatgtatgcaacttccccctactcggaccccgtggtatccatggatttagatccccagccaatcaccgacgaagaggagggactaatttgggtcgtgggacctgtgctggcagtggtgttcattatttgcattgtgatcgcaattttgctctacaagaggaaacgagccgaatctgactccagaaaaagcagtattccgaacaacaaagagatcccatcacaccacccaacagaccccgttgaactgagacgtctcaattttcagacccccggttctgatgacagcggatatcctggcaatttgcactctagctcaatggcctcacatccccctattcccattttggagcttgccgaccatattgagagattaaaggcaaacgataatctgaaattctcccaagaatacgagtccattgatccagggcaacagttcacctgggagcattccaacctggaagtcaacaagcccaaaaaccgctatgccaacgtgatcgcgtacgatcactcacgagtgcttctgtccgccattgaaggcattcccggaagcgattatgtcaatgccaactacattgatgggtacagaaagcagaacgcttacattgcaacacagggtagtctacctgaaacgttcggagatttttggaggatgatatgggagcagaggtccgcaacagttgtaatgatgacgaaactcgaggagagatccagggttaagtgcgatcagtattggccttcccgaggtactgaaacccatggactggttcaggtgaccctgcttgacaccgtggagttggccacctactgcgtgagaacgttcgcgttgtataagaatgggagctccgagaagagggaagtaaggcagttccagtttactgcctggcccgatcatggagtcccggagcacccgacaccttttctggcctttctccggagggtcaagacttgtaatcctcctgatgcaggtcccatggttgtgcactgctcggccggtgttggcaggactggttgtttcatcgtaatcgacgctatgcttgagcgtattaaacatgaaaaaacagtggacatctacggccatgtcactttgatgcgggctcaacgcaattatatggtgcagaccgaagaccagtatatctttatccacgatgccctgttggaggcagtaacctgtggtaacacagaagtgccagcccggaacctatacgcctacattcagaagctgacccaaatcgagaccggcgagaacgtgaccggcatggagttagaatttaaacggctagcctcttcaaaagctcatacttctcgattcatttctgcaaacctcccttgcaataaattcaagaatcgtctcgtaaatatcatgccatatgaatccacgagggtatgtttacagccaattaggggggtggaggggtctgactacatcaacgcatcatttattgatggatacagacagcagaaggcatatatcgcaacccaggggccattggcagagactaccgaagacttttggcgaatgctttgggagcataactcgaccattgtggtgatgctgaccaaactcagggagatgggtagggagaaatgccaccagtactggcctgccgaacggtctgcccggtaccagtatttcgttgtggatccaatggctgagtacaatatgccccagtacatcctcagagagttcaaagtaaccgacgcacgcgacgggcagtcccgtacagtgcgccagttccagtttactgattggcccgaacaaggggtccctaagagcggcgagggcttcatcgatttcatcggtcaggtgcacaagactaaggagcagttcgggcaagacggtccaattagtgttcactgttccgccggagtagggagaactggagttttcatcaccctgtcaatagtcctagaaaggatgcgctacgagggggtggttgacattttccagacagtcaaaatgctgcggacccagagacccgcaatggtacagacagaagatcagtaccagttctcttatcgcgcagctctcgaatatttggggagcttcgaccattatgctacttag

SEQ ID NO: 66969 - DNA, 4518 bp, Artificial Sequence
  derived and/or modified sequence
atggttcatgtcgcacgactgctcctgctgctcctcaccttcttccttcgaactgatgctgaaacaccaccgagatttacaaggactcctgtcgaccagaccggtgtctccggtggggtcgcgtcttttatatgccaggccacgggcgatccaagaccaaagattgtgtggaacaaaaagggcaaaaaggtgtctaaccagaggtttgaagtgattgagtttgatgacggctccgggtcggtcctcaggatacagccgctcaggactccccgcgacgaggccatctacgaatgcgttgccagtaataacgtaggcgaaatcagtgtttccacacgtctcacagtcctgcgcgaggaccagattccacggggattccccacgatagacatggggccacaactaaaagttgttgaaaggactagaacagccacgatgctctgcgcggctagtggaaaccctgacccggagatcacgtggttcaaggactttctgccagtggatacatccaataataatggcagaattaaacagctgaggagcgtgagtattggcgctcttcagattgagcagagcgaagaaagtgaccagggcaagtacgagtgtgtcgccacgaactcagcggggacaagatatagtgctccggctaacctctacgttagagttagacgggtgcccccgcggttcagcattccgcccactaaccatgagatcatgccaggtgggagtgtgaacattacgtgtgtcgccgttgggagcccgatgccctacgtgaaatggatgcttggcgcagaagacctaactcctgaggacgatatgccaattggccggaatgtcttggagctgaacgatgtccgccaatccgctaactacacctgtgtggcaatgtctaccctgggagttatagaagccattgcacagatcacagtgaaggctttaccaaagccccccgggacaccggtcgtaaccgaatccaccgccacgtccataaccttgacttgggacagcgggaatccggaaccggtatcctattacattatacagcacaaaccgaagaattccgaggaactatacaaagagatcgatggagtggcgaccactcgctattccgttgcagggctaagtccttacagtgactacgaatttcgcgtcgtcgccgtgaataacatcggacgcggaccgccctctgagcccgtgctcacgcagacttctgaacaggcaccctctagtgcacctcgagacgtgcaggcgcggatgctgtcgtcaaccaccatacttgttcagtggaaggagcctgaagaacctaacgggcagattcagggctatcgcgtttactataccatggaccctacacagcacgtaaacaattggatgaaacacaatgtggcggacagccagatcaccacaataggcaatctggtgccccaaaaaacttattcagttaaggtcttggctttcacgtccatcggggacggacccctatcgagcgacattcaagtcatcacccaaactggcgttcctggacagcctttaaattttaaggcggaacccgagagcgagaccagtatccttctgtcctggactcctccgagaagtgacaccatagctaactacgaactggtgtacaaggacggcgaacatggagaggagcagcggatcacgatcgaaccgggtaccagttaccgcttgcaaggattgaagcctaatagcttgtattattttagactcgctgctagatcaccacagggcctgggagcatctacagcagaaatatctgcccggaccatgcagtccatgtttgccaaaaattttcatgtaaaggccgtcatgaaaacctcagtgctgttgagctgggaaatcccagagaattataactcggccatgccattcaagatcctctacgacgacggaaagatggtagaggaggtggatgggcgcgccactcaaaagctcatcgtgaatttaaagccagagaagtcatacagcttcgtgctcacaaaccgaggcaactctgccggcggcctgcagcacagggtcactgctaagacagcaccggacgtgctgagaacgaaacccgctttcataggcaaaaccaacctcgacggcatgatcaccgtccagctgccagaagtccccgcgaacgaaaatattaaaggctactatattatcatcgttcccctcaagaagtcgcgcggcaagtttatcaaaccctgggaaagtccagacgaaatggagctcgatgaactcctaaaggagataagtcggaagcgccgcagtatccggtatggaagggaggtggaactgaaaccttacatcgcagcccacttcgatgtgctccctaccgaattcacacttggggatgacaagcactacggcggcttcactaacaaacagcttcaatcgggccaggaatacgtctttttcgttctggccgtgatggagcacgccgaaagcaagatgtatgcaacctccccttacagtgacccagtggtgtctatggacctggatccccagcccatcactgacgaggaagagggcttaatctgggtggtgggcccagtgctggcagtggtgtttattatatgtatcgttatcgcaatccttctgtataaacgcaaaagggcggagagcgatagcagaaaaagctcaatcccaaacaacaaagaaatacccagtcaccaccccaccgatcccgtcgagctgagaagattgaattttcagaccccaggatctgatgactcggggtaccccggtaacctgcatagttcatctatggcatctcatcctcccatccccatcctcgagctggccgaccacattgagaggctgaaggcgaacgataacctgaaattctctcaagaatacgaaagcatcgacccaggccaacaatttacttgggaacacagcaatctagaggttaacaaacctaaaaatagatacgcgaacgtaattgcttacgaccattctcgggtgttgctgtctgctatcgaaggcattcctggatcagattatgtaaatgccaattatattgacgggtatcggaaacagaacgcgtatatcgctacacagggctccctgcctgaaacctttggagacttttggagaatgatctgggagcaaagatcagcaacagttgtgatgatgacaaagttggaggaacggagccgcgtgaagtgcgatcagtactggcccagcagaggcacggagacacatgggttggttcaagtgaccttgctggacacagtcgagctggctacctactgtgtgagaacatttgccttatacaaaaacgggtcaagtgaaaaaagagaagtacggcagttccagttcactgcgtggcctgaccacggagtccccgaacaccctaccccatttctcgctttcctgcgcagagtgaaaacttgcaaccctccggatgcgggaccaatggtcgtccattgctcagcaggtgtcggcagaactggctgtttcatcgtgatcgatgccatgctggaaaggatcaaacacgaaaaaaccgtggacatctatggccatgtgaccctcatgagggcccagaggaactatatggttcaaactgaggaccagtatatcttcatacatgacgccctgctcgaggccgttacatgcggtaacactgaggtgccagcacggaacctgtatgcatacatccagaaattgacacagatcgagactggggagaacgtgactggcatggagctggaatttaagaggctcgcctcctctaaggctcatacaagcaggttcatcagtgcgaatctcccatgtaacaagttcaaaaaccgactggtaaacatcatgccttacgagtctaccagggtgtgtctccagccaattcgaggcgtggaagggtcagattatataaatgcatccttcatcgacggctatcgccagcagaaggcttatatcgccactcagggacctttggcagaaacaaccgaagatttttggaggatgctgtgggaacataattctactatcgttgtcatgcttaccaaactccgtgagatgggccgggagaaatgccatcaatattggccggccgagcggtctgcacgctaccagtacttcgtcgtggatccgatggcagaatataatatgccccagtacatcttgcgcgaatttaaggtaaccgatgcaagggacggccagtccaggaccgtgagacagttccaatttaccgattggcccgaacagggagtccccaagtccggcgaaggctttattgactttattggccaggtccataagacaaaagagcagttcggacaagacggacccatttcagtgcattgttcggcaggagtgggccgaacaggcgtgttcatcaccctcagtatcgtgttggaacggatgaggtacgagggggttgtcgacattttccagacggtaaagatgttacggacacagagacccgctatggtgcaaaccgaggatcagtaccagttctcttaccgtgcagccctggaatatctgggaagcttcgatcattacgctacctag

SEQ ID NO: 66970 - DNA, 4518 bp, Artificial Sequence
  derived and/or modified sequence
atggtgcacgtggcccggctgctgctgctgctgctgaccttcttcctgaggacagatgctgagaccccaccccgcttcaccaggacccctgtggaccagacaggagtgtctggaggagtggccagcttcatctgccaggccaccggggacccccggcccaagatcgtgtggaacaagaagggcaagaaggtgagcaaccagagatttgaagtcatcgagtttgatgatggcagcggctctgtgctgcgcatccagcccctgcggaccccaagagatgaggccatctatgaatgtgtggccagcaacaacgtgggggagatctctgtgtccacccggctgactgtgctgcgggaggaccagatcccccggggcttccccaccatcgacatgggcccccagctgaaggtggtggagaggaccaggacagccaccatgctgtgtgccgccagcggcaacccagaccctgagatcacctggttcaaggacttcctgcctgtggacaccagcaacaacaacggccgcatcaagcagctgcggtctgagagcattggagccctgcagatcgagcagagcgaggagagtgaccagggcaagtatgaatgtgtggccaccaacagcgctggcacccgctacagcgccccagccaacctgtatgtgcgggtgcggcgggtgcccccacgcttcagcatcccccccaccaaccacgagatcatgcctgggggctctgtgaacatcacctgtgtggccgtgggcagccccatgccctacgtgaagtggatgctgggcgctgaggacctgaccccagaagatgacatgcccatcggcagaaatgtgctggagctgaatgatgtgcggcagagcgccaactacacctgtgtggccatgagcaccctgggcgtgattgaggccatcgcccagatcaccgtgaaggccctgcccaagcccccaggcacccctgtggtgacagagagcacagccaccagcatcaccctgacctgggacagcggcaaccctgagcctgtgtcctactacatcatccagcacaagcccaagaacagcgaggagctgtacaaggagattgatggagtggccaccacccgctacagcgtggccggcctgagcccctacagcgactatgagttccgggtggtggccgtgaacaacatcggccggggccccccatctgagcctgtgctgacccagaccagcgagcaggcccccagcagcgcccccagagatgtgcaggccaggatgctgagcagcaccaccatcctggtgcagtggaaggagcctgaggagcccaacggccagatccagggctacagagtgtactacaccatggaccccacccagcacgtgaacaactggatgaagcacaacgtggccgacagccagatcaccaccatcggcaacctggtgccccagaagacctacagcgtgaaggtgctggccttcaccagcattggagatggccccctgagcagtgacatccaggtgatcacccagacaggagtgcccggccagcccctgaacttcaaggccgagcctgagagcgagaccagcatcctgctgtcctggaccccacccaggagtgacaccatcgccaactatgagctggtgtacaaggatggagagcacggggaggagcagaggatcaccatcgagcccggcaccagctaccgcctgcagggcctgaagcccaacagcctgtactacttccggctggccgcccggagcccccagggcctgggcgccagcacagctgagatcagcgcccggaccatgcagagcatgtttgccaagaacttccacgtgaaggctgtgatgaagacctctgtgctgctgtcctgggagatccctgagaactacaacagcgccatgcccttcaagatcctgtatgatgatggcaagatggtggaggaggtggatggccgggccacccagaagctgattgtgaacctgaagccagagaagagctacagctttgtgctgaccaacagaggcaacagcgctgggggcctgcagcaccgggtgacagccaagacagccccagatgtgctgcggaccaagccagccttcatcggcaagaccaacctggatggcatgatcaccgtgcagctgcctgaggtgcctgccaatgaaaacatcaagggctactacatcatcatcgtgcccctgaagaagagccggggcaagttcatcaagccctgggagagcccagatgagatggagctggatgagctgctgaaggagatcagcaggaagaggaggagcatccgctatggccgggaggtggagctgaagccctacatcgccgcccactttgatgtgctgcccacagagttcaccctgggagatgacaagcactacggcggcttcaccaacaagcagctgcagagcggccaggagtatgtgttctttgtgctggccgtgatggagcacgccgagagcaagatgtatgccaccagcccctacagcgaccctgtggtgtccatggacctggacccccagcccatcacagatgaggaggagggcctcatctgggtggtgggccctgtgctggccgtggtgttcatcatctgcatcgtcatcgccatcctgctgtacaagaggaagagagctgagagtgacagcaggaagagcagcatccccaacaacaaggagatccccagccaccaccccacagatcctgtggagctgcggcggctgaacttccagaccccaggcagtgatgattctggctacccaggcaacctgcacagcagctccatggccagccacccccccatccccatcctggagctggccgaccacatcgagcggctgaaggccaatgacaacctgaagttcagccaggagtatgagagcattgatcctggccagcagttcacctgggagcacagcaacctggaggtgaacaagcccaagaacagatatgccaacgtgattgcctatgaccacagccgggtgctgctgagcgccatcgagggcatccctggcagtgactatgtgaatgccaactacattgatggctacaggaagcagaatgcctacatcgccacccagggcagcctgcctgagacctttggagacttctggaggatgatctgggagcagaggtctgccaccgtggtgatgatgaccaagctggaggagaggagccgggtgaagtgtgaccagtactggcccagccggggcacagagacccacggcctggtgcaggtgaccctgctggacacagtggagctggccacctactgtgtgaggacctttgccctgtacaagaatggcagcagcgagaagcgggaggtgcggcagttccagttcaccgcctggccagaccatggagtgcctgagcaccccacccccttcctggccttcctgcggcgggtgaagacctgcaaccccccagatgctggccccatggtggtgcactgcagcgctggggtgggccgcacaggctgcttcatcgtgattgatgccatgctggagcgcatcaagcatgagaagacagtggacatctacggccacgtgaccctgatgagggcccagaggaactacatggtgcagacagaggaccagtacatcttcatccatgatgccctgctggaggccgtgacctgtggcaacacagaggtgcctgccaggaacctgtatgcctacatccagaagctgacccagatcgagaccggggagaatgtgacaggcatggagctggagttcaagaggctggccagcagcaaggcccacaccagccgcttcatcagcgccaacctgccctgcaacaagttcaagaaccggctggtgaacatcatgccctatgagagcaccagggtgtgcctgcagcccatccggggcgtggagggcagtgactacatcaatgccagcttcattgatggctaccggcagcagaaggcctacatcgccacccagggccccctggccgagaccacagaggacttctggaggatgctgtgggagcacaacagcaccatcgtggtgatgctgaccaagctgcgggagatgggccgggagaagtgccaccagtactggccagctgagaggtctgcccgctaccagtactttgtggtggaccccatggccgagtacaacatgccccagtacatcctgcgggagttcaaggtgacagatgccagagatggccagagcaggacagtgcggcagttccagttcacagactggccagagcagggcgtgcccaagtctggagagggcttcatcgacttcatcggccaggtgcacaagaccaaggagcagtttggccaggacggccccatctctgtgcactgcagcgctggggtgggccgcactggagtcttcatcaccctgagcatcgtgctggagaggatgagatatgaaggagtggtggacatcttccagacagtgaagatgctgcggacccagaggcctgccatggtgcagacagaggaccagtaccagttctcctaccgggccgccctggagtacctgggcagctttgaccactacgccacctag

SEQ ID NO: 66971 - DNA, 4518 bp, Artificial Sequence
  derived and/or modified sequence
atggtgcacgtggcccggctgctgctgctgctgctgaccttcttcctgaggacagatgctgagaccccaccccgcttcaccaggacccctgtggaccagacaggagtgtctggaggagtggccagcttcatctgccaggccaccggggacccccggcccaagatcgtgtggaacaagaagggcaagaaggtgagcaaccagagatttgaagtcatcgagtttgatgatggcagcggctctgtgctgcgcatccagcccctgcggaccccaagagatgaggccatctatgaatgtgtggccagcaacaacgtgggggagatctctgtgtccacccggctgactgtgctgcgggaggaccagatcccccggggcttccccaccatcgacatgggcccccagctgaaggtggtggagaggaccaggacagccaccatgctgtgtgccgccagcggcaacccagaccctgagatcacctggttcaaggacttcctgcctgtggacaccagcaacaacaacggccgcatcaagcagctgcggtctgtgtccattggagccctgcagatcgagcagagcgaggagagtgaccagggcaagtatgaatgtgtggccaccaacagcgctggcacccgctacagcgccccagccaacctgtatgtgcgggtgcggcgggtgcccccacgcttcagcatcccccccaccaaccacgagatcatgcctgggggctctgtgaacatcacctgtgtggccgtgggcagccccatgccctacgtgaagtggatgctgggcgctgaggacctgaccccagaagatgacatgcccatcggcagaaatgtgctggagctgaatgatgtgcggcagagcgccaactacacctgtgtggccatgagcaccctgggcgtgattgaggccatcgcccagatcaccgtgaaggccctgcccaagcccccaggcacccctgtggtgacagagagcacagccaccagcatcaccctgacctgggacagcggcaaccctgagcctgtgtcctactacatcatccagcacaagcccaagaacagcgaggagctgtacaaggagattgatggagtggccaccacccgctacagcgtggccggcctgagcccctacagcgactatgagttccgggtggtggccgtgaacaacatcggccggggccccccatctgagcctgtgctgacccagaccagcgagcaggcccccagcagcgcccccagagatgtgcaggccaggatgctgagcagcaccaccatcctggtgcagtggaaggagcctgaggagcccaacggccagatccagggctacagagtgtactacaccatggaccccacccagcacgtgaacaactggatgaagcacaacgtggccgacagccagatcaccaccatcggcaacctggtgccccagaagacctacagcgtgaaggtgctggccttcaccagcattggagatggccccctgagcagtgacatccaggtgatcacccagacaggagtgcccggccagcccctgaacttcaaggccgagcctgagagcgagaccagcatcctgctgtcctggaccccacccaggagtgacaccatcgccaactatgagctggtgtacaaggatggagagcacggggaggagcagaggatcaccatcgagcccggcaccagctaccgcctgcagggcctgaagcccaacagcctgtactacttccggctggccgcccggagcccccagggcctgggcgccagcacagctgagatcagcgcccggaccatgcagagcatgtttgccaagaacttccacgtgaaggctgtgatgaagacctctgtgctgctgtcctgggagatccctgagaactacaacagcgccatgcccttcaagatcctgtatgatgatggcaagatggtggaggaggtggatggccgggccacccagaagctgattgtgaacctgaagccagagaagagctacagctttgtgctgaccaacagaggcaacagcgctgggggcctgcagcaccgggtgacagccaagacagccccagatgtgctgcggaccaagccagccttcatcggcaagaccaacctggatggcatgatcaccgtgcagctgcctgaggtgcctgccaatgaaaacatcaagggctactacatcatcatcgtgcccctgaagaagagccggggcaagttcatcaagccctgggagagcccagatgagatggagctggatgagctgctgaaggagatcagcaggaagaggaggagcatccgctatggccgggaggtggagctgaagccctacatcgccgcccactttgatgtgctgcccacagagttcaccctgggagatgacaagcactacggcggcttcaccaacaagcagctgcagagcggccaggagtatgtgttctttgtgctggccgtgatggagcacgccgagagcaagatgtatgccaccagcccctacagcgaccctgtggtgtccatggacctggacccccagcccatcacagatgaggaggagggcctcatctgggtggtgggccctgtgctggccgtggtgttcatcatctgcatcgtcatcgccatcctgctgtacaagaggaagagagctgagagtgacagcaggaagagcagcatccccaacaacaaggagatccccagccaccaccccacagatcctgtggagctgcggcggctgaacttccagaccccaggcagtgatgattctggctacccaggcaacctgcacagcagctccatggccagccacccccccatccccatcctggagctggccgaccacatcgagcggctgaaggccaatgacaacctgaagttcagccaggagtatgagagcattgatcctggccagcagttcacctgggagcacagcaacctggaggtgaacaagcccaagaacagatatgccaacgtgattgcctatgaccacagccgggtgctgctgagcgccatcgagggcatccctggcagtgactatgtgaatgccaactacattgatggctacaggaagcagaatgcctacatcgccacccagggcagcctgcctgagacctttggagacttctggaggatgatctgggagcagaggtctgccaccgtggtgatgatgaccaagctggaggagaggagccgggtgaagtgtgaccagtactggcccagccggggcacagagacccacggcctggtgcaggtgaccctgctggacacagtggagctggccacctactgtgtgaggacctttgccctgtacaagaatggcagcagcgagaagcgggaggtgcggcagttccagttcaccgcctggccagaccatggagtgcctgagcaccccacccccttcctggccttcctgcggcgggtgaagacctgcaaccccccagatgctggccccatggtggtgcactgcagcgctggggtgggccgcacaggctgcttcatcgtgattgatgccatgctggagcgcatcaagcatgagaagacagtggacatctacggccacgtgaccctgatgagggcccagaggaactacatggtgcagacagaggaccagtacatcttcatccatgatgccctgctggaggccgtgacctgtggcaacacagaggtgcctgccaggaacctgtatgcctacatccagaagctgacccagatcgagaccggggagaatgtgacaggcatggagctggagttcaagaggctggccagcagcaaggcccacaccagccgcttcatcagcgccaacctgccctgcaacaagttcaagaaccggctggtgaacatcatgccctatgagagcaccagggtgtgcctgcagcccatccggggcgtggagggcagtgactacatcaatgccagcttcattgatggctaccggcagcagaaggcctacatcgccacccagggccccctggccgagaccacagaggacttctggaggatgctgtgggagcacaacagcaccatcgtggtgatgctgaccaagctgcgggagatgggccgggagaagtgccaccagtactggccagctgagaggtctgcccgctaccagtactttgtggtggaccccatggccgagtacaacatgccccagtacatcctgcgggagttcaaggtgacagatgccagagatggccagagcaggacagtgcggcagttccagttcacagactggccagagcagggcgtgcccaagtctggagagggcttcatcgacttcatcggccaggtgcacaagaccaaggagcagtttggccaggacggccccatctctgtgcactgcagcgctggggtgggccgcactggagtcttcatcaccctgagcatcgtgctggagaggatgagatatgaaggagtggtggacatcttccagacagtgaagatgctgcggacccagaggcctgccatggtgcagacagaggaccagtaccagttctcctaccgggccgccctggagtacctgggcagctttgaccactacgccacctag

SEQ ID NO: 66972 - DNA, 4518 bp, Artificial Sequence
  derived and/or modified sequence
atggtgcacgtggcccggctgctgctgctgctgctgaccttcttccttaggacggatgctgagaccccaccacggtttactcgaaccccagtggaccaaaccggcgtcagcggtggggttgcaagtttcatttgtcaggccacaggggacccacgacctaaaatcgtgtggaacaagaagggaaaaaaagtctcaaatcagaggtttgaggtcatagagtttgatgatggatcaggttccgtcctccggatccagccacttcgcacaccccgtgatgaagccatctacgagtgtgtcgccagcaacaatgtgggcgagatctcagtcagcaccaggctaacggtgctgcgagaggatcagatcccacgcggatttcctacaatcgatatggggccacagctgaaggttgtagagaggacacgaaccgcaaccatgctgtgcgcggcgtcaggaaatccagaccccgaaatcacttggttcaaggacttcctgcctgtagacactagtaataacaatggcagaatcaaacagctcagatcggaaagtatcggtgcattgcagatcgagcagtcggaagagagcgatcaagggaaatacgagtgcgtggctaccaacagtgctggcacaaggtattccgctcctgccaacttgtatgtgagagtacgcagggtgccacccaggttttccatcccgccaaccaatcatgagataatgcctgggggtagcgtgaatataacctgtgtagccgtgggtagcccaatgccttatgttaaatggatgttgggtgctgaggatctgacacctgaggacgatatgcccatcggaaggaatgtgctcgagctgaacgatgtgcgtcagagtgctaattatacttgcgttgcaatgtcaactctcggcgtgatagaggcgatagctcagatcaccgtcaaagctcttcctaagccacctggcacccccgtagtcaccgagagtactgcaactagtattacgctgacctgggatagcggaaaccctgagccggtgagttactatattatccagcacaaaccaaagaacagcgaggagctctacaaggaaatagacggcgtcgccacaacacgctactcggttgccggcttgtcaccttacagtgattacgaattcagggtggtggctgtaaacaatattggccgggggccaccatctgagcccgtattgacccagacgtcagaacaggctccaagtagcgcacctagggacgttcaggcgaggatgctttcctctacgaccatcctggtgcagtggaaggaaccagaggagcccaatggccagattcaagggtacagagtgtactatacaatggacccaacacagcatgtaaataactggatgaaacataatgttgctgattctcagatcactactatcggcaacctagtaccacagaaaacctacagtgtcaaggtgctggcatttacgagcataggtgacgggcctctgtcatctgatatccaggtgatcacccagaccggtgtcccagggcaaccattgaacttcaaggcggagcccgagtccgagacttccatcctcctgtcctggacacctcctcgatccgatacaattgcaaactatgaactagtttataaagacggcgagcacggtgaggaacagagaatcaccattgaacccggcacttcctaccgtctgcagggtcttaagccaaactctctctattacttcaggctggcagccaggtcacctcagggactcggagccagcacagccgaaataagtgcacggactatgcagtcgatgttcgccaagaacttccatgtcaaggcagtgatgaaaacgtccgttcttctgtcttgggagatccccgagaattataacagtgccatgcccttcaaaatactgtatgacgatggtaagatggtggaggaagtggatggtagggccacccagaaacttattgtcaatttgaagcccgagaaatcctacagtttcgtcttgactaaccggggcaacagcgccgggggtctgcaacaccgcgtgacagccaagaccgctcctgacgttctgcggactaaacctgcctttatcggtaagaccaatctggacggaatgatcactgtgcaactcccagaagtgccagcaaacgaaaacatcaagggatactatataattattgtgcccctcaaaaagtccaggggaaaattcatcaagccctgggaaagccctgacgagatggagctggatgagctgctcaaggagatttcgcggaaacgccggtcaattagatatgggcgggaggtcgagttaaaaccatacatcgcagctcacttcgacgtgctgcctaccgagtttacactcggggatgataaacactatggcgggttcaccaataaacaactccagagtggccaggagtatgtgttctttgtgctggctgtgatggagcatgcagagtctaagatgtacgccacttccccctacagtgacccagtagtaagcatggatctagacccccagcctataaccgacgaggaggaaggcttaatttgggtggtcggcccggtactggctgtggtttttattatctgcattgtgatcgctatcctactctataagcggaaacgggccgagtctgatagtcggaaaagtagtattcctaataataaggagattccttcacaccaccccaccgaccccgtcgaactgaggcgcttaaacttccagacgcctgggtctgatgacagcggctaccccgggaatctccactcctcttccatggcatcccaccctcctatcccaattctcgaactagccgaccacatcgagcgccttaaggcgaatgacaacctgaaattcagtcaggaatacgagtctatcgatccgggacagcagtttacatgggaacactccaatctggaggtcaataaacccaagaaccgttacgccaacgtgatagcctatgaccacagtcgcgtgctgctctcggccatcgagggtatacccgggagtgactatgtcaacgccaactacatcgatggttaccggaagcagaatgcttacattgccacgcaggggagcctgcctgagactttcggagatttttggcggatgatctgggagcagaggtcagcaacagtagtcatgatgaccaaactggaggaacggtccagagtgaaatgcgaccagtattggccatcacgggggaccgaaactcatggtttggttcaggtcacacttctggatactgtggagctcgctacatactgtgtgcgaacgttcgctctgtacaagaatgggtcaagcgaaaagcgggaggtacgccagtttcagtttacagcatggcccgaccatggggtgccagagcatcccacacccttccttgccttcctacgacgagtaaagacctgtaacccccccgacgcagggcccatggtagtccattgcagcgcgggggtgggacggacgggttgctttatagtaatagatgctatgttagagaggattaaacacgaaaagaccgttgacatctacgggcacgtcactctcatgcgagcacagagaaattacatggtgcagacagaggaccagtacatcttcatccacgatgctctcttggaagctgtaacatgcggcaacaccgaggtgccagcccgtaacctgtatgcctacattcagaaacttacgcagatcgagacaggggagaacgtaacaggtatggaacttgagtttaaaaggctggcaagctccaaggctcatacctctagatttataagtgccaatctcccttgtaataagttcaagaatcgtctcgtaaatatcatgccatacgaaagtactcgagtgtgcttgcagccaatccggggagttgaaggaagtgattatattaacgcctcctttattgacggctatcgtcagcagaaagcctacatagccacccaaggtcccctggccgaaacgaccgaagacttctggcggatgctctgggaacataacagcaccattgttgtgatgctcactaaactccgagagatgggaagggaaaaatgccaccagtattggcccgcggagcgctccgcccggtaccagtatttcgtcgttgatcctatggctgagtacaatatgcctcagtacatcttaagagagttcaaagtgacagatgcgcgcgatggacagagcaggacagtgagacagttccagtttactgattggcccgaacagggcgtgcccaagagcggagaaggatttatagacttcatcggtcaagtgcacaagactaaagaacaattcgggcaagacggccctatctctgtgcattgttctgcaggagtgggccgcaccggtgtttttatcactctgtcaatcgttctggagagaatgcgctacgagggggttgtggatatctttcagacagtgaagatgttgagaacacagaggcccgcgatggtacagaccgaggaccagtatcaattctcatatcgcgctgctttggaatatctcggctcttttgatcattacgccacctag

SEQ ID NO: 66973 - DNA, 4518 bp, Artificial Sequence
  derived and/or modified sequence
atggtgcacgtggcccggctgctgctgctgctgctgaccttcttcctgagaactgacgcggagaccccaccaaggttcacaagaacccccgtcgatcaaacaggtgtgtctgggggggtcgcttcttttatatgtcaggcgacaggcgatccccgacctaagatcgtttggaataaaaaaggaaaaaaggtgtcaaaccagaggttcgaggtgatcgagttcgacgatgggtccggctctgtactgcgcattcaacccctacggacaccccgggacgaggctatttatgagtgtgttgcatccaacaatgtgggagagatttccgtgagtacacggctgaccgtgttaagggaagaccaaatccctcgcggctttcccaccatcgatatgggcccccagttaaaagttgtagaacgaaccagaacagctaccatgctctgtgcagcaagtggaaacccagacccggagattacctggtttaaagacttcctccccgttgacacatccaacaataatggtcggataaagcagctacggtcagtatctatcggggcgctgcaaatcgaacagagcgaggagagtgatcagggcaagtacgagtgcgtagcaaccaactccgcaggaacacggtactcagccccagccaacttatatgtccgggttagacgcgtgcccccccgcttttccatcccacccacaaaccacgaaatcatgcccggcggcagcgtgaatatcacatgtgttgcagtggggtctcctatgccatatgtgaaatggatgcttggcgcggaggacctgactccggaagacgacatgcccattggtcggaacgttcttgaactcaatgacgtgaggcagtctgcgaactatacctgtgttgcaatgagtacgttgggggtcattgaagctattgcccagatcaccgtgaaagcactgcccaagccaccaggaacccccgtcgtcacggaatccacagctacatctatcacccttacctgggatagcgggaaccccgagcctgtgtcatattacattatccagcataaaccaaaaaactcagaagagctgtataaggagatcgatggtgttgccaccacccgatattccgtggccgggcttagcccatactctgattacgagttccgggtggtggccgtcaacaacatcgggagaggccctcccagcgaacccgttctgacccagacttctgagcaggcccccagttctgccccacgggacgtgcaggctcggatgctttcctccaccactatcttggtgcagtggaaggagccagaggagcctaacggccaaatccagggttatcgcgtttactacacaatggaccccacccagcacgtcaacaactggatgaagcacaatgtcgcagatagccagataaccacaattgggaatttggtgccgcagaaaacgtactccgtcaaggttctcgcatttaccagcatcggagatggtcctctgagttctgacatccaggtgattacccaaactggggtcccaggccagccacttaactttaaggccgagccagagtccgaaacaagcattctcttgtcttggacgcctccacgcagcgatacgattgctaactatgagctggtctacaaggacggagaacatggcgaggagcagaggattaccattgagcctggcacaagctatcgattgcagggcctgaagcctaactcattgtattatttcagactcgccgcccgcagcccacagggacttggcgcctccaccgccgaaattagtgcccggactatgcagtcgatgtttgccaaaaatttccatgtgaaggccgtgatgaagacctctgtactgctgtcatgggaaattccagaaaattataattctgccatgcctttcaagatcctgtatgacgacggcaagatggttgaggaggtggacggcagggctacccaaaaactcattgtgaatctcaaacccgaaaagtcatattcattcgtgctaaccaaccgagggaatagtgccggaggcttgcaacaccgggttacagccaagaccgccccggatgtgttgagaaccaagcctgcctttatcggcaagaccaatctggatgggatgattactgtgcagttgcccgaggtacccgctaatgagaatatcaaggggtattatattattatcgtgccgctaaaaaaatcgcgcggcaagtttattaaaccatgggagagtccagacgaaatggagctcgatgaactcttgaaagaaatttctagaaagcgcaggtctatcaggtacggcagagaggtggagttgaagccctatattgctgctcacttcgatgtcctgcctacagaattcacactgggcgatgataagcactatggaggcttcactaacaagcaacttcagtcaggccaagaatatgtgttctttgtactggcagtcatggaacacgcggaatcaaaaatgtacgctacgagcccttacagcgacccagtggtgagtatggatctggacccgcagccaataaccgacgaagaagagggtcttatctgggtcgtcggccccgtactcgccgtggtttttatcatttgcatcgtcattgctatcctcctgtacaagcgaaaacgcgctgaatcagattctcgcaaaagttcgatcccgaataataaggaaatacccagccatcacccaacagaccccgtagaactgcggagactgaactttcaaacacccgggtccgatgactccgggtacccaggaaacctgcattcttcatccatggcgtcacaccctccgatcccaatcctcgagctagcagatcacatcgagagactgaaagctaatgacaacctgaaatttagccaggagtatgagtcaatcgaccctggacagcaattcacgtgggagcactcaaatcttgaggtcaacaaaccaaaaaatcggtatgccaatgtcatcgcttacgaccattcgcgtgtcctcctgtcagcaatagaaggcataccagggtctgattatgtcaacgccaattacattgatggatatcgaaaacaaaatgcatatatagctactcaggggagtctgcccgagaccttcggcgatttttggcgaatgatttgggagcagaggagtgccactgttgtgatgatgaccaagctggaggagcgttcacgcgtcaagtgcgatcagtattggccgtcgcgggggaccgaaactcatggcttggttcaggttaccttgctggatacagtagagctagcaacctattgcgttagaaccttcgcactctataaaaatggcagcagcgaaaagcgcgaggtgcgtcagtttcagtttactgcctggccagaccacggcgtcccggagcacccaacgccatttctcgcgtttctccggcgggttaagacctgtaatccgccggacgctggtccaatggtggttcactgctccgcaggtgtggggagaaccggatgttttatcgttattgacgccatgctggagcggatcaagcacgagaagactgtggacatttacggccacgttactttaatgcgagcccaaaggaactacatggtacaaaccgaagaccaatatatctttatccacgacgctttgctcgaagccgttacttgcggcaatactgaggtacctgcacgcaatctgtatgcatacatccagaagctcacgcagatcgagacaggcgaaaatgtaactggcatggagcttgagtttaagaggctggcgagcagtaaggcacatacgagccgttttattagcgccaatcttccttgcaataagttcaagaacagactcgtgaacatcatgccttacgagagtaccagagtatgtttgcagcctattaggggggtggagggatcagattacatcaacgcctccttcattgatgggtaccgccaacagaaagcttacatagccactcagggccccctggccgaaaccaccgaagacttttggaggatgctgtgggagcacaactccaccattgtagtgatgctgacaaaactgcgcgaaatggggagagaaaagtgccaccagtactggccagcagagagaagtgctcgctatcagtacttcgtggttgacccaatggccgaatataatatgcctcaatatatactgcgagagttcaaggtcactgatgcccgggatggacagagccgcaccgtgagacagtttcaattcaccgactggccagaacaaggggtccctaagtctggtgaaggctttatcgactttatcggccaagtgcataaaaccaaggagcagttcggtcaggacggcccaatctctgtgcactgcagtgccggggtcggaaggaccggcgtattcatcacactaagcatcgttctggaacgcatgcgttatgaaggcgttgtggatatctttcagacagtcaagatgctgaggacccagaggccggccatggtccagactgaggatcaatatcagttctcctatagagctgcccttgaatacttggggagcttcgatcactacgcaacctag

SEQ ID NO: 66974 - DNA, 4518 bp, Artificial Sequence
  derived and/or modified sequence
atggtccacgtggctcgtctgttgctccttctgctgacctttttcctcaggacggatgcagagacacctcctcggttcacccgcacccctgtcgaccagacaggtgtgtctgggggagttgcaagtttcatctgtcaggctacaggagacccaaggcctaaaatcgtttggaataagaagggtaagaaggtcagcaaccaacgcttcgaagtgattgagtttgacgacggcagcggaagcgtcctcagaatccagcccctgcgcacacccagagacgaggctatctatgagtgcgtggccagcaacaacgtgggcgaaatctcagtgagtactcgcctcacagtcctgcgggaagatcagatcccacgaggattccctaccattgatatgggaccccagttgaaagtggtggagcgcactagaactgcgacgatgctgtgtgctgccagcgggaaccctgatcctgagattacatggttcaaagactttctgcctgtcgatacaagcaataacaacgggcgaattaaacagctgcggagcgaatcaatcggcgcactgcagatcgagcagagtgaggagtcagatcagggaaagtatgagtgcgtggccactaatagcgccggtacgagatacagcgcccctgctaatttgtacgtgcgcgtgagacgagtcccccctcgcttcagcatccctcccaccaatcacgagataatgcctggaggctcagtgaatataacttgcgtcgccgttggctctccgatgccttatgtgaaatggatgttgggagccgaggatctgactcccgaagatgatatgcccattgggaggaatgtcctggagctgaacgacgtaagacagagcgctaactacacgtgcgttgccatgtctactttgggtgtcatagaggctatcgctcaaatcactgtcaaagctcttcccaagcctcccggaacacctgtggtcaccgagtctactgccaccagcatcacactcacatgggactccggcaacccagaacccgttagctactatatcatccagcataagcccaagaactctgaggagttgtataaggagatcgacggtgtcgctacaactagatactccgtggctggcctaagtccttacagtgattatgagtttcgagtggtggctgtgaacaatattggaagagggccaccctctgagcctgtgttaacccagacatcagagcaagcaccatcctctgcgccaagggacgtacaggcaaggatgctgtcatccaccaccatcctagtccagtggaaggagccggaagaacccaacggtcagatacaggggtacagggtatactatacaatggatccaactcagcatgtaaataattggatgaagcacaacgtagcggactctcagattacgaccattggcaatctggtcccgcaaaaaacctactccgtgaaagtgctggcttttacaagcattggggatgggccattatcaagtgatattcaggtcatcactcaaaccggcgtgcctgggcaacctctgaacttcaaggcagaacccgaatcagaaacatctatcttactcagttggacccccccacgctccgatacaatcgctaactacgagctggtgtataaagacggagaacacggtgaggagcagcgaataacaatcgagcccggaacctcttatcggctccaggggctgaagccaaatagcctttactattttagactggccgcaaggtcccctcaggggcttggggcatcgaccgctgagatttccgcacggaccatgcaatcaatgtttgctaagaatttccatgttaaggccgtcatgaagacttcagtcttgctcagttgggagatcccggagaactacaatagcgcaatgccctttaagattctgtatgatgacggcaagatggtggaggaggttgatgggagggccacccaaaaacttatcgtaaatctgaagcccgaaaagagctactctttcgtcttgacaaataggggaaatagtgcgggtggactccagcatcgagtgacggccaagacagcgccagatgtactgcgaactaaaccagccttcatagggaaaacaaatctcgatgggatgatcactgttcaactgcctgaagtacctgccaacgaaaacatcaagggctactatataatcatcgtgccccttaagaagtccaggggtaaatttattaaaccctgggagtcccctgatgaaatggagctggacgagttgctcaaagagatctcgagaaagcgacggtctatcagatatgggagggaagtagaactcaagccatacatcgccgctcattttgacgtcctccctactgagttcactctgggcgacgacaagcattatggtggtttcaccaacaagcagttgcagtctggtcaagagtacgtgtttttcgtgcttgcagtgatggaacacgccgagagcaagatgtacgctacatcgccctacagtgatccagtggtctcaatggaccttgatccacagcctattacggatgaggaagaagggttgatttgggtcgtaggccctgtgctggccgtcgtgtttattatctgcatcgtcatagctattctcttgtacaagcgcaagcgcgcagaaagcgattcccgcaaatctagcatccctaacaataaggagatcccatcacatcaccctaccgatccagttgagctgagacggctcaactttcagacccccggaagcgatgattcgggctacccgggtaaccttcattcttcttctatggctagccacccaccaatccctattctggagttggctgatcatatagagaggctcaaagccaacgacaatcttaagttttcacaggaatacgagtcgattgaccctggacagcagtttacctgggaacattctaatctggaagtgaacaagcctaagaaccgctatgcaaatgttatagcttatgaccacagtcgcgtgttgctctccgcaatagaaggaatcccgggaagtgattatgtgaacgccaattacattgacggataccggaaacagaacgcatacatcgctacacaaggctcactgcccgagacctttggggatttttggcgcatgatttgggagcagcgttctgctacagttgtcatgatgaccaagctggaggagcggtctcgggtgaaatgcgaccaatattggccctctcgaggcactgagacacacgggcttgttcaggtgacactcctggacactgtggaactggctacttactgcgtaaggacctttgctctctacaaaaatgggtcatcagaaaagagagaagtgaggcagtttcaattcacagcttggcccgaccacggagtgcctgaacaccctacacccttcttggcgttcctgcgcagagttaaaacctgcaatcctcctgacgcgggacctatggtcgttcactgcagcgccggtgttgggcgaacgggttgctttattgtgattgatgcaatgctggagcgtatcaagcacgagaaaaccgtagacatttatgggcacgtaaccctgatgcgcgcacaaagaaattatatggtgcagaccgaggatcagtatatcttcatacatgacgctctgctggaggctgtgacctgtggaaacactgaggtgccggctcgcaacctatatgcttacatccagaagctgacccaaatcgaaaccggcgagaatgtgacagggatggagctagaattcaaacgacttgctagctcaaaggctcacacctcccgctttatttctgccaatctgccctgtaataaattcaaaaacagactggtgaacatcatgccatacgagtctacaagagtgtgtctgcagcccattagaggcgtagaaggcagcgattacatcaacgctagtttcattgatggatacagacagcagaaggcatatatagccacccagggcccactggcagagacaaccgaggatttctggcggatgttatgggaacacaactcgaccatagtcgtaatgctgacaaagctgcgggagatgggcagggagaagtgccatcagtactggcctgccgaacgcagcgcacgctatcagtacttcgtcgtcgaccctatggctgaatataacatgccacagtatattcttagggagttcaaagtaaccgatgctcgcgacgggcagtcccgcaccgtaagacagtttcaatttacagactggccagaacagggagtccctaaatcaggggaaggattcatcgacttcatcggtcaggtgcataagacaaaggagcagttcgggcaggacgggccaatctccgttcattgctccgccggtgtggggcgaaccggggtcttcatcacactcagtatcgtgctggaaaggatgcggtatgagggtgtggtcgacatctttcagaccgtaaaaatgctgaggacccagcggccagctatggttcaaactgaagaccagtaccagttcagctaccgggctgccctagagtatctgggtagctttgaccattatgccacttag

SEQ ID NO: 66975 - DNA, 4518 bp, Artificial Sequence
  derived and/or modified sequence
atggtgcatgtcgccagacttctgctgctcctccttacattctttttaagaaccgatgcggaaaccccaccgaggtttactcgtacgccagtggatcagactggcgtgtccggcggtgttgcatcattcatctgtcaggctacgggcgatccccgtcccaagattgtgtggaataagaaaggcaagaaggtatccaaccagcgatttgaagtgatcgaattcgacgatggatctggaagcgttctccgaatacagcccctacgcacacctagggacgaggctatctacgaatgcgtagctagcaataatgtgggtgagatctcggtgagtacgcggctgaccgtgctgcgggaggaccagatacccaggggtttccctacgattgatatgggtccacagctgaaggtggtcgagcgaacaaggaccgcgactatgctctgcgctgcaagcggtaacccagaccccgaaatcacttggttcaaggatttcctgccggttgatacgtccaataataatggaaggattaagcaactgcgaagtgtgagtatcggggctctgcagatcgagcaatctgaggaatcggatcaggggaagtatgagtgcgtcgcgaccaacagtgccggaaccaggtactctgctcccgcaaacctgtatgtcagagttagaagagtgcctcccagattcagtattcctcctacgaaccatgagattatgccaggcggatccgtcaatatcacttgcgtagccgtgggcagccccatgccctatgtaaaatggatgctgggcgctgaagacctcacccccgaagatgacatgcctatcggacgcaatgtgctggagctgaatgacgtgcggcagagcgccaattatacgtgcgtagctatgtcaactcttggcgtgatagaggcaatcgcccagataactgtcaaagcactgcctaagccgcctggaaccccggtggttacagagagcaccgcgacaagcatcacattaacatgggactctggaaatcctgagcccgtgtcttactacattatccaacataaacctaagaactctgaagagctctacaaggagatcgacggagttgccactacaaggtactctgtggccggtctcagcccctacagcgattacgaattcagagtggtagcagtgaataatattggtcgaggcccaccaagtgagcccgttctgacccagacgtctgagcaagctccaagctcagctccaagagacgttcaggctagaatgctaagtagtacgaccatactggtgcagtggaaagagcccgaggagcctaatggtcaaatccaggggtacagggtgtactacactatggatcctacacaacatgtcaacaattggatgaaacacaatgtggcagattctcaaatcaccacgatcgggaatttggtcccccaaaagacgtattctgtcaaagtgctggcgttcacaagtattggcgacggacccctgagtagcgatattcaggttattactcagacaggggtgcccggacagcccctgaatttcaaagccgaacctgagagcgagacttctatcctgttatcatggacaccaccccgtagcgacaccattgctaactatgagctcgtatacaaggacggggagcatggcgaggaacagcgaatcaccattgaaccagggactagctatagattgcaggggctgaaacccaatagcctgtattactttcggctcgcagccaggtctccacaggggttaggcgcatcaactgccgaaatatcagccaggacaatgcagtctatgtttgcgaaaaattttcacgtgaaggctgtgatgaaaacttctgtcctcttaagctgggaaattccagagaattataatagtgccatgccattcaaaatcctatatgacgacggcaaaatggtcgaagaggtcgatggaagagcaactcagaaattgatcgtcaatttgaagcccgaaaagtcttattccttcgtactgacgaataggggcaattcagctgggggactacaacacagagtcaccgctaagactgctccggatgtcctgcggacaaagcccgcatttattggcaaaaccaacctggatggcatgattaccgtccagttaccagaggtgccagccaatgaaaatattaagggatactatatcatcatcgttcccctgaaaaagtctagagggaagttcatcaagccatgggaaagccccgatgaaatggagttggatgagttgctgaaagagatttcgcgcaaaagacgatccatcaggtacggcagagaagtcgaactgaagccttacatcgccgcacacttcgatgtgctgcctacagagtttacattgggtgatgataagcactatgggggtttcacaaataaacaactacagagcggccaggaatacgtgttctttgtgttggcggtgatggagcatgccgaaagcaaaatgtacgctacgtccccttattccgatcccgtagttagtatggacttagacccacaacctattacagatgaggaagaggggctcatctgggtggttggaccagtgctagccgtcgtgttcatcatatgtatcgtcatcgcgatattgttgtataaaagaaaacgcgctgagtccgactcacggaaatctagcatacccaacaacaaggagatccctagccaccacccaactgatccggtggaattgcggagattgaacttccagacccccggttctgatgatagtggataccccggaaatcttcactcttcatctatggcctctcaccctcctattccaattctcgaactggctgaccacattgagaggctcaaggccaatgataatttgaagttcagtcaagagtacgagtctatcgaccccggacagcagtttacttgggaacattcaaacctcgaagtaaataagcccaagaatcgctatgccaacgtcatcgcgtacgatcattctagagtgctcctcagcgccatagaggggatcccaggatccgactacgtaaacgcaaactatatagatgggtataggaaacagaacgcatacatcgccacccaggggtccctgcctgagaccttcggcgatttctggcgcatgatttgggagcagaggtccgctaccgtcgtcatgatgaccaagctcgaggaaagaagccgtgtaaagtgtgatcaatactggcctagtagaggcacagaaacacacggcctggtacaggtcactctcctcgacaccgtggaactcgccacctactgcgttcgaactttcgccctgtacaagaacggaagttccgaaaagcgcgaagtgcgccagttccaatttacggcgtggcccgaccacggcgtccccgagcacccgactccctttctggcgtttctccgcagagtgaagacctgcaacccacccgatgctggtcctatggtggttcattgttctgccggagtgggccgaaccggatgctttatagttattgacgccatgcttgagcgtatcaagcatgaaaaaactgtggatatttatggtcacgtgaccctcatgagagcacaaagaaattatatggttcaaacggaagatcagtacatcttcatccatgacgccctgttagaggccgttacctgcggcaatactgaggtccccgcaagaaatctttacgcatatatccaaaagttgactcaaatcgaaaccggagagaatgtcacaggtatggaattggagttcaagagattggcctccagtaaagcccacaccagccgatttatatcggcaaatctgccctgcaacaaatttaaaaacaggctggtgaatattatgccctatgaatccacccgggtctgtctacaacctattagaggcgtggaaggttccgattacatcaatgcttccttcatagatggttatagacagcagaaagcatacattgcgacgcagggccctctggccgagacaacagaagacttctggcggatgctctgggaacacaacagcacaattgtcgtcatgttaaccaaattacgcgagatgggacgcgagaagtgccaccagtattggcctgctgaacgcagtgcccgataccagtattttgtagttgatccaatggctgagtacaatatgcctcagtacatccttcgggagttcaaggtcactgatgcaagggacggccagtcacgcacagttcggcagtttcagtttaccgattggcctgaacagggggtgccaaagtcaggggagggttttatcgacttcattgggcaggtgcacaagactaaggagcagttcggccaagatggtcccatctccgtgcattgctctgctggggtcgggagaaccggggtgttcattactctcagtatcgtcctggagcggatgcgatacgagggcgtcgtggatattttccagacagttaagatgctgcgtactcaaaggccagcaatggtgcaaactgaggatcagtaccaattctcttatagagctgctcttgaatatctgggaagctttgatcactatgctacttag

SEQ ID NO: 66976 - DNA, 5038 bp, Artificial Sequence
  derived and/or modified sequence
ccggaggcagtgattccaagctgctcgcgcacgctgctgccaagctgcaggatggtgcacgtagccaggctgctgctgctgctcctcactttcttcctccgcacggatgctgagacacctccaaggtttacacgaacacccgttgatcagacaggggtctctggcggagttgcctctttcatctgccaagctacgggagacccaagacctaaaattgtctggaacaaaaaaggaaagaaagtcagcaatcagagatttgaggtaatagagtttgacgatgggtctggatcagttctcagaatacaacccttacggactccgagggatgaggccatttatgaatgtgtggcctcaaataatgtgggagaaataagtgtatccaccagactcacagttttgcgggaagatcaaattcccaggggcttccctaccattgacatgggcccacagttgaaggtggttgagcgtactcgcacggccaccatgctttgtgcagccagtggtaatccggatccagaaatcacttggtttaaagatttcttacctgtggacacaagcaacaacaatggtcgtattaagcagttacgatcagaatctattggagcccttcagattgagcagagtgaagagtctgaccaaggaaaatatgagtgtgttgccaccaacagcgcgggcactcgctattccgctcctgccaatttatatgtcagagttcgccgtgtcccaccaagattctctatcccacccactaatcatgaaatcatgccaggcggaagcgttaatatcacctgtgtggccgtggggtcaccaatgccttatgtaaagtggatgttgggggcagaagatctgacacctgaagatgatatgccaataggaagaaatgtgctagaactgaatgatgtaagacagtcagcaaattacacctgtgttgctatgtcaacactgggtgtcattgaagcaatagcacagatcactgtcaaagccttacccaaacctccaggaactcctgtagtgaccgagagcacagctacaagcatcacactgacgtgggactctgggaaccctgagcctgtttcttattacataattcagcataaacctaaaaactctgaggaactttacaaagaaattgatggggtggcgaccacacgctacagtgtcgctggactaagtccctactcggattatgaattcagggttgttgctgtcaataacattgggcgggggcctcccagcgaacctgtgctaacacaaacctcagagcaagcaccatccagtgccccgagggatgtccaggcacgaatgttgagttcgaccaccattttggtacagtggaaggaacctgaagagccaaatggacagatccaaggatatagagtttattatacaatggatcccactcaacatgtcaacaactggatgaaacacaatgtagctgacagccaaatcactactattggcaacttagtgccccagaaaacatattctgtcaaagtcctggcttttacctcaattggagatggtcccctttcaagtgacatacaagtcatcactcagacaggagtaccagggcagccactaaacttcaaagcagaacctgagtctgaaacaagtattttgctctcttggacacctccacgttcagataccattgccaactatgaactggtctacaaagatggggagcatggagaggagcaacgaattaccattgagccagggacatcatataggctgcaaggactgaaaccaaacagcttatactatttccgtctggctgcacgctcccctcaaggcctgggtgcttctactgcagaaatatcagctagaaccatgcagtcaatgtttgcaaaaaattttcatgtcaaagcagtaatgaagacttccgtgttgctgtcttgggagattccagagaattataactccgccatgcctttcaaaattctttatgatgatgggaaaatggtagaagaagtggatggccgagccacacagaagttaattgtcaacctgaagcctgagaaatcatattcatttgtgctgacaaatcgtggaaacagtgctggtgggctgcagcacagggtcacggcaaagactgcaccagatgtattacgtaccaagcctgccttcattgggaagaccaacttggatggcatgattactgtgcaactgcctgaagtacctgcaaatgagaatataaaaggttactacataataattgtgcctttgaagaaatctcgcgggaaatttatcaagccatgggagagtccagatgaaatggaattagatgagctgcttaaggagatatctaggaagcgcagaagcatccgttatgggagagaagttgaattaaagccatatattgccgctcactttgatgtccttcccactgagttcaccctgggggatgacaagcattatggtggatttacaaacaagcaactccaaagtggtcaagaatatgtcttctttgtgttagcagtaatggaacatgcagagtctaagatgtatgcaaccagcccttactccgaccccgtggtgtcaatggatctggatccgcagccaatcacggatgaagaagaaggcttgatctgggttgtaggtcctgtccttgcagtggtctttatcatctgcattgtcattgctattcttctttataaaaggaagagggcagagtccgactctagaaaaagcagcataccgaacaataaggagatcccttcacaccacccaacagaccctgtagaactgaggcgccttaactttcaaacaccgggttcagatgattccggttaccctggtaaccttcattcttcaagtatggctagccatcctccaatacccatcttggaacttgcagaccacattgaaagattgaaagcaaatgacaacttgaagttttcccaggaatatgagtcaattgaccctggccagcagttcacttgggaacattcaaacttggaagtaaacaaaccaaagaatagatacgcgaatgtaatcgcatatgatcattcccgggttctcctatcagctatagaagggatcccaggaagtgactatgtgaatgccaactacatagatgggtataggaagcaaaatgcctatattgcaacacagggatctctccccgaaacatttggggacttttggagaatgatatgggaacaacggagtgccacagttgtcatgatgacaaaactagaagaaagatcaagggtgaagtgtgaccagtattggcctagcagaggcacagaaacccacggactcgttcaagtaacgctgcttgatactgtggagctggccacatattgtgttcgaacatttgcactttacaagaatggttcaagtgagaagagagaagtgagacaattccagttcaccgcctggcctgatcatggtgttccagaacaccctacaccttttctagctttcttacgtagagtcaaaacctgtaaccctcccgatgctggtccgatggttgtgcactgcagtgcgggagttggccggactggttgcttcatcgtcatagatgccatgttagaaagaataaagcatgaaaaaactgtagatatttatggccatgtaactttaatgagagcccagaggaactatatggttcaaacagaagaccaatacatctttatccatgatgcactgttagaagcagtgacttgtggaaataccgaagtgccagctagaaacttgtatgcctacattcagaagctgacacaaatagaaacgggagagaatgtcacaggaatggagctcgaatttaagcgtctagccagctcaaaagctcacacctcaaggtttatcagtgccaatcttccatgtaataaattcaaaaatcgccttgttaatattatgccatatgaatccacaagggtatgcctgcagcctatccgtggagtagaaggatctgattacatcaatgccagttttattgatggatacagacaacagaaagcctacatcgctacccaggggcccttggcagagaccactgaagacttctggcggatgctctgggaacacaattccaccatagttgtgatgctcaccaagctgcgtgaaatgggcagagagaaatgtcaccaatactggccagcagaacggtctgcaagataccagtactttgttgtagatcccatggctgagtacaacatgccacagtatatcctaagggaattcaaggtcacagatgccagggacggccagtcccgaacagtaaggcagttccagttcactgactggccagagcaaggagtgccaaagtccggagaaggatttattgacttcatcggccaagtccataaaacaaaagaacagtttggccaagatggacccatttcagtccattgcagcgcgggcgttggaagaactggagtcttcataacgctaagcattgttttggaaagaatgagatatgaaggagttgtagatatcttccagactgtcaaaatgttaagaacacaacgaccagctatggtacagacagaggatcaatatcagttttcctatcgtgccgcactagagtacctgggcagctttgaccactatgcaacgtagaaacccctgacccattctggatttttactacaggcccttcaatatccatggagtctcttctgagccatacagggcacttgagaagtccttcttaacttctagctaacaactacttagtgggactattacacacaaaacaaattaaaaacaaattattccaggtggaccaagaattcacagtttaataatctaacctgaaaaataatgaagagaatcctgactgatgaggcatctgaaggattttatttacagatacctcaaggattcaaaatcaagggaagaagaaatcacagcaaagaaccaccatcttattcaggattgcttgaaaggtgcaaggagaaattgccagaatgctgcagttcagcacaagatatgtgctggtgtggcttctcacaatgaaacggactctgctttgacatcgccccttcccaccatactgctcataataacattttagggggaaagggga

SEQ ID NO: 66977 - DNA, 8248 bp, Artificial Sequence
  derived and/or modified sequence
gctctgaaagtgttccagctgaaatttcagatcggacagactcgctgcggctccggaggcagtgattccaagctgctcgcgcacgctgctgccaagctgcaggatggtgcacgtagccaggctgctgctgctgctcctcactttcttcctccgcacggatgctgagacacctccaaggtttacacgaacacccgttgatcagacaggggtctctggcggagttgcctctttcatctgccaagctacgggagacccaagacctaaaattgtctggaacaaaaaaggaaagaaagtcagcaatcagagatttgaggtaatagagtttgacgatgggtctggatcagttctcagaatacaacccttacggactccgagggatgaggccatttatgaatgtgtggcctcaaataatgtgggagaaataagtgtatccaccagactcacagttttgcgggaagatcaaattcccaggggcttccctaccattgacatgggcccacagttgaaggtggttgagcgtactcgcacggccaccatgctttgtgcagccagtggtaatccggatccagaaatcacttggtttaaagatttcttacctgtggacacaagcaacaacaatggtcgtattaagcagttacgatcagtatccataggagcccttcagattgagcagagtgaagagtctgaccaaggaaaatatgagtgtgttgccaccaacagcgcgggcactcgctattccgctcctgccaatttatatgtcagagttcgccgtgtcccaccaagattctctatcccacccactaatcatgaaatcatgccaggcggaagcgttaatatcacctgtgtggccgtggggtcaccaatgccttatgtaaagtggatgttgggggcagaagatctgacacctgaagatgatatgccaataggaagaaatgtgctagaactgaatgatgtaagacagtcagcaaattacacctgtgttgctatgtcaacactgggtgtcattgaagcaatagcacagatcactgtcaaagccttacccaaacctccaggaactcctgtagtgaccgagagcacagctacaagcatcacactgacgtgggactctgggaaccctgagcctgtttcttattacataattcagcataaacctaaaaactctgaggaactttacaaagaaattgatggggtggcgaccacacgctacagtgtcgctggactaagtccctactcggattatgaattcagggttgttgctgtcaataacattgggcgggggcctcccagcgaacctgtgctaacacaaacctcagagcaagcaccatccagtgccccgagggatgtccaggcacgaatgttgagttcgaccaccattttggtacagtggaaggaacctgaagagccaaatggacagatccaaggatatagagtttattatacaatggatcccactcaacatgtcaacaactggatgaaacacaatgtagctgacagccaaatcactactattggcaacttagtgccccagaaaacatattctgtcaaagtcctggcttttacctcaattggagatggtcccctttcaagtgacatacaagtcatcactcagacaggagtaccagggcagccactaaacttcaaagcagaacctgagtctgaaacaagtattttgctctcttggacacctccacgttcagataccattgccaactatgaactggtctacaaagatggggagcatggagaggagcaacgaattaccattgagccagggacatcatataggctgcaaggactgaaaccaaacagcttatactatttccgtctggctgcacgctcccctcaaggcctgggtgcttctactgcagaaatatcagctagaaccatgcagtcaatgtttgcaaaaaattttcatgtcaaagcagtaatgaagacttccgtgttgctgtcttgggagattccagagaattataactccgccatgcctttcaaaattctttatgatgatgggaaaatggtagaagaagtggatggccgagccacacagaagttaattgtcaacctgaagcctgagaaatcatattcatttgtgctgacaaatcgtggaaacagtgctggtgggctgcagcacagggtcacggcaaagactgcaccagatgtattacgtaccaagcctgccttcattgggaagaccaacttggatggcatgattactgtgcaactgcctgaagtacctgcaaatgagaatataaaaggttactacataataattgtgcctttgaagaaatctcgcgggaaatttatcaagccatgggagagtccagatgaaatggaattagatgagctgcttaaggagatatctaggaagcgcagaagcatccgttatgggagagaagttgaattaaagccatatattgccgctcactttgatgtccttcccactgagttcaccctgggggatgacaagcattatggtggatttacaaacaagcaactccaaagtggtcaagaatatgtcttctttgtgttagcagtaatggaacatgcagagtctaagatgtatgcaaccagcccttactccgaccccgtggtgtcaatggatctggatccgcagccaatcacggatgaagaagaaggcttgatctgggttgtaggtcctgtccttgcagtggtctttatcatctgcattgtcattgctattcttctttataaaaggaagagggcagagtccgactctagaaaaagcagcataccgaacaataaggagatcccttcacaccacccaacagaccctgtagaactgaggcgccttaactttcaaacaccgggttcagatgattccggttaccctggtaaccttcattcttcaagtatggctagccatcctccaatacccatcttggaacttgcagaccacattgaaagattgaaagcaaatgacaacttgaagttttcccaggaatatgagtcaattgaccctggccagcagttcacttgggaacattcaaacttggaagtaaacaaaccaaagaatagatacgcgaatgtaatcgcatatgatcattcccgggttctcctatcagctatagaagggatcccaggaagtgactatgtgaatgccaactacatagatgggtataggaagcaaaatgcctatattgcaacacagggatctctccccgaaacatttggggacttttggagaatgatatgggaacaacggagtgccacagttgtcatgatgacaaaactagaagaaagatcaagggtgaagtgtgaccagtattggcctagcagaggcacagaaacccacggactcgttcaagtaacgctgcttgatactgtggagctggccacatattgtgttcgaacatttgcactttacaagaatggttcaagtgagaagagagaagtgagacaattccagttcaccgcctggcctgatcatggtgttccagaacaccctacaccttttctagctttcttacgtagagtcaaaacctgtaaccctcccgatgctggtccgatggttgtgcactgcagtgcgggagttggccggactggttgcttcatcgtcatagatgccatgttagaaagaataaagcatgaaaaaactgtagatatttatggccatgtaactttaatgagagcccagaggaactatatggttcaaacagaagaccaatacatctttatccatgatgcactgttagaagcagtgacttgtggaaataccgaagtgccagctagaaacttgtatgcctacattcagaagctgacacaaatagaaacgggagagaatgtcacaggaatggagctcgaatttaagcgtctagccagctcaaaagctcacacctcaaggtttatcagtgccaatcttccatgtaataaattcaaaaatcgccttgttaatattatgccatatgaatccacaagggtatgcctgcagcctatccgtggagtagaaggatctgattacatcaatgccagttttattgatggatacagacaacagaaagcctacatcgctacccaggggcccttggcagagaccactgaagacttctggcggatgctctgggaacacaattccaccatagttgtgatgctcaccaagctgcgtgaaatgggcagagagaaatgtcaccaatactggccagcagaacggtctgcaagataccagtactttgttgtagatcccatggctgagtacaacatgccacagtatatcctaagggaattcaaggtcacagatgccagggacggccagtcccgaacagtaaggcagttccagttcactgactggccagagcaaggagtgccaaagtccggagaaggatttattgacttcatcggccaagtccataaaacaaaagaacagtttggccaagatggacccatttcagtccattgcagcgcgggcgttggaagaactggagtcttcataacgctaagcattgttttggaaagaatgagatatgaaggagttgtagatatcttccagactgtcaaaatgttaagaacacaacgaccagctatggtacagacagaggatcaatatcagttttcctatcgtgccgcactagagtacctgggcagctttgaccactatgcaacgtagaaacccctgacccattctggatttttactacaggcccttcaatatccatggagtctcttctgagccatacagggcacttgagaagtccttcttaacttctagctaacaactacttagtgggactattacacacaaaacaaattaaaaacaaattattccaggtggaccaagaattcacagtttaataatctaacctgaaaaataatgaagagaatcctgactgatgaggcatctgaaggattttatttacagatacctcaaggattcaaaatcaagggaagaagaaatcacagcaaagaaccaccatcttattcaggattgcttgaaaggtgcaaggagaaattgccagaatgctgcagttcagcacaagatatgtgctggtgtggcttctcacaatgaaacggactctgctttgacatcgccccttcccaccatactgctcataataacattttagggggaaaggggagggaatgtttaaaaagaaagtccttgatttagttttttagtattgtaaagatactgctgacctgtgcttcatttctaactgtgtaaacttttttttaacaaaatgtatcattcgataaagtgaattttaaaaaagttacataactcttcatttttttatttccaaatcgtaggtttttttaagctgtagaactgttatctgtaatatcttgctgtagaaatatcaaatcatttgaaaatttgcacatttttgtgcaaaactcaatctacagtatcagtctcgtcagatatattaattttacacttcagttttgattggtgagaaagtacccattctcttcaaataatcaaagataattattattttgttttgtttttggaatcaacagggaggcgcaaagtataaagttgctgctaacatatatacatatatatccatattttataagggtgtctatgtatatatagacagtgtgtccacacaaaaaatagatacagttatcagtcagtcagttcttccatgatttagtttttttaaacgtagaaaagctattgtaaacatctctttccatttattcttaattttttgacatattggtatttctttaaagggaaatgaggaatgcacatcagtgattgattgtcaaacctcaccccctgatttcctacctaatctacccccacctaaccaatcaatcacatccacaaattgttttgtttgtttgttagtcaggcttccaacaaagttcaatatttctaacactctagtgcaataaaaattattattaaatagctaagaggtgtgcatgtgggaaaggtcagtgcatatccctttaggaggggagaatgttgtaatatatcagctatcgagttgtttaaaaaaagtgtattcaatcgtatattgtctatagtatgtgctatgaaatttgcatttatgatatgtaacaggggcaaagccaaattcatgttactctgttcagtcagaaacattttgtggcatacagcattcctgggaagtgctgtactttgtttcgttttggttttagttttgcatttagagtgccttataattgatgcctattttaatagcatttctttttagcttttggttcgtatttccattcactgttcgtatctgttactttctattaaagcattatctgtttaccacatgtacaaaaactctttgaataatatgcattcctagttttcagccaagtcggggatgttagtgattgtaccagcccaaagcacttggataatcagggcccttcttccttttataatcaatcatcaacatcagaaaaagctacttgttttatttatattcccttccaaatccgctctggaacatgcagtaactgcaccaaacttattttagtaacaaatatcattggcaactttggaatatatttgatattccattaggatttttctaaaaggggaaataaactatatatatatatgtatcttacccccaattcttccaacagaatttctataggaagccatggatgatggcataagtttgccacatattacatgattttaaataatcctcaaaatacccaaggaactcttaaagagttttggtatgagtatactactttggtttaattttagcttcatggatgttctgcatggaaggatttttgttttccacattttcccattgctagcagagtgaaatccaagagaccaaacatttgcaagcattgtatttgagcacttttgtaaaaaacaaagaaaaagaaaaaaaagaaaatatatataatactaaaaaaaagtatctagaaggctacctcagaatgagactctctaacctacatcagaaccagagaagaatgtgcactatgtgggtctgttatcattattttcttttagtttgtatctttttggagatttatccaagtgccagattactcagtgctataattttcttttagttaaacaaagggggtcagacagacattgcatcatccagacatgccttgttggacatgtagaatccgatggagcactgcacaccagaatgattggccaatgagcagcttctctccctgaaacaataactgcccatttggcaaagggaaagatgacaataatcagaagaagaaaatgaatgggatgcataccatagacgaacgaggcggagactattgcgggaatcttactgttcaggagctgttcctagaactaactcccttactgtcattgatgtgcattccactctgtgcttttctgtacaaccattcaagttttaatttcccaggtgaaccatctttatctgccattaccacaagctttcaagtttccagttattttcatcatcataaccagtacggtgctattatttacctatgtacgtgtagttatgtataattttgtaattagttacaatggtaaaaaaaatcaaaatatataaaaagtgatttgtacagaactttattttagctcttttttaaaaatgatttgcatggttagaaaacggcgaggacagccaggggagggaagggcctctagggaactttgcactttctatacctttgtactatgcactgccctattgattctacacccaataatgatattacttgaacccatctgtaagaaactgcttcggaaattcatttgtgtgtatgtaaataacacaacatagaaacaggaagggaaaaaagtctgcagtaatgcacgtattttttttctttcctgtttattttcggttttgctttaagtccttttatttttaattccctttttgtttttctttttgggttttggttccttttgggtttatgggtgccctgatactccagcagagatcagaaggctacagatccattctatccatccgttatgtggctttgccatcccagcttggagtgtctttacaaagataataacagttgtgttctttgctctcgttttggatgcatagactgaaaaattaaaacaaataacttgtaaaatggcttgttaaaaaatacaattacctctaattagtagtacgcgtaaatgttttacagaatgaaaggcgtgctttttattttcttacttcgttacattggtggcgaaagaagtctgtatgaaaatcagttctttgctgacacaagttccatttgttacaaatgaattctaataaaaatgtcagtgttatgc

SEQ ID NO: 66978 - DNA, 4518 bp, Artificial Sequence
  derived and/or modified sequence
atggtgcacgtggccagactgctgctgctgctgctgaccttcttcctgagaaccgacgccgagaccccccccagattcaccagaacccccgtggaccagaccggcgtgagcggcggcgtggccagcttcatctgccaggccaccggcgaccccagacccaagatcgtgtggaacaagaagggcaagaaggtgagcaaccagagattcgaggtgatcgagttcgacgacggcagcggcagcgtgctgagaatccagcccctgagaacccccagagacgaggccatctacgagtgcgtggccagcaacaacgtgggcgagatcagcgtgagcaccagactgaccgtgctgagagaggaccagatccccagaggcttccccaccatcgacatgggcccccagctgaaggtggtggagagaaccagaaccgccaccatgctgtgcgccgccagcggcaaccccgaccccgagatcacctggttcaaggacttcctgcccgtggacaccagcaacaacaacggcagaatcaagcagctgagaagcgagagcatcggcgccctgcagatcgagcagagcgaggagagcgaccagggcaagtacgagtgcgtggccaccaacagcgccggcaccagatacagcgcccccgccaacctgtacgtgagagtgagaagagtgccccccagattcagcatcccccccaccaaccacgagatcatgcccggcggcagcgtgaacatcacctgcgtggccgtgggcagccccatgccctacgtgaagtggatgctgggcgccgaggacctgacccccgaggacgacatgcccatcggcagaaacgtgctggagctgaacgacgtgagacagagcgccaactacacctgcgtggccatgagcaccctgggcgtgatcgaggccatcgcccagatcaccgtgaaggccctgcccaagccccccggcacccccgtggtgaccgagagcaccgccaccagcatcaccctgacctgggacagcggcaaccccgagcccgtgagctactacatcatccagcacaagcccaagaacagcgaggagctgtacaaggagatcgacggcgtggccaccaccagatacagcgtggccggcctgagcccctacagcgactacgagttcagagtggtggccgtgaacaacatcggcagaggcccccccagcgagcccgtgctgacccagaccagcgagcaggcccccagcagcgcccccagagacgtgcaggccagaatgctgagcagcaccaccatcctggtgcagtggaaggagcccgaggagcccaacggccagatccagggctacagagtgtactacaccatggaccccacccagcacgtgaacaactggatgaagcacaacgtggccgacagccagatcaccaccatcggcaacctggtgccccagaagacctacagcgtgaaggtgctggccttcaccagcatcggcgacggccccctgagcagcgacatccaggtgatcacccagaccggcgtgcccggccagcccctgaacttcaaggccgagcccgagagcgagaccagcatcctgctgagctggaccccccccagaagcgacaccatcgccaactacgagctggtgtacaaggacggcgagcacggcgaggagcagagaatcaccatcgagcccggcaccagctacagactgcagggcctgaagcccaacagcctgtactacttcagactggccgccagaagcccccagggcctgggcgccagcaccgccgagatcagcgccagaaccatgcagagcatgttcgccaagaacttccacgtgaaggccgtgatgaagaccagcgtgctgctgagctgggagatccccgagaactacaacagcgccatgcccttcaagatcctgtacgacgacggcaagatggtggaggaggtggacggcagagccacccagaagctgatcgtgaacctgaagcccgagaagagctacagcttcgtgctgaccaacagaggcaacagcgccggcggcctgcagcacagagtgaccgccaagaccgcccccgacgtgctgagaaccaagcccgccttcatcggcaagaccaacctggacggcatgatcaccgtgcagctgcccgaggtgcccgccaacgagaacatcaagggctactacatcatcatcgtgcccctgaagaagagcagaggcaagttcatcaagccctgggagagccccgacgagatggagctggacgagctgctgaaggagatcagcagaaagagaagaagcatcagatacggcagagaggtggagctgaagccctacatcgccgcccacttcgacgtgctgcccaccgagttcaccctgggcgacgacaagcactacggcggcttcaccaacaagcagctgcagagcggccaggagtacgtgttcttcgtgctggccgtgatggagcacgccgagagcaagatgtacgccaccagcccctacagcgaccccgtggtgagcatggacctggacccccagcccatcaccgacgaggaggagggcctgatctgggtggtgggccccgtgctggccgtggtgttcatcatctgcatcgtgatcgccatcctgctgtacaagagaaagagagccgagagcgacagcagaaagagcagcatccccaacaacaaggagatccccagccaccaccccaccgaccccgtggagctgagaagactgaacttccagacccccggcagcgacgacagcggctaccccggcaacctgcacagcagcagcatggccagccacccccccatccccatcctggagctggccgaccacatcgagagactgaaggccaacgacaacctgaagttcagccaggagtacgagagcatcgaccccggccagcagttcacctgggagcacagcaacctggaggtgaacaagcccaagaacagatacgccaacgtgatcgcctacgaccacagcagagtgctgctgagcgccatcgagggcatccccggcagcgactacgtgaacgccaactacatcgacggctacagaaagcagaacgcctacatcgccacccagggcagcctgcccgagaccttcggcgacttctggagaatgatctgggagcagagaagcgccaccgtggtgatgatgaccaagctggaggagagaagcagagtgaagtgcgaccagtactggcccagcagaggcaccgagacccacggcctggtgcaggtgaccctgctggacaccgtggagctggccacctactgcgtgagaaccttcgccctgtacaagaacggcagcagcgagaagagagaggtgagacagttccagttcaccgcctggcccgaccacggcgtgcccgagcaccccacccccttcctggccttcctgagaagagtgaagacctgcaacccccccgacgccggccccatggtggtgcactgcagcgccggcgtgggcagaaccggctgcttcatcgtgatcgacgccatgctggagagaatcaagcacgagaagaccgtggacatctacggccacgtgaccctgatgagagcccagagaaactacatggtgcagaccgaggaccagtacatcttcatccacgacgccctgctggaggccgtgacctgcggcaacaccgaggtgcccgccagaaacctgtacgcctacatccagaagctgacccagatcgagaccggcgagaacgtgaccggcatggagctggagttcaagagactggccagcagcaaggcccacaccagcagattcatcagcgccaacctgccctgcaacaagttcaagaacagactggtgaacatcatgccctacgagagcaccagagtgtgcctgcagcccatcagaggcgtggagggcagcgactacatcaacgccagcttcatcgacggctacagacagcagaaggcctacatcgccacccagggccccctggccgagaccaccgaggacttctggagaatgctgtgggagcacaacagcaccatcgtggtgatgctgaccaagctgagagagatgggcagagagaagtgccaccagtactggcccgccgagagaagcgccagataccagtacttcgtggtggaccccatggccgagtacaacatgccccagtacatcctgagagagttcaaggtgaccgacgccagagacggccagagcagaaccgtgagacagttccagttcaccgactggcccgagcagggcgtgcccaagagcggcgagggcttcatcgacttcatcggccaggtgcacaagaccaaggagcagttcggccaggacggccccatcagcgtgcactgcagcgccggcgtgggcagaaccggcgtgttcatcaccctgagcatcgtgctggagagaatgagatacgagggcgtggtggacatcttccagaccgtgaagatgctgagaacccagagacccgccatggtgcagaccgaggaccagtaccagttcagctacagagccgccctggagtacctgggcagcttcgaccactacgccacctag

SEQ ID NO: 66979 - DNA, 4518 bp, Artificial Sequence
  derived and/or modified sequence
atggtgcacgtggccagactgctgctgctgctgctgaccttcttcctgagaaccgacgccgagaccccccccagattcaccagaacccccgtggaccagaccggcgtgagcggcggcgtggccagcttcatctgccaggccaccggcgaccccagacccaagatcgtgtggaacaagaagggcaagaaggtgagcaaccagagattcgaggtgatcgagttcgacgacggcagcggcagcgtgctgagaatccagcccctgagaacccccagagacgaggccatctacgagtgcgtggccagcaacaacgtgggcgagatcagcgtgagcaccagactgaccgtgctgagagaggaccagatccccagaggcttccccaccatcgacatgggcccccagctgaaggtggtggagagaaccagaaccgccaccatgctgtgcgccgccagcggcaaccccgaccccgagatcacctggttcaaggacttcctgcccgtggacaccagcaacaacaacggcagaatcaagcagctgagaagcgtgagcatcggcgccctgcagatcgagcagagcgaggagagcgaccagggcaagtacgagtgcgtggccaccaacagcgccggcaccagatacagcgcccccgccaacctgtacgtgagagtgagaagagtgccccccagattcagcatcccccccaccaaccacgagatcatgcccggcggcagcgtgaacatcacctgcgtggccgtgggcagccccatgccctacgtgaagtggatgctgggcgccgaggacctgacccccgaggacgacatgcccatcggcagaaacgtgctggagctgaacgacgtgagacagagcgccaactacacctgcgtggccatgagcaccctgggcgtgatcgaggccatcgcccagatcaccgtgaaggccctgcccaagccccccggcacccccgtggtgaccgagagcaccgccaccagcatcaccctgacctgggacagcggcaaccccgagcccgtgagctactacatcatccagcacaagcccaagaacagcgaggagctgtacaaggagatcgacggcgtggccaccaccagatacagcgtggccggcctgagcccctacagcgactacgagttcagagtggtggccgtgaacaacatcggcagaggcccccccagcgagcccgtgctgacccagaccagcgagcaggcccccagcagcgcccccagagacgtgcaggccagaatgctgagcagcaccaccatcctggtgcagtggaaggagcccgaggagcccaacggccagatccagggctacagagtgtactacaccatggaccccacccagcacgtgaacaactggatgaagcacaacgtggccgacagccagatcaccaccatcggcaacctggtgccccagaagacctacagcgtgaaggtgctggccttcaccagcatcggcgacggccccctgagcagcgacatccaggtgatcacccagaccggcgtgcccggccagcccctgaacttcaaggccgagcccgagagcgagaccagcatcctgctgagctggaccccccccagaagcgacaccatcgccaactacgagctggtgtacaaggacggcgagcacggcgaggagcagagaatcaccatcgagcccggcaccagctacagactgcagggcctgaagcccaacagcctgtactacttcagactggccgccagaagcccccagggcctgggcgccagcaccgccgagatcagcgccagaaccatgcagagcatgttcgccaagaacttccacgtgaaggccgtgatgaagaccagcgtgctgctgagctgggagatccccgagaactacaacagcgccatgcccttcaagatcctgtacgacgacggcaagatggtggaggaggtggacggcagagccacccagaagctgatcgtgaacctgaagcccgagaagagctacagcttcgtgctgaccaacagaggcaacagcgccggcggcctgcagcacagagtgaccgccaagaccgcccccgacgtgctgagaaccaagcccgccttcatcggcaagaccaacctggacggcatgatcaccgtgcagctgcccgaggtgcccgccaacgagaacatcaagggctactacatcatcatcgtgcccctgaagaagagcagaggcaagttcatcaagccctgggagagccccgacgagatggagctggacgagctgctgaaggagatcagcagaaagagaagaagcatcagatacggcagagaggtggagctgaagccctacatcgccgcccacttcgacgtgctgcccaccgagttcaccctgggcgacgacaagcactacggcggcttcaccaacaagcagctgcagagcggccaggagtacgtgttcttcgtgctggccgtgatggagcacgccgagagcaagatgtacgccaccagcccctacagcgaccccgtggtgagcatggacctggacccccagcccatcaccgacgaggaggagggcctgatctgggtggtgggccccgtgctggccgtggtgttcatcatctgcatcgtgatcgccatcctgctgtacaagagaaagagagccgagagcgacagcagaaagagcagcatccccaacaacaaggagatccccagccaccaccccaccgaccccgtggagctgagaagactgaacttccagacccccggcagcgacgacagcggctaccccggcaacctgcacagcagcagcatggccagccacccccccatccccatcctggagctggccgaccacatcgagagactgaaggccaacgacaacctgaagttcagccaggagtacgagagcatcgaccccggccagcagttcacctgggagcacagcaacctggaggtgaacaagcccaagaacagatacgccaacgtgatcgcctacgaccacagcagagtgctgctgagcgccatcgagggcatccccggcagcgactacgtgaacgccaactacatcgacggctacagaaagcagaacgcctacatcgccacccagggcagcctgcccgagaccttcggcgacttctggagaatgatctgggagcagagaagcgccaccgtggtgatgatgaccaagctggaggagagaagcagagtgaagtgcgaccagtactggcccagcagaggcaccgagacccacggcctggtgcaggtgaccctgctggacaccgtggagctggccacctactgcgtgagaaccttcgccctgtacaagaacggcagcagcgagaagagagaggtgagacagttccagttcaccgcctggcccgaccacggcgtgcccgagcaccccacccccttcctggccttcctgagaagagtgaagacctgcaacccccccgacgccggccccatggtggtgcactgcagcgccggcgtgggcagaaccggctgcttcatcgtgatcgacgccatgctggagagaatcaagcacgagaagaccgtggacatctacggccacgtgaccctgatgagagcccagagaaactacatggtgcagaccgaggaccagtacatcttcatccacgacgccctgctggaggccgtgacctgcggcaacaccgaggtgcccgccagaaacctgtacgcctacatccagaagctgacccagatcgagaccggcgagaacgtgaccggcatggagctggagttcaagagactggccagcagcaaggcccacaccagcagattcatcagcgccaacctgccctgcaacaagttcaagaacagactggtgaacatcatgccctacgagagcaccagagtgtgcctgcagcccatcagaggcgtggagggcagcgactacatcaacgccagcttcatcgacggctacagacagcagaaggcctacatcgccacccagggccccctggccgagaccaccgaggacttctggagaatgctgtgggagcacaacagcaccatcgtggtgatgctgaccaagctgagagagatgggcagagagaagtgccaccagtactggcccgccgagagaagcgccagataccagtacttcgtggtggaccccatggccgagtacaacatgccccagtacatcctgagagagttcaaggtgaccgacgccagagacggccagagcagaaccgtgagacagttccagttcaccgactggcccgagcagggcgtgcccaagagcggcgagggcttcatcgacttcatcggccaggtgcacaagaccaaggagcagttcggccaggacggccccatcagcgtgcactgcagcgccggcgtgggcagaaccggcgtgttcatcaccctgagcatcgtgctggagagaatgagatacgagggcgtggtggacatcttccagaccgtgaagatgctgagaacccagagacccgccatggtgcagaccgaggaccagtaccagttcagctacagagccgccctggagtacctgggcagcttcgaccactacgccacctag

SEQ ID NO: 66980 - protein, 298 aa, Artificial Sequence
  derived and/or modified sequence
MGSSEDQAYRLLNDYANGFMVSQVLFAACELGVFDLLAEAPGPLDVAAVAAGVRASAHGTELLLDICVSLKLLKVETRGGKAFYRNTELSSDYLTTVSPTSQCSMLKYMGRTSYRCWGHLADAVREGRNQYLETFGVPAEELFTAIYRSEGERLQFMQALQEVWSVNGRSVLTAFDLSVFPLMCDLGGDFFKDPLPEADLYILARVLHDWADGKCSHLLERIYHTCKPGGGILVIESLLDEDRRGPLLTQLYSLNMLVQTEGQERTPTHYHMLLSSAGFRDFQFKKTGAIYDAILARK

SEQ ID NO: 66981 - DNA, 897 bp, Artificial Sequence
  derived and/or modified sequence
atgggctcttccgaggaccaggcgtacaggctgcttaatgattatgctaatggcttcatggtgtcgcaggtcttgttcgctgcttgcgaactgggcgtgttcgacctgttagcagaggcgccaggccccctggacgtggccgccgttgccgccggggtaagagcgtcggcccacggtaccgagctgctcctggatatttgtgtctcgttgaaactgctcaaggtggaaacccggggcggaaaagccttctaccgcaacactgaacttagcagcgactatttgacaaccgtatctcccacttcccagtgcagtatgctgaagtatatgggccggacatcttatcgttgttgggggcaccttgccgacgcagttagggagggacgcaaccagtaccttgaaactttcggagtgcctgctgaggagttatttacagccatctatcggtctgaaggagagcggctgcagttcatgcaggctctgcaagaagtctggtccgtcaatggtaggagtgtactgacagcattcgacttatctgtgttccccttgatgtgcgacctgggcggcgatttttttaaggatccactgcccgaggcagacctgtatatactggcaagagtcttgcacgattgggccgacgggaagtgtagccaccttctggagagaatttatcatacatgcaagccaggaggtgggattcttgtcatagagtccctgcttgatgaggacaggaggggaccgctgttgacacagctgtattctctcaacatgctcgtgcaaacggaaggccaggagcggacgccaactcactaccatatgctgttgtcctccgcaggttttcgggactttcagttcaagaagaccggtgctatatacgatgctattcttgcaaggaagtag

SEQ ID NO: 66982 - DNA, 375 bp, Artificial Sequence
  derived and/or modified sequence
gattgtcgcttaacctccgtatgtctaccgtgcgtaccaggagatttcttcaaggaccctcttccagaggcggatttgtatatcctggcaagagtcctccacgattgggccgacggaaagtgcagccacttgctggagcgtatctaccacacctgcaagccgggtggtggcattctggtaatcgagagtttgctcgatgaggacaggaggggaccgctgctgacccaattatacagcctgaatatgctggtccagaccgaaggacaggagcgcacgccaacccactatcatatgttgctgtcttccgccggatttcgggatttccagtttaaaaagaccggggccatttatgacgccattctggccagaaagtag

SEQ ID NO: 66983 - DNA, 897 bp, Artificial Sequence
  derived and/or modified sequence
atgggcagcagcgaggaccaggcctaccgcctgctgaatgactatgccaacggcttcatggtgtcccaggtgctgtttgctgcctgtgagctgggcgtgtttgacctgctggccgaggcccctggccccctggatgtggccgctgtggccgccggcgtgcgggccagcgcccacggcacagagctgctgctggacatctgtgtgtccctgaagctgctgaaggtggagacccggggcggcaaggccttctacagaaacacagagctgagcagtgactacctgaccaccgtgagccccaccagccagtgcagcatgctgaagtacatgggccgcaccagctaccgctgctggggccacctggctgatgctgtgcgggagggcaggaaccagtacctggagacctttggagtgcctgctgaggagctgttcaccgccatctacagaagtgaaggagagcggctgcagttcatgcaggccctgcaggaggtgtggagcgtgaatggccgctctgtgctgacagcctttgacctgagcgtcttccccctgatgtgtgacctgggcggggacttcttcaaggaccccctgcctgaggccgacctgtacatcctggcccgggtgctgcatgactgggcagatggcaagtgcagccacctgctggagcgcatctaccacacctgcaagccaggcggcggcatcctggtgattgagagcctgctggatgaagatagaagaggccccctgctgacccagctgtacagcctgaacatgctggtgcagacagagggccaggagaggacccccacccactaccacatgctgctgagcagcgctggcttccgggacttccagttcaagaagacaggagccatctatgatgccatcctggccaggaagtag

SEQ ID NO: 66984 - DNA, 375 bp, Artificial Sequence
  derived and/or modified sequence
gactgccgcctgacctctgtgtgcctgccctgtgtgcctggggacttcttcaaggaccccctgcctgaggccgacctgtacatcctggcccgggtgctgcatgactgggcagatggcaagtgcagccacctgctggagcgcatctaccacacctgcaagccaggcggcggcatcctggtgattgagagcctgctggatgaagatagaagaggccccctgctgacccagctgtacagcctgaacatgctggtgcagacagagggccaggagaggacccccacccactaccacatgctgctgagcagcgctggcttccgggacttccagttcaagaagacaggagccatctatgatgccatcctggccaggaagtag

SEQ ID NO: 66985 - DNA, 897 bp, Artificial Sequence
  derived and/or modified sequence
atgggcagcagcgaggaccaggcctaccggctgctgaacgactacgcaaacggatttatggtgagccaggtgttattcgctgcctgcgaacttggtgtgtttgatctgcttgcagaagctccaggccccttggacgtagcagcggttgcggctggagtgcgggctagcgcccacggcacagagctgctcctcgatatctgcgtgagcctgaagctcctgaaggtagaaacccgaggcggtaaagctttttaccgcaatactgaactgtctagtgattatttaacaacagtgtcgcccacatcccagtgctcaatgttgaagtatatgggacggacttcttaccgctgctggggtcatctggccgatgcggtgagggaaggaagaaaccaatacctcgaaacttttggcgtgcccgctgaagagctgtttacagctatataccgaagcgaaggtgaacgcctgcaattcatgcaagccttacaggaggtctggtccgtcaacggtagatccgttttaactgcctttgatctgtccgtattccctcttatgtgtgatttagggggtgatttcttcaaagatccgctccctgaggcggacttgtacatcctggcacgggtacttcatgactgggccgacggcaagtgttcacatttgttggagcgcatctaccacacgtgcaagcccggagggggaatcctcgtgatagaaagccttctggatgaggataggcgcgggccccttctgacccagctctacagcctgaacatgctggttcagacagagggacaagagcgcacccccacacactatcacatgctcctgagcagtgccgggttccgagactttcagttcaagaagactggggcaatctacgacgcaattcttgcacgcaagtag

SEQ ID NO: 66986 - DNA, 375 bp, Artificial Sequence
  derived and/or modified sequence
gactgccggctgaccagcgtgtgcctgccctgcgtgcccggcgacttctttaaagatcctctgcctgaagctgatttatatatccttgcacgtgtgctgcacgactgggcagacgggaagtgcagccacctgctggagcgcatttatcatacctgcaagccagggggtggaatcctggtgatcgagtccctccttgatgaagaccgacgtggcccactcctgacgcaactatacagtctgaacatgcttgtgcagacagagggtcaggagcggacccctacacattatcacatgctcctgtcctccgccgggtttcgcgacttccagttcaagaaaaccggtgctatctatgacgctattctggcacgcaagtag

SEQ ID NO: 66987 - DNA, 897 bp, Artificial Sequence
  derived and/or modified sequence
atgggtagctcagaagatcaggcctaccgcctcttgaacgattacgccaacggatttatggtctcccaggtactgttcgcagcatgcgaactgggggtgtttgatttacttgcagaagcccctggcccactggatgtcgctgctgtagctgcaggggtgcgagcctccgcccatggtacagaattgttactcgacatctgcgtgtctttgaaactcctgaaagttgaaacaagaggaggaaaggccttctaccgcaacaccgaactctctagtgactacttgactacagtctcccctacttcacaatgtagcatgctgaagtacatgggaagaacttcctatcgctgttggggtcatctggccgacgctgtaagagagggacggaatcagtacctggagacctttggcgttcccgcagaagagttgtttaccgcaatctacagaagcgagggggaaaggctccaatttatgcaggccttgcaggaagtgtggagcgtgaatggccgatccgtgctaaccgcctttgacctctcagtgttcccactgatgtgcgatctcggaggcgacttcttcaaagatccgttacctgaggcggacctttacattctcgctagggtcctgcacgactgggccgacggtaaatgcagccatctgctcgagagaatctaccatacctgcaaacccggtggcggaattctggtgatcgagtccctactggacgaggataggcggggacctctgcttactcaactttatagtctgaatatgctggttcagaccgaagggcaagagcgcaccccgacgcactaccacatgctcctcagctcagcaggcttccgcgacttccaattcaagaagacaggtgccatttacgatgccattttggccagaaagtag

SEQ ID NO: 66988 - DNA, 375 bp, Artificial Sequence
  derived and/or modified sequence
gattgcagactgacatccgtatgcttaccctgtgtacctggtgattttttcaaggatccactacccgaagccgacttgtatatccttgcacgcgtgctccatgactgggccgatggcaagtgtagtcatctgctcgaacgaatttatcacacttgtaagcccggaggcggtatattagtgatcgagtccctgctagatgaagatcgaaggggccctctgcttactcagttgtacagcctcaatatgctcgtccagacagagggacaagagcgaacaccgacccattaccacatgctcttatcctccgccggattcagagactttcagttcaagaagactggagccatttatgacgctattcttgcccgtaagtag

SEQ ID NO: 66989 - DNA, 989 bp, Artificial Sequence
  derived and/or modified sequence
aagccacggctggattggagacaagatgggatcctcagaggaccaggcctatcgcctccttaatgactacgccaacggcttcatggtgtcccaggttctcttcgccgcctgcgagctgggcgtgtttgaccttctcgccgaggccccagggcccctggacgtggcggcagtggctgcaggtgtgagggccagcgcccatgggacagagctcctgctggacatctgtgtgtccctgaagctgctgaaagtggagacgaggggaggaaaagctttctatcgaaacacagagctgtccagcgactacctgaccacggtcagcccgacgtcacaatgcagcatgctgaagtacatgggcaggaccagctaccggtgctggggccacctggcagacgccgtgagagaaggaaggaaccagtacctggagacgtttggcgttcccgctgaagagctttttacggccatctacaggtccgagggcgagcggctacagttcatgcaagctctgcaggaggtctggagcgtcaacgggagaagcgtgctgaccgcctttgacctgtcagtgttcccacttatgtgtgaccttggtggggatttcttcaaagaccctcttccggaagctgatctgtacatcctggccagggtcctccatgactgggcagacggaaagtgctcacacctgctggagaggatctaccacacttgcaagccaggtggtggcattctggtaattgaaagcctcctggatgaagacaggcgaggtcctctgctcacgcagctctactctctgaacatgcttgtgcagacggaagggcaggagaggacccccacccactaccacatgctcctctcttctgctggcttcagagacttccagtttaagaaaacaggagccatttatgatgccattttagccaggaaataactgtttcttgtgacctggaactaacgtcaaagcacacaagacataataataaagacatgtacctcca

SEQ ID NO: 66990 - DNA, 442 bp, Artificial Sequence
  derived and/or modified sequence
gattgcaggctgacctcggtgtgcctgccctgtgttccaggggatttcttcaaagaccctcttccggaagctgatctgtacatcctggccagggtcctccatgactgggcagacggaaagtgctcacacctgctggagaggatctaccacacttgcaagccaggtggtggcattctggtaattgaaagcctcctggatgaagacaggcgaggtcctctgctcacgcagctctactctctgaacatgcttgtgcagacggaagggcaggagaggacccccacccactaccacatgctcctctcttctgctggcttcagagacttccagtttaagaaaacaggagccatttatgatgccattttagccaggaaataactgtttcttgtgacctggaactaacgtcaaagcacacaagacataataataaagacatgtacctcca

SEQ ID NO: 66991 - DNA, 897 bp, Artificial Sequence
  derived and/or modified sequence
atgggcagcagcgaggaccaggcctacagactgctgaacgactacgccaacggcttcatggtgagccaggtgctgttcgccgcctgcgagctgggcgtgttcgacctgctggccgaggcccccggccccctggacgtggccgccgtggccgccggcgtgagagccagcgcccacggcaccgagctgctgctggacatctgcgtgagcctgaagctgctgaaggtggagaccagaggcggcaaggccttctacagaaacaccgagctgagcagcgactacctgaccaccgtgagccccaccagccagtgcagcatgctgaagtacatgggcagaaccagctacagatgctggggccacctggccgacgccgtgagagagggcagaaaccagtacctggagaccttcggcgtgcccgccgaggagctgttcaccgccatctacagaagcgagggcgagagactgcagttcatgcaggccctgcaggaggtgtggagcgtgaacggcagaagcgtgctgaccgccttcgacctgagcgtgttccccctgatgtgcgacctgggcggcgacttcttcaaggaccccctgcccgaggccgacctgtacatcctggccagagtgctgcacgactgggccgacggcaagtgcagccacctgctggagagaatctaccacacctgcaagcccggcggcggcatcctggtgatcgagagcctgctggacgaggacagaagaggccccctgctgacccagctgtacagcctgaacatgctggtgcagaccgagggccaggagagaacccccacccactaccacatgctgctgagcagcgccggcttcagagacttccagttcaagaagaccggcgccatctacgacgccatcctggccagaaagtag

SEQ ID NO: 66992 - DNA, 375 bp, Artificial Sequence
  derived and/or modified sequence
gactgcagactgaccagcgtgtgcctgccctgcgtgcccggcgacttcttcaaggaccccctgcccgaggccgacctgtacatcctggccagagtgctgcacgactgggccgacggcaagtgcagccacctgctggagagaatctaccacacctgcaagcccggcggcggcatcctggtgatcgagagcctgctggacgaggacagaagaggccccctgctgacccagctgtacagcctgaacatgctggtgcagaccgagggccaggagagaacccccacccactaccacatgctgctgagcagcgccggcttcagagacttccagttcaagaagaccggcgccatctacgacgccatcctggccagaaagtag

SEQ ID NO: 66993 - protein, 881 aa, Artificial Sequence
  derived and/or modified sequence
MAAAAAEEGMEPRALQYEQTLMYGRYTQDLGAFAKEEAARIRLGGPEPWKGPPSSRAAPELLEYGRSRCARCRVCSVRCHKFLVSRVGEDWIFLVLLGLLMALVSWVMDYAIAACLQAQQWMSRGLNTSILLQYLAWVTYPVVLITFSAGFTQILAPQAVGSGIPEMKTILRGVVLKEYLTLKTFIAKVIGLTCALGSGMPLGKEGPFVHIASMCAALLSKFLSLFGGIYENESRNTEMLAAACAVGVGCCFAAPIGGVLFSIEVTSTFFAVRNYWRGFFAATFSAFIFRVLAVWNRDEETITALFKTRFRLDFPFDLQELPAFAVIGIASGFGGALFVYLNRKIVQVMRKQKTINRFLMRKRLLFPALVTLLISTLTFPPGFGQFMAGQLSQKETLVTLFDNRTWVRQGLVEELEPPSTSQAWNPPRANVFLTLVIFILMKFWMSALATTIPVPCGAFMPVFVIDGIHTDSSTYRIVPGGYAVVGAAALAGAVTHTVSTAVIVFELTGQIAHILPVMIAVILANAVAQSLQPSLYDSIIRIKKLPYLPELGWGRHQQYRVRVEDIMVRDVPHVALSCTFRDLRLALHRTKGRMLALVESPESMILLGSIERSQVVALLGAQLSPARRRQHMQERRATQTSPLSDQEGPPTPEASVCFQVNTEDSAFPAARGETHKPLKPALKRGPSVTRNLGESPTGSAESAGIALRSLFCGSPPPEAASEKLESCEKRKLKRVRISLASDADLEGEMSPEEILEWEEQQLDEPVNFSDCKIDPAPFQLVERTSLHKTHTIFSLLGVDHAYVTSIGRLIGIVTLKELRKAIEGSVTAQGVKVRPPLASFRDSATSSSDTETTEVHALWGPHSRHGLPREGSPSDSDDKCQ

SEQ ID NO: 66994 - DNA, 2646 bp, Artificial Sequence
  derived and/or modified sequence
atggctgccgctgcagctgaagagggcatggagcctagagcccttcagtatgagcagacccttatgtacgggagatatacacaggacctcggggctttcgctaaggaggaggctgcgcgaatccgcttgggcggccctgagccctggaagggccccccaagctcccgggctgcgcctgagttgcttgagtatgggagatcacggtgtgcacgctgccgcgtgtgttctgtccgctgccacaagttcctggtctctcgtgttggcgaagattggatttttctagtgcttctgggactcttgatggctctcgtgtcgtgggtcatggattacgccattgctgcgtgtttgcaagcccagcagtggatgagccggggacttaacacttctattctcctgcaatatctggcatgggtgacttatcccgtcgtcctgatcactttcagtgccggcttcacacagatactagctccgcaggcagtcgggtccggaattcccgagatgaagacaatactacgaggggtggttctcaaggagtatctgacactgaagacatttattgccaaggtgatcggcctgacctgcgctctgggttccggtatgccattgggaaaagaagggccatttgtgcacattgcctctatgtgcgccgcactgctgagtaaatttctctccctgttcgggggaatctatgaaaacgagagtcgcaatactgagatgttggccgctgcctgcgccgtaggagtagggtgttgcttcgctgccccgatcggaggcgtgctctttagcattgaggtgacatccacattcttcgccgtccgaaactactggcgcggcttcttcgccgctactttttctgcctttatctttcgagtgctggctgtgtggaatagggacgaagagacaattactgctttattcaaaacaaggttcaggctagactttccttttgatctgcaggagctgccagcctttgccgtcatcgggatcgctagtggttttggaggcgctttgttcgtctatctgaatcgaaagatcgtccaggtcatgcggaaacagaagactatcaaccggtttctgatgcgcaaaagactgctgtttcctgcccttgtaaccctgctgatttcaaccctgacattcccccctggttttggtcagtttatggcaggtcaactcagccagaaagaaaccctggtgacgctgtttgacaacaggacttgggtccgccagggtctggtcgaagagcttgaacctcccagcacttctcaggcgtggaaccctcccagagcaaacgttttcctcacactcgtgatatttattttaatgaagttttggatgtctgctctggccacaacaataccagtgccttgtggagcttttatgcctgtgttcgtcattgacggaattcataccgattcatcaacataccggatcgtccccgggggttacgcagtcgtaggggccgccgcccttgccggggcggtgacccacacggtgagcacagccgtgattgtgttcgagctgaccggtcagatcgcccatattctgcctgtgatgatagctgttattctcgcgaacgccgtcgcacagtctttgcaaccttctctatacgattctataattcgcattaaaaaactgccctatctacctgaactgggatggggccgccatcagcagtacagagtgagggttgaagatattatggtccgggacgtcccgcacgtggccctgagctgcaccttccgggatctccgcctggctctgcacagaaccaaagggagaatgctggccctggttgaatctcccgagtccatgatacttctgggctctattgaacggtcccaggtggtggctctcctcggagctcagctgtccccagcgcgacgcagacagcatatgcaggagcgccgagcaacacaaaccagcccgctcagcgatcaagagggacctccaacgccagaagcatcggtttgctttcaagtcaataccgaggactcagcctttcctgcagcacgcggagaaacccacaaacccctaaagcccgccctcaaacggggaccctcggtgacgcgtaatcttggagagtctcctaccggcagcgcagagtccgccggcatcgccctccgctcacttttttgcggatccccaccccccgaagccgcttcagagaagcttgagtcctgcgagaagaggaagctaaagcgggtaagaatcagtctcgcttctgacgctgatctggagggcgagatgtcacccgaggagatactcgagtgggaggaacagcagcttgatgagccagtcaacttttcggattgtaagatcgatccagcgccgtttcaattagtcgaacgtaccagcctgcacaagacgcacaccattttttcactacttggcgtcgaccacgcctatgttacaagcattgggcgcctgatcggcatagtgaccctgaaggagctcagaaaggcgattgagggaagtgtgactgctcagggcgtgaaggtgagaccacctttggcatcattccgcgatagtgccacctcatccagtgacactgaaacaactgaggtgcatgctctgtggggcccccacagccgccacgggcttcctcgagaaggttctccaagtgatagcgacgacaagtgccagtag

SEQ ID NO: 66995 - DNA, 2646 bp, Artificial Sequence
  derived and/or modified sequence
atggctgctgctgctgctgaggagggcatggagccccgggccctgcagtatgagcagaccctgatgtatggccgctacacccaggacctgggcgcctttgccaaggaggaggccgcccgcatccggctgggcggccctgagccctggaagggcccccccagcagcagagctgcccctgagctgctggagtatggccgcagccgctgtgcccgctgccgggtgtgcagcgtgcgctgccacaagttcctggtgtcccgggtgggggaggactggatcttcctggtgctgctgggcctgctgatggccctggtgtcctgggtgatggactatgccatcgccgcctgcctgcaggcccagcagtggatgagccggggcctgaacaccagcatcctgctgcagtacctggcctgggtgacctaccctgtggtgctgatcaccttctctgctggcttcacccagatcctggccccccaggccgtgggcagcggcatccctgagatgaagaccatcctgcggggcgtggtgctgaaggagtacctgaccctgaagaccttcatcgccaaggtgattggcctgacctgtgccctgggcagcggcatgcccctgggcaaggagggcccctttgtgcacatcgcctccatgtgtgccgccctgctgagcaagttcctgagcctgtttggaggcatctatgaaaatgaaagcaggaacacagagatgctggccgccgcctgtgctgtgggcgtgggctgctgctttgctgcccccatcggcggcgtgctcttcagcattgaggtgaccagcaccttctttgctgtgaggaactactggaggggcttctttgctgccaccttcagcgccttcatcttccgggtgctggccgtgtggaacagagatgaggagaccatcacagccctcttcaagacccgcttccggctggacttcccctttgacctgcaggagctgcctgcctttgctgtgattggaattgccagcggctttggaggagccctgtttgtgtacctgaacaggaagatcgtgcaggtgatgaggaagcagaagaccatcaaccgcttcctgatgaggaagaggctgctcttccctgccctggtgaccctgctgatcagcaccctgaccttccccccaggcttcggccagttcatggccggccagctgagccagaaggagaccctggtgaccctgtttgacaacagaacctgggtgcggcagggcctggtggaggagctggagccccccagcaccagccaggcctggaaccccccccgggccaacgtgttcctgaccctggtgatcttcatcctgatgaagttctggatgtctgccctggccaccaccatccctgtgccctgtggggccttcatgcctgtgtttgtgattgatggcatccacacagacagcagcacctacagaattgtgcctgggggctatgctgtggtgggcgccgccgccctggccggggctgtgacccacacagtgtccacagctgtgattgtgtttgagctgaccggccagatcgcccacatcctgcctgtgatgattgctgtgatcctggccaatgctgtggcccagagcctgcagcccagcctgtatgacagcatcatccgcatcaagaagctgccctacctgcctgagctgggctggggccgccaccagcagtacagagtgcgggtggaggacatcatggtgagagatgtgccccacgtggccctgagctgcaccttccgggacctgcggctggccctgcacaggaccaagggccgcatgctggccctggtggagagccctgagagcatgatcctgctgggcagcattgaaagaagccaggtggtggccctgctgggcgcccagctgagccctgcccggcggcggcagcacatgcaggagcggcgggccacccagaccagccccctgagtgaccaggagggcccccccaccccagaggcctctgtgtgcttccaggtgaacacagaagattctgccttccctgctgcccggggggagacccacaagcccctgaagccagccctgaagaggggccccagcgtgaccaggaacctgggggagagccccactggatctgctgagagcgctggcatcgccctgcggagcctcttctgtggcagccccccacctgaggccgccagcgagaagctggagagctgtgagaagaggaagctgaagagggtgcgcatcagcctggccagtgatgctgacctggagggggagatgagccctgaggagatcctggagtgggaggagcagcagctggatgagcctgtgaacttcagtgactgcaagattgatcctgcccccttccagctggtggagaggaccagcctgcacaagacccacaccatcttcagcctgctgggcgtggaccacgcctacgtgaccagcatcggccgcctcatcggcatcgtgaccctgaaggagctgaggaaggccatcgagggctctgtgacagcccagggcgtgaaggtgcggccccccctggccagcttccgggacagcgccaccagcagcagtgacacagagaccacagaggtgcacgccctgtggggcccccacagcagacatggcctgccccgggagggcagccccagcgacagtgatgacaagtgccagtag

SEQ ID NO: 66996 - DNA, 2646 bp, Artificial Sequence
  derived and/or modified sequence
atggccgccgccgccgccgaggagggcatggagccccgggccctgcagtacgagcagacattgatgtatggtagatatactcaggatttgggcgcttttgccaaagaagaggcagctcgaatccgactgggcgggcccgaaccttggaagggacctcccagcagccgtgctgcccccgaactgctggaatacggtcgttctcgttgtgctcggtgtagagtgtgttcggtgaggtgccataaatttctggtaagcagggttggagaggactggattttccttgtcctcctcggcttgctaatggctttggtgagctgggttatggattatgccatcgccgcctgcctccaggctcaacaatggatgagccggggcctgaacactagtatcctgctacaatatctcgcgtgggttacttacccagtggtgctgattactttcagcgctggtttcacccaaatcctggcgccacaggccgtgggcagcggcatcccagaaatgaagactatcctccgaggtgtggtcctcaaagagtacctcacccttaagacattcatcgccaaagtgatagggcttacctgtgcactcggaagcggaatgcctctagggaaagagggacccttcgttcacatcgccagtatgtgtgccgcactcctgtcaaagttcctttccctgtttggtggtatctacgaaaacgaaagtagaaatacagaaatgctggccgccgcttgcgccgtcggcgttggctgttgcttcgccgcaccaattggaggagtactgttcagcattgaagtaacttcaactttttttgccgtgcgcaactattggagaggattttttgctgcgacctttagtgccttcatcttccgagtgctcgcagtctggaacagagacgaggagaccatcactgccctatttaaaacacggttccgattggattttccctttgatctgcaggagttgccagcatttgcggtcatcggcatagcctcgggttttgggggggccctgtttgtctacctcaatcgaaaaattgtgcaagttatgagaaagcagaaaactataaatcgcttcctgatgagaaaacgcctgctgtttccggccctggtgactctgctgattagtacacttaccttccccccagggttcggacagttcatggctggacaattatcacagaaagagaccctcgtgaccctttttgataatagaacttgggttaggcagggactggtggaagagctggagcctcccagtacctcccaggcctggaatcccccacgcgctaacgtgttcctgactctcgtgatcttcatcctgatgaaattttggatgtccgcccttgccaccaccatacccgtcccatgcggagctttcatgcctgtgtttgtcatcgatggaatccacactgactccagcacctaccgcatagttcctggtggctacgccgtagtgggagcggccgcactggcgggtgctgttactcatactgtgagtaccgctgttatcgtgttcgagttaactggccagatcgcacatattctgccggttatgatcgcagtaatcttggccaacgccgtcgctcagagccttcagccatcactgtacgattcaataatcagaattaaaaagctgccctacctgcctgagctgggctggggccgacatcagcagtatagggtccgcgtggaagatatcatggtgagggacgttcctcatgtggcgttgagctgcacttttagggacctccggctggcactgcataggacaaaggggcggatgcttgctttggttgagtcacccgagagcatgatcctcctcggctccattgaaaggagccaggtggtggccctgctgggggcccaattgagccccgcaaggagacggcaacatatgcaggaaagacgtgctacacagacatccccattgagtgaccaggagggtccacccaccccagaggctagtgtgtgttttcaggtcaatactgaggactccgcctttccagctgcccggggggagacacacaagccactgaagcccgcattgaaaaggggacccagtgttactcgaaatttaggtgagagtccgacaggatctgcagagagcgctgggattgccttaaggtctctgttttgtggatcccccccacccgaggctgcctccgaaaaacttgaaagctgcgaaaaacgaaaactgaaaagggtacggatctctctggctagcgatgctgacttggagggcgaaatgtcacccgaagagatacttgaatgggaagaacaacagttagatgagccagttaacttcagcgactgtaagattgacccagctccgttccaacttgtggagcgcacctctctgcacaagacacacacaatattttccttgctgggcgttgatcatgcatacgttacatcaatcggccgcctgataggaatagtcaccctaaaagaactgcggaaagctatcgaaggctccgtgacagctcagggggttaaggttcggccacctctggcaagcttcagagattctgccacctcttcttcagatactgagaccaccgaggtccacgcgttatggggccctcattcgcggcatggcctcccacgcgaaggatcacctagcgattccgatgacaagtgccagtag

SEQ ID NO: 66997 - DNA, 2646 bp, Artificial Sequence
  derived and/or modified sequence
atggcagcggctgctgccgaggaagggatggaaccccgagcccttcagtacgaacagacattaatgtatggacggtacacccaagacttaggggcttttgccaaggaggaggccgcacggatacggctaggtgggccagagccctggaagggcccaccgtcatcccgagccgcacctgagctgttggagtacggcaggtcccgatgtgcgcgatgtagggtctgcagcgtgaggtgtcataaattcctggtctcacgggtaggagaggactggatatttcttgtactgttgggacttctcatggcactggtttcctgggtgatggattacgctatagctgcttgcttgcaggctcaacaatggatgtccaggggactcaatacaagtattcttctgcagtaccttgcgtgggttacctatccagtagtgttaataacgttctccgctggcttcacccagattttggcaccgcaggctgtggggagtggcattcccgagatgaagactatcctcaggggtgtggtgctcaaggaatatctgacactcaaaactttcattgcaaaggtgataggcttgacatgcgctctgggatccggtatgcccttgggcaaggaaggtcccttcgtgcacatcgcttcaatgtgcgccgcactgctgagtaagtttctctctctcttcggcggaatttacgagaacgaatccaggaacaccgaaatgctcgctgcagcatgcgccgtgggagtgggatgctgtttcgcggctccaatcggaggcgtcttattcagtattgaggtgacatcgaccttctttgcggtgcgaaactattggcgcggtttctttgctgctaccttcagtgctttcatatttagggtcctggctgtctggaatagagatgaggagactataaccgctctttttaaaacacgctttcggcttgactttccttttgatctccaggagctgccagctttcgccgttatcgggattgctagcggctttggtggcgcactctttgtgtacttgaataggaaaattgtgcaggtcatgcgaaaacagaaaaccatcaatcggttcctgatgaggaaacgcctgctgtttccggctctggtcacgttgctgatttcaacattaactttccctcccggttttggtcagttcatggccggacagttgagccaaaaggagactcttgttaccctgttcgataatcgaacgtgggttcggcagggcctggtggaggaactcgagcctccctctaccagtcaggcctggaatcccccaagggccaatgtttttcttacactggtcatctttattttgatgaaattctggatgagtgcactcgccacaaccattcccgtgccttgcggcgcatttatgcctgtgtttgttattgacggtattcatacagactccagcacatacaggatcgttccaggaggatacgccgtagtgggggctgcggctctggccggagccgtcactcacaccgtgtctaccgcagtgatcgtgtttgagctgaccggccagatagcccatatcctgccggttatgatcgctgtcatcctggccaacgcagtcgctcagtctttgcagccttccctttacgacagtatcattaggatcaagaagctgccgtacctgcccgagttgggatgggggaggcaccagcagtacagggtccgcgtcgaggacataatggtcagggacgtgccccacgtggcgctgagttgtacattccgtgacttgagactagccctccacaggaccaaagggaggatgctagcgttagtggagtcacccgagtctatgatattgctggggtccatcgaaagatctcaagtggtagctctgctgggtgctcagctgtcaccagcccgaagacggcaacatatgcaggagcgccgagctacgcaaacctcaccactgtcagaccaggaaggaccgcctacccccgaggcatcagtctgctttcaggtcaatacagaagattcagctttccctgccgctcgaggggagactcataagcctttgaagccagcactgaagcgaggaccttcagtgacacggaacctgggagagagtccaacgggaagcgcggagtctgcaggcatcgcactgcgatcactgttttgcggctctccacctcccgaagctgctagcgaaaaactcgagtcctgcgagaagcgtaagttgaaacgtgtgcgaattagtttggcctcagacgctgaccttgaaggtgaaatgagccctgaagagattcttgaatgggaggaacagcagctggatgaaccagtgaacttcagtgactgtaagatagatcccgcaccatttcaactggtagaacggacatccctgcacaaaacacataccatcttctcgctcctgggcgtggaccatgcctacgtcacatcaatcggacgcctgatcgggatcgtcacgctgaaagagttgcgcaaggctatcgagggctccgtgacagcgcagggggtgaaagtgcggccaccattggcatcatttagggactcagccacaagttcttcagatacggagaccactgaagttcatgccctctggggaccacacagccggcacgggctcccgagggagggaagccccagtgactccgatgataaatgccagtag

SEQ ID NO: 66998 - DNA, 3187 bp, Artificial Sequence
  derived and/or modified sequence
ctctgctctcggcctcccgggctgcggggacgggacggctgccggcgcggactttgcgggccgggagccgagtccaggacagagccggaaccgccgagggaggcgagagggcagtgcgcggagatggcggccgcggcggcggaggaagggatggagccacgggcgctgcagtacgagcagaccctgatgtatggccggtacactcaggaccttggggcctttgccaaagaggaagctgctcggattcgcctgggagggcctgaaccctggaaaggtcccccttcctctcgggctgccccagagctcttggaatatggacggagccgttgcgcccgatgccgcgtctgttctgtccgctgccacaagttcctagtatccagggttggtgaagattggatcttcctggtcctgctggggcttctcatggcattggtcagctgggtcatggactatgccattgctgcctgtctgcaagcccagcagtggatgtcccggggcttgaacaccagcatcttgctccagtacctggcctgggtcacctaccctgttgtcctcatcactttctcagccggattcacacagatcctggcccctcaggctgtcggctctggcatccctgagatgaagaccatcttgcggggagtggtgctgaaagaatacctcacactcaagacctttatagctaaggtcattgggctgacctgcgccctaggcagcgggatgccgcttggcaaagagggcccttttgtgcatatcgcaagcatgtgtgctgcccttctcagcaagttcctctccctctttgggggtatctatgagaatgaatcccggaacacagagatgctggctgccgcctgtgccgtgggggtgggctgctgcttcgcggcacctattggaggcgtcctcttcagcatcgaggtcacctccaccttctttgcagtgcggaactactggcggggcttcttcgctgccaccttcagtgccttcatcttccgggtcttggcagtctggaaccgggatgaagagactattacagccctcttcaaaacccgattccggctcgacttcccctttgacctgcaggagctgccagcctttgctgtcattggtattgctagtggcttcggtggagccctctttgtctacctgaaccggaagattgtccaggtgatgcggaagcagaaaaccatcaatcgcttcctcatgaggaaacgcctgctcttcccggctctggtgaccctgctcatctccacgctgaccttcccccctggctttggacagttcatggctggacagctctcacagaaagagacgctggtcaccctgtttgacaatcggacgtgggtccgccagggcctggtggaggagctagaaccacccagcacctcacaggcctggaacccaccacgtgccaacgtcttcctcaccctggtcatcttcattctcatgaagttctggatgtctgcactggccaccaccatcccagttccctgtggggccttcatgcctgtctttgtcattgatggaattcatacggacagcagcacctaccggattgtgcctgggggctacgctgtggtcggggcagctgcgctggcaggagcggtgacacacacagtgtccacggctgtgatcgtgttcgagctcacaggccagattgcccacatcctgcctgtcatgatcgccgtcatcctggccaacgctgtcgcccagagtctgcagccctccctctatgacagcatcatccgaatcaagaaactgccctacctgcctgagctcggctggggccgccaccagcagtaccgggtgcgtgtggaggacatcatggtgcgggatgttccccatgtggccctcagctgcaccttccgggacctgcgtttggcactgcacaggaccaagggccgaatgctggccctagtggagtcccctgagtccatgattctgctgggctccatcgagcgttcacaggtggtggcattgttgggggcccagctgagcccagcccgccggcggcagcacatgcaggagcgcagagccacccagacctctccactatctgatcaggagggtccccctacccctgaggcttctgtctgcttccaggtgaacacagaagactcagccttcccagcagcccggggggagacccacaagcccctaaagcctgcactcaagagggggcccagtgtcaccaggaacctcggagagagtcccacagggagcgcagagtcggcaggcatcgccctccggagcctcttctgtggcagtccaccccctgaggctgcttcggagaagttggaatcctgtgagaagcgcaagctgaagcgtgtccgaatctccctggcaagtgacgcggacctggaaggcgagatgagccctgaagagattctggagtgggaggagcagcaactagatgaacctgtcaacttcagtgactgcaaaattgatcctgctcccttccagctggtggagcggacctctttgcacaagactcacactatcttctcactgctgggagtggaccatgcttatgtcaccagtattggcagactcattggaatcgttactctaaaggagctccggaaggccatcgagggctctgtcacagcacagggtgtgaaagtccggccgcccctcgccagcttccgagacagtgccaccagcagcagtgacacggagaccactgaggtgcatgcactctgggggccccactcccgtcatggcctcccccgggagggcagcccttccgacagcgacgacaaatgccaatgagcccctcgtgggtggcctaggatggtgctagccatgcccgtcagcccagaatgtgcatctttcattccttctgccttcggaaggcaggaggcagctacagctggaggctgcaccccagccccctccagacctggggtgccagcttctcccagttcatcctacctggaatctgacccactacccacctgcaacaagtcttccagaggcaggaagataggccctgccctggcaggatgggttggggtcacttgacccctgctccccctttgaggggaaaggggtggaactaagatgggtttataactggaacctccaatgaccagatgtatatagagatttacaaagatttttatattaatttaataaaacaaattcttaaatagaacaaaataaacacctaatgagccacttatatata

SEQ ID NO: 66999 - DNA, 2646 bp, Artificial Sequence
  derived and/or modified sequence
atggccgccgccgccgccgaggagggcatggagcccagagccctgcagtacgagcagaccctgatgtacggcagatacacccaggacctgggcgccttcgccaaggaggaggccgccagaatcagactgggcggccccgagccctggaagggcccccccagcagcagagccgcccccgagctgctggagtacggcagaagcagatgcgccagatgcagagtgtgcagcgtgagatgccacaagttcctggtgagcagagtgggcgaggactggatcttcctggtgctgctgggcctgctgatggccctggtgagctgggtgatggactacgccatcgccgcctgcctgcaggcccagcagtggatgagcagaggcctgaacaccagcatcctgctgcagtacctggcctgggtgacctaccccgtggtgctgatcaccttcagcgccggcttcacccagatcctggccccccaggccgtgggcagcggcatccccgagatgaagaccatcctgagaggcgtggtgctgaaggagtacctgaccctgaagaccttcatcgccaaggtgatcggcctgacctgcgccctgggcagcggcatgcccctgggcaaggagggccccttcgtgcacatcgccagcatgtgcgccgccctgctgagcaagttcctgagcctgttcggcggcatctacgagaacgagagcagaaacaccgagatgctggccgccgcctgcgccgtgggcgtgggctgctgcttcgccgcccccatcggcggcgtgctgttcagcatcgaggtgaccagcaccttcttcgccgtgagaaactactggagaggcttcttcgccgccaccttcagcgccttcatcttcagagtgctggccgtgtggaacagagacgaggagaccatcaccgccctgttcaagaccagattcagactggacttccccttcgacctgcaggagctgcccgccttcgccgtgatcggcatcgccagcggcttcggcggcgccctgttcgtgtacctgaacagaaagatcgtgcaggtgatgagaaagcagaagaccatcaacagattcctgatgagaaagagactgctgttccccgccctggtgaccctgctgatcagcaccctgaccttcccccccggcttcggccagttcatggccggccagctgagccagaaggagaccctggtgaccctgttcgacaacagaacctgggtgagacagggcctggtggaggagctggagccccccagcaccagccaggcctggaacccccccagagccaacgtgttcctgaccctggtgatcttcatcctgatgaagttctggatgagcgccctggccaccaccatccccgtgccctgcggcgccttcatgcccgtgttcgtgatcgacggcatccacaccgacagcagcacctacagaatcgtgcccggcggctacgccgtggtgggcgccgccgccctggccggcgccgtgacccacaccgtgagcaccgccgtgatcgtgttcgagctgaccggccagatcgcccacatcctgcccgtgatgatcgccgtgatcctggccaacgccgtggcccagagcctgcagcccagcctgtacgacagcatcatcagaatcaagaagctgccctacctgcccgagctgggctggggcagacaccagcagtacagagtgagagtggaggacatcatggtgagagacgtgccccacgtggccctgagctgcaccttcagagacctgagactggccctgcacagaaccaagggcagaatgctggccctggtggagagccccgagagcatgatcctgctgggcagcatcgagagaagccaggtggtggccctgctgggcgcccagctgagccccgccagaagaagacagcacatgcaggagagaagagccacccagaccagccccctgagcgaccaggagggcccccccacccccgaggccagcgtgtgcttccaggtgaacaccgaggacagcgccttccccgccgccagaggcgagacccacaagcccctgaagcccgccctgaagagaggccccagcgtgaccagaaacctgggcgagagccccaccggcagcgccgagagcgccggcatcgccctgagaagcctgttctgcggcagccccccccccgaggccgccagcgagaagctggagagctgcgagaagagaaagctgaagagagtgagaatcagcctggccagcgacgccgacctggagggcgagatgagccccgaggagatcctggagtgggaggagcagcagctggacgagcccgtgaacttcagcgactgcaagatcgaccccgcccccttccagctggtggagagaaccagcctgcacaagacccacaccatcttcagcctgctgggcgtggaccacgcctacgtgaccagcatcggcagactgatcggcatcgtgaccctgaaggagctgagaaaggccatcgagggcagcgtgaccgcccagggcgtgaaggtgagaccccccctggccagcttcagagacagcgccaccagcagcagcgacaccgagaccaccgaggtgcacgccctgtggggcccccacagcagacacggcctgcccagagagggcagccccagcgacagcgacgacaagtgccagtag

SEQ ID NO: 67000 - protein, 854 aa, Artificial Sequence
  derived and/or modified sequence
MAAAAAEEGMEPRALQYEQTLMYGRYTQDLGAFAKEEAARIRLGGPEPWKGPPSSRAAPELLEYGRSRCARCRAQQWMSRGLNTSILLQYLAWVTYPVVLITFSAGFTQILAPQAVGSGIPEMKTILRGVVLKEYLTLKTFIAKVIGLTCALGSGMPLGKEGPFVHIASMCAALLSKFLSLFGGIYENESRNTEMLAAACAVGVGCCFAAPIGGVLFSIEVTSTFFAVRNYWRGFFAATFSAFIFRVLAVWNRDEETITALFKTRFRLDFPFDLQELPAFAVIGIASGFGGALFVYLNRKIVQVMRKQKTINRFLMRKRLLFPALVTLLISTLTFPPGFGQFMAGQLSQKETLVTLFDNRTWVRQGLVEELEPPSTSQAWNPPRANVFLTLVIFILMKFWMSALATTIPVPCGAFMPVFVIGAAFGRLVGESMAAWFPDGIHTDSSTYRIVPGGYAVVGAAALAGAVTHTVSTAVIVFELTGQIAHILPVMIAVILANAVAQSLQPSLYDSIIRIKKLPYLPELGWGRHQQYRVRVEDIMVRDVPHVALSCTFRDLRLALHRTKGRMLALVESPESMILLGSIERSQVVALLGAQLSPARRRQHMQERRATQTSPLSDQEGPPTPEASVCFQVNTEDSAFPAARGETHKPLKPALKRGPSVTRNLGESPTGSAESAGIALRSLFCGSPPPEAASEKLESCEKRKLKRVRISLASDADLEGEMSPEEILEWEEQQLDEPVNFSDCKIDPAPFQLVERTSLHKTHTIFSLLGVDHAYVTSIGRLIGIVTLKELRKAIEGSVTAQGVKVRPPLASFRDSATSSSDTETTEVHALWGPHSRHGLPREGSPSDSDDKCQ

SEQ ID NO: 67001 - DNA, 2565 bp, Artificial Sequence
  derived and/or modified sequence
atggccgccgctgctgctgaggagggcatggaaccacgagcactccagtacgagcagaccctgatgtacggccggtatactcaggatctgggagcctttgctaaggaagaagctgctcgtatccgactgggcggacccgagccatggaaaggtccccccagcagccgagctgcccctgagctgctcgagtacggcaggagccgctgcgccaggtgccgggcccagcaatggatgtcccggggtttgaatacctcgattctacttcagtatctggcttgggtgacctatccagtggttcttattacctttagcgccggttttacacagatcctcgccccacaggcagtcggctcaggcatccccgagatgaagaccattcttagaggtgtggtgctgaaagagtacctgactcttaagactttcattgctaaagtgattggcctgacatgcgccctcggatctgggatgcctttgggaaaagagggcccctttgtccacatcgcgagcatgtgtgccgctctgttgtctaagtttctgagcctctttgggggaatttacgaaaacgaatctaggaacactgagatgctggctgctgcctgcgcagtgggcgtaggatgttgtttcgcggcacctatcgggggagttcttttctctattgaggtcaccagcactttctttgccgtacggaattactggcgaggcttctttgccgccacctttagtgcttttatcttcagagttctcgccgtctggaacagggatgaagagacaataactgctctgttcaaaacacgattcagactggattttccatttgatctccaggaattaccagcattcgctgtgatcggcatcgcatcgggatttggaggagcattatttgtgtatttaaatagaaaaatcgtgcaagtgatgaggaaacaaaagactatcaaccgcttcctgatgcgcaaaaggctgctgttcccggcactagtaactctgttgatatcaacgctgaccttccctcccggattcggacaattcatggcggggcagctctctcagaaagagacacttgtcacgttattcgacaatcgcacttgggtgcggcagggcctggtggaggaactggagcccccaagcacctctcaggcttggaacccccctcgtgcaaatgtttttctgaccctggttattttcatactcatgaagttttggatgagtgcgctggccactaccatcccagtaccctgtggcgctttcatgccggttttcgtgataggcgctgctttcgggcggctagtgggagagagtatggcggcgtggttccctgatggaatacataccgattcctcaacctacaggatagtgcctggaggttatgccgtcgtaggcgctgcagccttagctggcgccgttacccataccgtatccaccgccgtaatcgtgtttgaactgaccggccagatcgcccacatcctcccggttatgatcgccgttatcttggccaatgctgtggcccagtccctacaacccagtttatatgacagcatcattaggattaaaaaactcccttaccttcctgaacttgggtggggcagacaccagcaatatagagtgagagtggaggacatcatggtccgcgacgtcccgcacgtggccctgagctgcacctttagggatctccgcctcgctctccacagaaccaaggggcgcatgcttgcccttgtggaatcacctgaatctatgatcttgctgggctctattgagaggagtcaggtggtggccttgctgggtgcacaactgtccccagcccgacgacgccaacatatgcaagagcgtagagctacccaaacctctcccctcagcgaccaggaaggcccaccaacaccggaagcctccgtttgcttccaggtaaataccgaagactctgctttccccgctgccaggggcgagactcacaaacccctgaaaccggctcttaaaagaggcccctccgttactcggaatctgggtgagtctccgacaggcagtgctgaaagcgcaggaattgccctgagatctcttttttgtggatctccccctccggaggccgcttcagagaagctggagtcctgtgaaaagcgaaaactgaaacgcgtcagaatttcactggcctcagacgccgatctcgagggcgaaatgtcgcctgaggaaatactagaatgggaggaacagcagcttgatgagcctgtgaattttagcgactgtaaaattgatcctgccccctttcagctcgttgagaggacctccctccacaaaacacacacgatcttctccctgctaggtgtggaccacgcctatgtgacatcaattgggcgcctcatagggatagtgaccttgaaagagctgagaaaggccatcgagggatccgtcaccgctcagggtgtgaaggtgcgccccccactcgccagctttagagactccgctacttcaagttctgacaccgagacaaccgaggtgcatgccctttggggtccacacagcagacacgggttgcctagggagggatctcccagcgactctgacgataagtgccagtag

SEQ ID NO: 67002 - DNA, 2565 bp, Artificial Sequence
  derived and/or modified sequence
atggctgctgctgctgctgaggagggcatggagccccgggccctgcagtatgagcagaccctgatgtatggccgctacacccaggacctgggcgcctttgccaaggaggaggccgcccgcatccggctgggcggccctgagccctggaagggcccccccagcagcagagctgcccctgagctgctggagtatggccgcagccgctgtgcccgctgccgggcccagcagtggatgagccggggcctgaacaccagcatcctgctgcagtacctggcctgggtgacctaccctgtggtgctgatcaccttctctgctggcttcacccagatcctggccccccaggccgtgggcagcggcatccctgagatgaagaccatcctgcggggcgtggtgctgaaggagtacctgaccctgaagaccttcatcgccaaggtgattggcctgacctgtgccctgggcagcggcatgcccctgggcaaggagggcccctttgtgcacatcgcctccatgtgtgccgccctgctgagcaagttcctgagcctgtttggaggcatctatgaaaatgaaagcaggaacacagagatgctggccgccgcctgtgctgtgggcgtgggctgctgctttgctgcccccatcggcggcgtgctcttcagcattgaggtgaccagcaccttctttgctgtgaggaactactggaggggcttctttgctgccaccttcagcgccttcatcttccgggtgctggccgtgtggaacagagatgaggagaccatcacagccctcttcaagacccgcttccggctggacttcccctttgacctgcaggagctgcctgcctttgctgtgattggaattgccagcggctttggaggagccctgtttgtgtacctgaacaggaagatcgtgcaggtgatgaggaagcagaagaccatcaaccgcttcctgatgaggaagaggctgctcttccctgccctggtgaccctgctgatcagcaccctgaccttccccccaggcttcggccagttcatggccggccagctgagccagaaggagaccctggtgaccctgtttgacaacagaacctgggtgcggcagggcctggtggaggagctggagccccccagcaccagccaggcctggaaccccccccgggccaacgtgttcctgaccctggtgatcttcatcctgatgaagttctggatgtctgccctggccaccaccatccctgtgccctgtggggccttcatgcctgtgtttgtgattggagctgccttcggccgcctggtgggggagagcatggccgcctggttcccagatggcatccacacagacagcagcacctaccgcatcgtgcctgggggctatgctgtggtgggcgctgctgccctggccggggctgtgacccacacagtgtccacagctgtgattgtgtttgagctgaccggccagatcgcccacatcctgcctgtgatgattgctgtgatcctggccaatgctgtggcccagagcctgcagcccagcctgtatgacagcatcatccgcatcaagaagctgccctacctgcctgagctgggctggggccgccaccagcagtacagagtgcgggtggaggacatcatggtgagagatgtgccccacgtggccctgagctgcaccttccgggacctgcggctggccctgcacaggaccaagggccgcatgctggccctggtggagagccctgagagcatgatcctgctgggcagcattgaaagaagccaggtggtggccctgctgggcgcccagctgagccctgcccggcggcggcagcacatgcaggagcggcgggccacccagaccagccccctgagtgaccaggagggcccccccaccccagaggcctctgtgtgcttccaggtgaacacagaggacagcgccttccctgctgcccggggggagacccacaagcccctgaagccagccctgaagaggggccccagcgtgaccaggaacctgggggagagccccaccggcagcgctgagagcgctggcatcgccctgcggagcctcttctgtggcagccccccacctgaggccgccagcgagaagctggagagctgtgagaagaggaagctgaagagggtgcgcatcagcctggccagtgatgctgacctggagggggagatgagccctgaggagatcctggagtgggaggagcagcagctggatgagcctgtgaacttcagtgactgcaagattgatcctgcccccttccagctggtggagaggaccagcctgcacaagacccacaccatcttcagcctgctgggcgtggaccacgcctacgtgaccagcatcggccgcctgattggaattgtgaccctgaaggagctgaggaaggccatcgagggctctgtgacagcccagggcgtgaaggtgcggccccccctggccagcttccgggacagcgccaccagcagcagtgacacagagaccacagaggtgcacgccctgtggggcccccacagccgccacggcctgccccgggagggcagccccagcgacagtgatgacaagtgccagtag

SEQ ID NO: 67003 - DNA, 2565 bp, Artificial Sequence
  derived and/or modified sequence
atggccgccgccgccgccgaggagggcatggagccccgggccctgcagtatgaacagacgctgatgtatgggagatatacgcaggatctgggagcattcgcaaaagaggaagccgccagaattaggctcgggggaccagagccttggaaaggcccaccatcttcaagagccgcacccgagctgctcgagtacgggcgatcccggtgcgcgcgatgtcgcgctcagcaatggatgtcgaggggcctgaatacctctatcctgctgcaatacctggcctgggttacttatccagtggtgctgataacattctctgccggcttcactcagattctagctccacaggctgtggggtcgggaatcccagagatgaaaaccatactgcggggagtcgttttgaaagaatatctcacccttaagacgttcattgccaaggtgatcggtctgacatgtgcgctgggttctggaatgccccttggaaaagagggaccgtttgtccacatcgccagcatgtgcgcagcccttctgagtaagttcctgagtttgttcggggggatttacgagaatgagagtaggaacaccgaaatgctggccgccgcctgcgcagtgggcgtgggctgttgcttcgcagcccctattggtggcgtgctgttttcaatcgaggtaacctcaacattttttgcagtacgaaactactggagaggcttttttgctgccacattctcagcgtttatatttcgcgtgcttgcagtgtggaacagggacgaggagacaatcactgctctcttcaagacccgctttcgtcttgattttcccttcgacctacaggagctccctgccttcgctgtgatcgggattgcaagtgggttcggaggcgcactatttgtctacctgaacagaaaaatcgttcaagtcatgaggaaacagaagaccatcaacagatttctcatgcgcaagcgcttattgtttcccgcgttagttacactgctgatcagcactctgaccttcccccccggcttcggacagtttatggcaggacaattgtcacagaaggagacgctcgtgacccttttcgacaataggacgtgggttagacaggggttagtggaagagctggagccgccttccacctcgcaggcatggaaccctccacgcgcgaatgtcttcctgaccctggttatattcatcctgatgaagttctggatgtcagctttggctaccaccatacctgtgccttgcggtgccttcatgcctgtctttgtgattggagctgcgttcgggcggcttgtaggagagagcatggccgcctggtttcctgatggtattcacaccgactcctcaacgtaccggatcgtgcccggaggctacgccgtggtgggggctgccgcactggcgggagcagttacgcatacggtgtcaacagccgttattgtgtttgagctaacaggtcagatagcccacatcctgcctgtgatgatagccgtcatcctggcaaatgctgtggcccagtctctgcaaccttcgctctatgattctataatccgaattaaaaagctgccctacctgcctgagctcgggtgggggcgtcaccaacagtaccgggtcagagtagaagatattatggtgagagacgtcccccatgtagctttgtcctgcacctttcgcgacctgcgtctcgctctacaccgaacaaaggggagaatgcttgcactggttgaaagccccgagagcatgattttacttggaagtatcgagcggtcccaggttgtggcactccttggtgcccagctatcaccagccaggcgccgccaacatatgcaagagaggcgggccacacagacgagcccgctgtccgaccaggagggccctcctacccccgaagcgtcagtgtgttttcaggtaaacaccgaggattccgccttcccagccgccagaggtgaaactcacaagcccttaaaaccagccctgaagcgcgggccaagtgtgacaaggaacctgggggagtctcccaccgggtctgcggagtctgctgggatcgccctgcggtctttgttttgcggctctccccctccggaagcggcatcagagaagttggaaagctgcgagaaaaggaagctcaagcgggtgagaattagtcttgcctctgatgcagatctggaaggcgaaatgagtcccgaggagattcttgaatgggaggagcaacagctggatgagccggtgaatttcagcgactgcaagatcgaccctgcccccttccagttggtcgagcgaacctccctgcacaagacacatacaattttttctttgctgggcgtcgatcatgcatacgtaacctccatcgggcggcttatagggatcgtaacactgaaggaattacgcaaggcaatcgagggatccgtgacagcccagggtgtcaaagtccgacctccgctcgcctcgttccgcgacagcgccacaagttcatccgacaccgagaccaccgaggttcatgccctgtgggggcctcacagccgtcacggactccccagggaggggtctccgtccgactctgacgacaaatgtcagtag

SEQ ID NO: 67004 - DNA, 2565 bp, Artificial Sequence
  derived and/or modified sequence
atggccgcagcagctgccgaagagggcatggagccacgcgcacttcagtatgaacagaccctcatgtacggacgttatacccaggaccttggcgctttcgcaaaagaggaggcagctcggatccgcctggggggacctgagccctggaaagggccaccaagttccagggccgcacctgagcttcttgaatatggaagatctcgttgcgctcgatgcagagctcagcagtggatgagtcgcggactgaatacgtctatcctgttacaatatctggcctgggttacctaccccgtggttttgattaccttctcggcgggttttactcaaattctggccccacaggccgttgggagcggcatccccgagatgaaaactatcctgcggggagtcgtcttaaaggagtatctgacactcaaaacttttatcgcgaaggtgataggcctcacctgcgctctcggctccgggatgcccctaggcaaagaaggcccttttgtgcatatagcctcaatgtgcgcagctctactctcaaagttcctgtcactcttcggcggaatctacgaaaacgagagtaggaacacagaaatgcttgctgcagcgtgcgctgtcggtgtgggctgttgtttcgccgctcctattggaggcgttctgtttagtatcgaggtcaccagcacgttcttcgccgtacgcaattattggcggggattttttgcagccacgtttagcgcatttatttttagggtgctggccgtttggaacagggatgaagaaaccatcacggccctgttcaaaacgcggtttcgattggactttcccttcgacctgcaagagctgccagcatttgccgtcatcggcatcgcctcaggcttcggaggtgccctcttcgtctatctgaatcgaaaaatcgtgcaggttatgcgaaaacagaagaccatcaacaggtttttaatgcggaagagacttttgtttcctgcactggtgacattgctaatttccacactaacatttccaccaggctttggacagttcatggcgggacagctttcccaaaaggagaccttggtgacattgtttgacaatcgcacttgggtccgacagggacttgtggaggaactagagcccccttcgacaagccaggcttggaatccccctcgcgcaaatgtgttcctaacccttgtcatcttcatcctgatgaagttttggatgagtgctcttgccaccactattcccgtgccttgtggcgcttttatgcctgtgtttgtcatcggggctgccttcggaaggcttgtgggcgagtctatggctgcttggttccctgacgggatccatacagactcttctacttataggatcgtgccaggcggttacgctgtggtgggagccgcagccctagctggtgccgttacacatacagtgtctacagcggtaatagtgttcgagctgaccggtcaaatcgcgcacatcctccccgtcatgattgccgttatactcgccaacgccgtggcccagagtttgcagccgtccctttacgactctatcatcagaataaagaagttaccctatttgccagagctgggctggggacgccaccagcagtatcgggtgcgagtggaagatattatggtgagagacgtacctcacgtagccctcagctgcaccttcagagatctgcgactggcacttcatagaacaaagggcagaatgttggccctggttgaatcacccgaaagcatgatattattaggctctattgaacgctctcaggttgtcgcccttctcggagctcagctgtcgccagccagacggaggcagcacatgcaggaaagacgggctacccaaacctctccgcttagtgatcaagagggtccgcctacccctgaagcctcagtatgtttccaggtgaatacggaagactctgcgttcccggctgctcgtggggagactcacaaaccactcaagccggcactgaagcggggtccttccgttactcgcaatcttggggaaagccctacggggagcgctgaatccgccggaattgctcttagatcactgttttgcggctcccctcctcctgaagccgcttccgaaaaacttgagtcctgtgaaaaacgaaagctgaaaagagtaagaatttcactcgccagcgacgccgatcttgagggcgaaatgtctccagaggagattctggagtgggaagagcagcagcttgatgagcctgttaacttctccgattgcaaaatcgacccggcaccatttcaactagtagaacgtacaagcctgcacaaaacacatactatattcagtctgctcggggtggaccatgcctacgttacctccattggccgtctaatcgggatagtaactctcaaagagctgcgtaaagccatcgaagggtctgtgaccgcccagggcgtgaaagtgcgtccccctcttgcaagctttcgggatagcgccacctcctcctccgatacagagactaccgaggtgcacgcactttgggggccacactcacgccacggactgcctagagaagggtcaccctctgactctgatgacaagtgccaatag

SEQ ID NO: 67005 - DNA, 3160 bp, Artificial Sequence
  derived and/or modified sequence
actctgctctcggcctcccgggctgcggggacgggacggctgccggcgcggactttgcgggccgggagccgagtccaggacagagccggaaccgccgagggaggcgagagggcagtgcgcggagatggcggccgcggcggcggaggaagggatggagccacgggcgctgcagtacgagcagaccctgatgtatggccggtacactcaggaccttggggcctttgccaaagaggaagctgctcggattcgcctgggagggcctgaaccctggaaaggtcccccttcctctcgggctgccccagagctcttggaatatggacggagccgttgcgcccgatgccgcgtctgttctgtccgctgccacaagttcctagtatccagggttggtgaagattggatcttcctggtcctgctggggcttctcatggcattggtcagctgggtcatggactatgccattgctgcctgtctgcaagcccagcagtggatgtcccggggcttgaacaccagcatcttgctccagtacctggcctgggtcacctaccctgttgtcctcatcactttctcagccggattcacacagatcctggcccctcaggctgtcggctctggcatccctgagatgaagaccatcttgcggggagtggtgctgaaagaatacctcacactcaagacctttatagctaaggtcattgggctgacctgcgccctaggcagcgggatgccgcttggcaaagagggcccttttgtgcatatcgcaagcatgtgtgctgcccttctcagcaagttcctctccctctttgggggtatctatgagaatgaatcccggaacacagagatgctggctgccgcctgtgccgtgggggtgggctgctgcttcgcggcacctattggaggcgtcctcttcagcatcgaggtcacctccaccttctttgcagtgcggaactactggcggggcttcttcgctgccaccttcagtgccttcatcttccgggtcttggcagtctggaaccgggatgaagagactattacagccctcttcaaaacccgattccggctcgacttcccctttgacctgcaggagctgccagcctttgctgtcattggtattgctagtggcttcggtggagccctctttgtctacctgaaccggaagattgtccaggtgatgcggaagcagaaaaccatcaatcgcttcctcatgaggaaacgcctgctcttcccggctctggtgaccctgctcatctccacgctgaccttcccccctggctttggacagttcatggctggacagctctcacagaaagagacgctggtcaccctgtttgacaatcggacgtgggtccgccagggcctggtggaggagctagaaccacccagcacctcacaggcctggaacccaccacgtgccaacgtcttcctcaccctggtcatcttcattctcatgaagcatttgggcgtctggtgggtgaaagcatggctgcctggttcccagatggaattcatacggacagcagcacctaccggattgtgcctgggggctacgctgtggtcggggcagctgcgctggcaggagcggtgacacacacagtgtccacggctgtgatcgtgttcgagctcacaggccagattgcccacatcctgcctgtcatgatcgccgtcatcctggccaacgctgtcgcccagagtctgcagccctccctctatgacagcatcatccgaatcaagaaactgccctacctgcctgagctcggctggggccgccaccagcagtaccgggtgcgtgtggaggacatcatggtgcgggatgttccccatgtggccctcagctgcaccttccgggacctgcgtttggcactgcacaggaccaagggccgaatgctggccctagtggagtcccctgagtccatgattctgctgggctccatcgagcgttcacaggtggtggcattgttgggggcccagctgagcccagcccgccggcggcagcacatgcaggagcgcagagccacccagacctctccactatctgatcaggagggtccccctacccctgaggcttctgtctgcttccaggtgaacacagaagactcagccttcccagcagcccggggggagacccacaagcccctaaagcctgcactcaagagggggcccagtgtcaccaggaacctcggagagagtcccacagggagcgcagagtcggcaggcatcgccctccggagcctcttctgtggcagtccaccccctgaggctgcttcggagaagttggaatcctgtgagaagcgcaagctgaagcgtgtccgaatctccctggcaagtgacgcggacctggaaggcgagatgagccctgaagagattctggagtgggaggagcagcaactagatgaacctgtcaacttcagtgactgcaaaattgatcctgctcccttccagctggtggagcggacctctttgcacaagactcacactatcttctcactgctgggagtggaccatgcttatgtcaccagtattggcagactcattggaatcgttactctaaaggagctccggaaggccatcgagggctctgtcacagcacagggtgtgaaagtccggccgcccctcgccagcttccgagacagtgccaccagcagcagtgacacggagaccactgaggtgcatgcactctgggggccccactcccgtcatggcctcccccgggagggcagcccttccgacagcgacgacaaatgccaatgagcccctcgtgggtggcctaggatggtgctagccatgcccgtcagcccagaatgtgcatctttcattccttctgccttcggaaggcaggaggcagctacagctggaggctgcaccccagccccctccagacctggggtgccagcttctcccagttcatcctacctggaatctgacccactacccacctgcaacaagtcttccagaggcaggaagataggccctgccctggcaggatgggttggggtcacttgacccctgctccccctttgaggggaaaggggtggaactaagatgggtttataactggaacctccaatgaccagatgtatatagagatttacaaagatttttatattaatttaataaaacaaattcttaaatagaacaaaataaacacctaatgagccacttatat

SEQ ID NO: 67006 - DNA, 2897 bp, Artificial Sequence
  derived and/or modified sequence
actctgctctcggcctcccgggctgcggggacgggacggctgccggcgcggactttgcgggccgggagccgagtccaggacagagccggaaccgccgagggaggcgagagggcagtgcgcggagatggcggccgcggcggcggaggaagggatggagccacgggcgctgcagtacgagcagaccctgatgtatggccggtacactcaggaccttggggcctttgccaaagaggaagctgctcggattcgcctgggagggcctgaaccctggaaaggtcccccttcctctcgggctgccccagagctcttggaatatggacggagccgttgcgcccgatgccgcgcccagcagtggatgtcccggggcttgaacaccagcatcttgctccagtacctggcctgggtcacctaccctgttgtcctcatcactttctcagccggattcacacagatcctggcccctcaggctgtcggctctggcatccctgagatgaagaccatcttgcggggagtggtgctgaaagaatacctcacactcaagacctttatagctaaggtcattgggctgacctgcgccctaggcagcgggatgccgcttggcaaagagggcccttttgtgcatatcgcaagcatgtgtgctgcccttctcagcaagttcctctccctctttgggggtatctatgagaatgaatcccggaacacagagatgctggctgccgcctgtgccgtgggggtgggctgctgcttcgcggcacctattggaggcgtcctcttcagcatcgaggtcacctccaccttctttgcagtgcggaactactggcggggcttcttcgctgccaccttcagtgccttcatcttccgggtcttggcagtctggaaccgggatgaagagactattacagccctcttcaaaacccgattccggctcgacttcccctttgacctgcaggagctgccagcctttgctgtcattggtattgctagtggcttcggtggagccctctttgtctacctgaaccggaagattgtccaggtgatgcggaagcagaaaaccatcaatcgcttcctcatgaggaaacgcctgctcttcccggctctggtgaccctgctcatctccacgctgaccttcccccctggctttggacagttcatggctggacagctctcacagaaagagacgctggtcaccctgtttgacaatcggacgtgggtccgccagggcctggtggaggagctagaaccacccagcacctcacaggcctggaacccaccacgtgccaacgtcttcctcaccctggtcatcttcattctcatgaagttctggatgtctgcactggccaccaccatcccagttccctgtggggccttcatgcctgtctttgtcattggagcagcatttgggcgtctggtgggtgaaagcatggctgcctggttcccagatggaattcatacggacagcagcacctaccggattgtgcctgggggctacgctgtggtcggggcagctgcgctggcaggagcggtgacacacacagtgtccacggctgtgatcgtgttcgagctcacaggccagattgcccacatcctgcctgtcatgatcgccgtcatcctggccaacgctgtcgcccagagtctgcagccctccctctatgacagcatcatccgaatcaagaaactgccctacctgcctgagctcggctggggccgccaccagcagtaccgggtgcgtgtggaggacatcatggtgcgggatgttccccatgtggccctcagctgcaccttccgggacctgcgtttggcactgcacaggaccaagggccgaatgctggccctagtggagtcccctgagtccatgattctgctgggctccatcgagcgttcacaggtggtggcattgttgggggcccagctgagcccagcccgccggcggcagcacatgcaggagcgcagagccacccagacctctccactatctgatcaggagggtccccctacccctgaggcttctgtctgcttccaggtgaacacagaagactcagccttcccagcagcccggggggagacccacaagcccctaaagcctgcactcaagagggggcccagtgtcaccaggaacctcggagagagtcccacagggagcgcagagtcggcaggcatcgccctccggagcctcttctgtggcagtccaccccctgaggctgcttcggagaagttggaatcctgtgagaagcgcaagctgaagcgtgtccgaatctccctggcaagtgacgcggacctggaaggcgagatgagccctgaagagattctggagtgggaggagcagcaactagatgaacctgtcaacttcagtgactgcaaaattgatcctgctcccttccagctggtggagcggacctctttgcacaagactcacactatcttctcactgctgggagtggaccatgcttatgtcaccagtattggcagactcattggaatcgttactctaaaggagctccggaaggccatcgagggctctgtcacagcacagggtgtgaaagtccggccgcccctcgccagcttccgagacagtgccaccagcagcagtgacacggagaccactgaggtgcatgcactctgggggccccactcccgtcatggcctcccccgggagggcagcccttccgacagcgacgacaaatgccaatgagcccctcgtgggtggcctaggatggtgctagccatgcccgtcagcccagaatgtgcatctttcattccttctgccttcggaaggcaggaggcagctacagctggaggctgcaccccagccccctccagacctggggtgccagcttctcccagttcatcctacctggaatctgacccactacccacctgcaacaagtcttccagaggca

SEQ ID NO: 67007 - DNA, 2565 bp, Artificial Sequence
  derived and/or modified sequence
atggccgccgccgccgccgaggagggcatggagcccagagccctgcagtacgagcagaccctgatgtacggcagatacacccaggacctgggcgccttcgccaaggaggaggccgccagaatcagactgggcggccccgagccctggaagggcccccccagcagcagagccgcccccgagctgctggagtacggcagaagcagatgcgccagatgcagagcccagcagtggatgagcagaggcctgaacaccagcatcctgctgcagtacctggcctgggtgacctaccccgtggtgctgatcaccttcagcgccggcttcacccagatcctggccccccaggccgtgggcagcggcatccccgagatgaagaccatcctgagaggcgtggtgctgaaggagtacctgaccctgaagaccttcatcgccaaggtgatcggcctgacctgcgccctgggcagcggcatgcccctgggcaaggagggccccttcgtgcacatcgccagcatgtgcgccgccctgctgagcaagttcctgagcctgttcggcggcatctacgagaacgagagcagaaacaccgagatgctggccgccgcctgcgccgtgggcgtgggctgctgcttcgccgcccccatcggcggcgtgctgttcagcatcgaggtgaccagcaccttcttcgccgtgagaaactactggagaggcttcttcgccgccaccttcagcgccttcatcttcagagtgctggccgtgtggaacagagacgaggagaccatcaccgccctgttcaagaccagattcagactggacttccccttcgacctgcaggagctgcccgccttcgccgtgatcggcatcgccagcggcttcggcggcgccctgttcgtgtacctgaacagaaagatcgtgcaggtgatgagaaagcagaagaccatcaacagattcctgatgagaaagagactgctgttccccgccctggtgaccctgctgatcagcaccctgaccttcccccccggcttcggccagttcatggccggccagctgagccagaaggagaccctggtgaccctgttcgacaacagaacctgggtgagacagggcctggtggaggagctggagccccccagcaccagccaggcctggaacccccccagagccaacgtgttcctgaccctggtgatcttcatcctgatgaagttctggatgagcgccctggccaccaccatccccgtgccctgcggcgccttcatgcccgtgttcgtgatcggcgccgccttcggcagactggtgggcgagagcatggccgcctggttccccgacggcatccacaccgacagcagcacctacagaatcgtgcccggcggctacgccgtggtgggcgccgccgccctggccggcgccgtgacccacaccgtgagcaccgccgtgatcgtgttcgagctgaccggccagatcgcccacatcctgcccgtgatgatcgccgtgatcctggccaacgccgtggcccagagcctgcagcccagcctgtacgacagcatcatcagaatcaagaagctgccctacctgcccgagctgggctggggcagacaccagcagtacagagtgagagtggaggacatcatggtgagagacgtgccccacgtggccctgagctgcaccttcagagacctgagactggccctgcacagaaccaagggcagaatgctggccctggtggagagccccgagagcatgatcctgctgggcagcatcgagagaagccaggtggtggccctgctgggcgcccagctgagccccgccagaagaagacagcacatgcaggagagaagagccacccagaccagccccctgagcgaccaggagggcccccccacccccgaggccagcgtgtgcttccaggtgaacaccgaggacagcgccttccccgccgccagaggcgagacccacaagcccctgaagcccgccctgaagagaggccccagcgtgaccagaaacctgggcgagagccccaccggcagcgccgagagcgccggcatcgccctgagaagcctgttctgcggcagccccccccccgaggccgccagcgagaagctggagagctgcgagaagagaaagctgaagagagtgagaatcagcctggccagcgacgccgacctggagggcgagatgagccccgaggagatcctggagtgggaggagcagcagctggacgagcccgtgaacttcagcgactgcaagatcgaccccgcccccttccagctggtggagagaaccagcctgcacaagacccacaccatcttcagcctgctgggcgtggaccacgcctacgtgaccagcatcggcagactgatcggcatcgtgaccctgaaggagctgagaaaggccatcgagggcagcgtgaccgcccagggcgtgaaggtgagaccccccctggccagcttcagagacagcgccaccagcagcagcgacaccgagaccaccgaggtgcacgccctgtggggcccccacagcagacacggcctgcccagagagggcagccccagcgacagcgacgacaagtgccagtag

SEQ ID NO: 67008 - protein, 869 aa, Artificial Sequence
  derived and/or modified sequence
MAAAAAEEGMEPRALQYEQTLMYGRYTQDLGAFAKEEAARIRLGGPEPWKGPPSSRAAPELLEYGRSRCARCRVCSVRCHKFLVSRVGEDWIFLVLLGLLMALVSWVMDYAIAACLQAQQWMSRGLNTSILLQYLAWVTYPVVLITFSAGFTQILAPQAVGSGIPEMKTILRGVVLKEYLTLKTFIAKVIGLTCALGSGMPLGKEGPFVHIASMCAALLSKFLSLFGGIYENESRNTEMLAAACAVGVGCCFAAPIGGVLFSIEVTSTFFAVRNYWRGFFAATFSAFIFRVLAVWNRDEETITALFKTRFRLDFPFDLQELPAFAVIGIASGFGGALFVYLNRKIVQVMRKQKTINRFLMRKRLLFPALVTLLISTLTFPPGFGQFMAGQLSQKETLVTLFDNRTWVRQGLVEELEPPSTSQAWNPPRANVFLTLVIFILMKFWMSALATTIPVPCGAFMPVFVIGAAFGRLVGESMAAWFPDGIHTDSSTYRIVPGGYAVVGAAALAGAVTHTVSTAVIVFELTGQIAHILPVMIAVILANAVAQSLQPSLYDSIIRIKKLPYLPELGWGRHQQYRVRVEDIMVRDVPHVALSCTFRDLRLALHRTKGRMLALVESPESMILLGSIERSQVVALLGAQLSPARRRQHMQERRATQTSPLSDQEGPPTPEASVCFQVNTEDSAFPAARGETHKPLKPALKRGPSVTRNLGESPTGSAESAGIALRSLFCGSPPPEAASEKLESCEKRKLKRVRISLASDADLEGEMSPEEILEWEEQQLDEPVNFSDCKIDPAPFQLVERTSLHKLRKAIEGSVTAQGVKVRPPLASFRDSATSSSDTETTEVHALWGPHSRHGLPREGSPSDSDDKCQ

SEQ ID NO: 67009 - DNA, 2610 bp, Artificial Sequence
  derived and/or modified sequence
atggcagccgccgctgccgaggagggaatggaaccccgggcattacagtacgagcagactctcatgtacggtaggtacacacaggacctgggcgctttcgctaaggaagaggcagcgcgcattcggctggggggtcccgagccctggaaaggccctccatcgagccgggctgcccctgaacttctggagtacggacgctcaaggtgtgctcgctgccgcgtatgctctgtgcgatgccataagttcttagtgtcccgcgtcggagaggactggatcttcctggtgctcctaggtctgctaatggccctggttagttgggtcatggattacgccattgctgcctgcctgcaggcccagcagtggatgagtcggggccttaatacctccatcctgttgcagtacttggcctgggtaacttacccagtggtgctgattacattcagtgcaggatttactcagatcctggcccctcaggcagtaggatccggaattcctgaaatgaagacaatcctcaggggtgttgtgttgaaggagtacttgaccctgaagacctttatcgctaaagttatcggtctcacctgcgcccttggctcaggaatgccattgggcaaggaaggcccctttgttcacatagcctcaatgtgcgctgcattgctgtctaaattcttgtcactgtttggcggaatttacgaaaatgaaagccggaataccgagatgctcgctgctgcctgcgccgtcggcgtcggatgctgtttcgccgcccccatcggtggtgtgcttttttcgatagaagtcaccagtactttcttcgcagttcggaattactggcgcgggtttttcgccgcgacgttcagtgcctttatttttcgggttctagccgtgtggaatcgcgatgaagaaactatcaccgctctgtttaagacccgtttccgactggatttccctttcgatcttcaagagctgcccgcattcgccgtgataggtattgcctcaggattcggtggcgctctgttcgtgtacctcaaccgaaagattgtacaggttatgcgcaagcagaaaactattaacagatttctcatgcggaagcgcctgctttttccagccctggtgaccctactcatatctaccctgacctttccccctggtttcggtcagttcatggcgggccagctctcacagaaagagacgcttgtaaccctgtttgataatcggacatgggtgagacaaggattggtagaagagcttgaaccgcccagcactagtcaggcatggaatcctccccgagcaaacgtgttcttgacactcgtgatctttatcctgatgaagttttggatgtcggccctggctacgactattccagtgccttgcggcgccttcatgccagtcttcgtgattggtgctgcatttgggcgtctggtgggggaaagtatggccgcctggtttcctgatggaatccatactgactcgtccacgtatcgtatcgtgcctggaggctacgccgtggttggggccgctgcattagctggtgccgtgacacatacggtgtccaccgcggtcattgtgttcgagctcactgggcagatagcccatatcctgcctgtcatgatcgccgtgatactggcaaatgcagtggcgcagagtcttcagccctctctttatgatagtattattcgaattaagaaacttccatacttgcccgagctgggatggggtcggcaccagcagtatagggtgagagttgaagacattatggtgagagatgtccctcatgtagccctttcctgtactttccgcgaccttagactggccctccataggaccaaagggcggatgctggccttggtagagtctcctgagtcaatgatcctcctggggtcaattgagcgctcccaggtggtggcgttgctgggcgcccagttgagcccagcccggaggagacagcacatgcaggaacggagggcgactcagacgagtcctctatccgatcaggaaggaccaccaaccccagaggcctctgtgtgctttcaggtgaacacagaggacagtgcctttcccgccgcgaggggagagacacacaaaccactgaaacctgctttgaagagaggccccagcgttacaaggaatcttggagaatcccctactggctctgctgagtcggcggggatcgccctgcgatcactgttctgcgggagccctccgcctgaagccgccagcgaaaaactggaatcttgtgaaaaacgaaagctcaagcgcgtccgaatctcacttgcctcggatgcagacctcgagggtgagatgagtcccgaggaaatactggaatgggaggagcaacagctggatgagcccgtcaactttagtgattgcaagatcgatcccgcccccttccagttagttgagcgtacttccctgcacaagctgaggaaggctattgaagggagcgtaactgcccagggcgttaaagtgcggccacctctcgcctcctttcgcgactcagccacatccagtagtgacactgagacaactgaagttcatgctttgtgggggccccattcacgtcacggtctacctagagaaggctctccaagcgactcagatgacaagtgccagtag

SEQ ID NO: 67010 - DNA, 2610 bp, Artificial Sequence
  derived and/or modified sequence
atggctgctgctgctgctgaggagggcatggagccccgggccctgcagtatgagcagaccctgatgtatggccgctacacccaggacctgggcgcctttgccaaggaggaggccgcccgcatccggctgggcggccctgagccctggaagggcccccccagcagcagagctgcccctgagctgctggagtatggccgcagccgctgtgcccgctgccgggtgtgcagcgtgcgctgccacaagttcctggtgtcccgggtgggggaggactggatcttcctggtgctgctgggcctgctgatggccctggtgtcctgggtgatggactatgccatcgccgcctgcctgcaggcccagcagtggatgagccggggcctgaacaccagcatcctgctgcagtacctggcctgggtgacctaccctgtggtgctgatcaccttctctgctggcttcacccagatcctggccccccaggccgtgggcagcggcatccctgagatgaagaccatcctgcggggcgtggtgctgaaggagtacctgaccctgaagaccttcatcgccaaggtgattggcctgacctgtgccctgggcagcggcatgcccctgggcaaggagggcccctttgtgcacatcgcctccatgtgtgccgccctgctgagcaagttcctgagcctgtttggaggcatctatgaaaatgaaagcaggaacacagagatgctggccgccgcctgtgctgtgggcgtgggctgctgctttgctgcccccatcggcggcgtgctcttcagcattgaggtgaccagcaccttctttgctgtgaggaactactggaggggcttctttgctgccaccttcagcgccttcatcttccgggtgctggccgtgtggaacagagatgaggagaccatcacagccctcttcaagacccgcttccggctggacttcccctttgacctgcaggagctgcctgcctttgctgtgattggaattgccagcggctttggaggagccctgtttgtgtacctgaacaggaagatcgtgcaggtgatgaggaagcagaagaccatcaaccgcttcctgatgaggaagaggctgctcttccctgccctggtgaccctgctgatcagcaccctgaccttccccccaggcttcggccagttcatggccggccagctgagccagaaggagaccctggtgaccctgtttgacaacagaacctgggtgcggcagggcctggtggaggagctggagccccccagcaccagccaggcctggaaccccccccgggccaacgtgttcctgaccctggtgatcttcatcctgatgaagttctggatgtctgccctggccaccaccatccctgtgccctgtggggccttcatgcctgtgtttgtgattggagctgccttcggccgcctggtgggggagagcatggccgcctggttcccagatggcatccacacagacagcagcacctaccgcatcgtgcctgggggctatgctgtggtgggcgctgctgccctggccggggctgtgacccacacagtgtccacagctgtgattgtgtttgagctgaccggccagatcgcccacatcctgcctgtgatgattgctgtgatcctggccaatgctgtggcccagagcctgcagcccagcctgtatgacagcatcatccgcatcaagaagctgccctacctgcctgagctgggctggggccgccaccagcagtacagagtgcgggtggaggacatcatggtgagagatgtgccccacgtggccctgagctgcaccttccgggacctgcggctggccctgcacaggaccaagggccgcatgctggccctggtggagagccctgagagcatgatcctgctgggcagcattgaaagaagccaggtggtggccctgctgggcgcccagctgagccctgcccggcggcggcagcacatgcaggagcggcgggccacccagaccagccccctgagtgaccaggagggcccccccaccccagaggcctctgtgtgcttccaggtgaacacagaggacagcgccttccctgctgcccggggggagacccacaagcccctgaagccagccctgaagaggggccccagcgtgaccaggaacctgggggagagccccaccggcagcgctgagagcgctggcatcgccctgcggagcctcttctgtggcagccccccacctgaggccgccagcgagaagctggagagctgtgagaagaggaagctgaagagggtgcgcatcagcctggccagtgatgctgacctggagggggagatgagccctgaggagatcctggagtgggaggagcagcagctggatgagcctgtgaacttcagtgactgcaagattgatcctgcccccttccagctggtggagaggaccagcctgcacaagctgaggaaggccatcgagggctctgtgacagcccagggcgtgaaggtgcggccccccctggccagcttccgggacagcgccaccagcagcagtgacacagagaccacagaggtgcacgccctgtggggcccccacagcagacatggcctgccccgggagggcagccccagcgacagtgatgacaagtgccagtag

SEQ ID NO: 67011 - DNA, 2610 bp, Artificial Sequence
  derived and/or modified sequence
atggccgccgccgccgccgaggagggcatggagccccgggccctgcagtatgagcaaacactcatgtacggacgctatacacaggatcttggtgcctttgccaaggaagaggccgctcggatcaggctgggtggccccgaaccttggaagggacctccctcatccagagcggcacctgagcttctggagtatggtcggagcagatgtgcccgctgccgagtgtgctctgtgcgatgccacaaatttttggtgtcacgcgtaggcgaggattggatttttctggtgctgctgggattattaatggcgctggtgtcctgggtgatggattacgccatcgctgcttgcttgcaggctcaacagtggatgtctagaggcctcaacaccagtatcctgctgcaatatctcgcttgggtcacttatcctgtggtactgattactttctcagccggatttacacagatcctggctccccaagctgtcggctctgggatcccagagatgaaaactatactacggggggtggttctgaaggaatacctcaccctgaaaaccttcatcgccaaggtcattgggctgacctgtgccctgggatcgggaatgcccctgggcaaagaggggccattcgttcacattgcttccatgtgtgccgccctgttatcaaaatttctctccctctttggtggcatctacgagaatgaaagccgcaatacagagatgctggctgccgcgtgcgccgtgggcgtgggctgttgctttgccgcgcccataggtggagtgttgttctccatcgaggtgacaagcacattctttgcagtaagaaattactggcggggattcttcgctgccacgttcagcgctttcatcttcagagtgttggcagtatggaacagggacgaagagacaataacagctctcttcaagaccaggttccgactcgactttccatttgacctacaagagttgcccgccttcgccgtgattggtatcgcttccggctttggcggagctctgtttgtttacttgaataggaaaattgtccaggtgatgcggaagcagaagactattaatcgcttcctgatgagaaagcggcttttatttccagctttggtgaccctactgatcagtacactcacttttccacccggcttcgggcagttcatggccggtcaactgtcacagaaggaaacactggtgaccctgtttgacaatcgcacttgggtcagacagggtctggtcgaagaactcgagcctccctcaacatcccaagcgtggaatcctcctagggcaaacgtttttctgactctggtgatcttcattctgatgaagttctggatgtcagcactcgcgacgaccatccccgtcccatgcggggcgtttatgccggtatttgttatcggcgctgcttttggtcgtctagttggcgagagcatggcagcatggttccctgatggtatccacacggactccagtacgtatcgaattgtgcccggcgggtatgccgtggtcggtgcagccgcgcttgcgggtgctgtaacacacacagtttcgactgcagtcattgtgttcgagttgacaggccaaatagcccatattctacctgtgatgattgcggtgattctcgccaatgccgtcgcacagagtcttcagccctctctgtatgacagtattatacgcatcaagaaactgccatatctgcctgaactcgggtggggtagacaccagcaatatagggtgagggtcgaagacatcatggtgcgtgatgtgccacacgtggcgctcagctgcacgttccgggacctgagattggctctacaccggacaaagggcagaatgctagctcttgtggagagccctgagtccatgatattgctgggatcaattgagcgatcccaggtagtcgcgttattgggggcacagctctcaccagctaggcgcaggcaacacatgcaggagaggagagccactcagacctctccactgtctgatcaggaaggccccccgacacctgaggcctctgtgtgtttccaggtgaataccgaagatagcgcctttccagcagcgcggggggagacccacaagccccttaaacccgccctgaagagaggtcccagcgtgacgcgcaacctgggggagtcccctaccgggtccgccgagtcagccgggattgccctgagatctctgttttgtggatcgcctcctcccgaagccgcatcagagaaactagagagctgcgaaaaacggaaactgaagcgtgtaaggatttcacttgctagcgatgcagatttggaaggtgaaatgtcccccgaggagatcctcgagtgggaagagcagcagctcgatgagcccgtgaattttagcgactgcaaaatcgacccagcacccttccagctggtggaacggactagccttcataagcttcggaaggcgatagaaggcagcgtgacggcccagggcgtaaaggtaagaccacccctggcttctttccgcgactccgctacctctagctctgacactgagactactgaagtgcatgcattgtggggaccccattctaggcacggtctcccacgtgaaggtagcccctccgactcagatgacaagtgtcagtag

SEQ ID NO: 67012 - DNA, 2610 bp, Artificial Sequence
  derived and/or modified sequence
atggccgctgctgccgcagaggagggtatggagcctagagctctgcagtacgaacagacactgatgtatggcagatacacacaggacttaggggcttttgcgaaagaagaagcagcgagaattcgactgggcggtccagagccctggaaggggccaccatccagtcgggcagccccagagcttttggaatatggcaggtccaggtgtgcccgatgtagggtctgctcggtacgttgtcataagtttctggttagtagagtgggagaggactggatattcctcgtactgctggggctgctaatggccctcgtgtcttgggtcatggattatgccattgccgcttgtctccaggcacagcagtggatgtctaggggcttgaatacaagcatcctgctgcaatatctagcatgggtgacatacccagtggtgctcattacgttctccgctggttttacacagattctagctccacaggctgtgggtagcgggatccctgaaatgaaaaccatcttgagaggagtcgtactgaaggagtatttaacactcaaaacgttcattgctaaggtgatcggtctgacctgcgcactgggcagtggaatgcctttaggcaaggaaggtccgttcgtgcacatcgcatccatgtgcgcagcactcttaagtaaattcttaagtctgtttggaggtatctatgaaaatgaatcccgcaacacagagatgctggctgccgcatgtgctgtgggcgtgggctgctgcttcgctgcccctatcggcggagtgctgttcagcatcgaagttacctccacttttttcgcagtgaggaattactggagaggtttttttgccgctactttttcggctttcatcttccgtgtgcttgcggtgtggaatcgggatgaggagacaatcaccgctctattcaaaactagatttagactggattttccctttgacctgcaggaattgccggcatttgctgtgatcggaatagcaagcggcttcgggggagccctcttcgtgtacctgaataggaaaatcgttcaggtgatgcggaagcagaagacaattaatcgctttcttatgcggaagcgcttactatttcctgcactggtcaccctgcttatctcaacccttacattccccccagggtttgggcagttcatggcaggccaactctcccagaaggagactcttgttacactgttcgataaccgcacctgggtgcggcaaggccttgtcgaggaactggaaccaccttccacgtcccaagcctggaatccacccagggcaaacgtgtttttaacactggttattttcattctaatgaagttctggatgagcgctctcgctaccacaattcctgttccctgtggcgcattcatgccagtgtttgtgatcggcgcagcatttggaagactagtgggtgaatcaatggcagcctggttcccagacggaattcacacggattcatctacatacaggatagttccgggtggatacgccgtcgtcggggctgcagcgctcgctggtgctgtgacgcacaccgtttctacagcagtgatcgtttttgagctgacaggacaaatagcacacatcctgccggtcatgatcgctgtgattctggccaacgcagtggcccaaagtctccaaccgtccctatacgattcaattatacgaattaagaaattgccctatctccctgagctcgggtggggcagacaccagcagtacagggtgcgtgtagaagacattatggtacgtgatgtaccgcacgttgcgctctcctgcaccttcagagacctcaggctggctctgcaccgaactaaagggcgaatgctcgccctggtggagagcccagagagtatgatcctgctcgggagcattgaaaggtctcaggtcgtcgccctgctcggggcacaactctctcccgctagacgtaggcagcatatgcaagagaggagggccacccagacctctccactaagcgatcaagagggaccccctaccccagaagctagcgtgtgttttcaggtcaatactgaggattccgcgttccccgctgcaaggggcgagacacacaaacctctcaaaccggctctcaagagaggccctagcgtaactcggaatttgggagaaagtcccaccggatccgctgagagtgccggaattgctttgcgctctctgttttgcggctctccccctccagaagccgctagcgagaaactggagtcctgtgagaagcgcaagctgaaaagagtgagaataagtctcgcatcagatgccgaccttgagggtgagatgagcccagaagaaatattggagtgggaggagcaacagctcgacgagcccgtaaacttcagtgactgcaagatcgaccccgcacccttccagttggtggaacggacatccctgcacaaactaagaaaagccattgagggaagtgtcacggcccagggtgtgaaggtaagacctcctctggcttcgtttagggattccgctacttccagctccgacactgagaccacagaggttcacgcactgtggggtccacactcacgacacgggctgcccagggaggggagcccgtctgattctgacgataaatgccagtag

SEQ ID NO: 67013 - DNA, 2820 bp, Artificial Sequence
  derived and/or modified sequence
actctgctctcggcctcccgggctgcggggacgggacggctgccggcgcggactttgcgggccgggagccgagtccaggacagagccggaaccgccgagggaggcgagagggcagtgcgcggagatggcggccgcggcggcggaggaagggatggagccacgggcgctgcagtacgagcagaccctgatgtatggccggtacactcaggaccttggggcctttgccaaagaggaagctgctcggattcgcctgggagggcctgaaccctggaaaggtcccccttcctctcgggctgccccagagctcttggaatatggacggagccgttgcgcccgatgccgcgtctgttctgtccgctgccacaagttcctagtatccagggttggtgaagattggatcttcctggtcctgctggggcttctcatggcattggtcagctgggtcatggactatgccattgctgcctgtctgcaagcccagcagtggatgtcccggggcttgaacaccagcatcttgctccagtacctggcctgggtcacctaccctgttgtcctcatcactttctcagccggattcacacagatcctggcccctcaggctgtcggctctggcatccctgagatgaagaccatcttgcggggagtggtgctgaaagaatacctcacactcaagacctttatagctaaggtcattgggctgacctgcgccctaggcagcgggatgccgcttggcaaagagggcccttttgtgcatatcgcaagcatgtgtgctgcccttctcagcaagttcctctccctctttgggggtatctatgagaatgaatcccggaacacagagatgctggctgccgcctgtgccgtgggggtgggctgctgcttcgcggcacctattggaggcgtcctcttcagcatcgaggtcacctccaccttctttgcagtgcggaactactggcggggcttcttcgctgccaccttcagtgccttcatcttccgggtcttggcagtctggaaccgggatgaagagactattacagccctcttcaaaacccgattccggctcgacttcccctttgacctgcaggagctgccagcctttgctgtcattggtattgctagtggcttcggtggagccctctttgtctacctgaaccggaagattgtccaggtgatgcggaagcagaaaaccatcaatcgcttcctcatgaggaaacgcctgctcttcccggctctggtgaccctgctcatctccacgctgaccttcccccctggctttggacagttcatggctggacagctctcacagaaagagacgctggtcaccctgtttgacaatcggacgtgggtccgccagggcctggtggaggagctagaaccacccagcacctcacaggcctggaacccaccacgtgccaacgtcttcctcaccctggtcatcttcattctcatgaagttctggatgtctgcactggccaccaccatcccagttccctgtggggccttcatgcctgtctttgtcattggagcagcatttgggcgtctggtgggtgaaagcatggctgcctggttcccagatggaattcatacggacagcagcacctaccggattgtgcctgggggctacgctgtggtcggggcagctgcgctggcaggagcggtgacacacacagtgtccacggctgtgatcgtgttcgagctcacaggccagattgcccacatcctgcctgtcatgatcgccgtcatcctggccaacgctgtcgcccagagtctgcagccctccctctatgacagcatcatccgaatcaagaaactgccctacctgcctgagctcggctggggccgccaccagcagtaccgggtgcgtgtggaggacatcatggtgcgggatgttccccatgtggccctcagctgcaccttccgggacctgcgtttggcactgcacaggaccaagggccgaatgctggccctagtggagtcccctgagtccatgattctgctgggctccatcgagcgttcacaggtggtggcattgttgggggcccagctgagcccagcccgccggcggcagcacatgcaggagcgcagagccacccagacctctccactatctgatcaggagggtccccctacccctgaggcttctgtctgcttccaggtgaacacagaagactcagccttcccagcagcccggggggagacccacaagcccctaaagcctgcactcaagagggggcccagtgtcaccaggaacctcggagagagtcccacagggagcgcagagtcggcaggcatcgccctccggagcctcttctgtggcagtccaccccctgaggctgcttcggagaagttggaatcctgtgagaagcgcaagctgaagcgtgtccgaatctccctggcaagtgacgcggacctggaaggcgagatgagccctgaagagattctggagtgggaggagcagcaactagatgaacctgtcaacttcagtgactgcaaaattgatcctgctcccttccagctggtggagcggacctctttgcacaagctccggaaggccatcgagggctctgtcacagcacagggtgtgaaagtccggccgcccctcgccagcttccgagacagtgccaccagcagcagtgacacggagaccactgaggtgcatgcactctgggggccccactcccgtcatggcctcccccgggagggcagcccttccgacagcgacgacaaatgccaatgagcccctcgtgggtggcctaggatggtgctagccatgcccgtcagcccagaatgtgcatctttcattccttctgccttcggaaggca

SEQ ID NO: 67014 - DNA, 2610 bp, Artificial Sequence
  derived and/or modified sequence
atggccgccgccgccgccgaggagggcatggagcccagagccctgcagtacgagcagaccctgatgtacggcagatacacccaggacctgggcgccttcgccaaggaggaggccgccagaatcagactgggcggccccgagccctggaagggcccccccagcagcagagccgcccccgagctgctggagtacggcagaagcagatgcgccagatgcagagtgtgcagcgtgagatgccacaagttcctggtgagcagagtgggcgaggactggatcttcctggtgctgctgggcctgctgatggccctggtgagctgggtgatggactacgccatcgccgcctgcctgcaggcccagcagtggatgagcagaggcctgaacaccagcatcctgctgcagtacctggcctgggtgacctaccccgtggtgctgatcaccttcagcgccggcttcacccagatcctggccccccaggccgtgggcagcggcatccccgagatgaagaccatcctgagaggcgtggtgctgaaggagtacctgaccctgaagaccttcatcgccaaggtgatcggcctgacctgcgccctgggcagcggcatgcccctgggcaaggagggccccttcgtgcacatcgccagcatgtgcgccgccctgctgagcaagttcctgagcctgttcggcggcatctacgagaacgagagcagaaacaccgagatgctggccgccgcctgcgccgtgggcgtgggctgctgcttcgccgcccccatcggcggcgtgctgttcagcatcgaggtgaccagcaccttcttcgccgtgagaaactactggagaggcttcttcgccgccaccttcagcgccttcatcttcagagtgctggccgtgtggaacagagacgaggagaccatcaccgccctgttcaagaccagattcagactggacttccccttcgacctgcaggagctgcccgccttcgccgtgatcggcatcgccagcggcttcggcggcgccctgttcgtgtacctgaacagaaagatcgtgcaggtgatgagaaagcagaagaccatcaacagattcctgatgagaaagagactgctgttccccgccctggtgaccctgctgatcagcaccctgaccttcccccccggcttcggccagttcatggccggccagctgagccagaaggagaccctggtgaccctgttcgacaacagaacctgggtgagacagggcctggtggaggagctggagccccccagcaccagccaggcctggaacccccccagagccaacgtgttcctgaccctggtgatcttcatcctgatgaagttctggatgagcgccctggccaccaccatccccgtgccctgcggcgccttcatgcccgtgttcgtgatcggcgccgccttcggcagactggtgggcgagagcatggccgcctggttccccgacggcatccacaccgacagcagcacctacagaatcgtgcccggcggctacgccgtggtgggcgccgccgccctggccggcgccgtgacccacaccgtgagcaccgccgtgatcgtgttcgagctgaccggccagatcgcccacatcctgcccgtgatgatcgccgtgatcctggccaacgccgtggcccagagcctgcagcccagcctgtacgacagcatcatcagaatcaagaagctgccctacctgcccgagctgggctggggcagacaccagcagtacagagtgagagtggaggacatcatggtgagagacgtgccccacgtggccctgagctgcaccttcagagacctgagactggccctgcacagaaccaagggcagaatgctggccctggtggagagccccgagagcatgatcctgctgggcagcatcgagagaagccaggtggtggccctgctgggcgcccagctgagccccgccagaagaagacagcacatgcaggagagaagagccacccagaccagccccctgagcgaccaggagggcccccccacccccgaggccagcgtgtgcttccaggtgaacaccgaggacagcgccttccccgccgccagaggcgagacccacaagcccctgaagcccgccctgaagagaggccccagcgtgaccagaaacctgggcgagagccccaccggcagcgccgagagcgccggcatcgccctgagaagcctgttctgcggcagccccccccccgaggccgccagcgagaagctggagagctgcgagaagagaaagctgaagagagtgagaatcagcctggccagcgacgccgacctggagggcgagatgagccccgaggagatcctggagtgggaggagcagcagctggacgagcccgtgaacttcagcgactgcaagatcgaccccgcccccttccagctggtggagagaaccagcctgcacaagctgagaaaggccatcgagggcagcgtgaccgcccagggcgtgaaggtgagaccccccctggccagcttcagagacagcgccaccagcagcagcgacaccgagaccaccgaggtgcacgccctgtggggcccccacagcagacacggcctgcccagagagggcagccccagcgacagcgacgacaagtgccagtag

SEQ ID NO: 67015 - protein, 230 aa, Artificial Sequence
  derived and/or modified sequence
MASLGLQLVGYILGLLGLLGTLVAMLLPSWKTSSYVGASIVTAVGFSKGLWMECATHSTGITQCDIYSTLLGLPADIQAAQAMMVTSSAISSLACIISVVGMRCTVFCQESRAKDRVAVAGGVFFILGGLLGFIPVAWNLHGILRDFYSPLVPDSMKFEIGEALYLGIISSLFSLIAGIILCFSCSSQRNRSNYYDAYQAQPLATRSSPRPGQPPKVKSEFNSYSLTGYV

SEQ ID NO: 67016 - DNA, 2959 bp, Artificial Sequence
  derived and/or modified sequence
agatggattttgcaaagctgtggttaacgattagaaatcctttatcacctcagcccgtggccccttgtacttcgctcccctccctcaggatccctttctccctctccaggggcatctccccctccaaggctctgcaaagaactgccctgtcttctagatgccttcttgaggctgcttgtggccacccacagacacttgtaaggaggagagaagtcagcctggcagagagactctgaaatgagggattagaggtgttcaaggagcaagagcttcagcctgaagacaagggagcagtccctgaagacgcttctactgagaggtctgccatggcctctcttggcctccaacttgtgggctacatcctaggccttctggggcttttgggcacactggttgccatgctgctccccagctggaaaacaagttcttatgtcggtgccagcattgtgacagcagttggcttctccaagggcctctggatggaatgtgccacacacagcacaggcatcacccagtgtgacatctatagcacccttctgggcctgcccgctgacatccaggctgcccaggccatgatggtgacatccagtgcaatctcctccctggcctgcattatctctgtggtgggcatgagatgcacagtcttctgccaggaatcccgagccaaagacagagtggcggtagcaggtggagtctttttcatccttggaggcctcctgggattcattcctgttgcctggaatcttcatgggatcctacgggacttctactcaccactggtgcctgacagcatgaaatttgagattggagaggctctttacttgggcattatttcttccctgttctccctgatagctggaatcatcctctgcttttcctgctcatcccagagaaatcgctccaactactacgatgcctaccaagcccaacctcttgccacaaggagctctccaaggcctggtcaacctcccaaagtcaagagtgagttcaattcctacagcctgacagggtatgtgtgaagaaccaggggccagagctggggggtggctgggtctgtgaaaaacagtggacagcaccccgagggccacaggtgagggacactaccactggatcgtgtcagaaggtgctgctgaggatagactgactttggccattggattgagcaaaggcagaaatgggggctagtgtaacagcatgcaggttgaattgccaaggatgctcgccatgccagcctttctgttttcctcaccttgctgctcccctgccctaagtccccaaccctcaacttgaaaccccattcccttaagccaggactcagaggatccctttgccctctggtttacctgggactccatccccaaacccactaatcacatcccactgactgaccctctgtgatcaaagaccctctctctggctgaggttggctcttagctcattgctggggatgggaaggagaagcagtggcttttgtgggcattgctctaacctacttctcaagcttccctccaaagaaactgattggccctggaacctccatcccactcttgttatgactccacagtgtccagactaatttgtgcatgaactgaaataaaaccatcctacggtatccagggaacagaaagcaggatgcaggatgggaggacaggaaggcagcctgggacatttaaaaaaataaaaatgaaaaaaaaacccagaacccatttctcagggcactttccagaattctctcatatttgtgggctgggatcaagcctgcagcttgaggaaagcacaaggaaaggaaagaagatctggtggaaagctcaggtggcagcggactctgactccactgaggaactgcctcagaagctgcgatcacaactttggctgaagcccctgcctcactctagggcacctgacctggcctcttgcctaaaccacaaggctaagggctatagacaatggtttccttaggaacagtaaaccagtttttctagggatggcccttggctgggggatgacagtgtgggagctgtggggtactgaggaagacaccattccttgacggtgtctaagaagccaggtggatgtgtgtggtggctccagtgggtgtttctactctgccagtgagaggcagccccctagaaactcttcaggcgtaatggaaaatcagctcaaatgagatcaggcccccccagggtccacccacagagcactacagagcctctgaaagaccatagcaccaagcgagccccttcagattcccccactgtccatcggaagatgctccagagtggctagagggcatctaagggctccagcatggcatatccatgcccacggtgctgtgtccatgatctgagtgatagctgcactgctgcctgggattgcagctgaggtgggagtggagaatggttcccaggaagacagttccacctctaaggtccgaaaatgttccctttaccctggagtgggagtgaggggtcatacaccaaaggtattttccctcaccagtctaggcatgactggcttctgaaaaattccagcacacctcctcgaacctcattgtcagcagagagggcccatctgttgtctgtaacatgcctttcacatgtccaccttcttgccatgttccagctgctctcccaacctggaaggccgtctccccttagccaagtcctcctcaggcttggagaacttcctcagcgtcacctccttcattgagccttctctgatcactccatccctctcctacccctccctcccccaaccctcaatgtataaattgcttcttgatgcttagcattcacaatttttgattgatcgttatttgtgtgtgtgtgtccgatctcacaagtatattgtaaacccttcggtgggtgggggccatatcctagacctctctgtatcccccagactatctgtaacagtgccaggcacacagtaggtgatcaataaacacttgttgattgag

SEQ ID NO: 67017 - DNA, 2919 bp, Artificial Sequence
  derived and/or modified sequence
aggcatggctgcccttttagcgtgtcccagcctgccaagagggagtgccctggagagacccttgctcaggagcactgccaggggatcagtgccccatttgtacctgcaaggtcttctagatgccttcttgaggctgcttgtggccacccacagacacttgtaaggaggagagaagtcagcctggcagagagactctgaaatgagggattagaggtgttcaaggagcaagagcttcagcctgaagacaagggagcagtccctgaagacgcttctactgagaggtctgccatggcctctcttggcctccaacttgtgggctacatcctaggccttctggggcttttgggcacactggttgccatgctgctccccagctggaaaacaagttcttatgtcggtgccagcattgtgacagcagttggcttctccaagggcctctggatggaatgtgccacacacagcacaggcatcacccagtgtgacatctatagcacccttctgggcctgcccgctgacatccaggctgcccaggccatgatggtgacatccagtgcaatctcctccctggcctgcattatctctgtggtgggcatgagatgcacagtcttctgccaggaatcccgagccaaagacagagtggcggtagcaggtggagtctttttcatccttggaggcctcctgggattcattcctgttgcctggaatcttcatgggatcctacgggacttctactcaccactggtgcctgacagcatgaaatttgagattggagaggctctttacttgggcattatttcttccctgttctccctgatagctggaatcatcctctgcttttcctgctcatcccagagaaatcgctccaactactacgatgcctaccaagcccaacctcttgccacaaggagctctccaaggcctggtcaacctcccaaagtcaagagtgagttcaattcctacagcctgacagggtatgtgtgaagaaccaggggccagagctggggggtggctgggtctgtgaaaaacagtggacagcaccccgagggccacaggtgagggacactaccactggatcgtgtcagaaggtgctgctgaggatagactgactttggccattggattgagcaaaggcagaaatgggggctagtgtaacagcatgcaggttgaattgccaaggatgctcgccatgccagcctttctgttttcctcaccttgctgctcccctgccctaagtccccaaccctcaacttgaaaccccattcccttaagccaggactcagaggatccctttgccctctggtttacctgggactccatccccaaacccactaatcacatcccactgactgaccctctgtgatcaaagaccctctctctggctgaggttggctcttagctcattgctggggatgggaaggagaagcagtggcttttgtgggcattgctctaacctacttctcaagcttccctccaaagaaactgattggccctggaacctccatcccactcttgttatgactccacagtgtccagactaatttgtgcatgaactgaaataaaaccatcctacggtatccagggaacagaaagcaggatgcaggatgggaggacaggaaggcagcctgggacatttaaaaaaataaaaatgaaaaaaaaacccagaacccatttctcagggcactttccagaattctctcatatttgtgggctgggatcaagcctgcagcttgaggaaagcacaaggaaaggaaagaagatctggtggaaagctcaggtggcagcggactctgactccactgaggaactgcctcagaagctgcgatcacaactttggctgaagcccctgcctcactctagggcacctgacctggcctcttgcctaaaccacaaggctaagggctatagacaatggtttccttaggaacagtaaaccagtttttctagggatggcccttggctgggggatgacagtgtgggagctgtggggtactgaggaagacaccattccttgacggtgtctaagaagccaggtggatgtgtgtggtggctccagtgggtgtttctactctgccagtgagaggcagccccctagaaactcttcaggcgtaatggaaaatcagctcaaatgagatcaggcccccccagggtccacccacagagcactacagagcctctgaaagaccatagcaccaagcgagccccttcagattcccccactgtccatcggaagatgctccagagtggctagagggcatctaagggctccagcatggcatatccatgcccacggtgctgtgtccatgatctgagtgatagctgcactgctgcctgggattgcagctgaggtgggagtggagaatggttcccaggaagacagttccacctctaaggtccgaaaatgttccctttaccctggagtgggagtgaggggtcatacaccaaaggtattttccctcaccagtctaggcatgactggcttctgaaaaattccagcacacctcctcgaacctcattgtcagcagagagggcccatctgttgtctgtaacatgcctttcacatgtccaccttcttgccatgttccagctgctctcccaacctggaaggccgtctccccttagccaagtcctcctcaggcttggagaacttcctcagcgtcacctccttcattgagccttctctgatcactccatccctctcctacccctccctcccccaaccctcaatgtataaattgcttcttgatgcttagcattcacaatttttgattgatcgttatttgtgtgtgtgtgtccgatctcacaagtatattgtaaacccttcggtgggtgggggccatatcctagacctctctgtatcccccagactatctgtaacagtgccaggcacacagtaggtgatcaataaacacttgttgattg

SEQ ID NO: 67018 - DNA, 3150 bp, Artificial Sequence
  derived and/or modified sequence
cccagagcaagccgattctctacacactgccttcccttcctgtaagactcatcaaaaaggcaccccaaccttgcatggatctgctgttggtattccttggggtgaagccagaagtcaggctttccacagagagacgggactacatggccacctgggaaggctagggagtcaaagggcctgaggaatgactacttccctccacaagggcattccctgccctgctctgcttcctgggggcttcagcaagccttccttctagagctcctagaaccctcccatggtcaacacaacagcagcccagacaatgagatgcaagaggcctgagctcacaggccattcaggtcttctagatgccttcttgaggctgcttgtggccacccacagacacttgtaaggaggagagaagtcagcctggcagagagactctgaaatgagggattagaggtgttcaaggagcaagagcttcagcctgaagacaagggagcagtccctgaagacgcttctactgagaggtctgccatggcctctcttggcctccaacttgtgggctacatcctaggccttctggggcttttgggcacactggttgccatgctgctccccagctggaaaacaagttcttatgtcggtgccagcattgtgacagcagttggcttctccaagggcctctggatggaatgtgccacacacagcacaggcatcacccagtgtgacatctatagcacccttctgggcctgcccgctgacatccaggctgcccaggccatgatggtgacatccagtgcaatctcctccctggcctgcattatctctgtggtgggcatgagatgcacagtcttctgccaggaatcccgagccaaagacagagtggcggtagcaggtggagtctttttcatccttggaggcctcctgggattcattcctgttgcctggaatcttcatgggatcctacgggacttctactcaccactggtgcctgacagcatgaaatttgagattggagaggctctttacttgggcattatttcttccctgttctccctgatagctggaatcatcctctgcttttcctgctcatcccagagaaatcgctccaactactacgatgcctaccaagcccaacctcttgccacaaggagctctccaaggcctggtcaacctcccaaagtcaagagtgagttcaattcctacagcctgacagggtatgtgtgaagaaccaggggccagagctggggggtggctgggtctgtgaaaaacagtggacagcaccccgagggccacaggtgagggacactaccactggatcgtgtcagaaggtgctgctgaggatagactgactttggccattggattgagcaaaggcagaaatgggggctagtgtaacagcatgcaggttgaattgccaaggatgctcgccatgccagcctttctgttttcctcaccttgctgctcccctgccctaagtccccaaccctcaacttgaaaccccattcccttaagccaggactcagaggatccctttgccctctggtttacctgggactccatccccaaacccactaatcacatcccactgactgaccctctgtgatcaaagaccctctctctggctgaggttggctcttagctcattgctggggatgggaaggagaagcagtggcttttgtgggcattgctctaacctacttctcaagcttccctccaaagaaactgattggccctggaacctccatcccactcttgttatgactccacagtgtccagactaatttgtgcatgaactgaaataaaaccatcctacggtatccagggaacagaaagcaggatgcaggatgggaggacaggaaggcagcctgggacatttaaaaaaataaaaatgaaaaaaaaacccagaacccatttctcagggcactttccagaattctctcatatttgtgggctgggatcaagcctgcagcttgaggaaagcacaaggaaaggaaagaagatctggtggaaagctcaggtggcagcggactctgactccactgaggaactgcctcagaagctgcgatcacaactttggctgaagcccctgcctcactctagggcacctgacctggcctcttgcctaaaccacaaggctaagggctatagacaatggtttccttaggaacagtaaaccagtttttctagggatggcccttggctgggggatgacagtgtgggagctgtggggtactgaggaagacaccattccttgacggtgtctaagaagccaggtggatgtgtgtggtggctccagtgggtgtttctactctgccagtgagaggcagccccctagaaactcttcaggcgtaatggaaaatcagctcaaatgagatcaggcccccccagggtccacccacagagcactacagagcctctgaaagaccatagcaccaagcgagccccttcagattcccccactgtccatcggaagatgctccagagtggctagagggcatctaagggctccagcatggcatatccatgcccacggtgctgtgtccatgatctgagtgatagctgcactgctgcctgggattgcagctgaggtgggagtggagaatggttcccaggaagacagttccacctctaaggtccgaaaatgttccctttaccctggagtgggagtgaggggtcatacaccaaaggtattttccctcaccagtctaggcatgactggcttctgaaaaattccagcacacctcctcgaacctcattgtcagcagagagggcccatctgttgtctgtaacatgcctttcacatgtccaccttcttgccatgttccagctgctctcccaacctggaaggccgtctccccttagccaagtcctcctcaggcttggagaacttcctcagcgtcacctccttcattgagccttctctgatcactccatccctctcctacccctccctcccccaaccctcaatgtataaattgcttcttgatgcttagcattcacaatttttgattgatcgttatttgtgtgtgtgtgtccgatctcacaagtatattgtaaacccttcggtgggtgggggccatatcctagacctctctgtatcccccagactatctgtaacagtgccaggcacacagtaggtgatcaataaacacttgttgattg

SEQ ID NO: 67019 - DNA, 693 bp, Artificial Sequence
  derived and/or modified sequence
atggccagcctgggcctgcagctggtgggctacatcctgggcctgctgggcctgctgggcaccctggtggccatgctgctgcccagctggaagaccagcagctacgtgggcgccagcatcgtgaccgccgtgggcttcagcaagggcctgtggatggagtgcgccacccacagcaccggcatcacccagtgcgacatctacagcaccctgctgggcctgcccgccgacatccaggccgcccaggccatgatggtgaccagcagcgccatcagcagcctggcctgcatcatcagcgtggtgggcatgagatgcaccgtgttctgccaggagagcagagccaaggacagagtggccgtggccggcggcgtgttcttcatcctgggcggcctgctgggcttcatccccgtggcctggaacctgcacggcatcctgagagacttctacagccccctggtgcccgacagcatgaagttcgagatcggcgaggccctgtacctgggcatcatcagcagcctgttcagcctgatcgccggcatcatcctgtgcttcagctgcagcagccagagaaacagaagcaactactacgacgcctaccaggcccagcccctggccaccagaagcagccccagacccggccagccccccaaggtgaagagcgagttcaacagctacagcctgaccggctacgtgtag

SEQ ID NO: 67020 - DNA, 693 bp, Artificial Sequence
  derived and/or modified sequence
atggcctccttagggctacagctggtcggctacatcctgggcttgctgggtctattgggtacccttgtagctatgctgctgccgagctggaagacaagctcttatgtcggcgcctccatcgtgactgccgtgggcttcagcaaagggctgtggatggagtgcgctacccacagcacaggaatcactcagtgtgatatatacagtaccctcttgggactgccagccgacatccaggccgctcaagctatgatggtgacctcttccgcaatttcgtcgcttgcgtgcattatcagtgtggtcggaatgagatgtaccgttttttgtcaggaaagcagagcaaaagaccgggtggctgtggctggaggggttttttttatactggggggattattggggttcataccagtggcctggaacttgcacggcattttgagggatttttactcacctttagtgcccgacagtatgaaatttgagatcggcgaggccctgtacttggggatcatttctagcttattctctctcatcgctggcataattctctgctttagctgcagcagccagcggaatcggagcaactattacgatgcgtaccaggctcagcccctggccacccggagctcaccgcgccctggccagccaccaaaggtgaagtcagagtttaactcttatagcctgaccggctatgtatag

SEQ ID NO: 67021 - DNA, 693 bp, Artificial Sequence
  derived and/or modified sequence
atggcaagcctcggcctgcaactcgtagggtacatactgggtctgctcgggttactggggactttggtggctatgctcctaccttcctggaagacatcttcctatgtcggagcttccattgtgaccgctgtaggttttagtaaaggcctttggatggaatgcgccactcactcaacaggtatcactcaatgtgacatctattccactctcttaggattgcccgccgatattcaggccgctcaagccatgatggtcacatcatcagccatatccagcttagcatgtatcatctcggtcgtcggaatgagatgcacggtgttttgtcaggagtccagggccaaagaccgtgtggctgtggccggcggagtgttctttatccttggtggcctacttggattcattcctgtggcttggaacctgcacggcatcctacgggacttctactcacctctcgtgcctgattccatgaagttcgaaattggtgaggccttatatttgggcataatcagcagcctgttctcattaatagccgggatcattttatgtttctcatgcagcagccaacgcaacaggtccaactactacgatgcctatcaggcccagccactggcaactcgcagttcgccacgtcctggccagccccccaaggtgaaaagcgagttcaatagctatagtctgactggatacgtgtag

SEQ ID NO: 67022 - DNA, 693 bp, Artificial Sequence
  derived and/or modified sequence
atggctagcctgggcctgcaactcgtggggtatatcctagggctgctgggtttgctggggacacttgtggcaatgctgctgccctcttggaagaccagctcctatgtgggtgccagcattgtgacagccgtgggattttctaaggggctctggatggaatgcgccacccactccaccgggattacacagtgcgacatatactccactttactgggattacccgccgatattcaggccgcacaagcgatgatggtcacctcctcagcaatctcaagcctggcctgtattattagtgtcgtgggtatgcggtgcaccgttttttgccaagaaagccgggccaaagatcgagtggccgtcgcaggaggagttttcttcatacttggcggactacttggcttcatccccgtagcctggaacttgcatggcattttacgggatttttacagccccctggtacctgatagtatgaaatttgaaattggcgaggccctgtatctcgggataattagtagcctcttctcactaatcgcaggaattattctgtgtttctcctgcagctcacagcgtaatcgcagtaattattatgatgcataccaggcccagcccctggcaacccgttcaagccctcggcctggacagccgccgaaggtgaagagcgagtttaacagctacagtctcacaggatacgtttag

SEQ ID NO: 67023 - DNA, 693 bp, Artificial Sequence
  derived and/or modified sequence
atggccagcctgggcctgcagctggtgggctacatcctgggcctgctgggcctgctgggcaccctggtggccatgctgctgcccagctggaagaccagcagctatgtgggcgccagcatcgtgacagctgtgggcttcagcaagggcctgtggatggagtgtgccacccacagcacaggcatcacccagtgtgacatctacagcaccctgctgggcctgcctgctgacatccaggccgcccaggccatgatggtgaccagcagcgccatcagcagcctggcctgcatcatctctgtggtgggcatgcgctgcaccgtcttctgccaggagagccgggccaaggacagagtggccgtggccggcggcgtcttcttcatcctgggcggcctgctgggcttcatccctgtggcctggaacctgcacggcatcctgcgggacttctacagccccctggtgcctgacagcatgaagtttgagatcggggaggccctgtacctgggcatcatcagcagcctcttcagcctgattgctggcatcatcctgtgcttcagctgcagcagccagaggaacagaagcaactactatgatgcctaccaggcccagcccctggccaccaggagcagccccaggcctggccagccccccaaggtgaagtctgagttcaacagctacagcctgaccggctacgtgtag

SEQ ID NO: 67024 - DNA, 693 bp, Artificial Sequence
  derived and/or modified sequence
atggccagcctgggcctgcagctggtgggctacatcctgggcctgcttggactcctcgggacgctggtggctatgttacttccttcctggaagaccagttcttacgtcggcgcttcaattgtgaccgccgtggggttttctaaggggttatggatggagtgcgccactcactctactggcataacccagtgcgatatatactctacattattaggtctccctgcagacatccaggctgcccaggctatgatggtgacctcatctgcgatctcgtcacttgcgtgcataatcagcgtcgtgggtatgaggtgcacagtgttttgtcaggagagcagagccaaagacagggtcgcggtggccgggggcgtgttcttcatcttggggggcctcttgggattcattcctgtggcatggaacctgcacgggattttgagggacttctacagccctctcgttcccgatagcatgaaatttgaaatcggcgaagcgctgtatttgggtataatcagcagcctgttcagcttaatagctggcataatcctgtgcttttcgtgtagctcccagaggaatagatccaattactatgacgcgtatcaagcccagcccttggccacccgctcttcccctagaccaggacaaccccctaaggtgaagtctgagtttaattcctattcattgacggggtatgtgtag

SEQ ID NO: 67025 - DNA, 693 bp, Artificial Sequence
  derived and/or modified sequence
atggccagcctgggcctgcagctggtgggctacatcctgggcctgctgggcctgttgggaactctggtcgccatgttgcttccatcttggaagactagcagttacgtgggcgcctctattgtaactgccgtgggattcagcaagggcttgtggatggagtgtgctacccactcaaccggcattacccaatgtgacatctatagcactcttcttggcctccctgcagacatacaagcggctcaagcaatgatggtgacttccagcgctatctctagtttggcatgtattatctctgtggtggggatgagatgcaccgtcttttgccaggagagtagggcaaaggaccgcgtagcagtggccgggggtgtgttcttcattcttggaggacttttggggttcattcccgtggcctggaacctacacggtattctccgagatttctactcccctttggttccggacagtatgaaatttgagattggcgaggccctttacctcggcataattagctctctattcagcctcattgcaggcatcatcttatgcttcagctgttcctctcagcgtaatcgttccaactactacgacgcctaccaggcccagcctttagcgactcgctcctctccacgccccggtcagccccccaaggtgaagagtgagttcaattcatactcccttactggatatgtgtag

SEQ ID NO: 67026 - DNA, 693 bp, Artificial Sequence
  derived and/or modified sequence
atggccagcctgggcctgcagctggtgggctacatcctgggcctgttaggtctgctgggaacgctcgtcgctatgctgctgccaagctggaagacaagttcttacgtgggcgcaagcatagtgacagctgtcggattcagcaagggcttatggatggagtgcgccacacatagcacaggtataacccagtgtgatatctattcaactctgctgggcctgccagcggatattcaggcggctcaggccatgatggtgacttcctcggccattagctctctagcatgcattatatccgtggtgggaatgcggtgcactgtgttctgtcaggagagccgagcaaaggatcgggtggctgtggcggggggcgtctttttcattctgggagggctcttggggttcattcctgttgcgtggaacctacacggaattcttagagatttctacagtcctctggtgcccgacagcatgaagttcgaaatcggtgaagccctctatctgggcatcatatccagcctgttttcgcttatcgccggtataatactgtgtttttcatgcagctctcagcggaacagaagcaattattatgacgcttaccaggcgcagcccctggcaaccagaagctccccgcgccccggtcaacctcccaaggtaaagagcgagttcaacagttactcactcacaggttacgtgtag

SEQ ID NO: 67027 - DNA, 693 bp, Artificial Sequence
  derived and/or modified sequence
atggcctctcttggactgcaactggtcggatatattctgggcctgctgggtctcctgggcacccttgtggccatgttgttgcccagctggaagacatcatcgtacgtcggggcatccattgttaccgccgtgggcttctcaaagggcctgtggatggagtgtgcaacccactccacggggatcacgcagtgtgatatttattcaaccttgctggggttacctgctgacattcaagctgcgcaggcaatgatggtgacttcaagtgccatctccagcttggcatgtattatatctgttgtcggcatgcggtgcaccgtgttttgtcaagaaagcagagccaaggaccgtgtggccgtagccggaggcgtttttttcattctggggggtttactaggctttatccctgttgcttggaaccttcatgggatactgcgagatttctattcaccactagtgccggattcaatgaaattcgaaattggagaagccctctatttgggaattattagtagcctattttccttgatcgctggaattatcctgtgcttttcatgtagcagtcaacgcaatcgctccaactactacgacgcttatcaggcacagcctctggccacacggagcagcccaaggccaggtcaacccccaaaggtaaaaagcgaatttaactcttattctctgacagggtacgtgtag

SEQ ID NO: 67028 - DNA, 693 bp, Artificial Sequence
  derived and/or modified sequence
atggccagcctaggcctacagctagttggttatatcctgggcctgctgggcctgctgggaacgctggtggccatgctccttccttcatggaaaacatctagctacgtgggcgcttccatcgtaacagctgtaggatttagcaaaggtctgtggatggagtgcgccactcattcaaccggcattacccagtgcgatatctacagtaccttgttgggcttgcctgctgatatccaggccgctcaggcaatgatggtgacatcgtccgcgatctcaagtcttgcgtgtatcattagcgttgttgggatgaggtgcaccgtgttctgccaggagtccagagctaaggaccgggtcgcagtggcaggcggtgtgttctttatattaggaggactgctgggctttattccagtagcttggaacctccatggcatcctgagggatttttatagccctctggtcccagacagtatgaaatttgagatcggcgaggctctgtatcttggcatcatctcttcactgttcagcctcattgcgggaatcattctttgtttttcctgctccagtcagaggaaccgttccaattactacgacgcttaccaggcccagcccctggccactagatcctcccctcggccaggccagccccctaaggtaaagtcagagtttaacagttactctttgaccggctacgtttag

SEQ ID NO: 67029 - DNA, 693 bp, Artificial Sequence
  derived and/or modified sequence
atggcttccctgggcctgcaacttgtgggatacatcttaggccttctcggcctgctgggcactctcgttgcaatgttgctcccttcctggaagacaagctcttatgtgggggcttccatcgttactgccgtgggcttctcaaaagggttatggatggagtgtgccacccatagtactggcattactcagtgtgatatctatagtacgctgctcggactacctgcagacatccaggcagctcaggccatgatggtaactagctcagctatctcttcgcttgcatgcataatcagtgttgtcggcatgcggtgtaccgtgttctgtcaggagtcacgggcaaaggatcgggtggctgtggctggaggcgtgttcttcatccttggaggtctcttgggttttatccctgtggcctggaatctgcatggcatactccgtgacttttatagccccctcgtgccagacagtatgaaattcgaaattggggaggctctttatctgggtattattagctcgctgttcagtctgatcgctggcattatcctgtgttttagctgttcttcacagagaaatcgatctaactactacgacgcctatcaggcacagccgctggctacgaggagttctcctcggcctggccagccaccgaaagtgaagagcgagtttaactcatactcactcacaggctatgtgtag

SEQ ID NO: 67030 - protein, 192 aa, Artificial Sequence
  derived and/or modified sequence
MRLAGPESSVTAAPRARKYKCGLPQPCPEEHLAFRVVSGAANVIGPKICLEDKMLMSSVKDNVGRGLNIALVNGVSGELIEARAFDMWAGDVNDLLKFIRPLHEGTLVFVASYDDPATKMNEETRKLFSELGSRNAKELAFRDSWVFVGAKGVQNKSPFEQHVKNSKHSNKYEGWPEALEMEGCIPRRSTAS

SEQ ID NO: 67031 - DNA, 579 bp, Artificial Sequence
  derived and/or modified sequence
atgagactggccggtccagaatcttctgttaccgcagcgcctcgagctcgcaagtacaaatgcggtctgccccaaccgtgtcctgaggagcaccttgcattcagggtcgtgtccggggctgcaaatgtgatcgggcctaaaatctgtctcgaggacaagatgctcatgagctcagtgaaagataacgtcggccgaggccttaacatagcacttgtaaacggagtgagtggtgagcttattgaagcacgcgcattcgacatgtgggctggcgatgtgaacgacctgttaaaatttatcaggccgctgcacgagggcactctggtattcgtcgcaagctatgacgatccggctaccaagatgaatgaggagacacgcaagcttttctcagagttgggatcccgcaatgcaaaagagctggcattccgggattcctgggtgttcgtcggagccaagggagtgcagaataaaagcccattcgaacagcacgtgaaaaactctaaacatagcaacaaatatgaaggttggcccgaggccctcgaaatggaagggtgcatcccccgaagatctacagcctcatag

SEQ ID NO: 67032 - DNA, 579 bp, Artificial Sequence
  derived and/or modified sequence
atgcggttagcagggcccgagagcagtgtgacggccgcccctcgagcaaggaaatacaaatgcggactccctcaaccatgtccagaagaacatcttgcctttcgggtggtgtctggggccgctaatgttatcggaccaaagatctgcttggaggacaagatgctcatgtctagtgtgaaggataatgtaggtcgcggattgaacattgcactcgtgaatggcgtctccggggagctcatcgaggcccgggcgtttgatatgtgggcaggagatgtcaacgatctacttaaattcatccgcccactgcatgaaggcactctggtatttgtagcgtcgtacgatgacccagctacgaaaatgaacgaggagaccagaaaattgttcagcgagcttggcagccgcaacgcaaaggaactcgcctttcgcgactcctgggtgtttgtcggagcaaagggcgtccagaacaaatcaccgttcgagcagcacgtaaagaatagtaagcatagtaataagtacgaaggctggcccgaggcacttgagatggaagggtgcatacctcgtaggagcacggctagttag

SEQ ID NO: 67033 - DNA, 579 bp, Artificial Sequence
  derived and/or modified sequence
atgaggctagccgggccagaatcaagtgttaccgctgcacctagagcaaggaagtataagtgcgggctgcctcagccatgccctgaggaacatctggccttccgagttgtaagcggggccgccaatgtgatcggaccaaagatttgtctcgaagacaagatgctaatgagctctgtgaaggataatgtgggaaggggacttaacattgcacttgtgaatggggtgtctggagagttaattgaagcaagggcatttgacatgtgggctggtgacgtcaacgaccttctgaagttcatacggcccctgcatgaagggacccttgtattcgtcgccagctatgatgatccagccacaaagatgaatgaggagacacgaaaattgttcagcgaactgggttcccgtaacgctaaggagcttgccttccgggatagttgggtgttcgttggtgctaagggcgtgcagaacaaaagtccatttgagcaacacgtgaaaaacagtaaacattctaacaaatatgaggggtggcccgaagccctggaaatggaaggctgcatccccaggaggagcaccgcatcgtag

SEQ ID NO: 67034 - DNA, 579 bp, Artificial Sequence
  derived and/or modified sequence
atgagactggccggccccgagagcagcgtgaccgccgcccccagagccagaaagtacaagtgcggcctgccccagccctgccccgaggagcacctggccttcagagtggtgagcggcgccgccaacgtgatcggccccaagatctgcctggaggacaagatgctgatgagcagcgtgaaggacaacgtgggcagaggcctgaacatcgccctggtgaacggcgtgagcggcgagctgatcgaggccagagccttcgacatgtgggccggcgacgtgaacgacctgctgaagttcatcagacccctgcacgagggcaccctggtgttcgtggccagctacgacgaccccgccaccaagatgaacgaggagaccagaaagctgttcagcgagctgggcagcagaaacgccaaggagctggccttcagagacagctgggtgttcgtgggcgccaagggcgtgcagaacaagagccccttcgagcagcacgtgaagaacagcaagcacagcaacaagtacgagggctggcccgaggccctggagatggagggctgcatccccagaagaagcaccgccagctag

SEQ ID NO: 67035 - DNA, 579 bp, Artificial Sequence
  derived and/or modified sequence
atgaggctggccggtcccgagtcctccgtgacggcagctcccagggcacggaagtacaagtgcgggctgccacagccatgcccggaagagcacttagcctttagggttgtgtctggggcggcaaacgttattggccctaaaatatgcctcgaggataaaatgctcatgtctagtgttaaggacaatgtgggacggggactcaatatcgcgctggtcaacggtgtttctggggaattgatcgaggcccgggcattcgatatgtgggcgggcgatgtgaatgatcttctgaaatttatccggccactccatgaagggactctggtgttcgtagcctcctatgatgatccagctactaaaatgaatgaggaaactcgaaaactgtttagcgaacttggctctcggaacgccaaagaactcgcctttcgggacagctgggtgttcgttggagcaaaaggtgtccagaacaagtccccatttgaacaacacgtaaaaaatagcaaacactccaataagtatgaggggtggccagaggcccttgaaatggaggggtgtatcccacggcgaagcacagcctcatag

SEQ ID NO: 67036 - DNA, 579 bp, Artificial Sequence
  derived and/or modified sequence
atgaggctggccggccctgagagctctgtgacagctgccccccgggccaggaagtacaagtgtggcctgccccagccctgcccagaggagcacctggccttccgggtggtgtctggggccgccaacgtcatcggccccaagatctgcctggaggacaagatgctgatgagctctgtgaaggacaacgtgggccggggcctgaacatcgccctggtgaatggagtgtctggagagctgattgaggcccgggcctttgacatgtgggccggagatgtgaatgacctgctgaagttcatccggcccctgcacgagggcaccctggtgtttgtggccagctatgatgatcctgccaccaagatgaatgaggagaccaggaagctgttcagcgagctgggcagcagaaatgccaaggagctggccttccgggacagctgggtgtttgtgggcgccaagggcgtgcagaacaagagcccctttgagcagcacgtgaagaacagcaagcacagcaacaagtatgagggctggccagaggccctggagatggagggctgcatccccaggaggagcacagccagctag

SEQ ID NO: 67037 - DNA, 579 bp, Artificial Sequence
  derived and/or modified sequence
atgcggctggccggccccgagagcagcgtgaccgccgccccccgggctaggaagtataagtgcggtttgccacagccatgtccagaagaacacctggcttttagagtcgtgagcggagctgcaaacgtgatcgggccgaaaatctgtctggaggataagatgctgatgtcctctgtaaaggataacgtgggaagggggctaaatattgctctcgtcaacggggtaagtggcgaactgatcgaggcccgagcgtttgatatgtgggctggggacgttaatgacctccttaagtttattcggcccctacacgaaggtacacttgtcttcgtggcttcatatgatgatccagccaccaagatgaatgaggaaacaaggaaactgttttctgaactcggaagccgtaacgcaaaggagttggcatttcgtgattcgtgggtgtttgttggggccaaaggagtgcagaataaatccccatttgagcagcatgtcaagaacagtaagcattctaataaatacgaaggatggcccgaggcactcgaaatggaaggatgtatcccccgacgttccactgcatcatag

SEQ ID NO: 67038 - DNA, 1041 bp, Artificial Sequence
  derived and/or modified sequence
ctgacagggaacctccctgaccgagcccacgtctccccacggccagagaaatctccggcccggcccgcatcgccagcccccaggcccggaggaacggcccgagcccaggagaaccacatcttcgtcccagccccggaggctcctgtgggcaagatcgtgagccaacgggttcctgaggcccctcctggccaggcagggtttccccgcgcgtttccgaggagccctgcctggccgggcggctggacaaacagtgcacttgccggcggtcccaacccagcaggagaagtggacatgaggttggcaggtccagagagctcggtgactgcagcgccacgggccaggaagtacaagtgtggcctgccccagccgtgtcctgaggagcacctggccttccgcgtggtcagcggggccgccaacgtcattgggcccaagatctgcctcgaggacaagatgctgatgagcagcgtcaaggacaacgtgggccgcgggctgaacatcgccctggtgaacggggtcagcggcgagctcatcgaggcccgggcctttgacatgtgggccggagatgtcaacgacctgttgaagtttattcggccactgcacgaaggcaccctggtgttcgtggcatcctacgacgacccagccaccaagatgaatgaagagaccagaaagctcttcagtgagctgggcagcaggaacgccaaggagctggccttccgggacagctgggtgtttgtcggggccaagggtgtgcagaacaagagcccctttgagcagcacgtgaagaacagtaagcacagcaacaagtacgaaggctggcccgaggcgctggagatggaaggctgtatcccgcggagaagcacggccagctagcacggccagtgccaggaccgggccgagggaggccagaccaagggaggcacgcgcgctgccgggcggacagaggctgaggctcacaccccacacccgggcaggagcgctccctggccccaacacatcggggctccgaggcagtgaccagaacgtggtctcaaggtggtgggg

SEQ ID NO: 67039 - RNA, 579 nt, Artificial Sequence
  derived and/or modified sequence
augcgguuagcagggcccgagagcagugugacggccgccccucgagcaaggaaauacaaaugcggacucccucaaccauguccagaagaacaucuugccuuucggguggugucuggggccgcuaauguuaucggaccaaagaucugcuuggaggacaagaugcucaugucuagugugaaggauaauguaggucgcggauugaacauugcacucgugaauggcgucuccggggagcucaucgaggcccgggcguuugauaugugggcaggagaugucaacgaucuacuuaaauucauccgcccacugcaugaaggcacucugguauuuguagcgucguacgaugacccagcuacgaaaaugaacgaggagaccagaaaauuguucagcgagcuuggcagccgcaacgcaaaggaacucgccuuucgcgacuccuggguguuugucggagcaaagggcguccagaacaaaucaccguucgagcagcacguaaagaauaguaagcauaguaauaaguacgaaggcuggcccgaggcacuugagauggaagggugcauaccucguaggagcacggcuaguuag

SEQ ID NO: 67040 - RNA, 579 nt, Artificial Sequence
  derived and/or modified sequence
augaggcuagccgggccagaaucaaguguuaccgcugcaccuagagcaaggaaguauaagugcgggcugccucagccaugcccugaggaacaucuggccuuccgaguuguaagcggggccgccaaugugaucggaccaaagauuugucucgaagacaagaugcuaaugagcucugugaaggauaaugugggaaggggacuuaacauugcacuugugaauggggugucuggagaguuaauugaagcaagggcauuugacaugugggcuggugacgucaacgaccuucugaaguucauacggccccugcaugaagggacccuuguauucgucgccagcuaugaugauccagccacaaagaugaaugaggagacacgaaaauuguucagcgaacuggguucccguaacgcuaaggagcuugccuuccgggauaguuggguguucguuggugcuaagggcgugcagaacaaaaguccauuugagcaacacgugaaaaacaguaaacauucuaacaaauaugagggguggcccgaagcccuggaaauggaaggcugcauccccaggaggagcaccgcaucguag

SEQ ID NO: 67041 - protein, 213 aa, Artificial Sequence
  derived and/or modified sequence
MRLAGPLRIVVLVVSVGVTWIVVSILLGGPGSGFPRIQQLFTSPESSVTAAPRARKYKCGLPQPCPEEHLAFRVVSGAANVIGPKICLEDKMLMSSVKDNVGRGLNIALVNDVNDLLKFIRPLHEGTLVFVASYDDPATKMNEETRKLFSELGSRNAKELAFRDSWVFVGAKGVQNKSPFEQHVKNSKHSNKYEGWPEALEMEGCIPRRSTAS

SEQ ID NO: 67042 - DNA, 642 bp, Artificial Sequence
  derived and/or modified sequence
atgcgtctcgcaggacccctaagaatcgttgtgctggtcgtgtccgtgggagtgacctggatagtagtttctatcctcctcgggggacccggaagtggcttccccagaattcagcagctgttcacaagcccagagtcgtccgttaccgccgcacccagggcaaggaagtataaatgcggcctgccacaaccttgccccgaagagcacttagcctttagggtcgtgagtggggcagctaatgtgatagggccaaagatctgcttggaagataagatgctgatgtcctctgttaaggacaatgtaggacgtggtctcaatatcgcactggtaaatgacgtgaatgatctgcttaaatttatccgacccctgcacgagggaacactggtcttcgttgctagttacgatgaccctgctaccaagatgaatgaagaaacgagaaaactcttcagcgagctgggctcccgcaatgccaaggaactggctttcagggactcatgggtgtttgtgggggctaagggggtgcagaataagagtccttttgaacaacacgtgaagaacagtaaacatagtaacaaatacgaaggatggccagaggctctggagatggaggggtgcattccgaggagatccacggcatcttag

SEQ ID NO: 67043 - DNA, 2904 bp, Artificial Sequence
  derived and/or modified sequence
cttagccgccattgccgggcctgcctggccaccctgcgcagcggccttgcgtcctctccgggggcggagcgggtcggcgggcctgacagggaacctccctgaccgagcccacgtctccccacggccagagaaatctccggcccggcccgcatcgccagcccccaggcccggaggaacggcccgagcccaggagaaccacatcttcgtcccagccccggaggctcctgtgggcaagatcgtgagccaacgggttcctgaggcccctcctggccaggcagggtttccccgcgcgtttccgaggagccctgcctggccgggcggctggacaaacaggtcgtagcaccgatcgcgcccgcccccagcaggggtcccgcacaggcttgcccctgacccccacccaaacctgtccttccgctttgcccccaaacagtgcacttgccggcggtcccaacccagcaggagaagtggacatgaggttggcaggccctctccgcattgtggtcctagtcgtcagtgtgggtgtcacatggatcgtggtcagcatcctcctgggtgggcctggcagtggctttcctcgcatccagcaactcttcaccagtccagagagctcggtgactgcagcgccacgggccaggaagtacaagtgtggcctgccccagccgtgtcctgaggagcacctggccttccgcgtggtcagcggggccgccaacgtcattgggcccaagatctgcctcgaggacaagatgctgatgagcagcgtcaaggacaacgtgggccgcgggctgaacatcgccctggtgaacgatgtcaacgacctgttgaagtttattcggccactgcacgaaggcaccctggtgttcgtggcatcctacgacgacccagccaccaagatgaatgaagagaccagaaagctcttcagtgagctgggcagcaggaacgccaaggagctggccttccgggacagctgggtgtttgtcggggccaagggtgtgcagaacaagagcccctttgagcagcacgtgaagaacagtaagcacagcaacaagtacgaaggctggcccgaggcgctggagatggaaggctgtatcccgcggagaagcacggccagctagcacggccagtgccaggaccgggccgagggaggccagaccaagggaggcacgcgcgctgccgggcggacagaggctgaggctcacaccccacacccgggcaggagcgctccctggccccaacacatcggggctccgaggcagtgaccagaacgtggtctcaaggtggtgggggctatgggggctgcagggggtagccctgccgcactttgtcacgggagcccagggtacccgcctccttttcgtaacactgttccccccggtcagcccatctagccctgtcctccattcctcacgccatctccatccccatcttgagtcctggaacggccctgggtgcctgcccctcactgtgcaactctgggagcagcccggcaggttggggcgtcttccagaacctctcccttctggagccactctgcactgcgggctaaacatgtttccagtgtgattccttccagtgagccaaacccggtggctgcttcatgagcctgactgcctctcgcctgctctcagcaggaagggacccctggagcaggctggcccggggtggtgaagtagctggagcccgatcacagtcccgcggtttgtcagggggcccaccttctagatgaccccttaataaagtgatggccccacagaagaaatgccttcagatgctgttgtcagtgcggagtcagaggtggcggtgtcctctggggtgcgggaggacagattccagagtcttaaccaacctgctcccacagcccgagcagacagccttttgtctccagggctcctgccaccaacaggccccgctgcgactgagatgtgactcaagcagtcaacagagcagtgggactcttttcgtctggcagagaagattgcacactcgggctgcaggaagctgactcaacaactccctctgacccagtgcaggcctgtacggacagggacagggattgggattaacaccagcccaggcccccaccacaccccatcatcatccaggagcacatgtcgcccacagacttcggctgcctttgaagtcagggttgtgaggggtcgagtcacttgggctttttgcgtctctcccaggttacggttaatacctccctttgctaagcgagagccagcaaattagaagcaattttgctggaatatcaactccagaggcccagaagcagtctgagttcagcgaaaggagagaaggcagttcctagatgggaggcactgtggtgtccttcatggggcgacgttaggggcgatggacttaggagccaatcccaggaagagtacagagcgcagacagagcctcagaagacaaaagtgcttctggagcaggcacatgtggggttggaggcacaggggtgccctggaggagcggctcaccagggaggaaacgatggtgatgccagtcctgcctctgcaccaggaactttctacgtgtattccattccttttttgtttttgtaaactttccttcttagagccattttaggttcacagcaaaactgagtgaaaaggtcagagttcctgtgtgccccctgccagcccccagcttcccatctgttgctgtcaatgaaccagtatcggtgctcacatgaggcttcagtttgctgttggacgttcagtgggtttggacaaaaatgtgtaatgatggatccactgcaggatcatacacacttcactctttagacttgctatggaaaattgcaaacatctccaggagacagactagcatacaatcggcccttcatatccatgggggttccatgtccacagattcaaccaaccacagattggaaatacttgg

SEQ ID NO: 67044 - DNA, 642 bp, Artificial Sequence
  derived and/or modified sequence
atgcgacttgccggtcccttacgcatcgttgtgctagtcgtctccgtgggcgtgacctggatcgtcgtgtcaatcctgctggggggccccggttcaggttttccaagaattcagcagctctttacatcaccggagtcgagtgtgacagccgcgcctagagcaagaaaatacaaatgcggcctcccacagccgtgccccgaagaacaccttgcattccgggtcgttagcggtgcagcaaacgtgatcggacccaagatttgtctcgaggacaaaatgctgatgtctagtgtcaaggacaatgtggggcgtgggctgaacattgccctcgtgaatgacgtaaacgatctgttgaagttcatcagacctctccacgaaggcactctggtgtttgtggcttcttatgatgatcctgccaccaaaatgaacgaggagacacgtaagctatttagcgaactgggaagccgaaacgccaaagagctggcattcagagattcctgggttttcgtgggcgccaagggcgtgcaaaacaaatctccattcgaacaacacgtgaagaactccaagcactctaacaaatatgaagggtggcctgaggcacttgagatggaagggtgtatcccccggagatccactgcaagctag

SEQ ID NO: 67045 - DNA, 642 bp, Artificial Sequence
  derived and/or modified sequence
atgcgacttgccggtcccttacgcatcgttgtgctagtcgtctccgtgggcgtgacctggatcgtcgtgtcaatcctgctggggggccccggttcaggttttccaagaattcagcagctctttacatcaccggagtcgagtgtgacagccgcgcctagagcaagaaaatacaaatgcggcctcccacagccgtgccccgaagaacaccttgcattccgggtcgttagcggtgcagcaaacgtgatcggacccaagatttgtctcgaggacaaaatgctgatgtctagtgtcaaggacaatgtggggcgtggactgaacattgccctggtgaacgacgtcaacgacctcctaaaatttattagacctctgcacgaagggacactggtatttgtggctagctacgacgatcccgccaccaagatgaatgaagagacgcgaaagctatttagcgaactgggatcccgtaacgcaaaagaactcgcctttagggacagctgggtcttcgtcggcgccaaaggcgtccagaataaatcaccatttgaacagcacgtcaaaaatagtaagcattccaataaatacgagggctggccggaggcgctggagatggaaggatgtataccccgcagatctacggccagctag

SEQ ID NO: 67046 - DNA, 642 bp, Artificial Sequence
  derived and/or modified sequence
atgagactggccggccccctgagaatcgtggtgctggtggtgagcgtgggcgtgacctggatcgtggtgagcatcctgctgggcggccccggcagcggcttccccagaatccagcagctgttcaccagccccgagagcagcgtgaccgccgcccccagagccagaaagtacaagtgcggcctgccccagccctgccccgaggagcacctggccttcagagtggtgagcggcgccgccaacgtgatcggccccaagatctgcctggaggacaagatgctgatgagcagcgtgaaggacaacgtgggcagaggcctgaacatcgccctggtgaacgacgtgaacgacctgctgaagttcatcagacccctgcacgagggcaccctggtgttcgtggccagctacgacgaccccgccaccaagatgaacgaggagaccagaaagctgttcagcgagctgggcagcagaaacgccaaggagctggccttcagagacagctgggtgttcgtgggcgccaagggcgtgcagaacaagagccccttcgagcagcacgtgaagaacagcaagcacagcaacaagtacgagggctggcccgaggccctggagatggagggctgcatccccagaagaagcaccgccagctag

SEQ ID NO: 67047 - DNA, 642 bp, Artificial Sequence
  derived and/or modified sequence
atgagacttgcaggccctctgagaattgtggtgctcgtggtctcagtgggcgtgacgtggatcgtcgtgagcattctcctgggaggtcccgggagtgggtttcctcggattcaacagctgtttacatcaccagagtcttccgtgacagctgctccaagagcccgcaaatataaatgtgggctccctcagccttgccctgaggagcatctggcttttcgtgttgtgagtggcgccgccaacgtgataggtcctaaaatttgccttgaagacaagatgctcatgtcgtcggttaaggacaacgttggcagaggactgaacattgcacttgtgaacgatgtgaatgacctgcttaagtttattcgccccctgcatgaaggtacattggtgtttgtggcatcctatgatgatcctgctaccaagatgaacgaggaaacacggaaactgttctccgagctcggctccaggaacgcgaaggagcttgccttcagggattcttgggtctttgtgggagcgaagggggtgcaaaacaaatctccattcgagcagcatgtaaagaactccaaacacagtaacaagtatgagggttggccagaggcgttagaaatggagggatgcattcctcggcgctccaccgcttcttag

SEQ ID NO: 67048 - DNA, 642 bp, Artificial Sequence
  derived and/or modified sequence
atgaggctggccggccccctgagaattgtggtgctggtggtgtctgtgggcgtgacctggatcgtggtgtccatcctgctgggcggccctggcagcggcttcccccgcatccagcagctgttcaccagccctgagagctctgtgacagctgccccccgggccaggaagtacaagtgtggcctgccccagccctgcccagaggagcacctggccttccgggtggtgtctggggccgccaacgtcatcggccccaagatctgcctggaggacaagatgctgatgagctctgtgaaggacaacgtgggccggggcctgaacatcgccctggtgaatgatgtgaatgacctgctgaagttcatccggcccctgcacgagggcaccctggtgtttgtggccagctatgatgatcctgccaccaagatgaatgaggagaccaggaagctgttcagcgagctgggcagcagaaatgccaaggagctggccttccgggacagctgggtgtttgtgggcgccaagggcgtgcagaacaagagcccctttgagcagcacgtgaagaacagcaagcacagcaacaagtatgagggctggccagaggccctggagatggagggctgcatcccccggcgcagcacagccagctag

SEQ ID NO: 67049 - DNA, 642 bp, Artificial Sequence
  derived and/or modified sequence
atgcggctggccggccccctgcggatcgtggtgctggtggtgagcgtgggggttacatggatagtagtgtcgatcttgcttggaggcccaggcagcggatttccacgcatccaacagttattcacatctcccgagagttcagtgaccgctgcccctagagcacggaaatataagtgcgggctgcctcaaccctgcccggaagagcatcttgcctttcgggtcgtcagtggagctgctaacgttataggacctaaaatatgccttgaggacaaaatgctcatgtcatcagtgaaggacaacgtggggcgcggcctgaatatagctctcgtgaacgatgttaatgacctgctcaaattcattcgtccgctccacgagggaactttagtttttgttgcttcttatgatgatccagccaccaagatgaatgaggaaaccagaaagctctttagtgagctgggctccaggaatgcgaaggaactcgcctttagagactcctgggtgtttgtcggagctaagggtgtacagaataagtctccttttgaacagcacgtgaagaactctaaacatagcaacaaatacgaggggtggcctgaggccctcgagatggagggctgtatcccccgtcgatctaccgcatcttag

SEQ ID NO: 67050 - RNA, 642 nt, Artificial Sequence
  derived and/or modified sequence
augcgacuugccggucccuuacgcaucguugugcuagucgucuccgugggcgugaccuggaucgucgugucaauccugcuggggggccccgguucagguuuuccaagaauucagcagcucuuuacaucaccggagucgagugugacagccgcgccuagagcaagaaaauacaaaugcggccucccacagccgugccccgaagaacaccuugcauuccgggucguuagcggugcagcaaacgugaucggacccaagauuugucucgaggacaaaaugcugaugucuagugucaaggacaauguggggcgugggcugaacauugcccucgugaaugacguaaacgaucuguugaaguucaucagaccucuccacgaaggcacucugguguuuguggcuucuuaugaugauccugccaccaaaaugaacgaggagacacguaagcuauuuagcgaacugggaagccgaaacgccaaagagcuggcauucagagauuccuggguuuucgugggcgccaagggcgugcaaaacaaaucuccauucgaacaacacgugaagaacuccaagcacucuaacaaauaugaaggguggccugaggcacuugagauggaaggguguaucccccggagauccacugcaagcuag

SEQ ID NO: 67051 - RNA, 642 nt, Artificial Sequence
  derived and/or modified sequence
augcgacuugccggucccuuacgcaucguugugcuagucgucuccgugggcgugaccuggaucgucgugucaauccugcuggggggccccgguucagguuuuccaagaauucagcagcucuuuacaucaccggagucgagugugacagccgcgccuagagcaagaaaauacaaaugcggccucccacagccgugccccgaagaacaccuugcauuccgggucguuagcggugcagcaaacgugaucggacccaagauuugucucgaggacaaaaugcugaugucuagugucaaggacaauguggggcguggacugaacauugcccuggugaacgacgucaacgaccuccuaaaauuuauuagaccucugcacgaagggacacugguauuuguggcuagcuacgacgaucccgccaccaagaugaaugaagagacgcgaaagcuauuuagcgaacugggaucccguaacgcaaaagaacucgccuuuagggacagcugggucuucgucggcgccaaaggcguccagaauaaaucaccauuugaacagcacgucaaaaauaguaagcauuccaauaaauacgagggcuggccggaggcgcuggagauggaaggauguauaccccgcagaucuacggccagcuag

SEQ ID NO: 67052 - protein, 694 aa, Artificial Sequence
  derived and/or modified sequence
MENKSLESSQTDLKLVAHPRAKSKVWKYFGFDTNAEGCILQWKKIYCRICMAQIAYSGNTSNLSYHLEKNHPEEFCEFVKSNTEQMREAFATAFSKLKPESSQQPGQDALAVKAGHGYDSKKQQELTAAVLGLICEGLYPASIVDEPTFKVLLKTADPRYELPSRKYISTKAIPEKYGAVREVILKELAEATWCGISTDMWRSENQNRAYVTLAAHFLGLGAPNCLSMGSRCLKTFEVPEENTAETITRVLYEVFIEWGISAKVFGATTNYGKDIVKACSLLDVAVHMPCLGHTFNAGIQQAFQLPKLGALLSRCRKLVEYFQQSAVAMYMLYEKQKQQNVAHCMLVSNRVSWWGSTLAMLQRLKEQQFVIAGVLVEDSNNHHLMLEASEWATIEGLVELLQPFKQVAEMLSASRYPTISMVKPLLHMLLNTTLNIKETDSKELSMAKEVIAKELSKTYQETPEIDMFLNVATFLDPRYKRLPFLSAFERQQVENRVVEEAKGLLDKVKDGGYRPAEDKIFPVPEEPPVKKLMRTSTPPPASVINNMLAEIFCQTGGVEDQEEWHAQVVEELSNFKSQKVLGLNEDPLKWWSDRLALFPLLPKVLQKYWCVTATRVAPERLFGSAANVVSAKRNRLAPAHVDEQVFLYENARSGAEAEPEDQDEGEWGLDQEQVFSLGDGVSGGFFGIRDSSFL

SEQ ID NO: 67053 - protein, 272 aa, Artificial Sequence
  derived and/or modified sequence
MENKSLESSQTDLKLVAHPRAKSKVWKYFGFDTNAEGCILQWKKIYCRICMAQIAYSGNTSNLSYHLEKNHPEEFCEFVKSNTEQMREAFATAFSKLKPESSQQPGQDALAVKAGHGYDSKKQQELTAAVLGLICEGLYPASIVDEPTFKVLLKTADPRYELPSRKYISTKAIPEKYGAVREVILKELAEATWCGISTDMWRSENQNRAYVTLAAHFLGLGAPNCLSMGSRCLKTFEVPEENTAETITRVLYEVFIEWGISAKVFGATTNYG

SEQ ID NO: 67054 - DNA, 2085 bp, Artificial Sequence
  derived and/or modified sequence
atggagaacaagagcctggagagcagccagaccgacctgaagctggtggcccaccccagagccaagagcaaggtgtggaagtacttcggcttcgacaccaacgccgagggctgcatcctgcagtggaagaagatctactgcagaatctgcatggcccagatcgcctacagcggcaacaccagcaacctgagctaccacctggagaagaaccaccccgaggagttctgcgagttcgtgaagagcaacaccgagcagatgagagaggccttcgccaccgccttcagcaagctgaagcccgagagcagccagcagcccggccaggacgccctggccgtgaaggccggccacggctacgacagcaagaagcagcaggagctgaccgccgccgtgctgggcctgatctgcgagggcctgtaccccgccagcatcgtggacgagcccaccttcaaggtgctgctgaagaccgccgaccccagatacgagctgcccagcagaaagtacatcagcaccaaggccatccccgagaagtacggcgccgtgagagaggtgatcctgaaggagctggccgaggccacctggtgcggcatcagcaccgacatgtggagaagcgagaaccagaacagagcctacgtgaccctggccgcccacttcctgggcctgggcgcccccaactgcctgagcatgggcagcagatgcctgaagaccttcgaggtgcccgaggagaacaccgccgagaccatcaccagagtgctgtacgaggtgttcatcgagtggggcatcagcgccaaggtgttcggcgccaccaccaactacggcaaggacatcgtgaaggcctgcagcctgctggacgtggccgtgcacatgccctgcctgggccacaccttcaacgccggcatccagcaggccttccagctgcccaagctgggcgccctgctgagcagatgcagaaagctggtggagtacttccagcagagcgccgtggccatgtacatgctgtacgagaagcagaagcagcagaacgtggcccactgcatgctggtgagcaacagagtgagctggtggggcagcaccctggccatgctgcagagactgaaggagcagcagttcgtgatcgccggcgtgctggtggaggacagcaacaaccaccacctgatgctggaggccagcgagtgggccaccatcgagggcctggtggagctgctgcagcccttcaagcaggtggccgagatgctgagcgccagcagataccccaccatcagcatggtgaagcccctgctgcacatgctgctgaacaccaccctgaacatcaaggagaccgacagcaaggagctgagcatggccaaggaggtgatcgccaaggagctgagcaagacctaccaggagacccccgagatcgacatgttcctgaacgtggccaccttcctggaccccagatacaagagactgcccttcctgagcgccttcgagagacagcaggtggagaacagagtggtggaggaggccaagggcctgctggacaaggtgaaggacggcggctacagacccgccgaggacaagatcttccccgtgcccgaggagccccccgtgaagaagctgatgagaaccagcacccccccccccgccagcgtgatcaacaacatgctggccgagatcttctgccagaccggcggcgtggaggaccaggaggagtggcacgcccaggtggtggaggagctgagcaacttcaagagccagaaggtgctgggcctgaacgaggaccccctgaagtggtggagcgacagactggccctgttccccctgctgcccaaggtgctgcagaagtactggtgcgtgaccgccaccagagtggcccccgagagactgttcggcagcgccgccaacgtggtgagcgccaagagaaacagactggcccccgcccacgtggacgagcaggtgttcctgtacgagaacgccagaagcggcgccgaggccgagcccgaggaccaggacgagggcgagtggggcctggaccaggagcaggtgttcagcctgggcgacggcgtgagcggcggcttcttcggcatcagagacagcagcttcctgtag

SEQ ID NO: 67055 - DNA, 819 bp, Artificial Sequence
  derived and/or modified sequence
atggagaacaagagcctggagagcagccagaccgacctgaagctggtggcccaccccagagccaagagcaaggtgtggaagtacttcggcttcgacaccaacgccgagggctgcatcctgcagtggaagaagatctactgcagaatctgcatggcccagatcgcctacagcggcaacaccagcaacctgagctaccacctggagaagaaccaccccgaggagttctgcgagttcgtgaagagcaacaccgagcagatgagagaggccttcgccaccgccttcagcaagctgaagcccgagagcagccagcagcccggccaggacgccctggccgtgaaggccggccacggctacgacagcaagaagcagcaggagctgaccgccgccgtgctgggcctgatctgcgagggcctgtaccccgccagcatcgtggacgagcccaccttcaaggtgctgctgaagaccgccgaccccagatacgagctgcccagcagaaagtacatcagcaccaaggccatccccgagaagtacggcgccgtgagagaggtgatcctgaaggagctggccgaggccacctggtgcggcatcagcaccgacatgtggagaagcgagaaccagaacagagcctacgtgaccctggccgcccacttcctgggcctgggcgcccccaactgcctgagcatgggcagcagatgcctgaagaccttcgaggtgcccgaggagaacaccgccgagaccatcaccagagtgctgtacgaggtgttcatcgagtggggcatcagcgccaaggtgttcggcgccaccaccaactacggctag

SEQ ID NO: 67056 - DNA, 2085 bp, Artificial Sequence
  derived and/or modified sequence
atggaaaacaaaagcttggagagcagccaaactgacttaaagctggttgctcaccctagagccaaaagcaaggtatggaagtatttcgggtttgatactaatgccgaaggctgtattctgcaatggaagaagatctattgtagaatatgcatggcccaaatcgcctacagcggaaacacatctaatctgtcataccatttggagaagaatcatcccgaggagttttgcgagttcgtgaagtccaataccgaacagatgagagaggcgttcgctacagctttctcaaaactgaaaccagaaagcagtcagcagcctgggcaggatgccctggcggtgaaggcagggcacgggtacgattcaaagaaacagcaggaactgactgctgcggtgctggggcttatctgtgaaggcctgtatccagcctcaattgtggatgagccgacctttaaggtattgctcaagacggcggatccaagatatgagctgcccagcagaaagtatatctccactaaggccattcccgaaaagtacggtgctgtacgcgaggtaatactcaaggagcttgctgaagctacttggtgtggcatttcaaccgatatgtggcgaagcgagaatcagaatagagcatacgtgactctggctgcacacttcttggggctaggagcacccaattgtctgtcaatggggtcacgctgcttgaagacatttgaggtgcctgaggagaatactgcagaaaccataacgcgtgtgctgtacgaagttttcatcgagtgggggatctccgcaaaggtttttggcgctactaccaactacggtaaggacattgtgaaggcttgtagcttgctggatgtggcggttcacatgccttgcctcgggcacacctttaacgccggaatacaacaggcctttcagttgcccaagctgggcgcgctattgtctcggtgccggaagttggtggaatacttccagcaatctgctgtagcaatgtatatgctgtacgagaagcagaaacagcagaatgtcgctcattgcatgttggtttctaatcgcgtatcatggtgggggtcaactctcgccatgctacagaggttaaaagagcaacagttcgttattgccggagtgttggtggaagatagcaataatcaccatctgatgctggaggcttcagagtgggccactattgaaggactcgtggaactgctccagcccttcaagcaggttgccgagatgctatccgccagtcggtatcctaccatttccatggtgaagccactcctccatatgttgctgaacacaaccttgaacatcaaggaaactgacagtaaggaactcagtatggccaaggaggttatagcaaaagaattgagcaagacctaccaggaaacgcccgaaattgatatgtttttaaatgttgccacatttttagacccccggtataagagactcccgttcctctcagcgttcgaaaggcaacaggttgaaaacagggtggtggaggaggctaagggcttgctggacaaagtcaaggacggtggataccgacccgcagaggacaaaatattccccgtgccagaagagccacctgtgaagaaactgatgaggacaagcacacctccacctgcaagcgtcattaataacatgctggcagagatcttttgtcaaaccggcggtgtggaggatcaggaggaatggcacgcccaagttgtggaggaactgtctaactttaagtcccagaaagtcctcgggctaaatgaggatcccctgaagtggtggtctgataggctggcgctgtttccactgctgcctaaggtgcttcaaaagtactggtgcgtgacggctactagggtggctcccgagaggctgttcggctccgctgccaacgtggtgtcagccaagagaaatcgcctcgctcctgcacacgtagatgagcaggtcttcctgtatgaaaatgcacggtcaggcgccgaggccgaaccagaagatcaggacgagggggaatggggtctggatcaagaacaagtcttcagcctgggcgacggggtctctggcggattcttcggcattagggattcttcctttttgtag

SEQ ID NO: 67057 - DNA, 2085 bp, Artificial Sequence
  derived and/or modified sequence
atggaaaacaagtcactggaatcatcccagacagacctcaagctggttgcccacccccgggcgaagagcaaagtgtggaagtacttcggatttgatacaaatgcagaagggtgtatactccagtggaagaagatctattgcagaatctgcatggcccagatagcttactcaggcaacaccagcaacctgtcatatcatctggaaaaaaatcatcccgaagagttctgcgaattcgtgaaatcaaacaccgagcagatgagagaggccttcgccacagctttctctaaactcaaacccgaatcttctcagcagccgggtcaggacgcattggctgtgaaggctgggcatggttacgactctaagaagcagcaggaattgacagccgcagttctgggactgatctgtgaaggactatatcctgcttctatcgtcgacgagcccacgttcaaagtgctactcaagactgccgatccccgatatgagctccctagtcgtaagtacattagtaccaaagcgatccccgagaaatatggtgccgtaagggaagtgatcctgaaggagttagctgaagctacatggtgcggtatttctacagatatgtggaggtccgaaaatcagaatagagcgtacgtcactctcgccgcgcactttcttggattgggcgcaccaaactgtctctccatgggctctcggtgcctgaaaacattcgaagtgcctgaggagaacaccgcagagacgattaccagagtgctctatgaggtattcatagagtggggaatatcggccaaggtgtttggcgctaccacaaattacggcaaagatattgtgaaggcttgtagcctgctggatgttgccgtgcatatgccctgtctgggacacacctttaatgcaggcatccagcaggccttccagctgcccaaactcggagcgctgctgtcccgatgccgaaagctggttgaatacttccagcagtctgcagtggccatgtacatgctgtacgagaaacagaagcagcaaaacgtggcacattgtatgctggtctccaatcgagttagctggtggggatccaccctcgcgatgctccagaggttgaaagagcaacagttcgtgattgctggagtcctggtcgaagacagtaataatcatcatctgatgctcgaggcttctgaatgggcaaccatcgagggactagtagaactgctgcagcctttcaagcaagtggcagaaatgctctcagcgtccagatatcctaccataagtatggtcaagccactactacacatgcttctgaacacaactctgaatatcaaggagacagatagtaaggagctctctatggctaaagaggttattgccaaagaactcagcaaaacatatcaggagacccccgaaattgatatgtttctcaatgtggctacgtttctggatccccggtataagagattaccattcctctctgctttcgaacgacaacaagtggagaatcgagtcgtagaagaagctaaaggactgctggacaaagtcaaagacggcgggtatagaccggccgaagataagattttccccgtacccgaagaacctccagtgaagaaactcatgagaacatccaccccgccacctgcctcagtcatcaataatatgctggctgaaattttttgtcagacaggaggggtagaagaccaggaggaatggcatgcccaagtggttgaggaactcagcaacttcaaaagccaaaaggtccttggccttaacgaggatcctctgaagtggtggtctgatcggttggcccttttccctttgctgcctaaggttctccagaagtactggtgcgtcacagctacacgcgtcgcacctgagagacttttcgggagtgcagccaatgtggttagcgccaagagaaacagacttgcccccgcccacgttgacgagcaggtattcttgtatgagaacgctcggtccggcgcagaagccgaacccgaagaccaagacgaaggtgaatggggactagatcaggagcaggtgttctccctgggggatggagtgagcggaggcttcttcgggatcagagattctagttttttatag

SEQ ID NO: 67058 - DNA, 2085 bp, Artificial Sequence
  derived and/or modified sequence
atggaaaataagagtctcgagagttcccaaactgacctaaagcttgtggcccatcctcgggccaagagcaaggtttggaagtatttcgggttcgatacgaatgctgagggatgtattcttcaatggaagaaaatatattgccggatctgtatggcccagattgcatattccggaaacacatccaaccttagctaccatcttgaaaagaatcacccagaagagttctgtgagttcgtgaagagcaatactgagcagatgagggaggctttcgccaccgccttttcaaagctgaaaccagaaagttcgcaacagcctggtcaggatgccttagctgtcaaagctggccatgggtatgactcaaagaaacagcaggaattgaccgcagctgtgctcggtctgatctgcgaaggtctgtaccctgcctccattgttgacgaacccacattcaaggttttactgaaaacagcagaccccagatacgaactgccaagtcgtaagtatataagcacaaaagcaatacctgagaagtatggggccgtacgcgaggtcattctcaaagaactagctgaagccacctggtgtggcatttctactgacatgtggagatccgaaaatcagaaccgggcttacgtgactctagctgcccatttcttgggcctcggagctcctaattgtctgagcatgggctcacgctgtctgaagaccttcgaggtacctgaggagaacactgccgaaacgattacgagagtgctctacgaggttttcattgagtggggtatttcagctaaggtattcggtgccacaactaattacggcaaagacatcgtgaaggcgtgcagtctcctggacgtcgcggtgcacatgccgtgtctggggcacactttcaatgccggaatccagcaggctttccaactgcccaagcttggcgccttgctgtcacgctgcaggaaactagtggaatactttcaacagagcgccgtggcaatgtatatgctttacgaaaaacagaagcaacagaacgtagcacattgtatgcttgtgtccaatcgggtgtcttggtggggatctacattagccatgctgcagagactgaaggagcagcagttcgtcatcgccggtgttctggtcgaggattcaaacaaccatcacttgatgcttgaagcaagcgagtgggccacaatcgagggtctggtggagctgttgcagccttttaagcaagttgccgaaatgctaagcgcctcaagataccccaccatatccatggtgaagcccctccttcacatgctcctgaatacaacccttaacatcaaagagaccgatagcaaagagctatccatggctaaagaagtaattgcaaaagagctctccaagacctaccaggaaacacctgagattgacatgttcctcaatgttgccacattcttggaccctcgctataagagactgccctttctgtcagcatttgagcggcagcaggttgagaaccgagtggtggaggaggctaagggcctcctcgacaaagtgaaggacggaggataccggccagccgaggacaaaattttcccagtgccggaggaaccccccgtgaagaaactcatgagaactagcactcccccacccgcctctgtcatcaacaacatgctggcagaaattttctgtcagaccggaggcgtggaagaccaagaggagtggcatgctcaggtggtggaggagctgagtaatttcaaaagtcagaaagtgttgggtctcaatgaagacccgcttaagtggtggtccgatagactcgctctgtttcccctgctgccgaaagttctgcagaagtactggtgtgtgaccgccacgcgcgtagccccagaacgtctgtttggctcagctgccaacgttgtgagtgcaaagagaaaccgactcgctcctgcgcacgtggatgagcaggtattcctgtatgagaatgcacggtctggggccgaggcagagcccgaagaccaagacgagggggagtggggcctcgatcaggaacaggtatttagcctgggtgatggtgtctctggcggtttcttcgggatcagggattcaagcttcctctag

SEQ ID NO: 67059 - DNA, 819 bp, Artificial Sequence
  derived and/or modified sequence
atggagaataaaagcctggaatcttcccaaaccgacctgaagttggtcgcccatcctcgcgccaagagcaaggtgtggaaatattttggcttcgatacaaacgctgagggctgcatacttcagtggaagaaaatctattgtcgaatctgtatggcccagatagcatatagcggaaacaccagcaacctctcatatcacctggagaagaaccacccggaggaattctgcgaatttgttaagagcaatactgaacaaatgagggaagcttttgccactgccttctcaaagctgaagccagaatcttcccagcagccgggccaggacgctctggccgtcaaggccggccacggctatgactccaagaaacagcaggaattaaccgccgcggtgcttggtctgatctgtgagggcctgtatcctgccagcattgtggacgagccaaccttcaaagtccttttaaagacagccgacccacggtatgaattaccatcgcgaaagtacataagcacaaaggccattccggaaaagtatggcgctgttagagaagtgatcctgaaggaactggctgaagccacctggtgtgggatcagcacagacatgtggcggtcagaaaaccaaaatcgggcctacgtgacactggctgctcacttcctcggcctgggtgctcccaactgcttgtccatgggttccagatgtttgaagacgttcgaagtgcccgaggagaacacagcagagactatcaccagagtgttgtacgaggtatttatcgagtggggtataagtgcaaaggtgttcggagctactaccaactacgggtag

SEQ ID NO: 67060 - DNA, 2085 bp, Artificial Sequence
  derived and/or modified sequence
atggagaacaagagcctggagagcagccagacagacctgaagctggtggcccacccccgggccaagagcaaggtgtggaagtactttggatttgacaccaatgctgagggctgcatcctgcagtggaagaagatctactgccgcatctgcatggcccagatcgcctacagcggcaacaccagcaacctgagctaccacctggagaagaaccaccctgaggagttctgtgaatttgtgaagagcaacacagagcagatgagggaggcctttgccacagccttcagcaagctgaagccagagagcagccagcagcccggccaggatgccctggccgtgaaggccggccacggctatgacagcaagaagcagcaggagctgacagctgctgtgctgggcctcatctgtgagggcctgtacccagccagcatcgtggatgagcccaccttcaaggtgctgctgaagacagctgaccccaggtatgagctgcccagcaggaagtacatcagcaccaaggccatccctgagaagtatggagctgtgcgggaggtgatcctgaaggagctggccgaggccacctggtgtggcatcagcacagacatgtggaggtctgagaaccagaacagagcctacgtgaccctggccgcccacttcctgggcctgggcgcccccaactgcctgtccatgggcagccgctgcctgaagacctttgaggtgcctgaagaaaatacagctgagaccatcaccagggtgctgtatgaggtgttcatcgagtggggcatcagcgccaaggtgtttggagccaccaccaactacggcaaggacatcgtgaaggcctgcagcctgctggatgtggccgtgcacatgccctgcctgggccacaccttcaatgccggcatccagcaggccttccagctgcccaagctgggcgccctgctgagccgctgcaggaagctggtggagtacttccagcagagcgctgtggccatgtacatgctgtatgagaagcagaagcagcagaatgtggcccactgcatgctggtgagcaacagagtgtcctggtggggcagcaccctggccatgctgcagaggctgaaggagcagcagtttgtgattgctggggtgctggtggaggacagcaacaaccaccacctgatgctggaggccagcgagtgggccaccatcgagggcctggtggagctgctgcagcccttcaagcaggtggccgagatgctgagcgccagccgctaccccaccatctccatggtgaagcccctgctgcacatgctgctgaacaccaccctgaacatcaaggagacagacagcaaggagctgtccatggccaaggaggtgattgccaaggagctgagcaagacctaccaggagaccccagaaattgacatgttcctgaatgtggccaccttcctggacccccgctacaagaggctgcccttcctgagcgcctttgagcggcagcaggtggagaacagagtggtggaggaggccaagggcctgctggacaaggtgaaggatggcggctacagacctgctgaggacaagatcttccctgtgcctgaggagccccctgtgaagaagctgatgaggaccagcaccccacctccagccagcgtcatcaacaacatgctggccgagatcttctgccagacaggaggagtggaggaccaggaggagtggcacgcccaggtggtggaggagctgagcaacttcaagagccagaaggtgctgggcctgaatgaagaccccctgaagtggtggagcgaccggctggccctcttccccctgctgcccaaggtgctgcagaagtactggtgtgtgacagccaccagggtggcccctgagcggctgtttggcagcgctgccaacgtggtgtctgccaagaggaaccggctggccccagcccacgtggatgagcaggtgttcctgtatgaaaatgcccggtctggagctgaggccgagcctgaggaccaggatgaaggagagtggggcctggaccaggagcaggtgttcagcctgggagatggagtgtctgggggcttcttcggcatccgggacagcagcttcctgtag

SEQ ID NO: 67061 - DNA, 819 bp, Artificial Sequence
  derived and/or modified sequence
atggagaacaagagcctggagagcagccagacagacctgaagctggtggcccacccccgggccaagagcaaggtgtggaagtactttggatttgacaccaatgctgagggctgcatcctgcagtggaagaagatctactgccgcatctgcatggcccagatcgcctacagcggcaacaccagcaacctgagctaccacctggagaagaaccaccctgaggagttctgtgaatttgtgaagagcaacacagagcagatgagggaggcctttgccacagccttcagcaagctgaagccagagagcagccagcagcccggccaggatgccctggccgtgaaggccggccacggctatgacagcaagaagcagcaggagctgacagctgctgtgctgggcctcatctgtgagggcctgtacccagccagcatcgtggatgagcccaccttcaaggtgctgctgaagacagctgaccccaggtatgagctgcccagcaggaagtacatcagcaccaaggccatccctgagaagtatggagctgtgcgggaggtgatcctgaaggagctggccgaggccacctggtgtggcatcagcacagacatgtggaggtctgagaaccagaacagagcctacgtgaccctggccgcccacttcctgggcctgggcgcccccaactgcctgtccatgggcagccgctgcctgaagacctttgaggtgcctgaagaaaatacagctgagaccatcaccagggtgctgtatgaggtgttcatcgagtggggcatcagcgccaaggtgtttggagccaccaccaactatggatag

SEQ ID NO: 67062 - DNA, 2085 bp, Artificial Sequence
  derived and/or modified sequence
atggagaacaagagcctggagagcagccagaccgacctgaagctggtggcgcacccccgtgccaagagtaaggtttggaaatactttggatttgacaccaacgccgagggctgcatcttgcagtggaaaaagatttactgcagaatttgtatggcgcagattgcatatagcggcaacactagcaatctgtcctaccacctggaaaaaaaccaccccgaggaattctgcgagtttgttaaaagcaacactgaacagatgcgcgaagcctttgccacagccttttcgaagcttaaacctgagagtagccagcagccaggtcaggacgcgcttgccgtcaaggcagggcatggatacgactctaaaaagcagcaggagcttactgcagcagttttggggttaatctgcgaggggctctaccctgccagtatagttgatgaaccaacgttcaaggtgctcctcaaaacagcagacccccgatatgagctccccagtaggaagtatattagcaccaaagcaattcctgagaagtacggcgcagtcagagaagtgattctgaaggagcttgccgaggccacttggtgcggaatctccacagatatgtggaggagcgaaaatcagaaccgcgcctacgtgactctggcagctcattttctgggcctgggagcccccaactgtctgagcatggggtcccggtgtttgaagacctttgaggtgcctgaggaaaacaccgccgagactataacccgggtcctgtacgaggttttcatcgagtggggaattagtgccaaggtctttggtgccacgactaattatgggaaagatatcgtcaaggcttgctctctgttggatgtggcagttcatatgccgtgccttggacacacttttaacgccgggatccagcaggcattccagctacctaaactcggcgccctcctgagccgttgtagaaaactcgttgagtatttccagcaatctgcggtcgccatgtatatgctttatgaaaagcagaaacagcaaaacgtagcacattgcatgctcgtcagcaacagagtgtcctggtggggtagtacattagccatgctgcagagattaaaagagcagcaatttgtgattgccggagttctggtcgaagactcaaataatcaccacctcatgctggaagcctccgagtgggcgacgattgaaggtctcgttgagctcctgcagccattcaagcaggtcgcagaaatgctgagcgccagtcgctatcctactatatccatggtgaaaccccttctgcacatgctgctgaataccaccttaaacatcaaggaaacggattctaaggagctgtctatggctaaagaggttattgccaaagagctgagtaagacatatcaggagacacccgaaatagatatgtttctgaacgtcgcaactttcctggatccgcggtacaagcggctacccttcctgagtgcctttgaacgccagcaggtggagaatcgtgtcgtagaggaagccaagggcctgctcgacaaggtcaaggatggcggttatagacctgccgaggataaaattttcccagtgcctgaagagccacctgtaaaaaaactgatgagaacttctactccaccccccgcctctgttatcaacaatatgctcgcagagattttctgtcagaccggtggtgtggaggaccaagaggaatggcacgcgcaggtggtggaagaactaagtaatttcaagagccaaaaggtgttgggtctgaacgaagaccccctgaaatggtggtctgatcggctagccttattccccctattaccaaaggtcctccagaagtactggtgtgtgactgctacgagggttgcaccagagaggctatttggctccgccgccaacgtggtatccgctaaaagaaaccggctggcccccgcgcatgtagacgagcaagttttcctgtacgaaaatgcacgttcaggggcagaggctgaacctgaggaccaagatgagggcgaatggggcctcgatcaggaacaggtgttctctctgggagacggcgtctccgggggcttctttgggatcagggattcctcctttctttag

SEQ ID NO: 67063 - DNA, 2085 bp, Artificial Sequence
  derived and/or modified sequence
atggagaacaagagcctggagagcagccagaccgacctgaagctggtggcccatccccgggcgaaatccaaagtatggaagtattttggcttcgatactaatgccgagggatgcatcctccagtggaagaagatttattgtcgaatatgtatggcccagattgcgtattctggcaatacctctaatctgagctaccacctcgaaaagaaccatcccgaagagttctgcgaattcgtcaaaagcaatactgagcagatgcgggaagctttcgctaccgcattctctaaactgaagccagagtcatctcagcagccaggacaggacgcgttggccgttaaagccggacatgggtatgactcgaaaaaacagcaggagctgacagcagcagtgctgggtctgatttgcgaaggtctgtaccctgccagcatcgtggacgagcctacctttaaggtactgttgaagacagcggacccacggtatgagctcccctctcgtaagtatatttcaactaaagcaataccagagaaatatggagctgtccgtgaggtgatcttgaaggaactcgctgaggcaacatggtgtgggatctcaactgatatgtggcgctccgagaaccagaatcgagcctacgttaccctcgctgcgcactttctgggcttgggcgccccaaattgcctgagtatgggttcgagatgcctaaagactttcgaagtgcctgaagaaaacaccgccgaaactattaccagggtactgtacgaggtgtttatcgagtggggaatcagcgcaaaggtattcggagcaaccaccaactacggcaaggacattgtaaaggcctgttcactgctggatgtagccgttcacatgccttgcctcgggcacaccttcaatgctgggatccagcaggcctttcagttgcccaagcttggggccctcctgtcaaggtgcaggaaactggttgagtacttccagcaatctgctgtggcgatgtatatgctttacgagaaacagaagcagcagaacgttgcccactgcatgcttgtgagcaatagagttagctggtggggatctactctcgctatgttgcagcggcttaaggagcagcagttcgtgatcgccggcgtcctggtcgaagattccaacaaccaccacctgatgctcgaggcttccgagtgggcaactatcgaagggctggtggaactactccagccgtttaagcaggttgcagagatgctgagcgcctctagatacccaaccatttccatggtgaagcccctgcttcatatgttgctgaataccaccttgaatataaaggagaccgattcgaaagagttaagtatggcgaaagaagtgatcgctaaagagctatctaagacttaccaggaaactcctgaaatagatatgttcctgaatgttgctacgttcttagatccgcggtacaagaggttgccatttctgagcgctttcgagaggcagcaggtcgagaaccgggtggtggaggaggcgaaaggactacttgataaagtaaaagacggtgggtaccgcccggccgaggataaaatttttccggtgcctgaggagcccccagtcaaaaaattaatgagaacatctacgcccccacccgcaagcgttatcaataacatgcttgccgagatattttgtcaaacaggcggcgtggaagaccaggaagagtggcatgcccaagtagtggaagagctaagcaacttcaagtcccagaaagtgctgggcctgaatgaagatcccctgaagtggtggtcagatcggctcgcacttttcccacttctgccgaaagtgctgcagaagtattggtgcgtgactgcaacaagggtcgcacccgagcgattgttcggctcagctgccaatgtggtgtctgctaaaaggaatcggctggccccagcccacgtcgacgagcaggtctttctctacgaaaacgcaaggagcggggccgaggctgaacctgaagaccaggatgaaggcgaatgggggcttgaccaggagcaggttttttccctcggggacggtgtctctggggggttctttggcatccgagactccagttttctgtag

SEQ ID NO: 67064 - DNA, 2085 bp, Artificial Sequence
  derived and/or modified sequence
atggagaacaagagcctggagagcagccagaccgacctgaagctggtggcccatccacgggccaaaagcaaggtctggaagtactttggattcgataccaacgccgagggttgtatactacaatggaagaagatctactgtagaatctgtatggctcagatagcttatagcggaaacaccagcaatctgtcttaccatttggagaagaatcaccctgaggagttttgtgaattcgtcaagtccaacaccgagcagatgcgggaagcctttgccacggctttctcgaagttgaagcctgagagttctcagcagcctggccaggacgctctcgccgtcaaagctggccacggctacgactctaagaagcagcaggagttaacagctgccgttctcggactcatttgcgagggcctctaccccgccagcatagtggacgagcccacattcaaagtgctcctcaagacggccgatccgagatatgagctgccatcaagaaagtatattagcaccaaagccattccggaaaagtacggcgccgttagggaagtgattctgaaggaacttgctgaagccacgtggtgcggcatctccactgacatgtggcggagtgaaaaccagaatcgagcatacgtgacactggctgcccatttcctggggctaggagcccccaattgcctctccatgggtagcagatgcctcaagaccttcgaggtcccagaagaaaacacagctgagactattaccagggtgctgtatgaggtattcattgaatggggaatcagtgccaaggtctttggcgctaccactaattacggcaaggacattgtgaaggcctgctcactcttggacgtggctgtgcatatgccttgtttaggccatactttcaatgctggaattcaacaggccttccagctacccaaactcggagctttgcttagccggtgtagaaagcttgtcgagtatttccagcagagtgcagtcgccatgtacatgctgtacgagaaacagaaacaacagaatgtggcacactgcatgttggtctcaaacagagtgtcatggtggggaagtacgctcgctatgctgcaacgccttaaagagcagcagttcgtaatagccggcgtactggttgaggactcgaacaaccaccatctcatgctggaggcttccgagtgggctactatagagggactggtggaactcctgcaaccttttaaacaggttgctgaaatgctcagcgcctcaagataccccacaatatctatggtgaaaccattgttacacatgctgctgaacaccaccctgaacattaaagaaacagactccaaagagctatccatggccaaagaagttatagctaaagaattaagcaagacgtaccaggagaccccagagattgatatgttcctaaatgtggcaacctttttagatccgaggtataaaaggcttccttttctgagtgcttttgagcggcagcaggtagagaatcgtgtcgttgaggaagccaaaggcctcctagacaaggtaaaggacggaggataccggcctgccgaggataagatctttcctgtgcctgaagagcccccagttaaaaaactgatgcgaactagcacccccccccccgcctctgtgattaacaatatgctggctgagatcttctgccagaccggcggtgtagaggatcaggaagaatggcatgcccaggtggtggaggagctgtcaaatttcaagagccagaaagtcctagggctgaacgaggacccccttaagtggtggagcgatcggcttgcactgtttcccctcttaccaaaagttcttcagaagtactggtgcgtaaccgctacccgtgtggctcctgagcgactgtttgggagcgccgccaacgtagtttccgctaagaggaacaggctagcccccgcacatgtggatgagcaggtgtttctatacgaaaacgctcggtccggagctgaagctgaaccagaggatcaggatgagggggagtggggccttgatcaggaacaggtgttctctttgggagatggcgtaagtggggggttctttggcattagagacagctcctttctctag

SEQ ID NO: 67065 - DNA, 819 bp, Artificial Sequence
  derived and/or modified sequence
atggagaacaagagcctggagagcagccagaccgacctgaagctggttgctcacccgcgggcgaagtccaaggtctggaagtactttggattcgatacaaacgcagaggggtgtatcctgcagtggaagaagatttattgccggatttgcatggcgcagatagcgtacagcgggaacacatcaaatctgtcatatcatctggagaaaaatcatccagaagaattctgtgagttcgtcaagtcaaacacagagcagatgcgtgaggctttcgcaactgccttcagcaaattaaaacctgagagcagtcagcagccgggccaggatgcattggcagtgaaagcaggtcatggttatgactccaagaagcagcaagagctgaccgcagcagtgttgggactgatctgtgagggactttatcctgcctcgattgtggatgagcctactttcaaggtgcttctcaagactgcagatccaagatacgagctgcctagtcggaaatatatttcaaccaaagcaataccagagaagtacggcgccgtccgggaggtaatactgaaggaacttgccgaggccacttggtgcgggatctccaccgatatgtggcgcagcgagaatcaaaacagagcttatgtgactctggctgcacatttcctggggctgggggcccccaactgtctttctatggggagcaggtgcttgaagacattcgaggtgcctgaagagaataccgcagaaacaataactcgggtcttgtacgaagttttcattgagtggggcatttctgcgaaggtcttcggggctactacgaattatggctag

SEQ ID NO: 67066 - DNA, 2085 bp, Artificial Sequence
  derived and/or modified sequence
atggagaataagagtttggaaagctcccagactgacctgaaactcgttgcacatccgagagccaagagtaaagtctggaaatatttcgggttcgatactaacgcggaagggtgtattctgcagtggaaaaaaatctactgccggatttgtatggctcagatcgcatactccggaaataccagcaatttgtcctatcatctcgagaaaaaccatcctgaggaattctgcgagtttgtgaagagcaacaccgaacagatgcgagaagcatttgcgactgcattctccaagttaaagcccgaaagctctcaacagccgggtcaggacgctttggctgtgaaggcgggacacggatacgactcaaaaaaacagcaggagttgacggccgcagtcttgggcttgatatgcgaaggactgtatcctgcgtcaatcgttgatgagccaacgtttaaggtgttactcaaaactgccgacccaagatacgaactgccgagccgtaagtacatctccaccaaggcaatccctgagaaatatggcgctgtccgcgaggtcattcttaaagagctcgcggaggccacatggtgcgggatttcaacagatatgtggcggagcgagaatcaaaatcgcgcatacgtgacactggcggctcattttctgggcctcggcgcacctaattgcctgagcatgggcagcaggtgtttgaaaactttcgaagtgcctgaggagaatactgcagagacaattacccgggtgctgtatgaggtgtttatcgaatggggtatctcagcgaaagtttttggcgcaaccacaaattacggcaaggatatcgtgaaggcctgtagcctacttgatgtcgccgtgcatatgccatgtttggggcatacttttaatgccggaatccagcaggccttccagctgcctaagcttggcgcattgctgtctagatgtcgaaaactggtggaatattttcagcagagcgcagtcgccatgtatatgctgtacgagaaacagaaacagcaaaacgtggcccactgcatgttagtgtccaatcgggtctcgtggtggggttccactcttgcgatgcttcagcggctgaaagaacagcagtttgttatagctggtgtacttgtggaagactccaacaaccaccatctcatgttggaggcttccgaatgggccaccatagaagggctggtcgagcttctgcagccattcaagcaagttgcagagatgctctcagcatctaggtatccgaccatcagcatggtgaagccgctgctacacatgctgctgaatactactctcaatatcaaagagaccgacagcaaagagctctctatggccaaggaagtgatcgcaaaggaactcagtaagacctaccaggaaacgccagaaatagatatgttcctgaacgtggccacatttctggaccctcgatacaaaaggctgcccttcctgtctgccttcgaaaggcagcaggtggagaatcgagtggtggaggaggcgaaaggcttacttgacaaggtgaaagacgggggttacagacctgcggaggataaaatttttcctgtgcctgaagagccacccgtcaaaaagttgatgcgcacgtcgacgcctcctccggcatctgtgatcaacaatatgctggctgaaatattctgtcaaaccggtggcgttgaggatcaggaagagtggcacgcacaggtggtggaggagctcagcaatttcaaaagccagaaggtgctgggccttaatgaggatcctctgaaatggtggtccgaccgactcgctcttttcccactgctgcccaaagtgctgcagaagtactggtgcgtcacagccacgagggtggccccagagagactgtttgggagcgcggcaaatgttgtcagcgcaaaaaggaaccgactggcccctgcgcacgtggatgagcaggtctttttgtacgagaacgcgaggtccggcgctgaggcagagcccgaggaccaggacgagggtgaatggggattagaccaggaacaggtcttttctctgggcgatggagtctccggaggcttctttggtatcagggacagctcctttctttag

SEQ ID NO: 67067 - DNA, 2085 bp, Artificial Sequence
  derived and/or modified sequence
atggagaacaagtcgctggagtcatcacagacagacctgaagctggtagctcaccctcgcgcaaaatcaaaggtgtggaagtattttggctttgacacaaatgcagagggctgtatcttgcagtggaaaaagatttactgccgcatctgtatggcccagatcgcttacagcggcaatacatccaatctaagttatcacctcgaaaagaatcaccccgaagagttctgtgaattcgtcaagtccaacaccgagcagatgagggaagccttcgccacggctttctcgaagctgaaaccggagtctagccaacagcctggccaggacgccctggccgtcaaggccggacacggctacgactccaaaaagcagcaggaactgactgccgctgtgctgggactgatttgcgagggactttaccccgcatccatagtggacgagcctacattcaaggtgcttctgaaaaccgcagatccacgctatgaactaccaagtcgtaagtacattagtactaaagcaattcctgagaaatacggggctgttcgcgaggtgatactcaaggaactggctgaagctacttggtgcggaatttcaacggatatgtggagaagcgagaaccagaacagggcctatgtaactctggccgctcactttttaggactcggcgctcccaactgtctgagtatgggaagtcggtgcttaaagaccttcgaagtgccggaggaaaacacagcagaaacaattactagagtgctgtacgaggttttcatagaatggggaatttcagccaaggtcttcggtgccacaaccaattacgggaaagatatcgtgaaggcgtgctcactgctcgacgtggccgtccacatgccttgtttgggccatacattcaacgcagggatccagcaggctttccagcttcccaagctgggcgcacttctgtcaagatgtcggaaactggtcgagtattttcagcagtcggccgttgctatgtatatgctgtacgagaagcaaaagcagcaaaacgtggcgcactgcatgctggtgagcaatagagtgtcttggtggggttcgacactagcaatgctccagcgtctcaaagaacagcagtttgtgatcgcgggagtcctggtggaagactccaacaatcaccacctgatgctggaggccagtgagtgggcgactattgaaggattggtggagttattacagcccttcaagcaagtcgccgagatgttgtcggcctctcgctaccctacaatatctatggtaaagcctctcctccatatgctccttaacacgactctgaacatcaaggaaaccgatagtaaagaactgagtatggccaaggaggttatagccaaggaactatctaagacttaccaggagaccccagagattgatatgtttctcaacgtcgctacgtttttagatccaaggtataaacggctgccattcttgtcggcttttgagaggcaacaggtagaaaatcgcgtggtcgaggaagctaagggtcttctagataaagtgaaggacggcggatataggcccgctgaggataaaatcttccctgttccagaggagccacctgtgaagaaacttatgaggacttccacacctccacctgcctcggtgatcaataacatgctggcagagattttttgtcagacggggggagtcgaagaccaggaggaatggcatgcccaagtggtcgaggaactcagcaattttaaatcccagaaagtgcttggtctgaatgaggatcccctgaaatggtggtcggacagactagcactgtttcccttgttgcccaaagtgctgcagaaatactggtgcgtgacagctacgcgggtcgcccctgagcgactttttgggagcgccgcaaatgttgtgtccgcaaaaaggaacagactagcccctgctcacgttgacgagcaggtctttttatatgagaatgctcggagtggagccgaggcagaacccgaggaccaagatgaaggggagtggggccttgatcaggagcaggttttttccttgggtgacggagtatctggaggattttttggaatccgagattcatccttcctgtag

SEQ ID NO: 67068 - DNA, 2085 bp, Artificial Sequence
  derived and/or modified sequence
atggagaataaatccctcgagtcatcccagacagacttaaagctggttgctcacccgagagccaagagcaaggtgtggaagtacttcggctttgataccaacgcagaggggtgcatcttgcagtggaaaaaaatctattgtcgcatctgcatggcacagatcgcatactctggcaatacttccaatctgagctatcaccttgaaaaaaatcatccagaggaattttgtgagttcgtgaagtctaatactgagcagatgcgggaggcgttcgcaacagctttttctaaactgaagcctgaaagctcccagcagccagggcaggacgcactggcagtcaaggctggccatgggtacgattcaaagaaacagcaggaactgacagccgctgtgctggggcttatctgcgaaggcctttaccccgcttctatcgtggacgagccaaccttcaaagttttgctcaagaccgctgacccaaggtatgagttgccttcacgtaaatatattagcacgaaagcaattcccgagaagtacggcgcagtgagagaggtgatcttaaaggaacttgcagaggctacgtggtgtggaatttctactgacatgtggaggagcgagaaccagaatagggcctacgtaaccctagcagcacatttcctggggttgggggctcccaattgtttgagcatgggttctcgctgtttaaagacctttgaagtgcctgaagagaataccgcagaaaccatcaccagggttctctatgaggtgtttattgagtggggtataagtgcgaaggtgtttggggctacgacaaactacggtaaggacatcgtgaaggcttgctctctgctcgatgtggcagttcacatgccatgccttggccacacctttaacgcgggtatccagcaggcctttcagcttcctaaactcggagccttgctctcaagatgtagaaaactggtcgagtactttcagcagtccgctgtggcaatgtatatgctgtacgaaaaacagaaacagcagaacgttgcccactgtatgttagtgtcgaacagagttagttggtggggctccactcttgcaatgctgcagcgtctcaaggaacagcagtttgtgatcgctggggttctggtcgaggattcaaacaaccaccatctcatgctggaggcctccgaatgggcgaccatagaaggactggtagaactcctccagccttttaaacaagtcgcggagatgctgtctgcgagcagataccccaccatcagtatggtaaaaccactgctacacatgcttctcaacactacgcttaatataaaagagaccgacagcaaagagctttctatggctaaagaagtaatcgccaaagagttatctaaaacctatcaagagaccccagagatagacatgttcctaaacgtggcgacattcctcgacccaaggtacaaacgtttacccttcctcagcgctttcgaaagacagcaggttgaaaacagggtggttgaagaagccaagggactgttggataaggtgaaagatgggggatatcggccagctgaggacaaaatatttcccgtgccagaagagcctcctgttaagaaattaatgaggacttcgactccgcctcccgcttcagtaattaataacatgctagccgagattttttgccagaccggcggagtggaagaccaggaggagtggcacgcacaagtggtagaggagctgtcaaattttaaaagtcagaaggtgcttggcctcaacgaggatccattgaaatggtggtccgacaggctggctctgttccccctgcttcccaaggttttgcaaaagtactggtgcgtgacagcaaccagagttgccccagaaaggttattcgggtcagctgccaacgttgtctccgccaaacgcaatcgcctcgcccctgcccatgtggatgagcaggttttcctctacgaaaacgccagatcgggcgctgaagccgagcctgaagatcaggatgaaggagagtggggcctcgaccaggaacaggtgtttagtttgggcgacggcgtgagcgggggattctttggtatcagggacagcagttttctatag

SEQ ID NO: 67069 - DNA, 819 bp, Artificial Sequence
  derived and/or modified sequence
atggagaacaagagccttgaatcaagccagacagacctgaaactggtggcccatcccagagccaagtccaaggtgtggaagtacttcggatttgacacgaatgcagagggctgcattctacaatggaaaaaaatatattgccgtatctgtatggctcagatagcgtattccggcaacacaagtaatctaagctaccaccttgagaagaatcaccccgaggagttttgtgagttcgtgaaatctaatactgagcagatgcgagaagccttcgccactgcattctcgaaactgaagccagagtcttctcaacagcccggtcaggacgctttagccgtgaaggctggacacgggtacgattcgaagaagcagcaggagcttactgccgctgtgctgggactgatctgtgagggactgtacccagcatctatcgtggacgagcccacttttaaggtattgttgaaaaccgcggacccaaggtacgagctgccctccaggaagtacatttccactaaggcaattcctgagaagtacggtgcagtgagggaggtgatcctcaaggaattggccgaagccacttggtgcggaatctcgacggacatgtggcggtccgaaaatcagaaccgcgcatatgtcactctggctgcccactttctcggactcggtgcgcctaactgcctgagcatgggctccaggtgcctgaaaacattcgaggtgcctgaggagaatactgccgaaactatcaccagagtattgtacgaggtgtttattgaatggggcatatcggctaaggtgtttggcgcaacgactaactatggttag

SEQ ID NO: 67070 - DNA, 2832 bp, Artificial Sequence
  derived and/or modified sequence
gcgcgtgtggcctccccgcctgtcccgggtcgggctccaaccaagcagcccccgtgcagccgcccccccgcgcaccctgacacctccgggccatggccggggacccgggggctcgcacgccccgcgcccaagacatcaggcggctctgcctgccgcctgcggtcggccagtgaccgcgcgcccccgccaggccccggaggggaggagcgggcgtcccagggacctcgacccctacccaccccaggcaggtccccacgcatgagcagccgtccagcaggcaggctccggtggagaagcaatggagaataaaagcctggagagctcccagacagacctgaagctggtggcccacccccgcgccaagagcaaggtgtggaagtatttcggcttcgacaccaacgccgagggatgcatcctgcagtggaagaaaatctactgccgcatctgcatggcccagatcgcctactccggaaacacctccaacctgtcctaccacctggagaagaaccaccccgaggaattctgcgagttcgtcaagagcaacacggagcagatgcgtgaagccttcgccaccgccttctccaagctgaagcccgagtcgtcccagcagcccgggcaggacgcgctggccgtcaaggccggccacggctacgacagcaagaagcagcaggagctgacggccgccgtgctgggcctcatctgcgaggggctgtacccagcctccatcgtggacgagcccaccttcaaggtgctgctgaagacggccgacccccggtatgagctgcccagccggaagtacatctctaccaaggccatccctgagaagtacggggccgtccgggaggtgatcctgaaggagctggccgaggccacctggtgtggcatctccaccgacatgtggaggagtgagaatcagaaccgcgcctacgtcacgctggccgcccacttcctgggcctgggcgcccccaactgcctgtccatgggctcccgctgcctgaagaccttcgaggtgcccgaagagaacacggcggagaccatcacgcgagtgctctatgaggtcttcatcgagtggggcatcagcgccaaggtcttcggggccaccaccaactatggcaaggacatcgtgaaggcgtgctccctgctggacgtcgcagtgcacatgccctgcctgggccacaccttcaatgccggcatccagcaggccttccagctcccgaagctgggggcgctgctgtcgcgctgccgcaaactggtggagtacttccagcagtctgccgtggccatgtacatgctctatgagaagcagaagcagcagaacgtggcccactgcatgctggtgagcaaccgcgtctcctggtgggggagcacgctggccatgctgcagcgcctcaaggagcagcagttcgtcatcgccggggtcttggtggaggacagcaacaaccaccacctcatgctggaggccagcgagtgggccaccatcgaggggctggtggagctcctgcagcccttcaagcaggtggccgagatgctgtcggcctccaggtaccccaccatcagcatggtgaagccgctgctgcacatgctcctgaacaccacgctcaacatcaaggagaccgactccaaggagctcagcatggccaaggaggtcatcgccaaggagctttccaagacctaccaggagacgcccgagatcgacatgtttctcaacgtggccaccttcctggacccccgctacaagaggctgcccttcctctccgccttcgagcggcagcaggtggagaatcgcgtggtggaagaggccaagggcctgctggacaaggtcaaagacggcggctaccggccggctgaggacaagatcttcccggtgcccgaggagcctcccgtcaagaagctcatgcggacatccacgccgccgcccgccagcgtcatcaacaacatgctggccgagatcttctgccagacaggcggcgtggaggaccaggaagagtggcatgcccaggtggtggaggagctgagcaacttcaagtcccagaaggtgcttggcctcaacgaagaccccctcaagtggtggtcagaccgcctggccctcttccccctgctgcccaaggtgctgcagaagtactggtgcgtgacggccacgcgcgtcgcccctgagcgtctcttcggatccgccgccaacgtggtcagcgccaagaggaaccggctggctcccgcgcacgtggacgagcaggtgtttctgtatgagaacgcccggagtggggcagaggcggaacccgaggaccaggacgagggggagtggggcctggaccaggagcaggtgttctccttgggggatggcgtcagcggcggtttctttggcattagggacagcagcttcctgtagcgaggaagcgtgttgtcttacaagtcatccccgcagcagcccattggatgctttgctgtaaatacttacccggtcagcttggttttgaacctcagagaccatccactgtctttgacacctagaaggtggaaaaaggaaagagatttgagaagtgagagagggtcgggggcggtggctcctgtctataatcgcagcactttgggaggccgaggtgggcagatcagctgaggtcaggagatcgagaccagcctggccaacatggcgaaaccccgtctctactaaaaatacaaaaattagccaggactgatggcatgtgcctgtaatcccagcttctggaggctgaggccagagaatcgcttgaacctgggaggtggaggttgcagtaagctgagatcgctgcactccagcctgggcgacaagagcgagactctctcaaaaagaaaaaagaa

SEQ ID NO: 67071 - DNA, 4485 bp, Artificial Sequence
  derived and/or modified sequence
cgcgggcggcgcggaagcggcggcggcgcggccggggcagccatgtcgccattgtctgcggcgcgggcggccctgcgggtctacgcggtaggcgccgcggtgatcctggcgcagctgctgcggcgctgccgcgggggcttcctggagccaggtccccacgcatgagcagccgtccagcaggcaggctccggtggagaagcaatggagaataaaagcctggagagctcccagacagacctgaagctggtggcccacccccgcgccaagagcaaggtgtggaagtatttcggcttcgacaccaacgccgagggatgcatcctgcagtggaagaaaatctactgccgcatctgcatggcccagatcgcctactccggaaacacctccaacctgtcctaccacctggagaagaaccaccccgaggaattctgcgagttcgtcaagagcaacacggagcagatgcgtgaagccttcgccaccgccttctccaagctgaagcccgagtcgtcccagcagcccgggcaggacgcgctggccgtcaaggccggccacggctacgacagcaagaagcagcaggagctgacggccgccgtgctgggcctcatctgcgaggggctgtacccagcctccatcgtggacgagcccaccttcaaggtgctgctgaagacggccgacccccggtatgagctgcccagccggaagtacatctctaccaaggccatccctgagaagtacggggccgtccgggaggtgatcctgaaggagctggccgaggccacctggtgtggcatctccaccgacatgtggaggagtgagaatcagaaccgcgcctacgtcacgctggccgcccacttcctgggcctgggcgcccccaactgcctgtccatgggctcccgctgcctgaagaccttcgaggtgcccgaagagaacacggcggagaccatcacgcgagtgctctatgaggtcttcatcgagtggggcatcagcgccaaggtcttcggggccaccaccaactatggcaaggacatcgtgaaggcgtgctccctgctggacgtcgcagtgcacatgccctgcctgggccacaccttcaatgccggcatccagcaggccttccagctcccgaagctgggggcgctgctgtcgcgctgccgcaaactggtggagtacttccagcagtctgccgtggccatgtacatgctctatgagaagcagaagcagcagaacgtggcccactgcatgctggtgagcaaccgcgtctcctggtgggggagcacgctggccatgctgcagcgcctcaaggagcagcagttcgtcatcgccggggtcttggtggaggacagcaacaaccaccacctcatgctggaggccagcgagtgggccaccatcgaggggctggtggagctcctgcagcccttcaagcaggtggccgagatgctgtcggcctccaggtaccccaccatcagcatggtgaagccgctgctgcacatgctcctgaacaccacgctcaacatcaaggagaccgactccaaggagctcagcatggccaaggaggtcatcgccaaggagctttccaagacctaccaggagacgcccgagatcgacatgtttctcaacgtggccaccttcctggacccccgctacaagaggctgcccttcctctccgccttcgagcggcagcaggtggagaatcgcgtggtggaagaggccaagggcctgctggacaaggtcaaagacggcggctaccggccggctgaggacaagatcttcccggtgcccgaggagcctcccgtcaagaagctcatgcggacatccacgccgccgcccgccagcgtcatcaacaacatgctggccgagatcttctgccagacaggcggcgtggaggaccaggaagagtggcatgcccaggtggtggaggagctgagcaacttcaagtcccagaaggtgcttggcctcaacgaagaccccctcaagtggtggtcagaccgcctggccctcttccccctgctgcccaaggtgctgcagaagtactggtgcgtgacggccacgcgcgtcgcccctgagcgtctcttcggatccgccgccaacgtggtcagcgccaagaggaaccggctggctcccgcgcacgtggacgagcaggtgtttctgtatgagaacgcccggagtggggcagaggcggaacccgaggaccaggacgagggggagtggggcctggaccaggagcaggtgttctccttgggggatggcgtcagcggcggtttctttggcattagggacagcagcttcctgtagcgaggaagcgtgttgtcttacaagtcatccccgcagcagcccattggatgctttgctgtaaatacttacccggtcagcttggttttgaacctcagagaccatccactgtctttgacacctagaaggtggaaaaaggaaagagatttgagaagtgagagagggtcgggggcggtggctcctgtctataatcgcagcactttgggaggccgaggtgggcagatcagctgaggtcaggagatcgagaccagcctggccaacatggcgaaaccccgtctctactaaaaatacaaaaattagccaggactgatggcatgtgcctgtaatcccagcttctggaggctgaggccagagaatcgcttgaacctgggaggtggaggttgcagtaagctgagatcgctgcactccagcctgggcgacaagagcgagactctctcaaaaagaaaaaagaagacacaagagaggtggctttgagtgggtttcctttcctcccctattcccggggcccggacgacttctgcttgggaactgccaacgcttctgcttgggaattgcgtgcagcagagcctagaggagctgttccttccttcacagatacttaagacctccaccatgtctgattcgagttctccctgggagggtttagaagaaacgcaggaacattctgggtggcgtcgaaggagcctttcccgatcatcatgtgtgacttctgcgaggtccagatcactgaattcatgtttacattctcgtgcaagcagggacctcttgcttctgagaaatggggaagagaccttttagccaaaatgcccttcttaaaaagagagacctttttttttaatgttcggttaaaaatgtgacagatgagtacaaaaatgcagacacttaacaaaaagcaaacagaaaaaaaagtgtggaatgtgttgtattttcgacaggttgctgccagagagcctgcttcctgctgcctgccgaaatttcactttgcggagttggtccttaaaactgggcggtggccgggcgtggtggctcacgctgaggtcaggagttcgagaccagcctggccaaccaacatggtgaaacctcgtgtctactaaaaatacaagaaactagccagatgcggtggcacccgcctgtaatcccagctactcgggaggctgaggcggaagattcgcttgagcccaggaggtggaggttgcagtgagccaagactacgccactgcactccagcctggaggccagagtgagactccgtctcaaaacaaaacaaaagtgggtggctcacgggtccggaggttatgtcttcggtgtctcagccctaaaagtccagttcccccgtgcggccagcttttccacataaggtgtttttgatttgattaccggaaaggactcttgattcttctcttttaaactgaataccataggggaaatgaattttaaaatattgcccccggaggggttttccgtggctggattcctgcgagttgctttcagtcattcagggaaacagaaagacgttttccaacatgtagaactgctttttaactggaggaaaaatacttcaggaggcttagcatattgcttggattctacgtgcagcgggttctctgcctccgtgaagacaagctgggctggggagaacggtgtctaggagggatgaccccactcagctccaggcagtgttctgccgagaccccaagaactcggggtgtcagagggcaaaggaactacctgcctttcacggctgctgacttctcagggctgcaagcagcacagaatgttatccttacgtcctgagccggtttaagtctgtggaaaaggaagcacgggagaaatccacgtaacctttgctttctttttaagggaagcggttccgccgtgaacttggaaccctcagctccgggtgttctcggcagaagggcagctggaagggacacagtggggcaggctttggggttgctccctgttctgccccgaggccggggacgcagggcagcccacgcctccgtgggctccattctgtagcattgccagcgttctcttcacgtctctaacaatccttcgcttttcctcactcacgtggaaatgtgaactgtcccggctctgtcttcatttttatttttaagccatcgttcccctcctgaacggttgccccttatttaatgctgtaaagttggactgttgttcaataaaccagagcaatgc

SEQ ID NO: 67072 - DNA, 4510 bp, Artificial Sequence
  derived and/or modified sequence
cgcgggcggcgcggaagcggcggcggcgcggccggggcagccatgtcgccattgtctgcggcgcgggcggccctgcgggtctacgcggtaggcgccgcggtgatcctggcgcagctgctgcggcgctgccgcgggggcttcctggagccagcaggtccccacgcatgagcagccgtccagcaggcaggctccggtggagaagcaatggagaataaaagcctggagagctcccagacagacctgaagctggtggcccacccccgcgccaagagcaaggtgtggaagtatttcggcttcgacaccaacgccgagggatgcatcctgcagtggaagaaaatctactgccgcatctgcatggcccagatcgcctactccggaaacacctccaacctgtcctaccacctggagaagaaccaccccgaggaattctgcgagttcgtcaagagcaacacggagcagatgcgtgaagccttcgccaccgccttctccaagctgaagcccgagtcgtcccagcagcccgggcaggacgcgctggccgtcaaggccggccacggctacgacagcaagaagcagcaggagctgacggccgccgtgctgggcctcatctgcgaggggctgtacccagcctccatcgtggacgagcccaccttcaaggtgctgctgaagacggccgacccccggtatgagctgcccagccggaagtacatctctaccaaggccatccctgagaagtacggggccgtccgggaggtgatcctgaaggagctggccgaggccacctggtgtggcatctccaccgacatgtggaggagtgagaatcagaaccgcgcctacgtcacgctggccgcccacttcctgggcctgggcgcccccaactgcctgtccatgggctcccgctgcctgaagaccttcgaggtgcccgaagagaacacggcggagaccatcacgcgagtgctctatgaggtcttcatcgagtggggcatcagcgccaaggtcttcggggccaccaccaactatggcaaggacatcgtgaaggcgtgctccctgctggacgtcgcagtgcacatgccctgcctgggccacaccttcaatgccggcatccagcaggccttccagctcccgaagctgggggcgctgctgtcgcgctgccgcaaactggtggagtacttccagcagtctgccgtggccatgtacatgctctatgagaagcagaagcagcagaacgtggcccactgcatgctggtgagcaaccgcgtctcctggtgggggagcacgctggccatgctgcagcgcctcaaggagcagcagttcgtcatcgccggggtcttggtggaggacagcaacaaccaccacctcatgctggaggccagcgagtgggccaccatcgaggggctggtggagctcctgcagcccttcaagcaggtggccgagatgctgtcggcctccaggtaccccaccatcagcatggtgaagccgctgctgcacatgctcctgaacaccacgctcaacatcaaggagaccgactccaaggagctcagcatggccaaggaggtcatcgccaaggagctttccaagacctaccaggagacgcccgagatcgacatgtttctcaacgtggccaccttcctggacccccgctacaagaggctgcccttcctctccgccttcgagcggcagcaggtggagaatcgcgtggtggaagaggccaagggcctgctggacaaggtcaaagacggcggctaccggccggctgaggacaagatcttcccggtgcccgaggagcctcccgtcaagaagctcatgcggacatccacgccgccgcccgccagcgtcatcaacaacatgctggccgagatcttctgccagacaggcggcgtggaggaccaggaagagtggcatgcccaggtggtggaggagctgagcaacttcaagtcccagaaggtgcttggcctcaacgaagaccccctcaagtggtggtcagaccgcctggccctcttccccctgctgcccaaggtgctgcagaagtactggtgcgtgacggccacgcgcgtcgcccctgagcgtctcttcggatccgccgccaacgtggtcagcgccaagaggaaccggctggctcccgcgcacgtggacgagcaggtgtttctgtatgagaacgcccggagtggggcagaggcggaacccgaggaccaggacgagggggagtggggcctggaccaggagcaggtgttctccttgggggatggcgtcagcggcggtttctttggcattagggacagcagcttcctgtagcgaggaagcgtgttgtcttacaagtcatccccgcagcagcccattggatgctttgctgtaaatacttacccggtcagcttggttttgaacctcagagaccatccactgtctttgacacctagaaggtggaaaaaggaaagagatttgagaagtgagagagggtcgggggcggtggctcctgtctataatcgcagcactttgggaggccgaggtgggcagatcagctgaggtcaggagatcgagaccagcctggccaacatggcgaaaccccgtctctactaaaaatacaaaaattagccaggactgatggcatgtgcctgtaatcccagcttctggaggctgaggccagagaatcgcttgaacctgggaggtggaggttgcagtaagctgagatcgctgcactccagcctgggcgacaagagcgagactctctcaaaaagaaaaaagaagacacaagagaggtggctttgagtgggtttcctttcctcccctattcccggggcccggacgacttctgcttgggaactgccaacgcttctgcttgggaattgcgtgcagcagagcctagaggagctgttccttccttcacagatacttaagacctccaccatgtctgattcgagttctccctgggagggtttagaagaaacgcaggaacattctgggtggcgtcgaaggagcctttcccgatcatcatgtgtgacttctgcgaggtccagatcactgaattcatgtttacattctcgtgcaagcagggacctcttgcttctgagaaatggggaagagaccttttagccaaaatgcccttcttaaaaagagagacctttttttttaatgttcggttaaaaatgtgacagatgagtacaaaaatgcagacacttaacaaaaagcaaacagaaaaaaaagtgtggaatgtgttgtattttcgacaggttgctgccagagagcctgcttcctgctgcctgccgaaatttcactttgcggagttggtccttaaaactgggcggtggccgggcgtggtggctcacgctgaggtcaggagttcgagaccagcctggccaaccaacatggtgaaacctcgtgtctactaaaaatacaagaaactagccagatgcggtggcacccgcctgtaatcccagctactcgggaggctgaggcggaagattcgcttgagcccaggaggtggaggttgcagtgagccaagactacgccactgcactccagcctggaggccagagtgagactccgtctcaaaacaaaacaaaagtgggtggctcacgggtccggaggttatgtcttcggtgtctcagccctaaaagtccagttcccccgtgcggccagcttttccacataaggtgtttttgatttgattaccggaaaggactcttgattcttctcttttaaactgaataccataggggaaatgaattttaaaatattgcccccggaggggttttccgtggctggattcctgcgagttgctttcagtcattcagggaaacagaaagacgttttccaacatgtagaactgctttttaactggaggaaaaatacttcaggaggcttagcatattgcttggattctacgtgcagcgggttctctgcctccgtgaagacaagctgggctggggagaacggtgtctaggagggatgaccccactcagctccaggcagtgttctgccgagaccccaagaactcggggtgtcagagggcaaaggaactacctgcctttcacggctgctgacttctcagggctgcaagcagcacagaatgttatccttacgtcctgagccggtttaagtctgtggaaaaggaagcacgggagaaatccacgtaacctttgctttctttttaagggaagcggttccgccgtgaacttggaaccctcagctccgggtgttctcggcagaagggcagctggaagggacacagtggggcaggctttggggttgctccctgttctgccccgaggccggggacgcagggcagcccacgcctccgtgggctccattctgtagcattgccagcgttctcttcacgtctctaacaatccttcgcttttcctcactcacgtggaaatgtgaactgtcccggctctgtcttcatttttatttttaagccatcgttcccctcctgaacggttgccccttatttaatgctgtaaagttggactgttgttcaataaaccagagcaatgcattagctcctcattcatttgtc

SEQ ID NO: 67073 - DNA, 947 bp, Artificial Sequence
  derived and/or modified sequence
ctgcgggtctacgcggtaggcgccgcggtgatcctggcgcagctgctgcggcgctgccgcgggggcttcctggagccagcaggtccccacgcatgagcagccgtccagcaggcaggctccggtggagaagcaatggagaataaaagcctggagagctcccagacagacctgaagctggtggcccacccccgcgccaagagcaaggtgtggaagtatttcggcttcgacaccaacgccgagggatgcatcctgcagtggaagaaaatctactgccgcatctgcatggcccagatcgcctactccggaaacacctccaacctgtcctaccacctggagaagaaccaccccgaggaattctgcgagttcgtcaagagcaacacggagcagatgcgtgaagccttcgccaccgccttctccaagctgaagcccgagtcgtcccagcagcccgggcaggacgcgctggccgtcaaggccggccacggctacgacagcaagaagcagcaggagctgacggccgccgtgctgggcctcatctgcgaggggctgtacccagcctccatcgtggacgagcccaccttcaaggtgctgctgaagacggccgacccccggtatgagctgcccagccggaagtacatctctaccaaggccatccctgagaagtacggggccgtccgggaggtgatcctgaaggagctggccgaggccacctggtgtggcatctccaccgacatgtggaggagtgagaatcagaaccgcgcctacgtcacgctggccgcccacttcctgggcctgggcgcccccaactgcctgtccatgggctcccgctgcctgaagaccttcgaggtgcccgaagagaacacggcggagaccatcacgcgagtgctctatgaggtcttcatcgagtggggcatcagcgccaaggtcttcggggccaccaccaactatgg

SEQ ID NO: 67074 - protein, 75 aa, Artificial Sequence
  derived and/or modified sequence
MGVKLEIFRMIIYLTFPVAMFWVSNQAEWFEDDVIQRKRELWPPEKLQELEEFKERLRKRKRREEKLLRDAQQNS

SEQ ID NO: 67075 - protein, 73 aa, Artificial Sequence
  derived and/or modified sequence
MGVKLEIFRMIIYLTFPVAMFWVSNQAEWFEDDVIQRKRELWPPEKLQEIEEFKERLRKRREEKLLRDAQQNS

SEQ ID NO: 67076 - DNA, 228 bp, Artificial Sequence
  derived and/or modified sequence
atgggcgtgaagctggagatcttcagaatgatcatctacctgaccttccccgtggccatgttctgggtgagcaaccaggccgagtggttcgaggacgacgtgatccagagaaagagagagctgtggccccccgagaagctgcaggagctggaggagttcaaggagagactgagaaagagaaagagaagagaggagaagctgctgagagacgcccagcagaacagctag

SEQ ID NO: 67077 - DNA, 228 bp, Artificial Sequence
  derived and/or modified sequence
atgggtgtcaaacttgagatctttcggatgattatctacttgaccttccccgttgcaatgttctgggtatccaatcaggctgagtggtttgaagatgatgtaatccaacgaaagagggagctgtggccaccagagaagctacaggagctagaagagtttaaggaacgattgcgcaaacgtaagcgcagagaggaaaagctccttagggacgcgcaacagaattcttag

SEQ ID NO: 67078 - DNA, 228 bp, Artificial Sequence
  derived and/or modified sequence
atgggcgtgaagctggagatcttcaggatgatcatctacctgaccttccctgtggccatgttctgggtgagcaaccaggccgagtggtttgaagatgatgtgatccagaggaagcgggagctgtggcccccagagaagctgcaggagctggaggagttcaaggagcggctgaggaagaggaagaggcgggaggagaagctgctgagagatgcccagcagaacagctag

SEQ ID NO: 67079 - DNA, 228 bp, Artificial Sequence
  derived and/or modified sequence
atgggcgtgaagctggagatcttccggatgatcatctacctgacctttcctgtcgcgatgttctgggtctcaaatcaggctgagtggtttgaagatgatgtgatccagcggaaacgcgaactgtggcccccagagaagctccaagaactcgaggaatttaaagagaggctgcgaaagcggaaacgccgagaggaaaagctgctacgagatgcccagcagaattcctag

SEQ ID NO: 67080 - DNA, 228 bp, Artificial Sequence
  derived and/or modified sequence
atgggtgtgaaactcgaaatttttcgtatgattatctacctcaccttccctgtggcgatgttctgggtgagtaaccaagcggagtggtttgaggatgatgtaattcagcggaagcgagagctgtggcctcccgaaaagctccaggaactggaggagtttaaagagagactgcgtaaacgcaaacgccgtgaagagaaattactgcgggatgcccagcagaatagctag

SEQ ID NO: 67081 - DNA, 309 bp, Artificial Sequence
  derived and/or modified sequence
gggagaaacgagatgggggtgaagctggagatatttcggatgataatctacctcactttccctgtggctatgttctgggtttccaatcaggccgagtggtttgaggatgatgtcatacagcgcaagagggagctgtggccacctgagaagcttcaagagttagaggaattcaaagagaggttacggaagcggaagcggcgggaggagaagctccttcgcgacgcccagcagaactcctgaggcctccaagtgggagtcctagcccctcccctgatgaaatatacatatactcagttccttgttattcaa

SEQ ID NO: 67082 - DNA, 338 bp, Artificial Sequence
  derived and/or modified sequence
ggagggtcggctttgggcggaactggctttgttgaccgggagaaacgagatgggggtgaagctggagatatttcggatgataatctacctcactttccctgtggctatgttctgggtttccaatcaggccgagtggtttgaggacgatgtcatacagcgcaagagggagctgtggccacctgagaagcttcaagagatagaggaattcaaagagaggttacggaagcggcgggaggagaagctccttcgcgacgcccagcagaactcctgaggcctccaagtgggagtcctagcccctcccctgatgaaatatacatatactcagttccttgttattc

SEQ ID NO: 67083 - DNA, 222 bp, Artificial Sequence
  derived and/or modified sequence
atgggcgtgaagctggagatcttcagaatgatcatctacctgaccttccccgtggccatgttctgggtgagcaaccaggccgagtggttcgaggacgacgtgatccagagaaagagagagctgtggccccccgagaagctgcaggagatcgaggagttcaaggagagactgagaaagagaagagaggagaagctgctgagagacgcccagcagaacagctag

SEQ ID NO: 67084 - DNA, 222 bp, Artificial Sequence
  derived and/or modified sequence
atgggggtcaagctcgaaatctttcgaatgatcatctatctgacattccccgtcgctatgttctgggtgtccaatcaggctgagtggttcgaggatgatgtgattcagcggaagagggagctgtggccccctgaaaagttgcaggagattgaggagttcaaggaaaggctgcgaaagaggcgggaagagaaacttcttagggacgcgcagcagaatagctag

SEQ ID NO: 67085 - DNA, 222 bp, Artificial Sequence
  derived and/or modified sequence
atgggagtgaagttggaaatattcagaatgatcatctatctcacctttcctgtggccatgttttgggttagtaaccaggccgagtggttcgaagacgatgtcatccagagaaaacgggagctttggcctccggagaagctgcaagaaatagaagagtttaaggagcgactgcggaaaagaagagaagagaagctgttacgggacgctcaacagaacagttag

SEQ ID NO: 67086 - DNA, 222 bp, Artificial Sequence
  derived and/or modified sequence
atgggcgtgaagctggagatcttcaggatgatcatctacctgaccttccctgtggccatgttctgggtgagcaaccaggccgagtggtttgaagatgatgtgatccagaggaagcgggagctgtggcccccagagaagctgcaggagattgaggagttcaaggagcggctgaggaagaggcgggaggagaagctgctgagagatgcccagcagaacagctag

SEQ ID NO: 67087 - DNA, 222 bp, Artificial Sequence
  derived and/or modified sequence
atgggcgtgaagctggagatcttccggatgatcatctacctgacctttccggtggccatgttctgggtgagtaaccaggctgaatggtttgaagatgacgttatacagcggaagagggagctgtggcctcctgaaaagctgcaggagatcgaggagtttaaggaacgactgcggaagagaagagaagagaagctgttaagggatgcccaacagaacagttag

SEQ ID NO: 67088 - DNA, 222 bp, Artificial Sequence
  derived and/or modified sequence
atgggcgtgaagctggagatcttccggatgatcatctacctgaccttcccagtggccatgttttgggtttccaaccaggcagagtggtttgaggacgacgttatacagagaaaacgggagctatggccaccagagaagctacaggaaatcgaggagtttaaagagagattgcgtaaacgtagggaggaaaagctgctacgcgacgctcagcagaacagttag

SEQ ID NO: 67089 - DNA, 222 bp, Artificial Sequence
  derived and/or modified sequence
atgggagtgaagctggagatcttcaggatgattatttaccttaccttccccgttgcgatgttctgggtatcaaaccaagctgaatggttcgaggacgatgtgatccagcgaaagcgggaactgtggccccctgaaaagctgcaggagatcgaggaattcaaagaacgcctgaggaaacgcagggaagagaagctgctgcgggacgcacagcagaacagctag

SEQ ID NO: 67090 - DNA, 719 bp, Artificial Sequence
  derived and/or modified sequence
agcttcagcaatggagcgtgcaaaacaccagtgagcttctgtcttgctggagggtcggctttgggcggaactggctttgttgaccgggagaaacgagatgggggtgaagctggagatatttcggatgataatctacctcactttccctgtggctatgttctgggtttccaatcaggccgagtggtttgaggacgatgtcatacagcgcaagagggagctgtggccacctgagaagcttcaagagatagaggaattcaaagagaggttacggaagcggcgggaggagaagctccttcgcgacgcccagcagaactcctgaggcctccaagtgggagtcctagcccctcccctgatgaaatatacatatactcagttccttgttattcatttaagtgttttattcttttatcagtttttgggggccgagtgagacccaggatgcctcaggccctcagggggcttgtgtcgggggctgggggctgctgttccgacggaagccgagagcggtcgggtcctgaggggtgagcaggggttggggactgagggtcccagctcgtttctgtgctccgtcctgtggatgaagaggggtcagccagggggagggctcaagggcagtgccggccacaggtggcgaacaatggagagagggtgcaggtagccaccgtgtcccacctcattgtgagcactggtctatgtttaccctcaatatctgccattta

SEQ ID NO: 67091 - DNA, 222 bp, Artificial Sequence
  derived and/or modified sequence
atgggagtgaaactggagatcttccggatgatcatttacctgacattccccgtggcaatgttctgggtgtctaaccaagctgagtggtttgaggacgatgtcatacagcgcaagagggaactctggcctcccgaaaagctgcaggaaatcgaggagttcaaggagcggcttcgcaagcggagagaagagaaactgctcagagacgcccagcagaatagctag

SEQ ID NO: 67092 - protein, 349 aa, Artificial Sequence
  derived and/or modified sequence
MDPSDFPSPFDPLTLPEKPLAGDLPVDMEFGEDLLESQTAPTRGWAPPGPSPSSGALDLLDTPAGLEKDPGVLDGATELLGLGGLLYKAPSPPEVDHGPEGTLAWDAGDQTLEPGPGGQTPEVVPPDPGAGANSCSPEGLLEPLAPDSPITLQSPHIEEEETTSIATARRGSPGQEEELPQGQPQSPNAPPSPSVGETLGDGINSSQTKPGGSSPPAHPSLPGDGLTAKASEKPPERVQKRSERVRRAEPPKPEVVDSTESRRSGTPRTRLWRRLVLEAPSMSSAHPSVSPCMRPSSSARSPSLGIPPTLLAAAYARRLERSCTRSAMAAWYTGSAAILASPNSGPTRD

SEQ ID NO: 67093 - protein, 1358 aa, Artificial Sequence
  derived and/or modified sequence
MDPSDFPSPFDPLTLPEKPLAGDLPVDMEFGEDLLESQTAPTRGWAPPGPSPSSGALDLLDTPAGLEKDPGVLDGATELLGLGGLLYKAPSPPEVDHGPEGTLAWDAGDQTLEPGPGGQTPEVVPPDPGAGANSCSPEGLLEPLAPDSPITLQSPHIEEEETTSIATARRGSPGQEEELPQGQPQSPNAPPSPSVGETLGDGINSSQTKPGGSSPPAHPSLPGDGLTAKASEKPPERKRSERVRRAEPPKPEVVDSTESIPVSDEDSDAMVDDPNDEDFVPFRPRRSPRMSLRSSVSQRAGRSAVGTKMTCAHCRTPLQKGQTAYQRKGLPQLFCSSSCLTTFSKKPSGKKTCTFCKKEIWNTKDSVVAQTGSGGSFHEFCTSVCLSLYEAQQQRPIPQSGDPADATRCSICQKTGEVLHEVSNGSVVHRLCSDSCFSKFRANKGLKTNCCDQCGAYIYTKTGSPGPELLFHEGQQKRFCNTTCLGAYKKKNTRVYPCVWCKTLCKNFEMLSHVDRNGKTSLFCSLCCTTSYKVKQAGLTGPPRPCSFCRRSLSDPCYYNKVDRTVYQFCSPSCWTKFQRTSPEGGIHLSCHYCHSLFSGKPEVLDWQDQVFQFCCRDCCEDFKRLRGVVSQCEHCRQEKLLHEKLRFSGVEKSFCSEGCVLLYKQDFTKKLGLCCITCTYCSQTCQRGVTEQLDGSTWDFCSEDCKSKYLLWYCKAARCHACKRQGKLLETIHWRGQIRHFCNQQCLLRFYSQQNQPNLDTQSGPESLLNSQSPESKPQTPSQTKVENSNTIPVKTRSAPTAPTPPPPPPPATPRKNKAAMCKPLMQNRGVSCKVEMKSKGSQTEEWKPQVIVLPIPVPIFVPVPMHLYCQKVPVPFSMPIPVPVPMFLPTTLESTDKIVETIEELKVKIPSNPLEADILAMAEMIAEAEELDKASSDLCDLVSNQSAEGLLEDCDLFGPARDDVLAMAVKMANVLDEPGQDLEADFPKNPLDINPSVDFLFDCGLVGPEDVSTEQDLPRTMRKGQKRLVLSESCSRDSMSSQPSCTGLNYSYGVNAWKCWVQSKYANGETSKGDELRFGPKPMRIKEDILACSAAELNYGLAQFVREITRPNGERYEPDSIYYLCLGIQQYLLENNRMVNIFTDLYYLTFVQELNKSLSTWQPTLLPNNTVFSRVEEEHLWECKQLGVYSPFVLLNTLMFFNTKFFGLQTAEEHMQLSFTNVVRQSRKCTTPRGTTKVVSIRYYAPVRQRKGRDTGPGKRKREDEAPILEQRENRMNPLRCPVKFYEFYLSKCPESLRTRNDVFYLQPERSCIAESPLWYSVIPMDRSMLESMLNRILAVREIYEELGRPGEEDLD

SEQ ID NO: 67094 - DNA, 4077 bp, Artificial Sequence
  derived and/or modified sequence
atggaccccagcgacttccccagccccttcgaccccctgaccctgcccgagaagcccctggccggcgacctgcccgtggacatggagttcggcgaggacctgctggagagccagaccgcccccaccagaggctgggccccccccggccccagccccagcagcggcgccctggacctgctggacacccccgccggcctggagaaggaccccggcgtgctggacggcgccaccgagctgctgggcctgggcggcctgctgtacaaggcccccagcccccccgaggtggaccacggccccgagggcaccctggcctgggacgccggcgaccagaccctggagcccggccccggcggccagacccccgaggtggtgccccccgaccccggcgccggcgccaacagctgcagccccgagggcctgctggagcccctggcccccgacagccccatcaccctgcagagcccccacatcgaggaggaggagaccaccagcatcgccaccgccagaagaggcagccccggccaggaggaggagctgccccagggccagccccagagccccaacgccccccccagccccagcgtgggcgagaccctgggcgacggcatcaacagcagccagaccaagcccggcggcagcagcccccccgcccaccccagcctgcccggcgacggcctgaccgccaaggccagcgagaagccccccgagagaaagagaagcgagagagtgagaagagccgagccccccaagcccgaggtggtggacagcaccgagagcatccccgtgagcgacgaggacagcgacgccatggtggacgaccccaacgacgaggacttcgtgcccttcagacccagaagaagccccagaatgagcctgagaagcagcgtgagccagagagccggcagaagcgccgtgggcaccaagatgacctgcgcccactgcagaacccccctgcagaagggccagaccgcctaccagagaaagggcctgccccagctgttctgcagcagcagctgcctgaccaccttcagcaagaagcccagcggcaagaagacctgcaccttctgcaagaaggagatctggaacaccaaggacagcgtggtggcccagaccggcagcggcggcagcttccacgagttctgcaccagcgtgtgcctgagcctgtacgaggcccagcagcagagacccatcccccagagcggcgaccccgccgacgccaccagatgcagcatctgccagaagaccggcgaggtgctgcacgaggtgagcaacggcagcgtggtgcacagactgtgcagcgacagctgcttcagcaagttcagagccaacaagggcctgaagaccaactgctgcgaccagtgcggcgcctacatctacaccaagaccggcagccccggccccgagctgctgttccacgagggccagcagaagagattctgcaacaccacctgcctgggcgcctacaagaagaagaacaccagagtgtacccctgcgtgtggtgcaagaccctgtgcaagaacttcgagatgctgagccacgtggacagaaacggcaagaccagcctgttctgcagcctgtgctgcaccaccagctacaaggtgaagcaggccggcctgaccggcccccccagaccctgcagcttctgcagaagaagcctgagcgacccctgctactacaacaaggtggacagaaccgtgtaccagttctgcagccccagctgctggaccaagttccagagaaccagccccgagggcggcatccacctgagctgccactactgccacagcctgttcagcggcaagcccgaggtgctggactggcaggaccaggtgttccagttctgctgcagagactgctgcgaggacttcaagagactgagaggcgtggtgagccagtgcgagcactgcagacaggagaagctgctgcacgagaagctgagattcagcggcgtggagaagagcttctgcagcgagggctgcgtgctgctgtacaagcaggacttcaccaagaagctgggcctgtgctgcatcacctgcacctactgcagccagacctgccagagaggcgtgaccgagcagctggacggcagcacctgggacttctgcagcgaggactgcaagagcaagtacctgctgtggtactgcaaggccgccagatgccacgcctgcaagagacagggcaagctgctggagaccatccactggagaggccagatcagacacttctgcaaccagcagtgcctgctgagattctacagccagcagaaccagcccaacctggacacccagagcggccccgagagcctgctgaacagccagagccccgagagcaagccccagacccccagccagaccaaggtggagaacagcaacaccatccccgtgaagaccagaagcgcccccaccgcccccacccccccccccccccccccccccgccacccccagaaagaacaaggccgccatgtgcaagcccctgatgcagaacagaggcgtgagctgcaaggtggagatgaagagcaagggcagccagaccgaggagtggaagccccaggtgatcgtgctgcccatccccgtgcccatcttcgtgcccgtgcccatgcacctgtactgccagaaggtgcccgtgcccttcagcatgcccatccccgtgcccgtgcccatgttcctgcccaccaccctggagagcaccgacaagatcgtggagaccatcgaggagctgaaggtgaagatccccagcaaccccctggaggccgacatcctggccatggccgagatgatcgccgaggccgaggagctggacaaggccagcagcgacctgtgcgacctggtgagcaaccagagcgccgagggcctgctggaggactgcgacctgttcggccccgccagagacgacgtgctggccatggccgtgaagatggccaacgtgctggacgagcccggccaggacctggaggccgacttccccaagaaccccctggacatcaaccccagcgtggacttcctgttcgactgcggcctggtgggccccgaggacgtgagcaccgagcaggacctgcccagaaccatgagaaagggccagaagagactggtgctgagcgagagctgcagcagagacagcatgagcagccagcccagctgcaccggcctgaactacagctacggcgtgaacgcctggaagtgctgggtgcagagcaagtacgccaacggcgagaccagcaagggcgacgagctgagattcggccccaagcccatgagaatcaaggaggacatcctggcctgcagcgccgccgagctgaactacggcctggcccagttcgtgagagagatcaccagacccaacggcgagagatacgagcccgacagcatctactacctgtgcctgggcatccagcagtacctgctggagaacaacagaatggtgaacatcttcaccgacctgtactacctgaccttcgtgcaggagctgaacaagagcctgagcacctggcagcccaccctgctgcccaacaacaccgtgttcagcagagtggaggaggagcacctgtgggagtgcaagcagctgggcgtgtacagccccttcgtgctgctgaacaccctgatgttcttcaacaccaagttcttcggcctgcagaccgccgaggagcacatgcagctgagcttcaccaacgtggtgagacagagcagaaagtgcaccacccccagaggcaccaccaaggtggtgagcatcagatactacgcccccgtgagacagagaaagggcagagacaccggccccggcaagagaaagagagaggacgaggcccccatcctggagcagagagagaacagaatgaaccccctgagatgccccgtgaagttctacgagttctacctgagcaagtgccccgagagcctgagaaccagaaacgacgtgttctacctgcagcccgagagaagctgcatcgccgagagccccctgtggtacagcgtgatccccatggacagaagcatgctggagagcatgctgaacagaatcctggccgtgagagagatctacgaggagctgggcagacccggcgaggaggacctggactag

SEQ ID NO: 67095 - DNA, 4077 bp, Artificial Sequence
  derived and/or modified sequence
atggaccccagcgacttcccttctccgtttgatcccctgactcttccggagaaacctctggctggcgatctgcctgtagatatggaattcggtgaagatttgttggagtcccagacagctccaactcgcgggtgggctccaccaggcccgtctccaagttccggcgccctcgacctgctggacacacctgctggactcgaaaaagacccaggcgtactggacggagccacagaactcttaggattaggaggcctgctgtacaaagcccctagcccgccagaggttgaccacggtcctgagggcactttggcctgggatgccggcgaccagaccctggagccagggcccggcgggcagacccccgaggtcgtacctcctgaccctggcgctggagctaactcctgttcccccgagggcctgctggagccactggctcctgatagcccgataacacttcaatccccacacatcgaggaggaggaaactacctcgattgcaacagccagaaggggcagtcccgggcaggaggaagaactgccacaggggcagcctcaatctcccaatgcaccaccttctccttcagtgggcgagacgcttggggatggaattaactcatctcagactaaaccaggaggctcttctccacccgctcatccgagcctccccggggatggcttaaccgccaaggccagcgagaaaccacctgaacggaaaaggagtgaaagagtgcgacgggccgagccccccaaacccgaagtagtggactctactgagagcattcctgtgtcggatgaagatagtgatgcgatggtggatgatccgaacgacgaggacttcgttcctttccgcccacgcaggtcaccgaggatgtcccttcgctcttctgtgtcacagcgcgccggcagaagtgcagtcggcacaaagatgacctgcgcacactgtaggactcccttgcagaagggacagacagcctaccaacggaaggggcttccacagctcttctgttcttcctcttgtctgaccactttttccaagaaaccctctggaaaaaagacctgtacgttttgtaaaaaggagatctggaacacaaaagactccgttgtggctcaaaccggcagcggtggaagttttcatgaattctgcaccagcgtgtgcctgtccctgtatgaggcacaacagcaaagaccaattccacagtcaggcgatcctgcagatgccacacgttgttctatctgccaaaaaacaggggaggtgctccatgaggtaagcaatggctcggtggttcatcgtctgtgcagcgacagttgctttagcaagtttcgggctaacaaggggctcaagaccaactgttgtgatcagtgcggcgcatatatttacactaagacaggatctcccggccctgagctgttgttccacgagggacagcagaaaagattctgcaacaccacctgtctgggggcatataaaaagaaaaacacccgggtctacccctgcgtatggtgcaaaactctctgcaagaattttgaaatgttgagccatgtcgaccggaacggaaaaacaagtcttttctgctcactgtgttgcaccactagctataaagtcaagcaggccgggctcacagggcctccacggccatgtagcttctgcaggcgctccctctccgacccctgctactataataaggtggatcggaccgtgtaccaattctgttccccatcttgttggaccaagtttcagaggacttctcccgaaggagggatccacttatcatgtcactactgccactctctcttttccggaaaaccagaagtcctggactggcaggaccaggttttccagttctgctgcagagactgttgcgaggatttcaagcggctgcggggagtcgtcagtcagtgcgaacattgccgtcaggaaaagttactgcatgagaaacttcgcttctccggcgtcgaaaagtcattctgcagcgagggttgcgtgctgctctacaaacaggacttcacaaaaaagctgggactctgctgtatcacctgtacctattgtagtcagacatgtcaacggggcgtgaccgagcaactggatggcagtacatgggacttttgttccgaggactgcaaatccaagtatctgctctggtattgcaaggcagctagatgtcatgcctgtaagcgccaggggaaattactggaaaccattcactggcgcgggcagatccggcatttctgcaaccaacaatgcctgctgcgcttttacagtcaacagaatcagcctaacctggacacgcagagcggccctgaaagtcttctaaatagtcagtcccctgaatcaaagccccagaccccttcccaaactaaagtcgagaactctaatactatccccgtcaaaaccaggtctgcacctacggcccccaccccacccccaccaccccctcccgcaactcctcgcaagaataaggccgccatgtgcaaacccttaatgcagaatcgcggtgtttcctgcaaggtggagatgaaaagtaagggtagccaaacagaggaatggaagcctcaggtgattgtcctgcctatcccggtgccaatcttcgtccccgtgccaatgcacctgtactgccagaaggtgcccgtgcccttttcgatgcctattcctgtccccgtgcctatgttcctgccaaccacgttagagagtactgacaaaatcgtggagaccattgaagagctcaaggtgaagattccatctaatccccttgaggcggatatactggccatggctgagatgatagccgaagcggaggagctggacaaggcctcctctgacttatgcgacctggtttccaatcagagcgctgaaggactgctcgaggactgtgatttgttcgggcccgccagggacgatgtgcttgccatggcagtgaagatggcaaatgtgctcgatgaacctggacaggatctggaagctgattttccgaaaaatccccttgatataaacccatctgtcgacttcctcttcgattgtggactggtgggacctgaagatgttagcaccgaacaggacctgcctcgcaccatgcgtaagggccagaaacgtctcgtgctctcggaatcgtgctcacgcgactcaatgtccagccaaccgtcatgcaccggactcaattactcttacggggtaaacgcttggaaatgctgggtgcagtcaaagtacgccaacggcgaaacatcgaagggtgacgaattacgatttggccctaagcccatgcggatcaaagaggacattcttgcttgctcagccgccgagctcaactatggcctggcccagttcgtgcgggaaattacccggcctaacggagaacggtacgagcctgacagcatctactacctttgtctggggatccagcaatatctgcttgagaataacagaatggtgaatatttttaccgatctgtattatctgacctttgttcaggagctaaataaatcactgtctacctggcagccaactttgctcccaaacaacaccgtgttctcaagagtagaggaagagcatttgtgggagtgtaaacaactaggagtgtacagtcctttcgtgctcctgaacaccctgatgttttttaatacaaaattttttggcctgcagaccgctgaggagcacatgcagttgagctttaccaatgtcgttaggcagtcacgaaagtgcactactcccaggggaacaacaaaagtcgtttcaatcaggtattacgccccagtgcgccagcgcaagggaagagataccggtccaggtaagagaaagagagaagatgaggccccaatactggaacagagagaaaaccggatgaaccccctgaggtgtcccgtcaaattctatgaattctacctcagtaagtgtccggaatcactaagaacacgaaatgatgtcttttacctgcagcccgagaggagttgtatcgcagaaagccctctctggtacagcgtgatccccatggaccgttcaatgctggagtcgatgctgaacagaatacttgctgtgagggaaatatacgaggagcttggccgtccaggcgaggaggatttggactag

SEQ ID NO: 67096 - DNA, 4077 bp, Artificial Sequence
  derived and/or modified sequence
atggaccccagcgacttccccagcccctttgaccccctgaccctgcctgagaagcccctggccggggacctgcctgtggacatggagtttggagaggacctgctggagagccagacagcccccacccggggctgggcccctcctggccccagccccagcagcggggccctggacctgctggacaccccagctggcctggagaaggaccccggggtgctggatggagccacagagctgctgggcctgggcggcctgctgtacaaggcccccagccccccagaggtggaccacggccctgagggcaccctggcctgggatgctggggaccagaccctggagcccggccctgggggccagaccccagaggtggtgcccccagaccccggggccggggccaacagctgcagccctgagggcctgctggagcccctggccccagacagccccatcaccctgcagagcccccacatcgaggaggaggagaccaccagcatcgccacagcccggcggggcagccctggccaggaggaggagctgccccagggccagccccagagccccaatgccccacccagccccagcgtgggggagaccctgggagatggcatcaacagcagccagaccaagccaggcggcagcagccccccagcccaccccagcctgcctggagatggcctgacagccaaggccagcgagaagcccccagagaggaagaggtctgagcgggtgcggcgggcagagccccccaagccagaggtggtggacagcacagagagcatccctgtgtctgatgaagattctgatgccatggtggatgaccccaatgatgaagattttgtgcccttccggcccaggaggagccccaggatgagcctgcggagctctgtgtcccagagagctggccgctctgctgtgggcaccaagatgacctgtgcccactgcaggacccccctgcagaagggccagacagcctaccagaggaagggcctgccccagctgttctgcagcagcagctgcctgaccaccttcagcaagaagcccagcggcaagaagacctgcaccttctgcaagaaggagatctggaacaccaaggacagcgtggtggcccagacaggcagcggcggcagcttccacgagttctgcacctctgtgtgcctgagcctgtatgaggcccagcagcagaggcccatcccccagagcggggaccctgcagatgccacccgctgcagcatctgccagaagacaggagaggtgctgcacgaggtgtccaatggatctgtggtgcaccggctgtgcagcgacagctgcttcagcaagttccgggccaacaagggcctgaagaccaactgctgtgaccagtgtggggcctacatctacaccaagacaggcagccctggccctgagctgctcttccacgagggccagcagaagcgcttctgcaacaccacctgcctgggcgcctacaagaagaagaacaccagggtgtacccctgtgtgtggtgcaagaccctgtgcaagaactttgagatgctgagccacgtggacagaaatggcaagaccagcctcttctgcagcctgtgctgcaccaccagctacaaggtgaagcaggccggcctgaccggccccccccggccctgcagcttctgccgccgcagcctgagtgacccctgctactacaacaaggtggacagaacagtgtaccagttctgcagccccagctgctggaccaagttccagaggaccagccctgagggcggcatccacctgagctgccactactgccacagcctcttcagcggcaagccagaggtgctggactggcaggaccaggtgttccagttctgctgccgggactgctgtgaggacttcaagaggctgcggggcgtggtgtcccagtgtgagcactgccggcaggagaagctgctgcacgagaagctgcgcttctctggagtggagaagagcttctgcagcgagggctgtgtgctgctgtacaagcaggacttcaccaagaagctgggcctgtgctgcatcacctgcacctactgcagccagacctgccagaggggcgtgacagagcagctggatggcagcacctgggacttctgcagcgaggactgcaagagcaagtacctgctgtggtactgcaaggccgcccgctgccacgcctgcaagaggcagggcaagctgctggagaccatccactggaggggccagatccgccacttctgcaaccagcagtgcctgctgcgcttctacagccagcagaaccagcccaacctggacacccagagcggccctgagagcctgctgaacagccagagccctgagagcaagccccagacccccagccagaccaaggtggagaacagcaacaccatccctgtgaagaccaggtctgcccccacagcccccaccccacctcctcctcctcctccagccacccccaggaagaacaaggccgccatgtgcaagcccctgatgcagaacagaggagtgtcctgcaaggtggagatgaagagcaagggcagccagacagaggagtggaagccccaggtgattgtgctgcccatccctgtgcccatctttgtgcctgtgcccatgcacctgtactgccagaaggtgcctgtgcccttctccatgcccatccctgtgcctgtgcccatgttcctgcccaccaccctggagagcacagacaagatcgtggagaccatcgaggagctgaaggtgaagatccccagcaaccccctggaggccgacatcctggccatggccgagatgattgctgaggccgaggagctggacaaggccagcagtgacctgtgtgacctggtgagcaaccagagcgctgagggcctgctggaggactgtgacctgtttggacctgccagagatgatgtgctggccatggctgtgaagatggccaacgtgctggatgagcccggccaggacctggaggccgacttccccaagaaccccctggacatcaaccccagcgtggacttcctgtttgactgtggcctggtgggcccagaagatgtgtccacagagcaggacctgcccaggaccatgaggaagggccagaagaggctggtgctgtctgagagctgcagccgggacagcatgagcagccagcccagctgcaccggcctgaactacagctatggagtgaatgcctggaagtgctgggtgcagagcaaatatgccaatggagagaccagcaaaggagatgagctgcgcttcggccccaagcccatgaggatcaaggaggacatcctggcctgcagcgctgctgagctgaactacggcctggcccagtttgtgcgggagatcacccggcccaacggggagagatatgagccagacagcatctactacctgtgcctgggcatccagcagtacctgctggagaacaacaggatggtgaacatcttcacagacctgtactacctgacctttgtgcaggagctgaacaagagcctgagcacctggcagcccaccctgctgcccaacaacacagtgttcagccgggtggaggaggagcacctgtgggagtgcaagcagctgggcgtgtacagcccctttgtgctgctgaacaccctgatgttcttcaacaccaagttcttcggcctgcagacagctgaggagcacatgcagctgtccttcaccaacgtggtgcggcagagcaggaagtgcaccaccccccggggcaccaccaaggtggtgtccatccgctactatgcccctgtgcggcagaggaagggccgggacaccggccctgggaagaggaagagagaagatgaggcccccatcctggagcagagagaaaataggatgaaccccctgcgctgccctgtgaagttctatgagttctacctgagcaagtgcccagagagcctgcggaccagaaatgatgtgttctacctgcagcctgagaggagctgcatcgccgagagccccctgtggtacagcgtcatccccatggaccgctccatgctggagagcatgctgaaccgcatcctggccgtgcgggagatctatgaggagctgggccggcctggagaggaggacctggactag

SEQ ID NO: 67097 - DNA, 4077 bp, Artificial Sequence
  derived and/or modified sequence
atggaccccagcgacttccccagccccttcgaccccctgaccctgcctgagaagcctctcgccggggacctgcctgtggatatggagtttggtgaagacctcctggagagccagacggcgcctaccagaggctgggcccctcctgggccctctcctagttctggagccctggatttgcttgatactcctgcagggctggagaaggatccgggagtgctcgacggagcaacggagttactggggctggggggactgctctataaggctcccagcccgccggaagtcgatcacggcccagagggaacgttggcgtgggacgccggagaccagaccctggagccaggcccaggcgggcagacaccagaggtcgtcccgcctgacccgggcgccggtgccaatagctgctcacctgagggactactggagcccctggccccggactctccaataacactgcagtcccctcatattgaggaagaagagacaactagcatcgccacagcccgtcgcggaagtcccggtcaggaagaggagctaccacagggtcagccccagtcccccaatgccccgcccagccctagcgtcggtgagacgctgggcgatgggatcaacagtagccaaactaaacccggcggatcctctcctcccgcgcatccctctctgccaggtgacggcctgactgctaaagcctcagagaaaccacctgagcgaaaaaggagcgagagggtgcgcagagcagagccccctaagcctgaggtagttgatagcacagagtcaattcccgtgtctgatgaagactccgatgctatggtggatgacccaaacgatgaagatttcgtgcccttcaggcctcgcaggtctcctaggatgtcactccgcagtagtgtgtcccagcgcgccggtaggagcgctgtaggaaccaagatgacttgcgcacactgtagaactcctctccaaaaaggacagactgcctatcagaggaagggcctcccacagctattctgttcgtcaagttgtctcacaacattctccaagaaacctagcggcaagaaaacctgcaccttctgtaagaaagagatctggaatactaaggatagtgtggtggctcaaacagggtccggcgggtccttccacgagttctgcacgtcggtatgtctgagtctgtacgaggcgcaacagcagagaccaattccccagtccggagatccagcggacgccactcggtgcagtatctgtcagaagacaggcgaggttttgcacgaggttagcaatggttccgtcgtgcaccgcctctgctccgacagctgcttctcaaagtttcgagcgaacaaggggctcaagacaaattgctgcgaccaatgcggtgcatacatctacactaagaccggtagccccgggcccgagctcctcttccatgaaggccaacaaaaaaggttttgcaacaccacatgtcttggagcttataaaaaaaaaaacactcgtgtctatccatgcgtgtggtgcaaaacattatgcaaaaattttgagatgctgagccatgtggaccgcaacgggaagacctccctgttctgctccctatgttgtacgacatcctacaaggtgaaacaagccgggctgacagggcccccccgcccgtgctccttttgccggaggtctttatccgacccttgctattacaacaaggtggatagaacagtgtatcaattctgcagcccgtcttgttggactaagttccagcgcacttcaccggagggcgggatccacctgtcttgccactattgccattctttgttcagtggcaagcctgaggtactcgattggcaagatcaggtgtttcagttttgctgccgggattgctgcgaggacttcaaaaggctgaggggcgtggtcagccaatgtgagcattgcagacaggagaagttactgcacgagaagctcagattctcaggagtcgaaaagagcttctgcagcgaaggctgtgtgctgttgtataagcaggatttcacgaaaaaactgggattatgctgtatcacatgcacttattgctcacaaacgtgccagcggggcgttaccgaacagcttgacggctccacgtgggatttttgttctgaagactgcaagagtaaatacctcctgtggtattgcaaagccgccagatgccacgcctgtaaacggcaaggcaaattgcttgaaactatacattggaggggccagatcagacacttctgcaaccagcagtgcctcctgcgcttttactcgcagcaaaaccagccaaatctggatacacagtcagggcccgaaagtcttctcaacagccaaagcccagagtctaagccccagactccatcccagacaaaggtggaaaattctaatacgatccccgtgaagacaagatcagcccccacagcccctactccgcctcctccaccacctcctgccacaccgcgcaaaaataaggccgccatgtgtaaaccacttatgcaaaatagaggggtttcctgcaaagttgagatgaagagtaagggatcacaaaccgaggagtggaagccacaggtgatcgtactacccattcctgtcccgatttttgtacctgtacccatgcatctgtactgccaaaaggtgcccgtccctttcagcatgcctatcccggtcccagtgccaatgttcctccccacgactcttgaaagcactgacaagattgtggagactatcgaagaattgaaggtcaagatccccagtaatcctcttgaagcagacattctagccatggccgagatgatcgccgaagccgaagaacttgacaaggccagcagcgatctgtgcgatctggtctctaaccagtccgctgagggcctcctagaagattgtgatctcttcggtcctgcacgtgatgacgttttagcgatggcggtgaaaatggccaatgtgctggacgaaccaggacaggacctggaggctgactttccgaagaacccccttgatattaatccctccgtcgacttcctatttgactgcggtttagtagggcccgaggacgtgagcacggagcaggatctcccacgaacaatgcggaaaggccagaaacgactggtgctttctgagtcttgctcacgcgattccatgtcaagccagcctagttgtacaggcctgaactactcctatggcgtgaatgcgtggaagtgttgggtacagagcaaatacgctaatggggaaacttcaaagggcgacgagctacgcttcggccccaaaccaatgagaattaaagaagatattctggcctgcagtgccgccgagctgaactacggattggctcaatttgtacgcgagattactcgtcctaacggtgagagatacgagccagactcaatttattacctgtgcctcgggattcagcaatatttactagaaaataatcgtatggtaaatatatttacggatctgtattatttgacatttgttcaagaactgaacaaatcactgtctacatggcagccaaccctacttccaaacaacacagtgttttctcgagtggaggaagaacacctctgggagtgcaaacagctgggagtgtatagccccttcgtccttcttaacacattgatgttttttaacacaaaattttttgggctgcagactgctgaggaacacatgcaattgagctttactaacgttgtcaggcagtcacgaaagtgtactacacctaggggtaccactaaggtggtctccatacgatattatgctccggtccgccaaaggaaagggagggatactggcccaggcaaacggaagcgagaagacgaggcccctatcttggaacagcgagagaatcgtatgaatccgctgcggtgtcccgtcaagttctatgagttttacctatcaaagtgcccagaaagcctcaggacgcgtaacgacgtgttctacctgcagccagagcggagctgcatcgcagaatccccgctgtggtatagcgttattcctatggaccggtctatgctggagagcatgttgaaccggattcttgccgttagggagatttacgaagaactggggcggcctggcgaggaggacctagactag

SEQ ID NO: 67098 - DNA, 4077 bp, Artificial Sequence
  derived and/or modified sequence
atggatccttctgatttcccttctccatttgaccctctcactctccctgagaagccgcttgctggagatttgcctgttgacatggagttcggtgaagacctgctggagtcacagaccgccccaacgcgaggttgggcccctcctggcccaagtccgagctcgggggcattggatcttctggatactccggcaggcttggaaaaagacccgggagtcttagatggagccacagagctgctaggattgggaggcttattgtacaaagccccatctccgccagaggttgaccacgggccagagggtacacttgcttgggacgccggagaccaaacactggagcctgggccagggggacaaacccctgaagtagtgcctccagatcctggggctggggcaaacagctgctcacctgagggacttctggaacctctggctccagactcccccatcacgctccagtctcctcacatcgaggaagaagaaactacatctatagccactgcccgtcgcggaagtcccggacaggaggaggagctgccccagggacagccgcagagcccaaatgccccaccctccccatcagtgggagagacactgggtgacggaataaactcttcacagactaagccagggggaagctcccccccagcccacccttcactcccaggcgacggcctgaccgcaaaagcctctgagaaacccccagaaaggaaaaggagcgaaagggtgagaagagctgagccacccaaaccggaggtggtagattccactgagagtattcctgtatctgatgaggattcggacgctatggtggacgacccaaacgacgaggacttcgtccccttcagacccagaaggagtccgaggatgagcctgcgctcgtctgtcagtcaacgcgcagggagatcagcagtgggaaccaagatgacctgcgctcattgccgcacccccctgcagaaaggtcaaactgcttaccagcgtaaagggttaccccagctgttctgtagtagctcctgcctgaccaccttttccaaaaagccatctggaaaaaaaacttgcactttctgtaaaaaagagatttggaataccaaggactctgtggtggcccaaacgggcagtggcggtagtttccatgaattctgtacaagcgtttgcctgagcctttatgaagcccagcagcaacgcccaattcctcagtctggagatcccgcagatgccactaggtgttccatctgtcagaagacaggggaggtgttacacgaagtgagcaatgggagcgtggtgcaccggctctgcagtgatagctgtttctccaagtttagagcaaacaagggcctcaaaactaactgctgcgatcaatgtggagcatacatctataccaagaccggatcccccggtcccgaactccttttccacgaagggcagcagaaaagattctgcaataccacttgtcttggcgcatacaagaagaaaaacaccagggtgtacccatgtgtctggtgcaagaccctgtgcaagaatttcgaaatgctgtcccatgtcgaccggaacggtaagactagccttttttgttcactttgctgtacaaccagctacaaggtgaagcaggccggactgacggggcctccaaggccgtgttcattctgcaggaggagtctttccgatccatgctattataacaaagtagatcgcacagtataccaattctgctctccatcctgctggacaaaatttcagcgcacctcccctgaaggcggtattcacttaagctgccattattgtcatagcctgttctcaggcaaaccagaggtattggactggcaggaccaagtgtttcaattttgttgtcgagactgctgtgaggattttaaacgactgaggggggtggtgtcacagtgtgaacattgccgccaggaaaagctgttgcatgaaaaactcagattctctggggtggaaaagtcgttttgctccgaagggtgtgtccttctgtataaacaggattttacaaaaaaattgggattgtgttgcataacatgtacgtactgtagtcagacttgtcaaaggggagtcacggaacagttagacggcagcacctgggacttctgcagcgaagactgtaaatctaaatacctactctggtactgcaaggctgcacgctgccatgcctgtaagaggcagggaaagcttctggagactatccactggaggggccagattagacatttttgcaaccaacagtgtctcctccggttctatagccagcagaaccagcctaatttggacacccagtcagggccagaaagcctcttgaactctcagtcccctgagtcgaagccccagacaccttcacagaccaaagtggaaaattcgaacaccattcccgttaagactagatccgcgccaactgcgcctacacctcctcctcctccacctccagccactcccagaaaaaataaggccgcaatgtgtaaaccgctgatgcagaatcgtggggtgagctgcaaggtggaaatgaaatcaaagggtagccaaaccgaggagtggaaaccccaggtgatcgtccttcctatccctgtgcccattttcgttccagtccccatgcatctgtattgtcagaaagttcccgtgccctttagtatgccaatccctgtgcctgtgcccatgttcttacctaccaccctggagagtactgacaagatcgtagagaccattgaggagctcaaagtgaagattccttccaatccattagaggcagatatcttagccatggcagagatgattgccgaagctgaagagctcgataaggccagttccgacctctgtgacctcgtttccaaccaatcggccgagggcctgctggaagactgtgacctttttggacccgcacgcgacgatgtactggcaatggcggtaaaaatggcaaatgtactcgatgaacccggtcaggatctggaagctgatttccctaagaatccgttggacattaacccctcagtggacttcctttttgattgcggtcttgtgggacctgaggacgtgtccactgaacaggaccttcccaggaccatgaggaagggacagaaaaggttggtgctgagtgaaagttgcagtcgcgattccatgtctagccagccatcttgtaccggactgaactacagctatggcgtgaacgcctggaagtgctgggttcaaagcaagtacgccaacggcgagacgagtaaaggcgacgaactccggtttggcccaaagccaatgagaataaaagaggacatcctagcttgttctgcggcagagttaaattacggtctggctcaattcgtgcgagaaattacaagacctaatggagaaaggtacgagcctgactctatctactacctgtgcttaggaattcaacagtatctcctggaaaacaaccgtatggtgaacatttttacagatctttactatctcactttcgtccaggaactgaataaaagtctgtcaacgtggcagccaacattactgcctaacaacaccgtgttctcaagggtggaggaagaacacctgtgggaatgtaaacaacttggggtatactccccctttgtgctgctcaacacgttaatgtttttcaatactaaattcttcgggctgcagactgctgaggaacacatgcaactctcgttcacaaacgtcgtcagacagagcaggaaatgtactacgccccgaggcaccaccaaggtggtctctattagatattacgctcctgtgcggcaaagaaaaggaagagacacgggtccaggcaagagaaagagggaagacgaggccccaattctggagcagcgggaaaataggatgaacccccttcgttgcccagtcaaattttatgagttctacctgtcaaagtgtccggaaagtttgcggacgaggaacgatgtgttttacctgcagcccgagcgatcgtgtattgcggaaagccccttatggtattccgtgatacccatggacaggtctatgctggagagcatgctgaaccgaattctggccgtgcgcgaaatttacgaggagcttgggcgaccaggagaggaggaccttgactag

SEQ ID NO: 67099 - DNA, 6067 bp, Artificial Sequence
  derived and/or modified sequence
gagagagagagagagagagagagagagagagagagagagagagagagagagagagagagagatcagccctggtgagggaggaaaactccatagataatacagggagctcctgcaggaagactcagggagaagatcccagaacttaccctaagactgttgagagagtagggggtagctttgcaggacctggtttgggggtcatcaagcagtaacggttactgcacaggcgttgccactgagccagagccatttaacccgacctgtgtggctggggatcaagcttcagataccccataactctgactctcagactgttttgggggccccgtggctgcagacaagggaaggaggggcacgtgagggctgggtccctgcctccccccgtcctccgctgtcactcactaccccaacagtcgcccagggggcgggacccggagaggtggggatgggggagggtaatcttggcaggcgcctgctgcatggcgtaggtagggactattgaggggggcggacgccgagggggtgaacacgagtgggaagctaagagagacacggggagggggaggggaccgggaaccatttgaatgagaggaggggatcacgggtagagtgggctccaggaggtagggcgagcagggtgtgacgggggccagactcttgagccaggtaaggggagcagtacatatccagccatactcatggaccccagtgatttccccagtccatttgacccattgaccctgccagagaagcccctggctggagacctaccagtagacatggaatttggagaggatctactggaatcccagactgccccaactcgaggatgggccccccctggcccttctccatcctcgggagccctggacctgcttgatacccctgctggcctggaaaaagaccctggagtcctggatggagccactgagttgctggggctgggggggctgctctataaagccccctctcccccggaggtggaccacggtcctgagggaaccctggcatgggatgcaggagatcagaccctagagcctggaccagggggccagacccctgaggtggtaccacctgatccaggggctggggcaaattcctgttcacctgaggggctactagagcctttggctccagattctccaataacactgcagtccccacatattgaagaggaggagaccacctccatagctactgcaagaaggggctcccctgggcaggaggaggagcttccccaagggcagccacagagcccaaatgccccgcctagcccttcagtgggagagactctgggggatggaatcaacagttctcagaccaaacctgggggctctagcccccctgcacatccttccttgccaggagatggcctgactgcgaaggcgagtgagaagccgcctgaacggaagagaagcgagcgcgttaggagagcagaacctccaaaacctgaggttgtagattccactgagagcattccagtgtcagatgaggattctgatgccatggtagatgaccccaatgatgaggactttgtgccattccggccccggcgctctcctcgcatgtccctacgctcaagtgtgtcacaaagggccgggcgctctgcagtgggcaccaagatgacttgtgcacattgccggacaccactgcagaaggggcagactgcctatcagcgcaaggggctgcctcagctcttctgctcgtcatcctgcctcaccactttctccaagaagccctcgggcaaaaagacctgtaccttctgcaagaaggagatctggaacaccaaggactcggttgtggcgcagactggttctggaggctccttccatgagttctgcacatccgtctgtctctccctgtatgaggcccagcagcagcgcccgatcccccagtctggggatcccgccgacgctactcgctgcagcatatgccagaagactggagaggtcctgcacgaggtcagcaatggcagcgtggtacaccggctctgcagcgattcttgcttctccaaattccgggccaacaagggactgaaaaccaactgttgtgaccagtgtggggcttacatctacaccaagaccgggagtcctggccctgagctcctcttccacgagggccaacaaaagcggttctgcaacacaacctgcttgggggcgtacaagaagaaaaacacacgtgtgtacccatgtgtctggtgcaagaccctgtgtaagaactttgagatgctatcacatgtggatcgtaatggcaagaccagcttgttctgttccctgtgctgtaccacttcttacaaagtgaagcaggcagggctcactggccctccccgaccctgcagcttctgccgccgcagcctctctgacccctgttactacaacaaggttgaccgcacagtctaccagttctgcagccccagctgctggaccaagttccagcgcacaagccctgaggggggcattcacctgagctgtcactactgtcacagcctcttcagtggcaagcctgaggtcttggactggcaggaccaagtgttccagttctgctgccgtgattgctgtgaggacttcaagcggcttcggggtgtggtgtcccagtgtgagcactgtcggcaggagaaactcttgcatgagaaactccgattcagcggagtggagaaaagcttctgcagcgaaggctgtgtgctgctgtacaaacaggacttcactaagaagctgggcttgtgctgtatcacttgtacttactgctcccagacctgccagcgcggagtcaccgagcaactggatggcagcacctgggacttctgcagtgaggactgtaagagcaagtacctgctgtggtactgcaaggctgcccggtgccatgcgtgtaagcgccaggggaagctgctggagaccatccactggcgtgggcagatccgtcatttctgcaaccagcagtgtcttctgcgtttctatagccagcagaaccaacccaacctggatacccagagtgggcccgagagcctcctgaacagtcagtctcctgagtcaaaaccccagacaccctctcaaaccaaagtggagaacagcaacacaatccctgtgaagacccgatcagctcccactgctcccacccctccacccccaccacccccagcaacaccccgcaaaaacaaggctgccatgtgtaagccactgatgcagaatcggggcgtctcctgcaaggtggagatgaagtccaaaggaagtcaaacagaagagtggaagccacaggtgatcgtgctgcccatcccagtgcccatcttcgtgccagtgcctatgcatctgtactgccagaaagtcccggtgcctttctcgatgcctatcccggtgcctgtgcccatgttcttgcccactaccttggagagcacagacaagattgtagagaccattgaggagctgaaggtgaagatcccttccaaccccttggaggccgacatcctggctatggcagaaatgattgcagaggctgaggagttagacaaggcctcatctgacctttgtgatcttgtgagcaaccagagtgcagagggactcctggaagactgtgacctgtttgggcctgctcgagatgatgtcctggccatggcagtcaagatggccaatgtcttggatgagcctgggcaagacttggaggcagacttccctaagaatcctctggacattaatcccagtgtagacttcctctttgattgtggcctggtagggcctgaggatgtgtctactgaacaagaccttccccgaaccatgaggaagggtcaaaagcggctggtgctttccgaaagctgctcccgggactccatgagcagtcagcctagttgtaccgggctcaactattcatatggtgtcaatgcttggaagtgctgggtgcagtcaaaatatgccaatggagaaaccagcaagggtgatgagctgcgctttggccccaaacccatgcgtatcaaagaggatattctcgcctgctcagctgctgagctcaactacggtctggcccagtttgtgagagaaatcactcggcccaatggtgaacgatatgaacctgacagtatctactatttgtgtcttggcatccagcagtacttgctggaaaataaccggatggtgaacattttcacggacctttactacctgacttttgttcaagaactcaacaagtctctgagtacctggcagcccacactcctccccaacaatacggtgttctctcgagtggaggaggagcacctctgggagtgtaagcaactgggggtctactcgccctttgtcctcctcaacaccctcatgttcttcaacactaagttttttgggctgcagacagctgaggaacacatgcaactctccttcaccaatgtggtgcggcagtcccgcaagtgtaccacccctcggggcaccaccaaggtggtgagcatccgctactatgccccagtccgccagaggaaagggcgagacacgggtcctggaaaacggaagagagaagatgaagcccctatcttagagcagcgtgagaaccgcatgaatcccctccgctgccctgtcaagttctatgaattctatctctcaaaatgtcctgaaagcctccggactcgcaacgatgtgttctacctgcaacctgaacggtcctgcatcgccgagtcacctctctggtattctgtgatccccatggaccgcagcatgttggagagcatgctcaatcgcatcctggctgtgcgcgagatttatgaggaactgggtcgtcctggggaggaagacctggactgagctcgtgtgccatccatatccatctttcacatcaatgtctgtcctgtggccatgtccctcagggtgacaggcccaggaaccaatgctactcattctgaagggccctgactgctcctttccgctcacccattccctgccttctctaggaaccctggcttttatcttcttccgtaccacttgacaaccatggggccctggtcttctgtactcaggggctggtctcccagtgatgggcaaaagccagcttgcccgttttctttatgcttcagagtaaacccctccttctgggtccagactctgggtggagtgttaatagctctggtgatcctgttggctttgggtttcctgacccatcccgcataggtagagcctcttgttcctaggcatgacctagggaaaaacccagctgccttctctgccctgtgcccactcccttctctactcttccccagcaccatgccaaaaggtcttatctgaaaggtaagaaataaacaatgaaagcgatgaggggaccatttacataaaacacagagcttagacactcttcccctcctatgaaataattggttgttggcaccatctcaccaccgcatatccctcaccccctcggcaagcaccaatccttggtgctgccgtttttaaaatcttccaaatgcctttttttcctcagaggcagagaatgactaagtacggggagcagactcctgttgtgcagactcctgtccccttggtttctgtgtttgtctctctgccatcttaggttgccatgagccatggtgtcaacatgcttagccccctctgtaactgcctccctttagttcaatggacagacctcccaaggcaaaaactaccttctgacttgggttgaggctgggttcccctctattgttcccctatcataagagctaggccaagcctatgggaccttgagtcatgcaggatgggatctgtggtcaaaggacaggcgaggagctgtgggcgcagggcctgccgccactgcctacatcttctctcttccccatcttgcattggaggtcccagaaaacaattagcttctggcaaagggggtacccacttctttccctgttgactttgctgtttcccaggctcctttttgtgtttttataactgtcaccagttagccactgtttaaattgtatatattgttctgaggcgcctggcctgtcccttcagtgagccatgcccacccttgtgttgtagtgagaagctgttgtcacgactaaccttctgtctctgaaattgtttgtttcaaataaagagttaaaattgtc

SEQ ID NO: 67100 - protein, 495 aa, Artificial Sequence
  derived and/or modified sequence
MDPSDFPSPFDPLTLPEKPLAGDLPVDMEFGEDLLESQTAPTRGWAPPGPSPSSGALDLLDTPAGLEKDPGVLDGATELLGLGGLLYKAPSPPEVDHGPEGTLAWDAGDQTLEPGPGGQTPEVVPPDPGAGANSCSPEGLLEPLAPDSPITLQSPHIEEEETTSIATARRGSPGQEEELPQGQPQSPNAPPSPSVGETLGDGINSSQTKPGGSSPPAHPSLPGDGLTAKASEKPPERKRSERVRRAEPPKPEVVDSTESIPVSDEDSDAMVDDPNDEDFVPFRPRRSPRMSLRSSVSQRAGRSAVGTKMTCAHCRTPLQKGQTAYQRKGLPQLFCSSSCLTTFSKKPSGKKTCTFCKKEIWNTKDSVVAQTGSGGSFHEFCTSVCLSLYEAQQQRPIPQSGDPADATRCSICQKTGEVLHEVSNGSVVHRLCSDSCFSKFRANKGLKTNCCDQCGAYIYTKTGSPGPELLFHEGQQKRFCNTTCLGAYKKVGPRE

SEQ ID NO: 67101 - protein, 497 aa, Artificial Sequence
  derived and/or modified sequence
MDPSDFPSPFDPLTLPEKPLAGDLPVDMEFGEDLLESQTAPTRGWAPPGPSPSSGALDLLDTPAGLEKDPGVLDGATELLGLGGLLYKAPSPPEVDHGPEGTLAWDAGDQTLEPGPGGQTPEVVPPDPGAGANSCSPEGLLEPLAPDSPITLQSPHIEEEETTSIATARRGSPGQEEELPQGQPQSPNAPPSPSVGETLGDGINSSQTKPGGSSPPAHPSLPGDGLTAKASEKPPERVQKRSERVRRAEPPKPEVVDSTESIPVSDEDSDAMVDDPNDEDFVPFRPRRSPRMSLRSSVSQRAGRSAVGTKMTCAHCRTPLQKGQTAYQRKGLPQLFCSSSCLTTFSKKPSGKKTCTFCKKEIWNTKDSVVAQTGSGGSFHEFCTSVCLSLYEAQQQRPIPQSGDPADATRCSICQKTGEVLHEVSNGSVVHRLCSDSCFSKFRANKGLKTNCCDQCGAYIYTKTGSPGPELLFHEGQQKRFCNTTCLGAYKKVGPRE

SEQ ID NO: 67102 - DNA, 1050 bp, Artificial Sequence
  derived and/or modified sequence
atggaccccagcgacttccccagccccttcgaccccctgaccctgcccgagaagcccctggccggcgacctgcccgtggacatggagttcggcgaggacctgctggagagccagaccgcccccaccagaggctgggccccccccggccccagccccagcagcggcgccctggacctgctggacacccccgccggcctggagaaggaccccggcgtgctggacggcgccaccgagctgctgggcctgggcggcctgctgtacaaggcccccagcccccccgaggtggaccacggccccgagggcaccctggcctgggacgccggcgaccagaccctggagcccggccccggcggccagacccccgaggtggtgccccccgaccccggcgccggcgccaacagctgcagccccgagggcctgctggagcccctggcccccgacagccccatcaccctgcagagcccccacatcgaggaggaggagaccaccagcatcgccaccgccagaagaggcagccccggccaggaggaggagctgccccagggccagccccagagccccaacgccccccccagccccagcgtgggcgagaccctgggcgacggcatcaacagcagccagaccaagcccggcggcagcagcccccccgcccaccccagcctgcccggcgacggcctgaccgccaaggccagcgagaagccccccgagagagtgcagaagagaagcgagagagtgagaagagccgagccccccaagcccgaggtggtggacagcaccgagagcagaagaagcggcacccccagaaccagactgtggagaagactggtgctggaggcccccagcatgagcagcgcccaccccagcgtgagcccctgcatgagacccagcagcagcgccagaagccccagcctgggcatcccccccaccctgctggccgccgcctacgccagaagactggagagaagctgcaccagaagcgccatggccgcctggtacaccggcagcgccgccatcctggccagccccaacagcggccccaccagagactag

SEQ ID NO: 67103 - DNA, 1488 bp, Artificial Sequence
  derived and/or modified sequence
atggaccccagcgacttccccagccccttcgaccccctgaccctgcccgagaagcccctggccggcgacctgcccgtggacatggagttcggcgaggacctgctggagagccagaccgcccccaccagaggctgggccccccccggccccagccccagcagcggcgccctggacctgctggacacccccgccggcctggagaaggaccccggcgtgctggacggcgccaccgagctgctgggcctgggcggcctgctgtacaaggcccccagcccccccgaggtggaccacggccccgagggcaccctggcctgggacgccggcgaccagaccctggagcccggccccggcggccagacccccgaggtggtgccccccgaccccggcgccggcgccaacagctgcagccccgagggcctgctggagcccctggcccccgacagccccatcaccctgcagagcccccacatcgaggaggaggagaccaccagcatcgccaccgccagaagaggcagccccggccaggaggaggagctgccccagggccagccccagagccccaacgccccccccagccccagcgtgggcgagaccctgggcgacggcatcaacagcagccagaccaagcccggcggcagcagcccccccgcccaccccagcctgcccggcgacggcctgaccgccaaggccagcgagaagccccccgagagaaagagaagcgagagagtgagaagagccgagccccccaagcccgaggtggtggacagcaccgagagcatccccgtgagcgacgaggacagcgacgccatggtggacgaccccaacgacgaggacttcgtgcccttcagacccagaagaagccccagaatgagcctgagaagcagcgtgagccagagagccggcagaagcgccgtgggcaccaagatgacctgcgcccactgcagaacccccctgcagaagggccagaccgcctaccagagaaagggcctgccccagctgttctgcagcagcagctgcctgaccaccttcagcaagaagcccagcggcaagaagacctgcaccttctgcaagaaggagatctggaacaccaaggacagcgtggtggcccagaccggcagcggcggcagcttccacgagttctgcaccagcgtgtgcctgagcctgtacgaggcccagcagcagagacccatcccccagagcggcgaccccgccgacgccaccagatgcagcatctgccagaagaccggcgaggtgctgcacgaggtgagcaacggcagcgtggtgcacagactgtgcagcgacagctgcttcagcaagttcagagccaacaagggcctgaagaccaactgctgcgaccagtgcggcgcctacatctacaccaagaccggcagccccggccccgagctgctgttccacgagggccagcagaagagattctgcaacaccacctgcctgggcgcctacaagaaggtgggccccagagagtag

SEQ ID NO: 67104 - DNA, 1494 bp, Artificial Sequence
  derived and/or modified sequence
atggaccccagcgacttccccagccccttcgaccccctgaccctgcccgagaagcccctggccggcgacctgcccgtggacatggagttcggcgaggacctgctggagagccagaccgcccccaccagaggctgggccccccccggccccagccccagcagcggcgccctggacctgctggacacccccgccggcctggagaaggaccccggcgtgctggacggcgccaccgagctgctgggcctgggcggcctgctgtacaaggcccccagcccccccgaggtggaccacggccccgagggcaccctggcctgggacgccggcgaccagaccctggagcccggccccggcggccagacccccgaggtggtgccccccgaccccggcgccggcgccaacagctgcagccccgagggcctgctggagcccctggcccccgacagccccatcaccctgcagagcccccacatcgaggaggaggagaccaccagcatcgccaccgccagaagaggcagccccggccaggaggaggagctgccccagggccagccccagagccccaacgccccccccagccccagcgtgggcgagaccctgggcgacggcatcaacagcagccagaccaagcccggcggcagcagcccccccgcccaccccagcctgcccggcgacggcctgaccgccaaggccagcgagaagccccccgagagagtgcagaagagaagcgagagagtgagaagagccgagccccccaagcccgaggtggtggacagcaccgagagcatccccgtgagcgacgaggacagcgacgccatggtggacgaccccaacgacgaggacttcgtgcccttcagacccagaagaagccccagaatgagcctgagaagcagcgtgagccagagagccggcagaagcgccgtgggcaccaagatgacctgcgcccactgcagaacccccctgcagaagggccagaccgcctaccagagaaagggcctgccccagctgttctgcagcagcagctgcctgaccaccttcagcaagaagcccagcggcaagaagacctgcaccttctgcaagaaggagatctggaacaccaaggacagcgtggtggcccagaccggcagcggcggcagcttccacgagttctgcaccagcgtgtgcctgagcctgtacgaggcccagcagcagagacccatcccccagagcggcgaccccgccgacgccaccagatgcagcatctgccagaagaccggcgaggtgctgcacgaggtgagcaacggcagcgtggtgcacagactgtgcagcgacagctgcttcagcaagttcagagccaacaagggcctgaagaccaactgctgcgaccagtgcggcgcctacatctacaccaagaccggcagccccggccccgagctgctgttccacgagggccagcagaagagattctgcaacaccacctgcctgggcgcctacaagaaggtgggccccagagagtag

SEQ ID NO: 67105 - DNA, 1050 bp, Artificial Sequence
  derived and/or modified sequence
atggacccgtcggattttccctccccattcgatccgctgacactgccagaaaagcctctggcaggagaccttcctgtagacatggagtttggcgaagacttgcttgagtctcagacggccccgacacggggatgggctcctccaggcccatctccatcatccggtgcactcgaccttttggataccccggctggtcttgaaaaggaccccggggtccttgatggagccactgagctgctcgggctggggggtctgttgtacaaggcaccctccccccccgaagtggatcatggccccgaaggcacgctggcttgggacgccggagatcagacactggagcctggtccaggcggccaaacacctgaagttgtaccccccgatcccggtgccggtgcgaattcctgttccccggagggcctgttagaaccacttgcaccagattcgcctattacattgcaaagccctcatattgaggaggaagagaccacgtcaatcgcaacagccaggcggggatcccctgggcaggaggaggagctgccccagggacagccccagagtccaaacgccccccccagccccagtgttggcgaaaccctcggagatggaatcaactcctcccagactaagccagggggtagctctcctccagcccaccctagcctgccgggagacgggctcacagccaaagccagcgagaaacctcctgagcgggtacaaaagcgttcagagagagttagacgcgcagagccccccaagcccgaagtcgtcgatagcacagagagtcgccgctccggcaccccacgtacccgactctggcgaagactcgtccttgaggcgccgagcatgagctctgctcacccgtctgtctcaccgtgtatgcgcccttctagctcagcgagatcaccaagcctcgggatcccacctacccttctcgccgctgcatacgccagacgcctagaacgatcctgcaccagaagcgccatggctgcctggtatactggttccgccgcgatcctggcctcacctaactcaggacccacacgagattag

SEQ ID NO: 67106 - DNA, 1488 bp, Artificial Sequence
  derived and/or modified sequence
atggacccctctgactttcctagccccttcgaccccctgacgcttcccgagaaacccctggccggggacctgcctgtggatatggagtttggcgaagacttgctggagagccagacagcacccacacgaggctgggcgccacctggaccctcgccttccagtggcgccttggatctgttggatacacctgcaggtttggaaaaagacccaggagttttagatggagccactgagctgctcggactcggcggcctgctgtacaaggctccttcgcctcctgaggtggatcatggccccgaaggtacactggcatgggatgccggcgaccaaactttagagcctgggcccggcggacagactcctgaggtcgtaccgccagaccccggagctggagctaattcctgctcacctgaagggctgctggaaccattggccccagacagtccaataaccctgcaatctcctcatatagaggaggaggagaccacttctattgccaccgcaagacgcggatcccctgggcaagaggaagaactgccccagggccagccccagtcccctaatgcccctccgagcccatcagtgggtgagaccttgggggatgggatcaacagtagccaaaccaagcccggcggatccagcccccccgcccacccttcgctgcccggggatggactcactgctaaggccagtgagaaaccccctgagcgaaaaagatcagaaagagttcgccgagctgaacctccaaaacctgaggtcgtggattccactgagtctatacccgtgtctgacgaggactccgatgccatggttgatgaccctaacgacgaggacttcgtgccatttcgcccccggagaagcccccgcatgagcctgaggagttccgtgagccagcgcgcaggacgctcagcagttggaacaaaaatgacctgcgcccattgcaggacacctctgcagaaagggcaaaccgcttaccagagaaaggggctacctcagttattttgctcttcaagctgtttgaccacattttctaagaagcctagtggaaaaaaaacatgcacgttttgtaaaaaggaaatctggaacactaaggattcagtcgtagcccaaacaggatcgggtgggagttttcatgagttctgtacttctgtgtgtctgagtctgtacgaggcccagcagcagcgccccataccccagtccggggaccccgccgacgctacgcgatgctccatatgccagaagacgggtgaagttctgcacgaagtcagcaacggatcagttgtgcaccggctgtgcagcgactcttgtttctccaagttccgggccaacaagggcctaaaaacgaattgctgtgaccagtgcggtgcttacatctacactaaaactggttcaccagggcccgaactcctatttcatgagggacagcagaagcgcttttgcaacaccacatgccttggtgcttacaaaaaggtggggccccgggaatag

SEQ ID NO: 67107 - DNA, 1494 bp, Artificial Sequence
  derived and/or modified sequence
atggacccgagtgattttccatccccgtttgatcctcttacactccccgaaaagcctctcgctggtgacctgccggtggacatggaatttggcgaggatcttctcgaatctcagaccgcaccaaccagaggctgggccccccctggtccttccccatcaagtggagctctcgatctgctggacacgccggccgggctggagaaagaccctggagtcctagatggcgctaccgagctgctcggactcggcggactactgtacaaagcaccaagtcctccagaagtggatcatggtccagaaggcacactcgcgtgggacgcgggggatcagacactggaaccaggacctggaggccagactcctgaggtggtacctccagatcctggtgcaggagcaaattcctgctctccggaaggcctgctagagccactggctcctgattcaccgatcacactgcagagcccccacattgaggaagaggagacgacatccatcgccaccgcaagacggggctcaccaggacaggaagaagaacttccacagggccaaccacagtcccccaatgcgccacccagcccatcagtcggtgagactctcggagacggcattaactcttcacagaccaagcctggagggagcagcccccccgcccatcctagcctgccaggcgatggtctgactgctaaagctagtgaaaagccacctgagcgcgtccagaagcgttcggaacgagtgcgccgggccgaaccgcctaaacccgaggtcgtggactccaccgaaagtattccagtttctgatgaagatagcgacgccatggtcgacgatcccaatgacgaagatttcgttccctttcggccccgcaggagcccccgtatgtccctccgctcttccgtgtcccagcgtgctggacggagtgcagtcgggacaaaaatgacctgcgcccactgccgcacaccattacagaaaggtcagaccgcgtaccagcgcaagggacttccacagctgttctgctcctcctcttgtttgaccacattctcgaaaaagccctccggcaaaaagacctgcacattttgcaaaaaggagatctggaacactaaagactctgttgtcgcacagacaggatcaggtggctcctttcacgagttctgcacaagcgtgtgcctcagcttgtacgaggcccaacagcagcgacctatcccccaatcaggagaccctgccgacgcaacccggtgctctatttgccagaaaaccggggaggttctacacgaggtgagcaacggctcggttgtccaccggctctgtagcgatagctgtttttccaaattccgggctaacaagggcctcaagaccaattgctgtgatcagtgcggtgcctatatctacacaaaaaccgggtctcctggacccgagttgctgttccatgaaggccagcaaaagcggttctgcaataccacctgtcttggtgcatacaagaaagtaggtccacgagaatag

SEQ ID NO: 67108 - DNA, 1050 bp, Artificial Sequence
  derived and/or modified sequence
atggaccccagcgacttccccagcccctttgaccccctgaccctgcctgagaagcccctggccggggacctgcctgtggacatggagtttggagaggacctgctggagagccagacagcccccacccggggctgggcccctcctggccccagccccagcagcggggccctggacctgctggacaccccagctggcctggagaaggaccccggggtgctggatggagccacagagctgctgggcctgggcggcctgctgtacaaggcccccagccccccagaggtggaccacggccctgagggcaccctggcctgggatgctggggaccagaccctggagcccggccctgggggccagaccccagaggtggtgcccccagaccccggggccggggccaacagctgcagccctgagggcctgctggagcccctggccccagacagccccatcaccctgcagagcccccacatcgaggaggaggagaccaccagcatcgccacagcccggcggggcagccctggccaggaggaggagctgccccagggccagccccagagccccaatgccccacccagccccagcgtgggggagaccctgggagatggcatcaacagcagccagaccaagccaggcggcagcagccccccagcccaccccagcctgcctggagatggcctgacagccaaggccagcgagaagcccccagagcgggtgcagaagaggtctgagcgggtgcggcgggcagagccccccaagccagaggtggtggacagcacagagagccgccgcagcggcacccccaggacccggctgtggaggcggctggtgctggaggcccccagcatgagcagcgcccaccccagcgtgagcccctgcatgaggcccagcagcagcgcccggagccccagcctgggcatcccccccaccctgctggccgccgcctatgcccggcggctggagaggagctgcaccaggtctgccatggccgcctggtacacaggcagcgctgccatcctggccagccccaacagcggccccacccgggactag

SEQ ID NO: 67109 - DNA, 1488 bp, Artificial Sequence
  derived and/or modified sequence
atggaccccagcgacttccccagcccctttgaccccctgaccctgcctgagaagcccctggccggggacctgcctgtggacatggagtttggagaggacctgctggagagccagacagcccccacccggggctgggcccctcctggccccagccccagcagcggggccctggacctgctggacaccccagctggcctggagaaggaccccggggtgctggatggagccacagagctgctgggcctgggcggcctgctgtacaaggcccccagccccccagaggtggaccacggccctgagggcaccctggcctgggatgctggggaccagaccctggagcccggccctgggggccagaccccagaggtggtgcccccagaccccggggccggggccaacagctgcagccctgagggcctgctggagcccctggccccagacagccccatcaccctgcagagcccccacatcgaggaggaggagaccaccagcatcgccacagcccggcggggcagccctggccaggaggaggagctgccccagggccagccccagagccccaatgccccacccagccccagcgtgggggagaccctgggagatggcatcaacagcagccagaccaagccaggcggcagcagccccccagcccaccccagcctgcctggagatggcctgacagccaaggccagcgagaagcccccagagaggaagaggtctgagcgggtgcggcgggcagagccccccaagccagaggtggtggacagcacagagagcatccctgtgtctgatgaagattctgatgccatggtggatgaccccaatgatgaagattttgtgcccttccggcccaggaggagccccaggatgagcctgcggagctctgtgtcccagagagctggccgctctgctgtgggcaccaagatgacctgtgcccactgcaggacccccctgcagaagggccagacagcctaccagaggaagggcctgccccagctgttctgcagcagcagctgcctgaccaccttcagcaagaagcccagcggcaagaagacctgcaccttctgcaagaaggagatctggaacaccaaggacagcgtggtggcccagacaggcagcggcggcagcttccacgagttctgcacctctgtgtgcctgagcctgtatgaggcccagcagcagaggcccatcccccagagcggggaccctgcagatgccacccgctgcagcatctgccagaagacaggagaggtgctgcacgaggtgtccaatggatctgtggtgcaccggctgtgcagcgacagctgcttcagcaagttccgggccaacaagggcctgaagaccaactgctgtgaccagtgtggggcctacatctacaccaagacaggcagccctggccctgagctgctcttccacgagggccagcagaagcgcttctgcaacaccacctgcctgggcgcctacaagaaggtgggcccccgggagtag

SEQ ID NO: 67110 - DNA, 1494 bp, Artificial Sequence
  derived and/or modified sequence
atggaccccagcgacttccccagcccctttgaccccctgaccctgcctgagaagcccctggccggggacctgcctgtggacatggagtttggagaggacctgctggagagccagacagcccccacccggggctgggcccctcctggccccagccccagcagcggggccctggacctgctggacaccccagctggcctggagaaggaccccggggtgctggatggagccacagagctgctgggcctgggcggcctgctgtacaaggcccccagccccccagaggtggaccacggccctgagggcaccctggcctgggatgctggggaccagaccctggagcccggccctgggggccagaccccagaggtggtgcccccagaccccggggccggggccaacagctgcagccctgagggcctgctggagcccctggccccagacagccccatcaccctgcagagcccccacatcgaggaggaggagaccaccagcatcgccacagcccggcggggcagccctggccaggaggaggagctgccccagggccagccccagagccccaatgccccacccagccccagcgtgggggagaccctgggagatggcatcaacagcagccagaccaagccaggcggcagcagccccccagcccaccccagcctgcctggagatggcctgacagccaaggccagcgagaagcccccagagcgggtgcagaagaggtctgagcgggtgcggcgggcagagccccccaagccagaggtggtggacagcacagagagcatccctgtgtctgatgaagattctgatgccatggtggatgaccccaatgatgaagattttgtgcccttccggcccaggaggagccccaggatgagcctgcggagctctgtgtcccagagagctggccgctctgctgtgggcaccaagatgacctgtgcccactgcaggacccccctgcagaagggccagacagcctaccagaggaagggcctgccccagctgttctgcagcagcagctgcctgaccaccttcagcaagaagcccagcggcaagaagacctgcaccttctgcaagaaggagatctggaacaccaaggacagcgtggtggcccagacaggcagcggcggcagcttccacgagttctgcacctctgtgtgcctgagcctgtatgaggcccagcagcagaggcccatcccccagagcggggaccctgcagatgccacccgctgcagcatctgccagaagacaggagaggtgctgcacgaggtgtccaatggatctgtggtgcaccggctgtgcagcgacagctgcttcagcaagttccgggccaacaagggcctgaagaccaactgctgtgaccagtgtggggcctacatctacaccaagacaggcagccctggccctgagctgctcttccacgagggccagcagaagcgcttctgcaacaccacctgcctgggcgcctacaagaaggtgggcccccgggagtag

SEQ ID NO: 67111 - DNA, 1050 bp, Artificial Sequence
  derived and/or modified sequence
atggaccccagcgacttccccagccccttcgaccccctgaccctgcccgaaaaacccctggcgggtgatctgccagtcgatatggaatttggcgaagacttgttggagtcccagacggcccccacacggggctgggcccctcccggcccctcacctagcagcggcgccctggatctattagatacacccgcaggactagaaaaggaccctggggtgctggacggcgcaacagagctactcggtctcggaggactactgtacaaggcccccagccctccagaagtggaccacggtcccgagggcaccttagcttgggacgctggagaccagaccctcgagccaggacctgggggccagactcctgaggtagttccccccgaccccggagccggggccaactcttgtagccccgagggtctcctcgagcccttagcccccgacagtccaatcaccctccaatctccccacatcgaagaggaggaaactacgtcaatcgctaccgctagacggggtagccccggtcaagaagaagagctcccgcaagggcagccccagtctcccaacgccccacctagcccctcggtcggcgaaacactgggggatggcataaatagctcccagactaagccaggaggatcgtctccccctgcgcatccctccctcccaggagacggactgaccgccaaggcttccgaaaagccaccagaaagggtgcagaagcgctccgagcgggttagacgagcggagccgcctaagcccgaggttgttgattccactgaatcacgaagatctggcacgccccgtacaaggttatggagacgcctcgtccttgaggcgccaagtatgtcctcagcccatccgtctgtgagtccctgcatgcggccgtctagcagcgcgaggagccccagcctgggcataccacccaccttgttggcggcagcttacgcccgcagacttgaaagatcctgcacgagatccgctatggcggcctggtatactgggagtgcagctatcctcgcttcaccaaattcagggccaacccgggactag

SEQ ID NO: 67112 - DNA, 1488 bp, Artificial Sequence
  derived and/or modified sequence
atggaccccagcgacttccccagccccttcgaccccctgaccctgcccgagaaacccttagctggcgaccttccagtggatatggaattcggcgaggatttgctcgagtcccagacggcccctactagaggctgggccccacctggtccttccccctcttctggggctctggatcttctggacacacctgccgggctggaaaaagacccaggagtgctcgacggggccactgagttactaggtctaggcggcttgctgtacaaggcgccatccccaccagaggtcgatcatggtccagaggggacccttgcttgggacgccggcgaccaaaccttggaaccaggacccggcggacagaccccagaagtcgtgcccccggatccaggcgcaggcgccaatagctgttctcctgaaggattgttggagcctctggcgcccgattccccaatcactttgcaatccccccatatagaagaagaggagaccacttccatagcaacagcccgccggggttcaccaggacaggaggaggaattgcctcaggggcagccgcaaagccccaacgcaccgcccagcccatctgtcggagagaccctcggagacgggataaattcatctcagacaaagccaggaggctcttccccccctgcccatccatcactgcctggtgacgggctcaccgcgaaggcctcagagaagccccccgagcggaaacgctctgagcgcgtgagacgggccgagcccccaaaacccgaggtcgtcgacagtaccgaaagcatcccggtgtccgacgaagactccgatgccatggtggatgatcccaacgatgaggacttcgtgccatttcgccctaggcggtccccccgcatgtctctgcggagtagcgtgtcccagagggctggacgctcggccgtgggcacaaagatgacctgcgctcattgcaggacacctcttcagaagggccaaaccgcctatcagcggaaaggtctgccgcagctgttctgcagttcttcctgtctcaccacgtttagcaagaagcccagtgggaagaaaacttgtaccttttgtaaaaaggaaatctggaacacgaaggatagtgtagttgcacaaacagggagtggtggaagcttccatgaattctgtaccagcgtgtgcctgagtctgtacgaagcccagcagcagcgaccaatcccccagtcaggtgacccagccgacgcgacgaggtgcagcatctgtcagaaaacaggagaagtactccacgaagtgtccaacggtagcgttgtgcaccgcctgtgttctgacagctgcttctctaagttcagggcaaacaaaggactgaagacgaactgctgcgaccagtgcggggcgtacatctacacaaagacaggatctcccggtccagagctgcttttccacgaaggccagcagaagaggttctgcaatactacctgtctgggcgcctataaaaaggtcgggccacgagaatag

SEQ ID NO: 67113 - DNA, 1494 bp, Artificial Sequence
  derived and/or modified sequence
atggaccccagcgacttccccagccccttcgaccccctgaccctgccagagaagccactcgccggtgacctgcccgttgacatggaattcggcgaagacctattggagtctcaaaccgcccccacaagaggatgggcccccccagggccctccccgtcttccggcgctctggacctgctcgatacaccagccgggctcgagaaggacccgggcgttctggacggcgccactgaactccttggactggggggcttgctctataaagccccttccccacctgaagtcgaccacggaccagaaggcacactggcatgggacgctggagatcagaccctggaacccggccctggtggccaaacccccgaagttgtgccgcccgaccccggagctggagcaaattcctgtagcccagaaggcctgctcgaacctctagctccagatagtccgatcactctacagagcccgcacattgaggaggaggaaaccacaagcattgcaaccgccagacggggcagccctggtcaggaagaagaacttcctcagggacagcctcagagccccaatgcccctcccagtccaagcgtgggcgagactttgggcgacggtattaattcctctcagactaaacctgggggctcgagtccccccgcgcatccatcgcttccaggcgacggattgacagctaaggctagtgaaaaaccgcctgagcgggtgcagaagcggtctgagcgggtgagaagagcggagcctcctaaaccagaggtggtggacagcacagagtccattcccgtctccgatgaggatagcgatgccatggttgacgaccctaatgacgaggactttgttcctttccggccaaggcgcagcccgcgcatgtcactccggtcgagcgtgtcccaacgagccggccggtccgcagtgggcacaaagatgacgtgcgcccactgtcgtacccctctccagaagggacagaccgcctaccagaggaaaggtctccctcagctgttctgcagcagttcatgtctgactaccttctcgaagaaaccttcaggaaagaaaacttgtacattttgcaagaaagaaatatggaacacgaaagattcagtggtggctcagaccggaagcggtggcagctttcacgaattttgcaccagcgtgtgtctctctctgtacgaggcacagcagcaaaggcctattcctcaatccggggatcctgctgacgccacccgatgctctatctgccagaaaaccggcgaggtgctgcatgaggtatctaatggatcagtcgttcaccgactttgttccgatagctgcttttctaaatttcgagcaaacaagggccttaagactaattgctgcgatcagtgcggagcttatatctatacaaaaacagggtccccgggtccagagctgttgtttcacgaggggcagcagaaacgattttgtaacaccacctgtcttggcgcttacaaaaaggtggggcctagggagtag

SEQ ID NO: 67114 - DNA, 1050 bp, Artificial Sequence
  derived and/or modified sequence
atggatccatctgattttcccagcccctttgacccgctgacactgccggagaagcccctggccggtgacctgcccgtggacatggagtttggcgaagatttgctggaatcccagacggctccaactcggggatgggctccacccggtccgagtccttcctctggcgcattagacttgctggacacccctgccggacttgagaaggatccaggcgtgctggacggagctacagagcttctaggactgggcggactgctctataaggcaccttcaccacctgaggtggatcacggcccagaaggcaccctggcttgggatgccggagatcaaacacttgagcccggacccggtggacagacacccgaagtggtcccgccagaccccggagcaggggctaatagctgctccccagagggactcctggagccgttggccccagattcacctattacactgcagagtccccacatcgaggaagaagaaactacatccatcgctaccgctcgccgtggcagccccggtcaggaagaggagcttccccaggggcagccacaatcacctaatgcaccgccaagccctagtgtgggcgaaacactgggagacggcatcaatagtagccaaacaaaacccggtggctcgtcgccccctgcacacccaagccttcctggagatggcctgaccgccaaggctagtgagaagccgccagagcgcgtacagaagagatctgagagagtccgccgtgccgagccgcctaagcctgaggtcgttgatagtacagagagtcgccgttctggcacgcccaggacaagattgtggcgacggcttgtcctcgaggctccttcaatgtcttctgcacatccatcggtgtcaccgtgcatgaggccaagctccagcgctcgttctcctagcctggggatcccccctaccctactagccgcagcgtacgccagacgccttgagcggtcctgtacacgctctgctatggcagcgtggtacaccgggtccgcagccattttggcttcccctaactcaggacccactagagactag

SEQ ID NO: 67115 - DNA, 1488 bp, Artificial Sequence
  derived and/or modified sequence
atggatccttcagatttcccaagcccattcgatccccttaccctccccgaaaaacccctcgccggtgacctgcctgtggacatggaattcggagaggatctgctggaaagtcaaactgctcctacccgcggatgggcaccgcctggaccctccccaagttctggtgcattggacctgctggatacacctgcaggattggagaaggatccgggtgtcctcgatggggcaaccgagttactgggtctcggcggacttttatacaaagcccctagccccccagaggtggatcacggtcctgaagggacgctggcttgggatgcgggtgatcagacactggagccaggcccagggggtcagacccctgaggttgtacccccagacccaggagcaggtgccaattcatgctctcccgagggactgttagagcctctggcgcctgactcccctatcaccctgcagtcaccccacatcgaggaggaggagaccacttccatcgccactgcccgtagaggcagcccgggacaagaggaggaactcccccagggtcagccccaatctccaaatgcacctccttcgcccagcgtgggagagactctgggagacggcatcaactcatcgcagactaaacccggaggctcttctccacctgcccacccctcactgccaggggacgggctaacagccaaagcgtcagagaagccccctgagaggaagcgtagcgaacgggtgcgaagagccgaaccacccaaaccagaagtggttgactccactgaatcaatcccagtgtctgatgaagacagcgacgcgatggtggatgacccgaacgatgaggacttcgtgccttttaggcccagacggagtccacggatgagcctaaggagctccgtgtcacagcgagcgggaaggagtgcagtgggtaccaaaatgacatgcgctcactgtcggacgcctctccagaaaggacaaaccgcctaccagaggaaggggcttcctcagctcttctgttccagcagttgtctgactacctttagtaaaaaacctagtggtaaaaagacctgtaccttctgtaagaaggagatctggaataccaaggattccgtggttgcccagaccgggtccggtggatcgtttcatgagttttgtacatcagtctgtctcagcctctacgaagcccaacagcagcgaccaattccccaatccggcgatccagccgatgcgacccgttgctctatctgccagaagaccggagaggtgctgcatgaggtgtccaacggttctgtggtccacaggctatgcagtgactcttgcttctctaaatttagggccaataaaggccttaagactaactgctgtgaccagtgtggtgcctatatctataccaagaccgggtcccctggacccgagctactgtttcacgaaggacagcagaaacgattttgcaacacaacatgcctcggggcttataaaaaggtgggtcccagggaatag

SEQ ID NO: 67116 - DNA, 1494 bp, Artificial Sequence
  derived and/or modified sequence
atggacccctccgactttccctctccatttgatcctctgacactgcccgaaaagccgctggctggtgatctgccggtggacatggaatttggggaagaccttctggagagccagactgctcccactcgaggttgggctcccccaggaccttccccttcaagtggggctttggacctgcttgatacgcctgcaggactggagaaggaccctggcgtgttagacggggcaactgaactgcttggattaggcggactcctatacaaggccccaagtccccctgaggtggaccacggccctgagggcaccctggcgtgggatgccggagatcaaactctagaacctggcccaggagggcagacgcctgaagtcgtgccacccgacccaggcgctggcgctaactcctgctcacctgagggactgctggagcctctggctcctgactcacctataacgctgcaaagcccacacatagaggaagaggagaccaccagcatagccacagcgaggcgaggatctcctggccaggaggaggagctaccccaggggcagccacaatctcccaacgctccaccctcgccttctgtgggggaaacgttgggcgacggaataaattcttcccagaccaaacccggtggctcatcaccacccgcacaccccagtctaccaggggatggcttgaccgcaaaggcatctgaaaaaccccctgaacgggtgcagaagaggtcggagagagtgcgcagggctgagccaccaaagccagaagtggtggacagcacagagtcaatcccggtgtccgacgaagattcagacgctatggtcgacgatcctaacgatgaggacttcgtaccgtttaggcctaggagaagcccccgaatgtcgctccgctctagcgtgtcccagcgggctgggcgatccgccgtgggcaccaaaatgacctgcgcgcattgtaggacacctctacagaaaggtcagacagcgtaccagcgtaaggggttgcctcagctcttctgttcatcttcctgcctgactacattctctaaaaagcccagtggtaagaaaacctgtacattctgcaagaaggaaatctggaacacgaaggatagcgttgtggcccaaaccgggagcggaggctcattccacgaattctgtacctccgtatgcctgtctttatacgaggcacagcaacagcgcccaatcccgcaaagtggagacccagcagacgcaacacgctgctcgatctgccagaagactggagaggttctgcacgaagtgtcgaacgggagtgtggttcaccgcctgtgctctgattcttgttttagcaaattccgcgctaataaaggtttgaaaaccaactgttgcgaccagtgcggtgcctacatttacacaaagactgggagccccggacccgagttgctcttccacgagggacagcagaaacggttttgcaacactacatgcctgggggcatacaagaaggtaggccctagggagtag

SEQ ID NO: 67117 - DNA, 1511 bp, Artificial Sequence
  derived and/or modified sequence
gagtgggctccaggaggtagggcgagcagggtgtgacgggggccagactcttgagccagtacatatccagccatactcatggaccccagtgatttccccagtccatttgacccattgaccctgccagagaagcccctggctggagacctaccagtagacatggaatttggagaggatctactggaatcccagactgccccaactcgaggatgggccccccctggcccttctccatcctcgggagccctggacctgcttgatacccctgctggcctggaaaaagaccctggagtcctggatggagccactgagttgctggggctgggggggctgctctataaagccccctctcccccggaggtggaccacggtcctgagggaaccctggcatgggatgcaggagatcagaccctagagcctggaccagggggccagacccctgaggtggtaccacctgatccaggggctggggcaaattcctgttcacctgaggggctactagagcctttggctccagattctccaataacactgcagtccccacatattgaagaggaggagaccacctccatagctactgcaagaaggggctcccctgggcaggaggaggagcttccccaagggcagccacagagcccaaatgccccgcctagcccttcagtgggagagactctgggggatggaatcaacagttctcagaccaaacctgggggctctagcccccctgcacatccttccttgccaggagatggcctgactgcgaaggcgagtgagaagccgcctgaacgggtacagaagagaagcgagcgcgttaggagagcagaacctccaaaacctgaggttgtagattccactgagagcaggagatctggaacaccaaggactcggttgtggcgcagactggttctggaggctccttccatgagttctgcacatccgtctgtctctccctgtatgaggcccagcagcagcgcccgatcccccagtctggggatcccgccgacgctactcgctgcagcatatgccagaagactggagaggtcctgcacgaggtcagcaatggcagcgtggtacaccggctctgcagcgattcttgcttctccaaattccgggccaacaagggactgaaaaccaactgttgtgaccagtgtggggcttacatctacaccaagaccgggagtcctggccctgagctcctcttccacgagggccaacaaaagcggttctgcaacacaacctgcttgggggcgtacaagaaggtggggccgagggagtagtgcattagagggctgtggaagggggtgtggttcttgggttataaataaaggtggctgatgggtcaagggctgggagaaataaaacaaataaagggggtttcaattgtatccgttatgttttatttttgaagctggctggtggatacacaggtctttgttacatcatcatctatactttttttgtatgcctgaaatatttcatgtttaaaacatttaaaaaataaaagtgaaggg

SEQ ID NO: 67118 - DNA, 1841 bp, Artificial Sequence
  derived and/or modified sequence
gggaaccatttgaatgagaggaggggatcacgggtagagtgggctccaggaggtagggcgagcagggtgtgacgggggccagactcttgagccagtacatatccagccatactcatggaccccagtgatttccccagtccatttgacccattgaccctgccagagaagcccctggctggagacctaccagtagacatggaatttggagaggatctactggaatcccagactgccccaactcgaggatgggccccccctggcccttctccatcctcgggagccctggacctgcttgatacccctgctggcctggaaaaagaccctggagtcctggatggagccactgagttgctggggctgggggggctgctctataaagccccctctcccccggaggtggaccacggtcctgagggaaccctggcatgggatgcaggagatcagaccctagagcctggaccagggggccagacccctgaggtggtaccacctgatccaggggctggggcaaattcctgttcacctgaggggctactagagcctttggctccagattctccaataacactgcagtccccacatattgaagaggaggagaccacctccatagctactgcaagaaggggctcccctgggcaggaggaggagcttccccaagggcagccacagagcccaaatgccccgcctagcccttcagtgggagagactctgggggatggaatcaacagttctcagaccaaacctgggggctctagcccccctgcacatccttccttgccaggagatggcctgactgcgaaggcgagtgagaagccgcctgaacggaagagaagcgagcgcgttaggagagcagaacctccaaaacctgaggttgtagattccactgagagcattccagtgtcagatgaggattctgatgccatggtagatgaccccaatgatgaggactttgtgccattccggccccggcgctctcctcgcatgtccctacgctcaagtgtgtcacaaagggccgggcgctctgcagtgggcaccaagatgacttgtgcacattgccggacaccactgcagaaggggcagactgcctatcagcgcaaggggctgcctcagctcttctgctcgtcatcctgcctcaccactttctccaagaagccctcgggcaaaaagacctgtaccttctgcaagaaggagatctggaacaccaaggactcggttgtggcgcagactggttctggaggctccttccatgagttctgcacatccgtctgtctctccctgtatgaggcccagcagcagcgcccgatcccccagtctggggatcccgccgacgctactcgctgcagcatatgccagaagactggagaggtcctgcacgaggtcagcaatggcagcgtggtacaccggctctgcagcgattcttgcttctccaaattccgggccaacaagggactgaaaaccaactgttgtgaccagtgtggggcttacatctacaccaagaccgggagtcctggccctgagctcctcttccacgagggccaacaaaagcggttctgcaacacaacctgcttgggggcgtacaagaaggtggggccgagggagtagtgcattagagggctgtggaagggggtgtggttcttgggttataaataaaggtggctgatgggtcaagggctgggagaaataaaacaaataaagggggtttcaattgtatccgttatgttttatttttgaagctggctggtggatacacaggtctttgttacatcatcatctatactttttttgtatgcctgaaatatttcatgtttaaaacatttaaaaaataaaagtgaagggacaaa

SEQ ID NO: 67119 - DNA, 1867 bp, Artificial Sequence
  derived and/or modified sequence
aaaggggccgcgacccctgtcccggctgctagggagggaggtagagaaggagcgcggggccgtcgctgtctgcagttctaggcttgtagcctttgcactaaccctgccgcagtacatatccagccatactcatggaccccagtgatttccccagtccatttgacccattgaccctgccagagaagcccctggctggagacctaccagtagacatggaatttggagaggatctactggaatcccagactgccccaactcgaggatgggccccccctggcccttctccatcctcgggagccctggacctgcttgatacccctgctggcctggaaaaagaccctggagtcctggatggagccactgagttgctggggctgggggggctgctctataaagccccctctcccccggaggtggaccacggtcctgagggaaccctggcatgggatgcaggagatcagaccctagagcctggaccagggggccagacccctgaggtggtaccacctgatccaggggctggggcaaattcctgttcacctgaggggctactagagcctttggctccagattctccaataacactgcagtccccacatattgaagaggaggagaccacctccatagctactgcaagaaggggctcccctgggcaggaggaggagcttccccaagggcagccacagagcccaaatgccccgcctagcccttcagtgggagagactctgggggatggaatcaacagttctcagaccaaacctgggggctctagcccccctgcacatccttccttgccaggagatggcctgactgcgaaggcgagtgagaagccgcctgaacgggtacagaagagaagcgagcgcgttaggagagcagaacctccaaaacctgaggttgtagattccactgagagcattccagtgtcagatgaggattctgatgccatggtagatgaccccaatgatgaggactttgtgccattccggccccggcgctctcctcgcatgtccctacgctcaagtgtgtcacaaagggccgggcgctctgcagtgggcaccaagatgacttgtgcacattgccggacaccactgcagaaggggcagactgcctatcagcgcaaggggctgcctcagctcttctgctcgtcatcctgcctcaccactttctccaagaagccctcgggcaaaaagacctgtaccttctgcaagaaggagatctggaacaccaaggactcggttgtggcgcagactggttctggaggctccttccatgagttctgcacatccgtctgtctctccctgtatgaggcccagcagcagcgcccgatcccccagtctggggatcccgccgacgctactcgctgcagcatatgccagaagactggagaggtcctgcacgaggtcagcaatggcagcgtggtacaccggctctgcagcgattcttgcttctccaaattccgggccaacaagggactgaaaaccaactgttgtgaccagtgtggggcttacatctacaccaagaccgggagtcctggccctgagctcctcttccacgagggccaacaaaagcggttctgcaacacaacctgcttgggggcgtacaagaaggtggggccgagggagtagtgcattagagggctgtggaagggggtgtggttcttgggttataaataaaggtggctgatgggtcaagggctgggagaaataaaacaaataaagggggtttcaattgtatccgttatgttttatttttgaagctggctggtggatacacaggtctttgttacatcatcatctatactttttttgtatgcctgaaatatttcatgtttaaaacatttaaaaaataaaagtgaagggacaaatcc

SEQ ID NO: 67120 - DNA, 539 bp, Artificial Sequence
  derived and/or modified sequence
accgcccccaggggccgagggctgccccttgtcccccttccagttctgcccgcgttttcctccttaaggaggaaccccctcccctaagagagcgaccctctctggcagtcggagcgggaggactgcacagagggggtcgctccctcccctcggcccagtccccagctccggaggcaggatggagggtgtgcgtcccccagggcgacagagctctaggagagcggctcctgaggaccctgtccttgggtccgagcgctggcagaggacccaaagccaccgagtgggggtcaccgcctgcgtggcggcctgggcaggtcgggcggcgagcgccggggaggcggagggaaatccacagcagtgatacatgtgacgtccacactgacagtgccctcctgtgggcatggctcaggttgtgcgcagttcctggcacactggctgtaactccgcccctttctctccctctcagtaaagcaagattacgcggtgacatgcctcacagctgatcacgacacacggggatggagagcaagagttatgga

SEQ ID NO: 67121 - protein, 298 aa, Artificial Sequence
  derived and/or modified sequence
MSAKPEVSLVREASRQIVAGGSAGLVEICLMHPLDVVKTRFQIQRCATDPNSYKSLVDSFRMIFQMEGLFGFYKGILPPILAETPKRAVKFFTFEQYKKLLGYVSLSPALTFAIAGLGSGLTEAIVVNPFEVVKVGLQANRNTFAEQPSTVGYARQIIKKEGWGLQGLNKGLTATLGRHGVFNMVYFGFYYNVKNMIPVNKDPILEFWRKFGIGLLSGTIASVINIPFDVAKSRIQGPQPVPGEIKYRTCFKTMATVYQEEGILALYKGLLPKIMRLGPGGAVMLLVYEYTYSWLQEN

SEQ ID NO: 67122 - DNA, 897 bp, Artificial Sequence
  derived and/or modified sequence
atgagtgcaaagccagaagtgagtctggttagagaggccagccggcagatcgtcgccggtggcagcgccggccttgttgagatctgcctgatgcatccactagacgtcgtcaagactagattccaaatacagcgatgcgcgacagacccaaactcctacaagtcgttggttgattcatttagaatgatatttcagatggagggtctgttcggcttttacaagggaattctgccacctattctcgccgaaaccccaaagagagccgtaaagtttttcacatttgagcagtacaagaagctgcttggctacgtctccctgtcacctgctctgacttttgctattgccggcctcggctctggtctgactgaagcgattgtcgtcaaccccttcgaggtggttaaagtgggcttacaagccaatagaaacacctttgccgaacaaccatccactgtcggctacgcccggcaaatcatcaagaaagaaggctggggcctccagggcctcaacaagggactcacggcgacccttgggcgccacggcgtcttcaacatggtgtattttggcttttactataacgtcaagaatatgatcccagtgaacaaagacccaattctagaattctggcggaagtttggaattgggctcctttcaggaacaatcgccagtgtaatcaatatcccttttgacgtcgcgaagagccggatccagggacctcaacccgtacctggagaaattaaatatagaacctgcttcaaaacgatggctaccgtctaccaggaagaggggattttagccctgtataagggactgttgccgaagataatgcggctgggaccaggaggggcagtgatgctgctggtttacgaatacacgtatagttggctgcaggagaactag

SEQ ID NO: 67123 - DNA, 897 bp, Artificial Sequence
  derived and/or modified sequence
atgtctgccaagccagaggtgtccctggtgcgggaggccagccggcagatcgtggccggcggcagcgctggcctggtggagatctgcctgatgcaccccctggatgtggtgaagacccgcttccagatccagagatgtgccacagaccccaacagctacaagagcctggtggacagcttcaggatgatcttccagatggagggcctgtttggcttctacaagggcatcctgccccccatcctggccgagacccccaagagagctgtgaagttcttcacctttgagcagtacaagaagctgctgggctacgtgtccctgagccctgccctgacctttgccatcgccggcctgggcagcggcctgacagaggccatcgtggtgaacccctttgaggtggtgaaggtgggcctgcaggccaacagaaacacctttgctgagcagcccagcacagtgggctacgcccggcagatcatcaagaaggagggctggggcctgcagggcctgaacaagggcctgacagccaccctgggcagacatggagtcttcaacatggtgtacttcggcttctactacaacgtgaagaacatgatccctgtgaacaaggaccccatcctggagttctggaggaagtttggaattggcctgctgagcggcaccatcgccagcgtcatcaacatcccctttgatgtggccaagagccgcatccagggcccccagcctgtgcctggagagatcaagtaccgcacctgcttcaagaccatggccaccgtgtaccaggaggagggcatcctggccctgtacaagggcctgctgcccaagatcatgaggctgggccctggaggagctgtgatgctgctggtgtatgagtacacctacagctggctgcaggagaactag

SEQ ID NO: 67124 - DNA, 897 bp, Artificial Sequence
  derived and/or modified sequence
atgagcgccaagcccgaggtgagcctggtgcgggaggccagccggcagattgttgctggcgggagcgcagggctagtggaaatttgccttatgcaccccttagacgtcgtgaagaccagattccaaatccagcggtgtgctacagaccccaattcttacaagagcctggtagactccttccgaatgatcttccagatggagggtctgttcgggttctacaagggcatcctgcctcctattctcgccgagactccgaaacgagcagtgaagtttttcacttttgagcagtacaagaaattattggggtacgtgtctctatcccccgccctgacttttgctattgccggcctggggtctgggctgacagaggcaatagttgtgaatccgtttgaggtggttaaagtcgggttgcaggcgaatcggaacacctttgctgagcagccttcaacagtgggctacgctcggcagataatcaaaaaggagggctgggggctccaggggctgaataaggggcttaccgctactctgggcaggcacggcgtgtttaatatggtgtatttcgggttctattataacgtaaagaatatgattcctgtcaacaaagacccaatcctggagttttggcggaaattcggaatcggtctgctgtcaggaaccatcgctagtgtcattaacatcccgtttgacgtggcgaaatcaagaatccaggggcctcaacccgtgccaggcgagattaaatatcggacctgttttaaaaccatggccaccgtctaccaggaagaagggattctggcactgtacaaaggtctcctccccaaaattatgcgcctcggccccggtggcgcagtgatgttactagtttatgagtacacatacagttggctgcaggaaaattag

SEQ ID NO: 67125 - DNA, 897 bp, Artificial Sequence
  derived and/or modified sequence
atgtcagcaaaacctgaagtgtctttggtgcgggaggcgagccgccaaatcgtcgcaggcggatcagcgggtcttgttgaaatatgccttatgcatcctcttgacgtggtgaagacgcggtttcagattcagaggtgcgccaccgaccccaactcctataaatcactagtcgacagtttccgcatgatattccagatggaggggctgtttggattttataaaggcattctacctcccattttggcagaaacccccaagcgcgctgtcaagttctttaccttcgagcagtataaaaaactcctgggctacgtttcactgtctccggctctcacgtttgctatcgccggactgggaagcgggctgacagaagcgatcgtggtcaatccttttgaggtcgtgaaggtcggccttcaggctaatagaaatacctttgccgagcagccgtcaacagtaggatacgccaggcagatcatcaaaaaagaaggctggggcctccaaggactgaacaagggtttgacagccacactgggcagacacggggtctttaacatggtctactttggattttattacaatgtaaaaaatatgattccagttaataaggaccctatactggagttctggcgtaaattcggaatcggattgctttccgggaccatcgcctctgtaatcaatattcctttcgacgtagctaagtcccgaatccagggccctcagcccgttcccggagagattaagtacagaacttgctttaaaacaatggcaacagtttaccaagaggaaggcatcctggccctctacaaaggcttgctgcccaagatcatgcgtttaggacccggaggagccgtcatgctgttggtatacgagtacacttattcatggctgcaggagaactag

SEQ ID NO: 67126 - DNA, 1023 bp, Artificial Sequence
  derived and/or modified sequence
atcagtaggctgtgcaggctgcgagctcgttgacgcatctcagcccactcccttgtcctcccgcctggcgaagatgtccgccaagcctgaagtcagcttagtgcgcgaggcttctcggcagatcgtggccggtggttctgcaggtcttgtagaaatttgcctgatgcaccccctagatgtggtgaaaaccaggtttcagattcagagatgtgcaaccgatccaaacagttataaaagcttggtagacagctttcgaatgattttccaaatggaagggttatttggtttttacaagggaattctgccacctatcttggctgaaaccccaaaaagagcagtgaagtttttcacctttgagcagtacaagaaattgctgggatatgtgtcactgtcaccagcattgacattcgccattgctggattgggatctggactaacagaagccattgtagttaacccttttgaggtagtaaaagttggcttgcaagcaaatcggaacacatttgcagagcaaccatccactgtgggttatgcaagacaaatcattaagaaggaaggctggggactccagggcctcaacaaaggattaactgcaactttgggacgacatggagttttcaacatggtttattttggcttctactacaatgtcaaaaacatgattcctgtcaataaggatccaatcttggagttttggagaaaatttgggattggtcttctctcggggacaatagcctcagtcattaacatcccttttgatgttgccaaaagtaggattcaagggcctcaaccagttcctggagagatcaagtacagaacctgttttaaaacaatggcaacagtctatcaggaagaagggattttagctttgtacaaaggcctgcttcccaagattatgagacttggaccaggtggtgcagtgatgctgctggtttatgaatacacctattcatggcttcaagagaactgactgggaactccagatgtcaatggaagttttacaagatcaaaggaagactatgg

SEQ ID NO: 67127 - DNA, 897 bp, Artificial Sequence
  derived and/or modified sequence
atgagcgccaagcccgaggtgagcctggtgagagaggccagcagacagatcgtggccggcggcagcgccggcctggtggagatctgcctgatgcaccccctggacgtggtgaagaccagattccagatccagagatgcgccaccgaccccaacagctacaagagcctggtggacagcttcagaatgatcttccagatggagggcctgttcggcttctacaagggcatcctgccccccatcctggccgagacccccaagagagccgtgaagttcttcaccttcgagcagtacaagaagctgctgggctacgtgagcctgagccccgccctgaccttcgccatcgccggcctgggcagcggcctgaccgaggccatcgtggtgaaccccttcgaggtggtgaaggtgggcctgcaggccaacagaaacaccttcgccgagcagcccagcaccgtgggctacgccagacagatcatcaagaaggagggctggggcctgcagggcctgaacaagggcctgaccgccaccctgggcagacacggcgtgttcaacatggtgtacttcggcttctactacaacgtgaagaacatgatccccgtgaacaaggaccccatcctggagttctggagaaagttcggcatcggcctgctgagcggcaccatcgccagcgtgatcaacatccccttcgacgtggccaagagcagaatccagggcccccagcccgtgcccggcgagatcaagtacagaacctgcttcaagaccatggccaccgtgtaccaggaggagggcatcctggccctgtacaagggcctgctgcccaagatcatgagactgggccccggcggcgccgtgatgctgctggtgtacgagtacacctacagctggctgcaggagaactag

SEQ ID NO: 67128 - protein, 387 aa, Artificial Sequence
  derived and/or modified sequence
MREPLEAFKLADLDFRKSSLASGWRMASGAFTMDQFPESVTENFEYDDLAEACYIGDIVVFGTVFLSIFYSVIFAIGLVGNLLVVFALTNSKKPKSVTDIYLLNLALSDLLFVATLPFWTHYLINEKGLHNAMCKFTTAFFFIGFFGSIFFITVISIDRYLAIVLAANSMNNRTVQHGVTISLGVWAAAILVAAPQFMFTKQKENECLGDYPEVLQEIWPVLRNVETNFLGFLLPLLIMSYCYFRIIQTLFSCKNHKKAKAIKLILLVVIVFFLFWTPYNVMIFLETLKLYDFFPSCDMRKDLRLALSVTETVAFSHCCLNPLIYAFAGEKFRRYLYHLYGKCLAVLCGRSVHVDFSSSESQRSRHGSVLSSNFTYHTSDGDALLLL

SEQ ID NO: 67129 - protein, 355 aa, Artificial Sequence
  derived and/or modified sequence
MDQFPESVTENFEYDDLAEACYIGDIVVFGTVFLSIFYSVIFAIGLVGNLLVVFALTNSKKPKSVTDIYLLNLALSDLLFVATLPFWTHYLINEKGLHNAMCKFTTAFFFIGFFGSIFFITVISIDRYLAIVLAANSMNNRTVQHGVTISLGVWAAAILVAAPQFMFTKQKENECLGDYPEVLQEIWPVLRNVETNFLGFLLPLLIMSYCYFRIIQTLFSCKNHKKAKAIKLILLVVIVFFLFWTPYNVMIFLETLKLYDFFPSCDMRKDLRLALSVTETVAFSHCCLNPLIYAFAGEKFRRYLYHLYGKCLAVLCGRSVHVDFSSSESQRSRHGSVLSSNFTYHTSDGDALLLL

SEQ ID NO: 67130 - protein, 166 aa, Artificial Sequence
  derived and/or modified sequence
MDQFPESVTENFEYDDLAEACYIGDIVVFGTVFLSIFYSVIFAIGLVGNLLVVFALTNSKKPKSVTDIYLLNLALSDLLFVATLPFWTHYLINEKGLHNAMCKFTTAFFFIGFFGSIFFITVISIDRYLAIVLAANSMNNRTVQHGVTISLGVWAAAILVAAPQFM

SEQ ID NO: 67131 - DNA, 1164 bp, Artificial Sequence
  derived and/or modified sequence
atgcgggaacccctggaggcattcaaactggccgatctggactttaggaaatcttctctggcctctggatggaggatggcaagcggtgccttcacaatggatcagttccccgagtctgtcactgagaactttgaatacgacgatctggccgaagcgtgctacatcggagacatcgtggtgtttggcacagtcttcctttcaatcttttattccgtgatattcgccatcggcctggtgggcaacctgctggtggtgtttgcattaactaactctaaaaagccaaagtctgttacagatatataccttcttaatttggccctgtctgaccttctcttcgttgccacgttgccattctggactcattatcttatcaacgagaagggcctgcataacgctatgtgcaagtttaccaccgcatttttttttatcggttttttcgggagtattttcttcataaccgtcatctcgatcgataggtatttagcgatcgtgctggcagccaattcaatgaataatcgcactgttcaacacggcgtgaccatttcgctgggcgtatgggcagccgccattttagtagccgcaccacagtttatgtttactaagcagaaagaaaacgagtgtctaggtgattatcccgaggtgctgcaggagatctggccggtccttcggaacgtggagactaattttctcggcttcctcctcccacttctaataatgagttattgttatttcaggataattcagacattattctcttgcaaaaaccacaagaaagctaaggcaataaaactgatcctcttggtagtgattgtattttttctgttctggaccccttacaatgttatgatctttctggaaaccttaaaactttatgacttctttccctcatgtgacatgcggaaagatctgcgattggcgctgtcagtcacagaaaccgtagctttttcgcattgctgcctgaacccactaatttacgcattcgccggcgagaagtttaggagatacctgtaccacttgtacggtaaatgcctcgctgtgctatgtgggaggagcgtgcacgtggattttagttcctccgagagccagagatctaggcatggatccgtactgtcctcgaacttcacgtatcatacgtcagatggggacgctctcctgctgttatag

SEQ ID NO: 67132 - DNA, 1092 bp, Artificial Sequence
  derived and/or modified sequence
atggcatccggcaaagcttttactatggaccagttcccagagagtgtgacggagaacttcgagtacgacgacctggcggaagcttgctatataggggacatcgtggtctttggtaccgtctttctgtctattttttactctgtaatattcgcaataggtctcgtggggaatctcctagtcgtctttgcgttgaccaactcgaaaaagccaaaatccgtgacagacatctatctgctaaatctggccctcagtgatttgttgttcgttgccacattgccgttttggactcactatcttatcaatgagaaaggactccacaacgccatgtgtaagttcacaaccgcttttttctttattgggtttttcgggagcatttttttcattacagtaatctcgattgaccgatatctcgcaatcgtgcttgcagccaatagcatgaacaaccgcaccgtgcagcacggagtaacgatctctctgggggtgtgggctgctgcaatactcgttgccgcacctcagtttatgtttactaagcaaaaggagaatgagtgtctgggcgactaccccgaggtactgcaggaaatctggccagtacttcgcaatgttgaaaccaactttcttggcttcctgctgccccttctgataatgtcttactgttattttaggattatacagacactgttctcttgtaaaaaccataaaaaagccaaggctataaaactgatactgttggtggttatcgttttcttcctgttctggactccttacaacgtgatgatcttcctcgaaactctaaaactgtatgactttttcccaagctgtgacatgcgcaaagacctcaggttagctctgtccgtgaccgagactgtggctttctctcactgctgccttaaccccctgatttacgctttcgctggggaaaagtttcggcgctacctctatcacttgtatggtaaatgcctggccgtactgtgcggaagatctgttcacgttgacttctcttcgagcgagtcgcaaaggtcacgccatggctctgtcctgtcctcgaattttacctaccatacttcggacggcgacgctctgctactgctctag

SEQ ID NO: 67133 - DNA, 1164 bp, Artificial Sequence
  derived and/or modified sequence
atgagggagcccctggaggccttcaagctggccgacctggacttcaggaagagcagcctggccagcggctggaggatggccagcggggccttcaccatggaccagtttcctgagagcgtgacagagaactttgaatatgatgacctggccgaggcctgctacatcggggacatcgtggtgtttggaacagtgttcctgagcatcttctacagcgtcatctttgccatcggcctggtgggcaacctgctggtggtgtttgccctgaccaacagcaagaagcccaagtctgtgacagacatctacctgctgaacctggccctgagtgacctgctgtttgtggccaccctgcccttctggacccactacctgatcaatgagaagggcctgcacaatgccatgtgcaagttcaccacagccttcttcttcatcggcttcttcggcagcatcttcttcatcaccgtcatcagcattgaccgctacctggccatcgtgctggccgccaacagcatgaacaacagaacagtgcagcacggcgtgaccatcagcctgggcgtgtgggccgccgccatcctggtggccgccccccagttcatgttcaccaagcagaaggaaaatgaatgtctgggggactacccagaggtgctgcaggagatctggcctgtgctgagaaatgtggagaccaacttcctgggcttcctgctgcccctgctgatcatgagctactgctacttccgcatcatccagaccctcttcagctgcaagaaccacaagaaggccaaggccatcaagctgatcctgctggtggtgattgtgttcttcctgttctggaccccctacaacgtgatgatcttcctggagaccctgaagctgtatgacttcttccccagctgtgacatgaggaaggacctgcggctggccctgtctgtgacagagaccgtggccttcagccactgctgcctgaaccccctcatctatgcctttgctggggagaagttccgccgctacctgtaccacctgtatggcaagtgcctggccgtgctgtgtggccgctctgtgcacgtggacttcagcagcagcgagagccagaggagccgccacggctctgtgctgagcagcaacttcacctaccacaccagtgatggagatgccctgctgctgctgtag

SEQ ID NO: 67134 - DNA, 1092 bp, Artificial Sequence
  derived and/or modified sequence
atggccagcggcaaggccttcaccatggaccagtttcctgagagcgtgacagagaactttgaatatgatgacctggccgaggcctgctacatcggggacatcgtggtgtttggaacagtgttcctgagcatcttctacagcgtcatctttgccatcggcctggtgggcaacctgctggtggtgtttgccctgaccaacagcaagaagcccaagtctgtgacagacatctacctgctgaacctggccctgagtgacctgctgtttgtggccaccctgcccttctggacccactacctgatcaatgagaagggcctgcacaatgccatgtgcaagttcaccacagccttcttcttcatcggcttcttcggcagcatcttcttcatcaccgtcatcagcattgaccgctacctggccatcgtgctggccgccaacagcatgaacaacagaacagtgcagcacggcgtgaccatcagcctgggcgtgtgggccgccgccatcctggtggccgccccccagttcatgttcaccaagcagaaggaaaatgaatgtctgggggactacccagaggtgctgcaggagatctggcctgtgctgagaaatgtggagaccaacttcctgggcttcctgctgcccctgctgatcatgagctactgctacttccgcatcatccagaccctcttcagctgcaagaaccacaagaaggccaaggccatcaagctgatcctgctggtggtgattgtgttcttcctgttctggaccccctacaacgtgatgatcttcctggagaccctgaagctgtatgacttcttccccagctgtgacatgaggaaggacctgcggctggccctgtctgtgacagagaccgtggccttcagccactgctgcctgaaccccctcatctatgcctttgctggggagaagttccgccgctacctgtaccacctgtatggcaagtgcctggccgtgctgtgtggccgctctgtgcacgtggacttcagcagcagcgagagccagaggagccgccacggctctgtgctgagcagcaacttcacctaccacaccagtgatggagatgccctgctgctgctgtag

SEQ ID NO: 67135 - DNA, 1164 bp, Artificial Sequence
  derived and/or modified sequence
atgcgggagcccctggaggccttcaagctggccgacctggacttccggaagtccagtctggcgtccggctggcgaatggccagcggtgccttcactatggaccagttccctgagtccgttactgaaaattttgagtacgacgacctcgcagaagcttgctacatcggagacattgtcgtcttcggaacagtcttcttatctattttctatagtgtcatttttgcaatcgggctggtgggcaatttactcgtggtcttcgcgctcaccaattctaagaagcctaagtctgtgacggacatttacttgctcaacttggccctgtctgaccttttgttcgtggcaactttaccattttggacacactacctgattaacgagaagggacttcacaacgctatgtgtaagtttaccacagcctttttctttattggcttcttcggcagtatatttttcattacagtgatttctatcgatcggtacctcgcaattgttttagcagcaaattctatgaacaaccgaactgtccaacacggagtcacgatttcattgggtgtgtgggccgctgccatccttgtggcagctccccagttcatgttcaccaaacaaaaggagaatgaatgtctcggcgattatcccgaagttttacaggagatttggcctgtattgagaaatgtcgagacaaactttttggggtttctgctgcccttgttgattatgtcctattgttatttcaggattatccagaccctcttttcttgtaaaaatcataagaaggctaaggcgattaagctcattctgcttgtggtgattgtcttcttcctcttctggaccccttataatgtcatgatctttctcgaaaccctcaagctctacgacttctttcctagctgcgatatgcgtaaagacctgcgcctggctctgtctgtgaccgagaccgtggcttttagccattgctgtctgaatccgcttatttacgcgttcgccggcgagaagtttagacgctatctgtatcacctatacggcaaatgccttgccgtcctgtgcgggcggtctgtacacgttgatttcagtagctcagaatcacagcgttctagacacggatcagttttgagctccaattttacatatcatacatcggacggggatgccttactgctcctgtag

SEQ ID NO: 67136 - DNA, 1092 bp, Artificial Sequence
  derived and/or modified sequence
atggccagcggcaaggccttcaccatggaccagttccccgagagcgttaccgaaaattttgagtatgacgatcttgctgaggcttgttacattggagacatagtcgtctttgggaccgttttcctgagtatattttactcagtcatcttcgccatcggactcgtgggtaatctgctcgtggtcttcgctttgacgaactcaaagaaacctaagtccgttacagacatatacctgctgaatctggcgctctccgacctgctattcgtggcgacattaccattctggactcattacctgatcaacgagaagggcctgcataatgctatgtgtaaatttacaaccgccttcttttttatcggcttctttggctccatcttcttcatcactgttatttccattgacagatacttagcaatcgtgctggctgccaactcgatgaacaaccgtaccgtgcagcatggcgttaccatttctctgggagtgtgggccgctgcaattttggtggccgcccctcagttcatgttcacaaagcagaaagaaaatgaatgtcttggagattaccctgaggtattgcaagagatatggcctgttctgcgcaatgtggaaacaaacttcctgggctttcttttacctctcctgataatgtcttattgttacttcagaattattcagaccctgttctcctgtaaaaatcataagaaggctaaggccataaagctcatccttttagtggtgatcgtgtttttcttattttggaccccctataacgtcatgatcttcctggagaccctcaagttgtatgactttttcccctcctgcgacatgcgcaaagacctgagactcgctttatctgtgaccgagactgtggctttcagtcactgttgccttaatcccctaatttacgcgttcgccggggagaaattccgtcgatacctctaccacttatacggaaagtgcctggccgtgctctgtggccggagtgtgcacgtcgactttagctcaagtgagagtcagcgaagtagacatggtagcgtgttaagcagcaacttcacctatcataccagcgatggtgatgccctcttactgttgtag

SEQ ID NO: 67137 - DNA, 1164 bp, Artificial Sequence
  derived and/or modified sequence
atgcgagaaccccttgaggcctttaagctcgccgacctcgactttcggaagagttccctcgcttcgggctggaggatggctagcggtgcatttacaatggaccagtttccagagtctgtgacggagaatttcgagtatgacgaccttgccgaagcgtgctacatcggggacatagtagtcttcggcaccgtttttctgagtattttttatagtgtgatttttgccatcgggctggtcggcaacctactcgtggtgtttgcactgaccaactctaaaaagccaaagtccgtgaccgacatctacttgttgaatttagccctgagcgatctgcttttcgttgccacactcccattttggactcactatctgatcaacgagaaggggttacacaacgcaatgtgtaaatttaccacagccttcttctttattgggtttttcggttctatcttttttatcaccgtaatttcgatcgacagatacctggccatcgtcctcgctgccaactctatgaacaatcgtactgtgcaacatggcgttacgatctctctgggagtgtgggctgctgcgatcctggttgcggctccccagttcatgttcaccaaacaaaaagagaacgagtgtcttggcgactatccggaagtgctgcaggaaatctggcccgttttacggaacgtcgaaacaaactttctaggcttcctgttacctctgttgataatgtcttattgctattttcgtatcatacagacacttttctcgtgtaagaatcataagaaggccaaagccattaagctcatcctcctggtcgtgatagtgtttttcctgttttggacaccatataatgtgatgatctttctagagaccctaaaactatatgacttttttcccagctgtgatatgcgcaaggatttgcggcttgcactgagcgttacagagactgtggccttctcacattgctgcttgaacccactaatatacgcttttgccggtgagaagtttagacgttatctgtatcacttgtacggtaagtgtctcgcggtcctgtgcggtagatctgtgcacgtggacttctctagttctgagagccagcggagccgtcacggctctgtgctttcctccaatttcacctaccacacctcagatggagacgcactgctgctgctctag

SEQ ID NO: 67138 - DNA, 1092 bp, Artificial Sequence
  derived and/or modified sequence
atggcatcaggcaaagcatttacaatggatcagttcccagaaagcgtgaccgagaacttcgaatatgacgacctagctgaggcctgttatattggggacattgtggtgttcggcacagtcttcctgagcatattctactccgtcatcttcgcaatcggcctggtggggaatcttctggtggtgtttgctctcactaacagcaaaaagccaaagagcgtgaccgatatctatctgctcaatttggctctcagtgacctgttgtttgtagctactctgcctttctggactcattacctaatcaacgaaaaaggcctgcacaatgccatgtgtaagtttacaactgctttttttttcataggtttttttggttcaatcttctttataactgtgataagtatagaccgatatctggctatagttctcgctgcgaattcgatgaacaaccggacagtccaacacggggtgaccatttcgctcggggtgtgggcagcagccattctggttgccgctccccagtttatgttcaccaagcagaaagagaatgaatgcttaggggactatcctgaagtgctacaagagatttggccagtgctgagaaacgtcgagacaaacttcttgggtttcttgctacccttattgattatgtcttattgctatttccggatcatccagacgctgttcagttgcaagaaccataagaaggccaaagctatcaagctcatcctgcttgtagtgatagtgtttttcctgttctggacaccctataacgtgatgattttccttgaaactcttaaactttacgatttctttccgtcatgcgatatgaggaaagatctacgcttggcgctgtccgtaaccgagacggtagccttcagccattgttgtctcaatcccctgatctacgcttttgctggagagaagttccggcgatacctgtatcacctttacggcaagtgcctggcagtactgtgtggcaggagcgtgcacgtcgacttcagttcgagcgaatcgcaacgctcccgacacggatccgtgctaagcagtaatttcacatatcacacatccgacggcgacgcgctattgctgttgtag

SEQ ID NO: 67139 - DNA, 3151 bp, Artificial Sequence
  derived and/or modified sequence
ggggcgggccgtgcttaccaggccgtggacttaaaccaggatgagagaacccctggaggcgtttaagttggcagacttggatttcaggaagagctctctggcttctgggtggagaatggccagtggggccttcaccatggatcagttccctgaatcagtgacagaaaactttgagtacgatgatttggctgaggcctgttatattggggacatcgtggtctttgggactgtgttcctgtccatattctactccgtcatctttgccattggcctggtgggaaatttgttggtagtgtttgccctcaccaacagcaagaagcccaagagtgtcaccgacatttacctcctgaacctggccttgtctgatctgctgtttgtagccactttgcccttctggactcactatttgataaatgaaaagggcctccacaatgccatgtgcaaattcactaccgccttcttcttcatcggcttttttggaagcatattcttcatcaccgtcatcagcattgataggtacctggccatcgtcctggccgccaactccatgaacaaccggaccgtgcagcatggcgtcaccatcagcctaggcgtctgggcagcagccattttggtggcagcaccccagttcatgttcacaaagcagaaagaaaatgaatgccttggtgactaccccgaggtcctccaggaaatctggcccgtgctccgcaatgtggaaacaaattttcttggcttcctactccccctgctcattatgagttattgctacttcagaatcatccagacgctgttttcctgcaagaaccacaagaaagccaaagccattaaactgatccttctggtggtcatcgtgtttttcctcttctggacaccctacaacgttatgattttcctggagacgcttaagctctatgacttctttcccagttgtgacatgaggaaggatctgaggctggccctcagtgtgactgagacggttgcatttagccattgttgcctgaatcctctcatctatgcatttgctggggagaagttcagaagatacctttaccacctgtatgggaaatgcctggctgtcctgtgtgggcgctcagtccacgttgatttctcctcatctgaatcacaaaggagcaggcatggaagtgttctgagcagcaattttacttaccacacgagtgatggagatgcattgctccttctctgaagggaatcccaaagccttgtgtctacagagaacctggagttcctgaacctgatgctgactagtgaggaaagatttttgttgttatttcttacaggcacaaaatgatggacccaatgcacacaaaacaaccctagagtgttgttgagaattgtgctcaaaatttgaagaatgaacaaattgaactctttgaatgacaaagagtagacatttctcttactgcaaatgtcatcagaactttttggtttgcagatgacaaaaattcaactcagactagtttagttaaatgagggtggtgaatattgttcatattgtggcacaagcaaaagggtgtctgagccctcaaagtgaggggaaaccagggcctgagccaagctagaattccctctctctgactctcaaatcttttagtcattatagatcccccagactttacatgacacagctttatcaccagagagggactgacacccatgtttctctggccccaagggcaaaattcccagggaagtgctctgataggccaagtttgtatcaggtgcccatccctggaaggtgctgttatccatggggaagggatatataagatggaagcttccagtccaatctcatggagaagcagaaatacatatttccaagaagttggatgggtgggtactattctgattacacaaaacaaatgccacacatcacccttaccatgtgcctgatccagcctctcccctgattacaccagcctcgtcttcattaagccctcttccatcatgtccccaaacctgcaagggctccccactgcctactgcatcgagtcaaaactcaaatgcttggcttctcatacgtccaccatggggtcctaccaatagattccccattgcctcctccttcccaaaggactccacccatcctatcagcctgtctcttccatatgacctcatgcatctccacctgctcccaggccagtaagggaaatagaaaaaccctgcccccaaataagaagggatggattccaaccccaactccagtagcttgggacaaatcaagcttcagtttcctggtctgtagaagagggataaggtacctttcacatagagatcatcctttccagcatgaggaactagccaccaactcttgcaggtctcaacccttttgtctgcctcttagacttctgctttccacacctggcactgctgtgctgtgcccaagttgtggtgctgacaaagcttggaagagcctgcaggtgctgctgcgtggcatagcccagacacagaagaggctggttcttacgatggcacccagtgagcactcccaagtctacagagtgatagccttccgtaacccaactctcctggactgccttgaatatcccctcccagtcaccttgtggcaagcccctgcccatctgggaaaataccccatcattcatgctactgccaacctggggagccagggctatgggagcagcttttttttcccccctagaaacgtttggaacaatctaaaagtttaaagctcgaaaacaattgtaataatgctaaagaaaaagtcatccaatctaaccacatcaatattgtcattcctgtattcacccgtccagaccttgttcacactctcacatgtttagagttgcaatcgtaatgtacagatggttttataatctgatttgttttcctcttaacgttagaccacaaatagtgctcgctttctatgtagtttggtaattatcattttagaagactctaccagactgtgtattcattgaagtcagatgtggtaactgttaaattgctgtgtatctgatagctctttggcagtctatatgtttgtataatgaatgagagaataagtcatgttccttcaagatcatgtaccccaatttacttgccattactcaattgataaacatttaacttgtttccaatgtttagcaaatacatattttatagaacttcc

SEQ ID NO: 67140 - DNA, 3106 bp, Artificial Sequence
  derived and/or modified sequence
aatactcgtctctggtaaagtctgagcaggacagggtggctgactggcagatccagaggttcccttggcagtccacgccaggccttcaccatggatcagttccctgaatcagtgacagaaaactttgagtacgatgatttggctgaggcctgttatattggggacatcgtggtctttgggactgtgttcctgtccatattctactccgtcatctttgccattggcctggtgggaaatttgttggtagtgtttgccctcaccaacagcaagaagcccaagagtgtcaccgacatttacctcctgaacctggccttgtctgatctgctgtttgtagccactttgcccttctggactcactatttgataaatgaaaagggcctccacaatgccatgtgcaaattcactaccgccttcttcttcatcggcttttttggaagcatattcttcatcaccgtcatcagcattgataggtacctggccatcgtcctggccgccaactccatgaacaaccggaccgtgcagcatggcgtcaccatcagcctaggcgtctgggcagcagccattttggtggcagcaccccagttcatgttcacaaagcagaaagaaaatgaatgccttggtgactaccccgaggtcctccaggaaatctggcccgtgctccgcaatgtggaaacaaattttcttggcttcctactccccctgctcattatgagttattgctacttcagaatcatccagacgctgttttcctgcaagaaccacaagaaagccaaagccattaaactgatccttctggtggtcatcgtgtttttcctcttctggacaccctacaacgttatgattttcctggagacgcttaagctctatgacttctttcccagttgtgacatgaggaaggatctgaggctggccctcagtgtgactgagacggttgcatttagccattgttgcctgaatcctctcatctatgcatttgctggggagaagttcagaagatacctttaccacctgtatgggaaatgcctggctgtcctgtgtgggcgctcagtccacgttgatttctcctcatctgaatcacaaaggagcaggcatggaagtgttctgagcagcaattttacttaccacacgagtgatggagatgcattgctccttctctgaagggaatcccaaagccttgtgtctacagagaacctggagttcctgaacctgatgctgactagtgaggaaagatttttgttgttatttcttacaggcacaaaatgatggacccaatgcacacaaaacaaccctagagtgttgttgagaattgtgctcaaaatttgaagaatgaacaaattgaactctttgaatgacaaagagtagacatttctcttactgcaaatgtcatcagaactttttggtttgcagatgacaaaaattcaactcagactagtttagttaaatgagggtggtgaatattgttcatattgtggcacaagcaaaagggtgtctgagccctcaaagtgaggggaaaccagggcctgagccaagctagaattccctctctctgactctcaaatcttttagtcattatagatcccccagactttacatgacacagctttatcaccagagagggactgacacccatgtttctctggccccaagggcaaaattcccagggaagtgctctgataggccaagtttgtatcaggtgcccatccctggaaggtgctgttatccatggggaagggatatataagatggaagcttccagtccaatctcatggagaagcagaaatacatatttccaagaagttggatgggtgggtactattctgattacacaaaacaaatgccacacatcacccttaccatgtgcctgatccagcctctcccctgattacaccagcctcgtcttcattaagccctcttccatcatgtccccaaacctgcaagggctccccactgcctactgcatcgagtcaaaactcaaatgcttggcttctcatacgtccaccatggggtcctaccaatagattccccattgcctcctccttcccaaaggactccacccatcctatcagcctgtctcttccatatgacctcatgcatctccacctgctcccaggccagtaagggaaatagaaaaaccctgcccccaaataagaagggatggattccaaccccaactccagtagcttgggacaaatcaagcttcagtttcctggtctgtagaagagggataaggtacctttcacatagagatcatcctttccagcatgaggaactagccaccaactcttgcaggtctcaacccttttgtctgcctcttagacttctgctttccacacctggcactgctgtgctgtgcccaagttgtggtgctgacaaagcttggaagagcctgcaggtgctgctgcgtggcatagcccagacacagaagaggctggttcttacgatggcacccagtgagcactcccaagtctacagagtgatagccttccgtaacccaactctcctggactgccttgaatatcccctcccagtcaccttgtggcaagcccctgcccatctgggaaaataccccatcattcatgctactgccaacctggggagccagggctatgggagcagcttttttttcccccctagaaacgtttggaacaatctaaaagtttaaagctcgaaaacaattgtaataatgctaaagaaaaagtcatccaatctaaccacatcaatattgtcattcctgtattcacccgtccagaccttgttcacactctcacatgtttagagttgcaatcgtaatgtacagatggttttataatctgatttgttttcctcttaacgttagaccacaaatagtgctcgctttctatgtagtttggtaattatcattttagaagactctaccagactgtgtattcattgaagtcagatgtggtaactgttaaattgctgtgtatctgatagctctttggcagtctatatgtttgtataatgaatgagagaataagtcatgttccttcaagatcatgtaccccaatttacttgccattactcaattgataaacatttaacttgtttccaatgtttagcaaatacatattttatagaacttcca

SEQ ID NO: 67141 - DNA, 559 bp, Artificial Sequence
  derived and/or modified sequence
gcttttgtcctgtggccttctggccaaaggcagggaaaggtggccaaacactgagaccaagaacaaagaaagaaaactgctggtggacttcttccaccatgagcaggccaccaagcccgcagcactgcactgcagcccccagctctgtcctggggttgggggaggtgaggaggggcaaggtggggagcacacagagcacccgctgtcctcggaacaccacagcgactagaggccttcaccatggatcagttccctgaatcagtgacagaaaactttgagtacgatgatttggctgaggcctgttatattggggacatcgtggtctttgggactgtgttcctgtccatattctactccgtcatctttgccattggcctggtgggaaatttgttggtagtgtttgccctcaccaacagcaagaagcccaagagtgtcaccgacatttacctcctgaacctggccttgtctgatctgctgtttgtagccactttgcccttctggactcactatttgataaatgaaaagggcctccacaatgccatgtgcaaattcactaccg

SEQ ID NO: 67142 - DNA, 699 bp, Artificial Sequence
  derived and/or modified sequence
actttgaggagaagagctgtgtgtgccccagtgtggtccagtgagtactctgggctccctctcgtgggcagggaagctgagggccccatgagctctcccagcttcctgaaggctccccattaatgagagctgactgtgctgtgctttgctgactgcagggcctgctccctgccccccacctccaggttggggccttcaccatggatcagttccctgaatcagtgacagaaaactttgagtacgatgatttggctgaggcctgttatattggggacatcgtggtctttgggactgtgttcctgtccatattctactccgtcatctttgccattggcctggtgggaaatttgttggtagtgtttgccctcaccaacagcaagaagcccaagagtgtcaccgacatttacctcctgaacctggccttgtctgatctgctgtttgtagccactttgcccttctggactcactatttgataaatgaaaagggcctccacaatgccatgtgcaaattcactaccgccttcttcttcatcggcttttttggaagcatattcttcatcaccgtcatcagcattgataggtacctggccatcgtcctggccgccaactccatgaacaaccggaccgtgcagcatggcgtcaccatcagcctaggcgtctgggcagcagccattttggtggcagcaccccagttcatgt

SEQ ID NO: 67143 - DNA, 3040 bp, Artificial Sequence
  derived and/or modified sequence
atggcaagtgggaaggccttcaccatggatcagttccctgaatcagtgacagaaaactttgagtacgatgatttggctgaggcctgttatattggggacatcgtggtctttgggactgtgttcctgtccatattctactccgtcatctttgccattggcctggtgggaaatttgttggtagtgtttgccctcaccaacagcaagaagcccaagagtgtcaccgacatttacctcctgaacctggccttgtctgatctgctgtttgtagccactttgcccttctggactcactatttgataaatgaaaagggcctccacaatgccatgtgcaaattcactaccgccttcttcttcatcggcttttttggaagcatattcttcatcaccgtcatcagcattgataggtacctggccatcgtcctggccgccaactccatgaacaaccggaccgtgcagcatggcgtcaccatcagcctaggcgtctgggcagcagccattttggtggcagcaccccagttcatgttcacaaagcagaaagaaaatgaatgccttggtgactaccccgaggtcctccaggaaatctggcccgtgctccgcaatgtggaaacaaattttcttggcttcctactccccctgctcattatgagttattgctacttcagaatcatccagacgctgttttcctgcaagaaccacaagaaagccaaagccattaaactgatccttctggtggtcatcgtgtttttcctcttctggacaccctacaacgttatgattttcctggagacgcttaagctctatgacttctttcccagttgtgacatgaggaaggatctgaggctggccctcagtgtgactgagacggttgcatttagccattgttgcctgaatcctctcatctatgcatttgctggggagaagttcagaagatacctttaccacctgtatgggaaatgcctggctgtcctgtgtgggcgctcagtccacgttgatttctcctcatctgaatcacaaaggagcaggcatggaagtgttctgagcagcaattttacttaccacacgagtgatggagatgcattgctccttctctgaagggaatcccaaagccttgtgtctacagagaacctggagttcctgaacctgatgctgactagtgaggaaagatttttgttgttatttcttacaggcacaaaatgatggacccaatgcacacaaaacaaccctagagtgttgttgagaattgtgctcaaaatttgaagaatgaacaaattgaactctttgaatgacaaagagtagacatttctcttactgcaaatgtcatcagaactttttggtttgcagatgacaaaaattcaactcagactagtttagttaaatgagggtggtgaatattgttcatattgtggcacaagcaaaagggtgtctgagccctcaaagtgaggggaaaccagggcctgagccaagctagaattccctctctctgactctcaaatcttttagtcattatagatcccccagactttacatgacacagctttatcaccagagagggactgacacccatgtttctctggccccaagggcaaaattcccagggaagtgctctgataggccaagtttgtatcaggtgcccatccctggaaggtgctgttatccatggggaagggatatataagatggaagcttccagtccaatctcatggagaagcagaaatacatatttccaagaagttggatgggtgggtactattctgattacacaaaacaaatgccacacatcacccttaccatgtgcctgatccagcctctcccctgattacaccagcctcgtcttcattaagccctcttccatcatgtccccaaacctgcaagggctccccactgcctactgcatcgagtcaaaactcaaatgcttggcttctcatacgtccaccatggggtcctaccaatagattccccattgcctcctccttcccaaaggactccacccatcctatcagcctgtctcttccatatgacctcatgcatctccacctgctcccaggccagtaagggaaatagaaaaaccctgcccccaaataagaagggatggattccaaccccaactccagtagcttgggacaaatcaagcttcagtttcctggtctgtagaagagggataaggtacctttcacatagagatcatcctttccagcatgaggaactagccaccaactcttgcaggtctcaacccttttgtctgcctcttagacttctgctttccacacctggcactgctgtgctgtgcccaagttgtggtgctgacaaagcttggaagagcctgcaggtgctgctgcgtggcatagcccagacacagaagaggctggttcttacgatggcacccagtgagcactcccaagtctacagagtgatagccttccgtaacccaactctcctggactgccttgaatatcccctcccagtcaccttgtggcaagcccctgcccatctgggaaaataccccatcattcatgctactgccaacctggggagccagggctatgggagcagcttttttttcccccctagaaacgtttggaacaatctaaaagtttaaagctcgaaaacaattgtaataatgctaaagaaaaagtcatccaatctaaccacatcaatattgtcattcctgtattcacccgtccagaccttgttcacactctcacatgtttagagttgcaatcgtaatgtacagatggttttataatctgatttgttttcctcttaacgttagaccacaaatagtgctcgctttctatgtagtttggtaattatcattttagaagactctaccagactgtgtattcattgaagtcagatgtggtaactgttaaattgctgtgtatctgatagctctttggcagtctatatgtttgtataatgaatgagagaataagtcatgttccttcaagatcatgtaccccaatttacttgccattactcaattgataaacatttaacttgtttccaatgtttagcaaatacatattttatagaacttcca

SEQ ID NO: 67144 - DNA, 3255 bp, Artificial Sequence
  derived and/or modified sequence
gcttttgtcctgtggccttctggccaaaggcagggaaaggtggccaaacactgagaccaagaacaaagaaagaaaactgctggtggacttcttccaccatgagcaggccaccaagcccgcagcactgcactgcagcccccagctctgtcctggggttgggggaggtgaggaggggcaaggtggggagcacacagagcacccgctgtcctcggaacaccacagcgactagaggccttcaccatggatcagttccctgaatcagtgacagaaaactttgagtacgatgatttggctgaggcctgttatattggggacatcgtggtctttgggactgtgttcctgtccatattctactccgtcatctttgccattggcctggtgggaaatttgttggtagtgtttgccctcaccaacagcaagaagcccaagagtgtcaccgacatttacctcctgaacctggccttgtctgatctgctgtttgtagccactttgcccttctggactcactatttgataaatgaaaagggcctccacaatgccatgtgcaaattcactaccgccttcttcttcatcggcttttttggaagcatattcttcatcaccgtcatcagcattgataggtacctggccatcgtcctggccgccaactccatgaacaaccggaccgtgcagcatggcgtcaccatcagcctaggcgtctgggcagcagccattttggtggcagcaccccagttcatgttcacaaagcagaaagaaaatgaatgccttggtgactaccccgaggtcctccaggaaatctggcccgtgctccgcaatgtggaaacaaattttcttggcttcctactccccctgctcattatgagttattgctacttcagaatcatccagacgctgttttcctgcaagaaccacaagaaagccaaagccattaaactgatccttctggtggtcatcgtgtttttcctcttctggacaccctacaacgttatgattttcctggagacgcttaagctctatgacttctttcccagttgtgacatgaggaaggatctgaggctggccctcagtgtgactgagacggttgcatttagccattgttgcctgaatcctctcatctatgcatttgctggggagaagttcagaagatacctttaccacctgtatgggaaatgcctggctgtcctgtgtgggcgctcagtccacgttgatttctcctcatctgaatcacaaaggagcaggcatggaagtgttctgagcagcaattttacttaccacacgagtgatggagatgcattgctccttctctgaagggaatcccaaagccttgtgtctacagagaacctggagttcctgaacctgatgctgactagtgaggaaagatttttgttgttatttcttacaggcacaaaatgatggacccaatgcacacaaaacaaccctagagtgttgttgagaattgtgctcaaaatttgaagaatgaacaaattgaactctttgaatgacaaagagtagacatttctcttactgcaaatgtcatcagaactttttggtttgcagatgacaaaaattcaactcagactagtttagttaaatgagggtggtgaatattgttcatattgtggcacaagcaaaagggtgtctgagccctcaaagtgaggggaaaccagggcctgagccaagctagaattccctctctctgactctcaaatcttttagtcattatagatcccccagactttacatgacacagctttatcaccagagagggactgacacccatgtttctctggccccaagggcaaaattcccagggaagtgctctgataggccaagtttgtatcaggtgcccatccctggaaggtgctgttatccatggggaagggatatataagatggaagcttccagtccaatctcatggagaagcagaaatacatatttccaagaagttggatgggtgggtactattctgattacacaaaacaaatgccacacatcacccttaccatgtgcctgatccagcctctcccctgattacaccagcctcgtcttcattaagccctcttccatcatgtccccaaacctgcaagggctccccactgcctactgcatcgagtcaaaactcaaatgcttggcttctcatacgtccaccatggggtcctaccaatagattccccattgcctcctccttcccaaaggactccacccatcctatcagcctgtctcttccatatgacctcatgcatctccacctgctcccaggccagtaagggaaatagaaaaaccctgcccccaaataagaagggatggattccaaccccaactccagtagcttgggacaaatcaagcttcagtttcctggtctgtagaagagggataaggtacctttcacatagagatcatcctttccagcatgaggaactagccaccaactcttgcaggtctcaacccttttgtctgcctcttagacttctgctttccacacctggcactgctgtgctgtgcccaagttgtggtgctgacaaagcttggaagagcctgcaggtgctgctgcgtggcatagcccagacacagaagaggctggttcttacgatggcacccagtgagcactcccaagtctacagagtgatagccttccgtaacccaactctcctggactgccttgaatatcccctcccagtcaccttgtggcaagcccctgcccatctgggaaaataccccatcattcatgctactgccaacctggggagccagggctatgggagcagcttttttttcccccctagaaacgtttggaacaatctaaaagtttaaagctcgaaaacaattgtaataatgctaaagaaaaagtcatccaatctaaccacatcaatattgtcattcctgtattcacccgtccagaccttgttcacactctcacatgtttagagttgcaatcgtaatgtacagatggttttataatctgatttgttttcctcttaacgttagaccacaaatagtgctcgctttctatgtagtttggtaattatcattttagaagactctaccagactgtgtattcattgaagtcagatgtggtaactgttaaattgctgtgtatctgatagctctttggcagtctatatgtttgtataatgaatgagagaataagtcatgttccttcaagatcatgtaccccaatttacttgccattactcaattgataaacatttaacttgtttccaatgtttagcaaatacatattttatagaacttcc

SEQ ID NO: 67145 - DNA, 3215 bp, Artificial Sequence
  derived and/or modified sequence
actttgaggagaagagctgtgtgtgccccagtgtggtccagtgagtactctgggctccctctcgtgggcagggaagctgagggccccatgagctctcccagcttcctgaaggctccccattaatgagagctgactgtgctgtgctttgctgactgcagggcctgctccctgccccccacctccaggttggggccttcaccatggatcagttccctgaatcagtgacagaaaactttgagtacgatgatttggctgaggcctgttatattggggacatcgtggtctttgggactgtgttcctgtccatattctactccgtcatctttgccattggcctggtgggaaatttgttggtagtgtttgccctcaccaacagcaagaagcccaagagtgtcaccgacatttacctcctgaacctggccttgtctgatctgctgtttgtagccactttgcccttctggactcactatttgataaatgaaaagggcctccacaatgccatgtgcaaattcactaccgccttcttcttcatcggcttttttggaagcatattcttcatcaccgtcatcagcattgataggtacctggccatcgtcctggccgccaactccatgaacaaccggaccgtgcagcatggcgtcaccatcagcctaggcgtctgggcagcagccattttggtggcagcaccccagttcatgttcacaaagcagaaagaaaatgaatgccttggtgactaccccgaggtcctccaggaaatctggcccgtgctccgcaatgtggaaacaaattttcttggcttcctactccccctgctcattatgagttattgctacttcagaatcatccagacgctgttttcctgcaagaaccacaagaaagccaaagccattaaactgatccttctggtggtcatcgtgtttttcctcttctggacaccctacaacgttatgattttcctggagacgcttaagctctatgacttctttcccagttgtgacatgaggaaggatctgaggctggccctcagtgtgactgagacggttgcatttagccattgttgcctgaatcctctcatctatgcatttgctggggagaagttcagaagatacctttaccacctgtatgggaaatgcctggctgtcctgtgtgggcgctcagtccacgttgatttctcctcatctgaatcacaaaggagcaggcatggaagtgttctgagcagcaattttacttaccacacgagtgatggagatgcattgctccttctctgaagggaatcccaaagccttgtgtctacagagaacctggagttcctgaacctgatgctgactagtgaggaaagatttttgttgttatttcttacaggcacaaaatgatggacccaatgcacacaaaacaaccctagagtgttgttgagaattgtgctcaaaatttgaagaatgaacaaattgaactctttgaatgacaaagagtagacatttctcttactgcaaatgtcatcagaactttttggtttgcagatgacaaaaattcaactcagactagtttagttaaatgagggtggtgaatattgttcatattgtggcacaagcaaaagggtgtctgagccctcaaagtgaggggaaaccagggcctgagccaagctagaattccctctctctgactctcaaatcttttagtcattatagatcccccagactttacatgacacagctttatcaccagagagggactgacacccatgtttctctggccccaagggcaaaattcccagggaagtgctctgataggccaagtttgtatcaggtgcccatccctggaaggtgctgttatccatggggaagggatatataagatggaagcttccagtccaatctcatggagaagcagaaatacatatttccaagaagttggatgggtgggtactattctgattacacaaaacaaatgccacacatcacccttaccatgtgcctgatccagcctctcccctgattacaccagcctcgtcttcattaagccctcttccatcatgtccccaaacctgcaagggctccccactgcctactgcatcgagtcaaaactcaaatgcttggcttctcatacgtccaccatggggtcctaccaatagattccccattgcctcctccttcccaaaggactccacccatcctatcagcctgtctcttccatatgacctcatgcatctccacctgctcccaggccagtaagggaaatagaaaaaccctgcccccaaataagaagggatggattccaaccccaactccagtagcttgggacaaatcaagcttcagtttcctggtctgtagaagagggataaggtacctttcacatagagatcatcctttccagcatgaggaactagccaccaactcttgcaggtctcaacccttttgtctgcctcttagacttctgctttccacacctggcactgctgtgctgtgcccaagttgtggtgctgacaaagcttggaagagcctgcaggtgctgctgcgtggcatagcccagacacagaagaggctggttcttacgatggcacccagtgagcactcccaagtctacagagtgatagccttccgtaacccaactctcctggactgccttgaatatcccctcccagtcaccttgtggcaagcccctgcccatctgggaaaataccccatcattcatgctactgccaacctggggagccagggctatgggagcagcttttttttcccccctagaaacgtttggaacaatctaaaagtttaaagctcgaaaacaattgtaataatgctaaagaaaaagtcatccaatctaaccacatcaatattgtcattcctgtattcacccgtccagaccttgttcacactctcacatgtttagagttgcaatcgtaatgtacagatggttttataatctgatttgttttcctcttaacgttagaccacaaatagtgctcgctttctatgtagtttggtaattatcattttagaagactctaccagactgtgtattcattgaagtcagatgtggtaactgttaaattgctgtgtatctgatagctctttggcagtctatatgtttgtataatgaatgagagaataagtcatgttccttcaagatcatgtaccccaatttacttgccattactcaattgataaacatttaacttgtttccaatgtttagcaaatacatattttatagaacttcc

SEQ ID NO: 67146 - DNA, 1164 bp, Artificial Sequence
  derived and/or modified sequence
atgagagagcccctggaggccttcaagctggccgacctggacttcagaaagagcagcctggccagcggctggagaatggccagcggcgccttcaccatggaccagttccccgagagcgtgaccgagaacttcgagtacgacgacctggccgaggcctgctacatcggcgacatcgtggtgttcggcaccgtgttcctgagcatcttctacagcgtgatcttcgccatcggcctggtgggcaacctgctggtggtgttcgccctgaccaacagcaagaagcccaagagcgtgaccgacatctacctgctgaacctggccctgagcgacctgctgttcgtggccaccctgcccttctggacccactacctgatcaacgagaagggcctgcacaacgccatgtgcaagttcaccaccgccttcttcttcatcggcttcttcggcagcatcttcttcatcaccgtgatcagcatcgacagatacctggccatcgtgctggccgccaacagcatgaacaacagaaccgtgcagcacggcgtgaccatcagcctgggcgtgtgggccgccgccatcctggtggccgccccccagttcatgttcaccaagcagaaggagaacgagtgcctgggcgactaccccgaggtgctgcaggagatctggcccgtgctgagaaacgtggagaccaacttcctgggcttcctgctgcccctgctgatcatgagctactgctacttcagaatcatccagaccctgttcagctgcaagaaccacaagaaggccaaggccatcaagctgatcctgctggtggtgatcgtgttcttcctgttctggaccccctacaacgtgatgatcttcctggagaccctgaagctgtacgacttcttccccagctgcgacatgagaaaggacctgagactggccctgagcgtgaccgagaccgtggccttcagccactgctgcctgaaccccctgatctacgccttcgccggcgagaagttcagaagatacctgtaccacctgtacggcaagtgcctggccgtgctgtgcggcagaagcgtgcacgtggacttcagcagcagcgagagccagagaagcagacacggcagcgtgctgagcagcaacttcacctaccacaccagcgacggcgacgccctgctgctgctgtag

SEQ ID NO: 67147 - DNA, 1092 bp, Artificial Sequence
  derived and/or modified sequence
atggccagcggcaaggccttcaccatggaccagttccccgagagcgtgaccgagaacttcgagtacgacgacctggccgaggcctgctacatcggcgacatcgtggtgttcggcaccgtgttcctgagcatcttctacagcgtgatcttcgccatcggcctggtgggcaacctgctggtggtgttcgccctgaccaacagcaagaagcccaagagcgtgaccgacatctacctgctgaacctggccctgagcgacctgctgttcgtggccaccctgcccttctggacccactacctgatcaacgagaagggcctgcacaacgccatgtgcaagttcaccaccgccttcttcttcatcggcttcttcggcagcatcttcttcatcaccgtgatcagcatcgacagatacctggccatcgtgctggccgccaacagcatgaacaacagaaccgtgcagcacggcgtgaccatcagcctgggcgtgtgggccgccgccatcctggtggccgccccccagttcatgttcaccaagcagaaggagaacgagtgcctgggcgactaccccgaggtgctgcaggagatctggcccgtgctgagaaacgtggagaccaacttcctgggcttcctgctgcccctgctgatcatgagctactgctacttcagaatcatccagaccctgttcagctgcaagaaccacaagaaggccaaggccatcaagctgatcctgctggtggtgatcgtgttcttcctgttctggaccccctacaacgtgatgatcttcctggagaccctgaagctgtacgacttcttccccagctgcgacatgagaaaggacctgagactggccctgagcgtgaccgagaccgtggccttcagccactgctgcctgaaccccctgatctacgccttcgccggcgagaagttcagaagatacctgtaccacctgtacggcaagtgcctggccgtgctgtgcggcagaagcgtgcacgtggacttcagcagcagcgagagccagagaagcagacacggcagcgtgctgagcagcaacttcacctaccacaccagcgacggcgacgccctgctgctgctgtag

SEQ ID NO: 67148 - protein, 879 aa, Artificial Sequence
  derived and/or modified sequence
MNLCWNEIKKKSHNLRARLEAFSDHSGKLQLPLQEIIDWLSQKDEELSAQLPLQGDVALVQQEKETHAAFMEEVKSRGPYIYSVLESAQAFLSQHPFEELEEPHSESKDTSPKQRIQNLSRFVWKQATVASELWEKLTARCVDQHRHIERTLEQLLEIQGAMEELSTTLSQAEGVRATWEPIGDLFIDSLPEHIQAIKLFKEEFSPMKDGVKLVNDLAHQLAISDVHLSMENSQALEQINVRWKQLQASVSERLKQLQDAHRDFGPGSQHFLSSSVQVPWERAISPNKVPYYINHQAQTTCWDHPKMTELYQTLADLNNIKFSAYRTAMKLRRVQKALRLDLVTLTTALEIFNEHDLQASEHVMDVVEVIHCLTALYERLEEERGILVNVPLCVDMSLNWLLNVFDSGRSGKMRALSFKTGIACLCGTEVKEKLQYLFSQVANSGSQCDQRHLGVLLHEAIQVPRQLGEVAAFGGSNVEPSVRSCFRFSTGKPVIEASQFLEWVNLEPQSMVWLAVLHRVTIAEQVKHQTKCSICRQCPIKGFRYRSLKQFNVDICQTCFLTGRASKGNKLHYPIMEYYTPTTSSENMRDFATTLKNKFRSKHYFSKHPQRGYLPVQSVLEADYSETPASSPMWPHADTHSRIEHFASRLAEMESQNCSFFNDSLSPDDSIDEDQYLLRHSSPITDREPAFGQQAPCSVATESKGELQKILAHLEDENRILQGELRRLKWQHEEAAEAPSLADGSTEAATDHRNEELLAEARILRQHKSRLETRMQILEDHNKQLESQLQRLRELLLQPPTESDGSGSAGSSLASSPQQSEGSHPREKGQTTPDTEAADDVGSKSQDVSLCLEDIMEKLRHAFPSVRSSDVTANTLLAS

SEQ ID NO: 67149 - DNA, 1041 bp, Artificial Sequence
  derived and/or modified sequence
atggagacacagttgtcaaacggcccaacatgtaacaacacagcaaacgggcctactactatcaataacaattgctcgagtccggttgattctgggaacactgaggatagcaagaccaatctaatcgtcaactatctgccgcagaatatgacgcaggaagagctcaagtccctcttcggaagcatcggcgagatcgagtcctgcaaactggtgcgcgataaaataacaggacagagtctgggatatgggtttgttaactatatcgatcctaaagatgctgagaaggccattaataccctaaatgggctgcgcctgcagactaagactatcaaagtttcctacgctcgtccttcctcagccagtatccgcgacgcaaacctttacgttagcgggctcccgaaaaccatgacccagaaggaactcgagcagctcttcagccagtacggtaggatcattacaagccggatcctggtagatcaggtgactgggatctctcgcggggtaggattcattcggttcgataaaaggatagaagcagaggaggctatcaagggactcaacggccagaagcctcctggcgcaactgaacctataaccgtgaagtttgcaaacaatcctagccagaaaaccaatcaggctattctttcccagttatatcagagtcctaatagacgttacccaggccctctagctcagcaggcacaaaggttccgtttctctcccatgaccattgacggcatgacgagcttagccgggattaacatccctgggcatcctggaaccggttggtgtatcttcgtgtataatcttgccccagacgctgatgaatcaatcctgtggcagatgttcggcccatttggcgctgtcaccaatgtgaaggtgatacgcgactttaatacaaacaagtgcaaaggattcggttttgtgactatgaccaattatgacgaggccgcgatggcgatcgcttccctaaacggctaccggctcggcgacagagtactccaggtatctttcaagactaacaagacgcacaaagcttag

SEQ ID NO: 67150 - DNA, 1041 bp, Artificial Sequence
  derived and/or modified sequence
atggagacccagctgagcaatggccccacctgcaacaacacagccaacggccccaccaccatcaacaacaactgcagcagccctgtggacagcggcaacacagaggacagcaagaccaacctgattgtgaactacctgccccagaacatgacccaggaggagctgaagagcctgtttggcagcatcggggagattgagagctgcaagctggtgcgggacaagatcaccggccagagcctgggctacggctttgtgaactacatcgaccccaaggatgctgagaaggccatcaacaccctgaatggcctgcggctgcagaccaagaccatcaaggtgtcctatgcccggcccagcagcgccagcatcagagatgccaacctgtatgtgtctggcctgcccaagaccatgacccagaaggagctggagcagctgttcagccagtatggccgcatcatcaccagccgcatcctggtggaccaggtgacaggcatcagcagaggagtgggcttcatccgctttgacaagagaattgaagctgaggaggccatcaagggcctgaatggccagaagcccccaggggccacagagcccatcaccgtgaagtttgccaacaaccccagccagaagaccaaccaggccatcctgagccagctgtaccagagccccaacagacgctacccaggccccctggcccagcaggcccagcgcttccgcttcagccccatgaccattgatggcatgaccagcctggccggcatcaacatccctggccaccctggcaccggctggtgcatctttgtgtacaacctggccccagatgctgatgagagcatcctgtggcagatgtttggcccctttggagctgtgaccaacgtgaaggtgatccgggacttcaacaccaacaagtgcaagggcttcggctttgtgaccatgaccaactatgatgaagctgccatggccatcgccagcctgaatggctaccgcctgggggacagagtgctgcaggtgtccttcaagaccaacaagacccacaaggcctag

SEQ ID NO: 67151 - DNA, 1041 bp, Artificial Sequence
  derived and/or modified sequence
atggagacccagctgagcaacggccccacctgcaacaacaccgccaatgggcccacgaccattaataataattgttcctccccggttgactcaggtaacaccgaggacagtaagactaacctgatcgtgaactacctaccacagaatatgacgcaggaagaactgaagagccttttcgggagcataggcgagatcgaaagctgcaagctggtcagggacaagattacaggacagtctctgggatacggctttgtgaactatatcgatcccaaagacgcagagaaggcaatcaatacacttaacgggctgaggctgcagacaaaaaccatcaaggtttcatacgctagaccttcaagcgctagcataagggatgccaatctctacgtcagtgggctgcccaaaacaatgactcagaaggaactggagcagctgtttagccagtacgggcgtattataacatcaaggattctggtcgaccaagtcactggcattagccgcggggtgggctttatcaggttcgataaaaggattgaagcagaggaagccatcaagggactgaacggccaaaagcccccgggcgctaccgagccaatcaccgtcaaatttgccaataaccctagccagaaaacaaatcaggccattctctcgcagctgtatcagagccctaatcggcgctatccaggaccgctcgcccagcaggctcagagattcaggttttcgcccatgaccatcgatggaatgacttctctcgccggaatcaacatccccggccacccgggtaccggctggtgtatctttgtgtataacttagccccggatgccgatgaaagtatattgtggcagatgttcggaccatttggtgctgtcacaaacgtgaaagtgattagagacttcaacacaaacaaatgtaaagggttcgggtttgtgacaatgacaaattacgatgaagcagctatggcaattgcgtcgctaaacggatatcgcttgggggatcgagttctacaggtttcattcaagactaataaaacacacaaggcgtag

SEQ ID NO: 67152 - DNA, 1041 bp, Artificial Sequence
  derived and/or modified sequence
atggagacccaactctcaaatggcccaacctgcaacaacaccgctaacgggcctacaaccattaataataactgctcttcgccagtagactccggtaatactgaggattctaagaccaacctgattgtcaattatctcccccagaatatgactcaggaggaattgaagtctctctttggctcaataggcgaaatcgagagctgcaagcttgtgcgggataagataaccggccagagtctgggctacgggttcgtgaattacattgatcctaaagacgccgaaaaggccatcaacacgctaaacggtcttagacttcagactaaaaccattaaagtctcctatgctaggccatcatccgcttccatcagagacgctaatctgtacgtgagtggtctccctaaaactatgactcagaaggagctggaacaactgtttagccagtacgggagaataataacctcaaggatactcgtggaccaagtcacaggcattagccggggagtaggattcatccgctttgacaagaggatcgaggccgaggaggccattaaggggctgaatggtcagaaaccacccggtgccacagaacctattactgtgaagttcgccaacaatcccagccagaaaactaaccaggccatcctctcccaactgtatcaaagcccaaaccgacgatatcccggacccctggctcagcaggcacagcgcttccggttctctccaatgacgatcgatggaatgacatcgctggcaggcattaacattcccggtcatccaggaacgggatggtgcatcttcgtgtataatctggctccagatgccgacgaatctatactctggcagatgttcggaccattcggcgctgtcactaacgtcaaagtcatcagagactttaataccaataaatgcaagggcttcgggtttgtgacaatgaccaattacgatgaagccgcaatggcaatcgcctcccttaacgggtatcggctcggggatcgtgtactgcaagttagctttaagacaaacaagacccataaggcgtag

SEQ ID NO: 67153 - DNA, 1041 bp, Artificial Sequence
  derived and/or modified sequence
atggagacccagctgagcaacggccccacctgcaacaacaccgccaacggccccaccaccatcaacaacaactgcagcagccccgtggacagcggcaacaccgaggacagcaagaccaacctgatcgtgaactacctgccccagaacatgacccaggaggagctgaagagcctgttcggcagcatcggcgagatcgagagctgcaagctggtgagagacaagatcaccggccagagcctgggctacggcttcgtgaactacatcgaccccaaggacgccgagaaggccatcaacaccctgaacggcctgagactgcagaccaagaccatcaaggtgagctacgccagacccagcagcgccagcatcagagacgccaacctgtacgtgagcggcctgcccaagaccatgacccagaaggagctggagcagctgttcagccagtacggcagaatcatcaccagcagaatcctggtggaccaggtgaccggcatcagcagaggcgtgggcttcatcagattcgacaagagaatcgaggccgaggaggccatcaagggcctgaacggccagaagccccccggcgccaccgagcccatcaccgtgaagttcgccaacaaccccagccagaagaccaaccaggccatcctgagccagctgtaccagagccccaacagaagataccccggccccctggcccagcaggcccagagattcagattcagccccatgaccatcgacggcatgaccagcctggccggcatcaacatccccggccaccccggcaccggctggtgcatcttcgtgtacaacctggcccccgacgccgacgagagcatcctgtggcagatgttcggccccttcggcgccgtgaccaacgtgaaggtgatcagagacttcaacaccaacaagtgcaagggcttcggcttcgtgaccatgaccaactacgacgaggccgccatggccatcgccagcctgaacggctacagactgggcgacagagtgctgcaggtgagcttcaagaccaacaagacccacaaggcctag

SEQ ID NO: 67154 - DNA, 1041 bp, Artificial Sequence
  derived and/or modified sequence
atggaaacccaactgtccaacggcccgacgtgtaataataccgctaatggacccacgaccatcaacaataattgttcttccccggtggattctggcaacacagaagactctaaaactaatctgattgttaattatctgccgcagaatatgactcaggaggagctgaaatctctgtttggttctataggcgagatcgaatcatgcaaactggtgcgcgacaaaatcacaggccagtcactcggatacggattcgttaactatattgaccccaaggatgccgagaaagcaattaacacactcaacggcctccggctccaaacaaaaaccatcaaggtatcctatgctcgcccttcctctgcgagtattagggacgccaatctgtatgtcagcggactccccaagactatgacccagaaggagcttgagcagctgttctctcagtatggtcgcatcatcacaagcagaatcctagtggaccaagtgacagggatctccaggggagtcggttttattagattcgacaaacggatagaggccgaggaagctatcaaaggtctgaacggccagaagccccccggtgctacagagcctatcaccgtgaagtttgcaaacaaccctagccaaaaaaccaaccaggcgatcctttctcaactttatcaaagtccaaatcgccggtatcctggacctctcgcccagcaggcccagcggtttcggttcagccccatgactatcgatgggatgactagcctcgcgggcataaacatacctggacacccaggcaccggctggtgtatctttgtgtataacctggcgccggatgccgatgagtcgatactctggcagatgtttggccctttcggtgcggtaacaaatgtgaaagtcatcagggatttcaacacgaacaaatgtaagggcttcggtttcgtgactatgaccaactacgacgaggcggcgatggcgatcgctagcctcaacggttatagactgggtgaccgagtgcttcaggtgtcgttcaagactaacaaaacacataaggcatag

SEQ ID NO: 67155 - DNA, 273 bp, Artificial Sequence
  derived and/or modified sequence
atgactcagaaggagctggagcagctgtttagtcaatacggccggattattacttctcgaatcctcgtggaccaggttaccggaatttcccgcggcgtaggattcatccgattcgacaagaggatcgaggcagaggaggcaattaaaggattgaacggacagaaaccacccggggccacagagccaataactgtaaaatttgccaataatcccagtcagaagactaaccaggccatcctcagccagttataccagtcccctaaccgaaggtag

SEQ ID NO: 67156 - DNA, 570 bp, Artificial Sequence
  derived and/or modified sequence
atggagacccagctgtctaacggtcccacttgtaataatacagcaaacggtccaaccacaattaataacaattgctcttctcccgtggattccggaaacaccgaggactcgaaaacaaatctgattgtgaactacctcccgcagaatatgacccaagaagagctgaagagcttattcgggtctatcggagagattgagagctgtaagctggttcgagataagattaccgggcagtcactcggctatggattcgtcaattatattgaccctaaggacgctgagaaggcgatcaacaccctaaacggcctaaggttacaaaccaagactattaaggtgagttatgctaggccatcttccgcaagtatccgggacgctaacctgtacgtgagcggcctcccaaaaactatgacacagaaagaactcgaacagctcttctcccaatatggtaggataattacatccaggatcttagtggaccaagttacaggaatcagtcgaggggttggatttatcaggttcgacaagcgaatagaggccgaagaggccatcaaagggctcaacggacagtag

SEQ ID NO: 67157 - DNA, 273 bp, Artificial Sequence
  derived and/or modified sequence
atgacccagaaggagctggagcagctgttcagccagtatggccgcatcatcaccagccgcatcctggtggaccaggtgacaggcatcagccggggcgtgggcttcatccgctttgacaagagaattgaggccgaggaggccatcaagggcctgaatggccagaagcccccaggggccacagagcccatcaccgtgaagtttgccaacaaccccagccagaagaccaaccaggccatcctgagccagctgtaccagagccccaacagaagatag

SEQ ID NO: 67158 - DNA, 570 bp, Artificial Sequence
  derived and/or modified sequence
atggagacccagctgagcaatggccccacctgcaacaacacagccaacggccccaccaccatcaacaacaactgcagcagccctgtggacagcggcaacacagaggacagcaagaccaacctgattgtgaactacctgccccagaacatgacccaggaggagctgaagagcctgtttggcagcatcggggagattgagagctgcaagctggtgcgggacaagatcaccggccagagcctgggctacggctttgtgaactacatcgaccccaaggatgctgagaaggccatcaacaccctgaatggcctgcggctgcagaccaagaccatcaaggtgtcctatgcccggcccagcagcgccagcatcagagatgccaacctgtatgtgtctggcctgcccaagaccatgacccagaaggagctggagcagctgttcagccagtatggccgcatcatcaccagccgcatcctggtggaccaggtgacaggcatcagcagaggagtgggcttcatccgctttgacaagagaattgaagctgaggaggccatcaagggcctgaatggccagtag

SEQ ID NO: 67159 - DNA, 1041 bp, Artificial Sequence
  derived and/or modified sequence
atggagacccagctgagcaacggccccacctgcaacaacaccgccaatggacccactacaattaacaataactgttctagcccagtcgatagcgggaataccgaagacagtaagactaatttaatcgtgaattacttgccacagaacatgacgcaggaggagctcaagagcttgttcggctctatcggcgaaatcgaaagctgcaaattggtgagagacaaaataacaggccaaagcctgggatacggctttgtgaattacatcgatccaaaggacgccgagaaagccatcaacactttgaatggcctacggctccaaacgaagacgataaaagtctcttatgccaggcctagcagcgcatctattcgggatgccaatctgtacgtgtctggcttaccgaagaccatgactcagaaagagctagaacaactcttttctcaatacggcagaatcattactagccgcattctcgtggatcaggtgaccggaattagcaggggcgtggggttcattaggttcgacaagcgcatcgaagccgaggaggccattaaggggctgaatggacagaaaccccccggtgccactgaacccatcactgtcaaattcgctaacaacccctctcagaagacaaaccaagcgatcctgagccaactgtatcaatctcctaataggcgatatcccggacctcttgcacagcaggctcagcgcttcaggttcagtcccatgaccatagacggaatgacatccctggctggcataaatatcccagggcaccctggtacggggtggtgcatttttgtgtacaatctggccccagacgctgacgagagtatactgtggcaaatgtttggaccctttggggccgtcaccaatgtgaaggtgatccgagacttcaacaccaacaagtgcaaaggcttcggattcgtcactatgacaaactatgatgaagcagctatggccatcgcctcactaaatgggtatcggctgggtgacagggtgctacaggtgagctttaaaacaaataagacgcacaaggcctag

SEQ ID NO: 67160 - DNA, 273 bp, Artificial Sequence
  derived and/or modified sequence
atgacccagaaggagctggagcagctgttcagccagtacggccggatcattactagtaggattcttgtggaccaagtgacagggataagtaggggggtgggcttcatcagattcgataagcgtattgaggccgaagaggccatcaagggactcaatgggcagaaacctcccggagccactgaacctattaccgtcaagttcgccaacaatccctcacagaagaccaatcaggcaatcctcagccagctatatcagtcacccaacagacggtag

SEQ ID NO: 67161 - DNA, 570 bp, Artificial Sequence
  derived and/or modified sequence
atggagacccagctgagcaacggccccacctgcaacaacaccgccaacggcccaactactattaacaacaattgctcatctccagttgacagcggcaacaccgaggacagtaagaccaaccttatcgtgaactatctgcctcagaatatgacgcaggaggagctgaaaagcttgtttggcagcataggcgaaatagagtcttgcaagctagttcgtgacaagatcacggggcaatctctggggtacgggtttgtgaattacatcgaccccaaggatgccgaaaaggccataaatactctgaacggtttacggctgcaaactaaaactatcaaagtaagttacgcgcgacccagcagcgctagcatacgagatgcaaacttgtacgtctccggattaccaaagaccatgacccagaaagaactggagcaactgtttagtcaatatggacggattattacatctcgtatcttagttgatcaggtcaccgggatctcccgcggtgttggatttattaggtttgacaagaggattgaggcggaggaggccatcaagggattgaatggacagtag

SEQ ID NO: 67162 - DNA, 1041 bp, Artificial Sequence
  derived and/or modified sequence
atggaaacacagttaagcaacggtcctacctgcaacaacactgctaacgggcctactacgattaataataactgttcctcaccggtagattctggcaacacagaagacagcaagacaaatttaatagtgaactatctcccccagaacatgacccaagaggagctcaagagcctttttgggtcaatcggagaaatcgagtcttgcaaactggttcgagacaagatcacagggcagagcctcggctacggatttgtcaactacattgatcctaaggacgcagagaaagccatcaataccctgaatggtctccgcctgcagacgaagaccataaaagtctcctacgcacggccttcctcagccagtatccgtgacgccaatctctatgtcagcggattaccaaagacgatgacacaaaaggagttagagcagctgttttcccaatacgggcgtatcataacctccaggatcctggtggatcaagtgacgggcattagccgtggcgtggggtttattagattcgacaaaagaatcgaggccgaggaggccattaagggtctgaatggccagaaaccccctggagccacagagccaatcaccgtgaaattcgctaataatcctagccagaagaccaaccaggcaatcctgagccaactttaccaatctccaaatcgacggtatccaggtcccttagcacagcaagctcaacgtttcagatttagcccgatgacaattgacggaatgacttcactggccggaatcaacattcctggacatccaggaacagggtggtgtatattcgtgtacaaccttgcaccagacgcagatgaatccattctctggcagatgttcggtccgttcggagccgtgactaatgtaaaggttattagggattttaacaccaacaagtgcaaaggatttggcttcgtgacgatgaccaactacgatgaggctgccatggctatagcctccttaaacggttacaggctgggcgaccgcgtgctgcaggtttctttcaagacaaacaaaacccataaggcctag

SEQ ID NO: 67163 - DNA, 273 bp, Artificial Sequence
  derived and/or modified sequence
atgactcaaaaggaactggagcagcttttctcccagtatgggcgtatcattactagcagaattttagtcgatcaggtcaccgggataagtaggggggtgggattcatacgttttgacaaacgcattgaggccgaggaggcgatcaagggactaaatggccagaagcctccaggtgctacagagccaatcactgttaaatttgcgaacaacccaagtcagaagacgaaccaagccatcctcagtcagctgtaccagtcgccaaaccgtcggtag

SEQ ID NO: 67164 - DNA, 570 bp, Artificial Sequence
  derived and/or modified sequence
atggaaactcagctgtccaacggccctacatgcaataacaccgctaacgggcctaccactatcaataacaactgctcctcgccagtcgacagcggcaataccgaggactcgaaaaccaatctcatcgtcaattatctgccccaaaatatgacacaagaagagctcaaatcattgttcggttccatcggcgaaattgagagctgcaagttagtccgtgacaaaataaccgggcaaagccttggctatggatttgtcaattatatagacccaaaagatgcagaaaaggctattaatacattgaatggcttgcggctccagacgaaaactatcaaagtgtcatacgctcggccttctagcgcaagtataagggacgccaacctatatgtttccggtctccccaaaactatgacacaaaaagagctggaacagctcttttcccagtacgggaggatcataacttctaggattctcgtagatcaggtaactgggatcagcaggggtgtcggcttcattcgttttgataaaaggattgaagcagaggaggcaataaaaggcctcaacggccagtag

SEQ ID NO: 67165 - DNA, 273 bp, Artificial Sequence
  derived and/or modified sequence
atgacccagaaggagctggagcagctgttcagccagtacggcagaatcatcaccagcagaatcctggtggaccaggtgaccggcatcagcagaggcgtgggcttcatcagattcgacaagagaatcgaggccgaggaggccatcaagggcctgaacggccagaagccccccggcgccaccgagcccatcaccgtgaagttcgccaacaaccccagccagaagaccaaccaggccatcctgagccagctgtaccagagccccaacagaagatag

SEQ ID NO: 67166 - DNA, 570 bp, Artificial Sequence
  derived and/or modified sequence
atggagacccagctgagcaacggccccacctgcaacaacaccgccaacggccccaccaccatcaacaacaactgcagcagccccgtggacagcggcaacaccgaggacagcaagaccaacctgatcgtgaactacctgccccagaacatgacccaggaggagctgaagagcctgttcggcagcatcggcgagatcgagagctgcaagctggtgagagacaagatcaccggccagagcctgggctacggcttcgtgaactacatcgaccccaaggacgccgagaaggccatcaacaccctgaacggcctgagactgcagaccaagaccatcaaggtgagctacgccagacccagcagcgccagcatcagagacgccaacctgtacgtgagcggcctgcccaagaccatgacccagaaggagctggagcagctgttcagccagtacggcagaatcatcaccagcagaatcctggtggaccaggtgaccggcatcagcagaggcgtgggcttcatcagattcgacaagagaatcgaggccgaggaggccatcaagggcctgaacggccagtag

SEQ ID NO: 67167 - DNA, 777 bp, Artificial Sequence
  derived and/or modified sequence
ggctcacgcctgtaatcccagcacattgggaggccgaggttggcagatcagttgaagccaggagttcgagacgagcctggccaacgtggcgaaaccctgtctctactaaaaatacaaaaaaatagctgggtgtggtgatgcatgcctgtaatcccagctacttgggaggccgaggcagaagaatcgcttgaacccaggaggtggaagttgcagtgatccgagatcatgcccactgccatccagtctggatgacagagagagagaccttgcctcaaaagaagaaagatttgaattaatggtttgaaaattcttagaacacttgaccacagggcagagcttgggatatggctttgtgaactacattgaccccaaggatgcagagaaagctatcaacaccctgaatggattgagacttcaaaccaaaacaataaaagtttcctatgctcgcccaagttcagcttctatcagagatgcaaatttatatgtcagcggacttccaaaaacaatgacccagaaggagttggaacagcttttttcacaatatggacgcattattacttctcgtattcttgtcgaccaggtcactggcatatcaaggggtgtagggtttattcgatttgacaagcgaattgaggcagaagaagctatcaaaggcctaaatggccagaaacctcccggtgccacggagccaatcactgtaaagtttgctaataacccaagccaaaaaaccaatcaggccatcctttcccagctgtaccagtctccaaacagaaggta

SEQ ID NO: 67168 - protein, 566 aa, Artificial Sequence
  derived and/or modified sequence
MSGAVRGRRREVGLQHGGCGTGGGYGDGLARSGQSWRWWRSLSLGAVGSSAGTEPGRPAGASTFRLLRRRQQRHSGTFSYLDDVPFKTGDKFKTPAKVGLPIGFSLPDCLQVVREVQYDFSLEKKTIEWAEEIKKIEEAEREAECKIAEAEAKVNSKSGPEGDSKMSFSKTHSTATMPPPINPILASLQHNSILTPTRVSSSATKQKVLSPPHIKADFNLADFECEEDPFDNLELKTIDEKEELRNILVGTTGPIMAQLLDNNLPRGGSGSVLQDEEVLASLERATLDFKPLHKPNGFITLPQLGNCEKMSLSSKVSLPPIPAVSNIKSLSFPKLDSDDSNQKTAKLASTFHSTSCLRNGTFQNSLKPSTQSSASELNGHHTLGLSALNLDSGTEMPALTSSQMPSLSVLSVCTEESSPPNTGPTVTPPNFSVSQVPNMPSCPQAYSELQMLSPSERQCVETVVNMGYSYECVLRAMKKKGENIEQILDYLFAHGQLCEKGFDPLLVEEALEMHQCSEEKMMEFLQLMSKFKEMGFELKDIKEVLLLHNNDQDNALEDLMARAGAS

SEQ ID NO: 67169 - DNA, 1701 bp, Artificial Sequence
  derived and/or modified sequence
atgagcggcgccgtgagaggcagaagaagagaggtgggcctgcagcacggcggctgcggcaccggcggcggctacggcgacggcctggccagaagcggccagagctggagatggtggagaagcctgagcctgggcgccgtgggcagcagcgccggcaccgagcccggcagacccgccggcgccagcaccttcagactgctgagaagaagacagcagagacacagcggcaccttcagctacctggacgacgtgcccttcaagaccggcgacaagttcaagacccccgccaaggtgggcctgcccatcggcttcagcctgcccgactgcctgcaggtggtgagagaggtgcagtacgacttcagcctggagaagaagaccatcgagtgggccgaggagatcaagaagatcgaggaggccgagagagaggccgagtgcaagatcgccgaggccgaggccaaggtgaacagcaagagcggccccgagggcgacagcaagatgagcttcagcaagacccacagcaccgccaccatgcccccccccatcaaccccatcctggccagcctgcagcacaacagcatcctgacccccaccagagtgagcagcagcgccaccaagcagaaggtgctgagccccccccacatcaaggccgacttcaacctggccgacttcgagtgcgaggaggaccccttcgacaacctggagctgaagaccatcgacgagaaggaggagctgagaaacatcctggtgggcaccaccggccccatcatggcccagctgctggacaacaacctgcccagaggcggcagcggcagcgtgctgcaggacgaggaggtgctggccagcctggagagagccaccctggacttcaagcccctgcacaagcccaacggcttcatcaccctgccccagctgggcaactgcgagaagatgagcctgagcagcaaggtgagcctgccccccatccccgccgtgagcaacatcaagagcctgagcttccccaagctggacagcgacgacagcaaccagaagaccgccaagctggccagcaccttccacagcaccagctgcctgagaaacggcaccttccagaacagcctgaagcccagcacccagagcagcgccagcgagctgaacggccaccacaccctgggcctgagcgccctgaacctggacagcggcaccgagatgcccgccctgaccagcagccagatgcccagcctgagcgtgctgagcgtgtgcaccgaggagagcagcccccccaacaccggccccaccgtgaccccccccaacttcagcgtgagccaggtgcccaacatgcccagctgcccccaggcctacagcgagctgcagatgctgagccccagcgagagacagtgcgtggagaccgtggtgaacatgggctacagctacgagtgcgtgctgagagccatgaagaagaagggcgagaacatcgagcagatcctggactacctgttcgcccacggccagctgtgcgagaagggcttcgaccccctgctggtggaggaggccctggagatgcaccagtgcagcgaggagaagatgatggagttcctgcagctgatgagcaagttcaaggagatgggcttcgagctgaaggacatcaaggaggtgctgctgctgcacaacaacgaccaggacaacgccctggaggacctgatggccagagccggcgccagctag

SEQ ID NO: 67170 - DNA, 1701 bp, Artificial Sequence
  derived and/or modified sequence
atgtccggagccgtacggggacgccgaagagaagtcggattacagcatggcgggtgcggaacgggaggtggctacggagatggactcgcacgaagtggccagtcctggcggtggtggaggtcactaagcctaggcgcggtgggatcctcagcaggtaccgagcccgggaggccagcaggcgcttctaccttccgcctgttgagacgaaggcaacagagacactcaggaacctttagctatttggacgacgtcccatttaagaccggggacaagtttaagacccccgccaaggtgggcctccccattggcttctccctgcctgactgcctgcaggtcgtgcgcgaggtccaatacgacttttcactcgaaaaaaaaacgatcgaatgggcggaggaaattaagaagatcgaggaagcggagagggaggctgaatgcaagatagccgaggcagaagctaaggtcaactccaagtctggcccggaaggtgactctaaaatgagtttctccaagacccattctaccgcaactatgcccccacctatcaatccgatcctggcatcactgcagcacaatagtatcctcacacctactcgcgtgtctagcagcgccacgaagcaaaaggtgctgagcccccctcacatcaaggcagattttaacctcgccgatttcgagtgtgaggaggatccattcgataacctcgaattgaagactatcgacgaaaaggaggagctccgcaatattttggtcggcaccacaggacctattatggctcagctcctggacaataaccttccacgcggaggctctgggtcagtgttgcaagatgaggaagttcttgcctccctggaacgagccacactcgacttcaaacctctccacaaacccaacgggttcattacactgccccaactcggcaactgcgaaaaaatgtccctaagctccaaggtgagcctacccccaattccggctgtgtccaatatcaaatctttgagcttccctaaactagactcagatgacagcaatcagaagacggcaaagctggctagtactttccacagtacttcctgccttcgcaatgggaccttccaaaacagcctcaagccaagcacccagtcgagtgcgtccgagttgaatgggcaccacacactcggcctgtccgcactgaaccttgattccggaacagagatgcccgcactgactagttctcagatgcccagtctatctgtgctctctgtgtgcactgaagagtcctcgccacccaatacaggtcccacagtgactcccccaaactttagcgtctctcaggtccctaacatgcctagttgcccgcaagcttatagtgaacttcagatgctatctccttcggagcgtcagtgcgtcgagaccgtggtcaacatggggtactcttacgagtgtgtgcttcgcgccatgaaaaagaaaggcgagaacatagaacaaattctggattacttgtttgcccacggacagttgtgcgagaagggctttgatcctcttctcgttgaagaggcactggaaatgcaccagtgcagtgaggagaagatgatggagttccttcagctgatgagcaagtttaaagaaatggggttcgaactgaaggatataaaggaggtcctgctccttcacaataatgaccaagacaacgcgttggaagacctgatggcgagggctggagcttcctag

SEQ ID NO: 67171 - DNA, 1701 bp, Artificial Sequence
  derived and/or modified sequence
atgtctggagctgtgcggggcagaagaagagaggtgggcctgcagcacggcggctgcggcactggaggcggctatggagatggcctggcccggagcggccagagctggcgctggtggaggagcctgagcctgggcgctgtgggcagcagcgctggaacagagcccggccggcctgctggggccagcaccttccggctgctgcggcggcggcagcagaggcacagcggcaccttctcctacctggatgatgtgcccttcaagacaggagacaagttcaagaccccagccaaggtgggcctgcccatcggcttcagcctgcctgactgcctgcaggtggtgcgggaggtgcagtatgacttcagcctggagaagaagaccatcgagtgggccgaggagatcaagaagattgaggaggccgagcgggaggccgagtgcaagattgctgaggccgaggccaaggtgaacagcaagagcggccctgagggggacagcaagatgtccttcagcaagacccacagcacagccaccatgcccccacccatcaaccccatcctggccagcctgcagcacaacagcatcctgacccccaccagggtgagcagcagcgccaccaagcagaaggtgctgagccccccccacatcaaggctgacttcaacctggccgactttgaatgtgaggaggacccctttgacaacctggagctgaagaccattgatgagaaggaggagctgaggaacatcctggtgggcaccaccggccccatcatggcccagctgctggacaacaacctgccccggggcggcagcggctctgtgctgcaggatgaggaggtgctggccagcctggagcgggccaccctggacttcaagcccctgcacaagcccaacggcttcatcaccctgccccagctgggcaactgtgagaagatgagcctgagcagcaaggtgtccctgccccccatcccagctgtgagcaacatcaagagcctgtccttccccaagctggacagtgatgacagcaaccagaagacagccaagctggccagcaccttccacagcaccagctgcctgagaaatggcaccttccagaacagcctgaagcccagcacccagagcagcgccagcgagctgaatggccaccacaccctgggcctgagcgccctgaacctggacagcggcacagagatgcctgccctgaccagcagccagatgcccagcctgtctgtgctgtctgtgtgcacagaggagagcagcccccccaacacaggccccaccgtgaccccacccaacttctctgtgtcccaggtgcccaacatgcccagctgcccccaggcctacagcgagctgcagatgctgagccccagcgagcggcagtgtgtggagaccgtggtgaacatgggctacagctatgaatgtgtgctgcgggccatgaagaagaagggggagaacatcgagcagatcctggactacctgtttgcccacggccagctgtgtgagaagggctttgaccccctgctggtggaggaggccctggagatgcaccagtgcagcgaggagaagatgatggagttcctgcagctgatgagcaagttcaaggagatgggctttgagctgaaggacatcaaggaggtgctgctgctgcacaacaatgaccaggacaatgccctggaggacctgatggcccgggccggggccagctag

SEQ ID NO: 67172 - DNA, 1701 bp, Artificial Sequence
  derived and/or modified sequence
atgagcggcgccgtgcggggccggcggcgggaggtgggcctgcagcacggcggctgtggcactggcggagggtacggagatggactcgctagatccggacaaagttggcggtggtggaggtctctgtccctcggcgcagtaggatctagcgctggaactgaaccagggagaccagcaggtgccagcaccttccgtctgctgaggcggaggcagcagcgacacagcggcactttttcttacctcgatgatgtgccatttaagactggggacaagttcaaaaccccagcaaaggtcgggttacccatcggtttcagtctgcctgattgcttacaggtagtgagagaagtccaatacgatttttctctcgaaaagaaaacaattgaatgggccgaagagatcaaaaaaatcgaggaagctgaacgtgaagccgaatgtaagattgcagaggcagaggccaaagtgaattcaaaatctggccccgaaggagatagcaaaatgagtttttcgaagacacactccaccgccacgatgcccccacccataaatcccatcctcgcatctcttcagcacaacagcattctgaccccaacgagggtgtctagctcggccaccaaacagaaggtgcttagccccccccacattaaggccgatttcaacctggctgattttgagtgtgaggaggaccctttcgataacttggaactgaaaaccattgatgaaaaggaagaattgaggaatatcctcgttgggactaccgggccaattatggcacagctcctggataacaacctccctagggggggatcaggttccgtgctgcaggacgaggaggttctcgcaagcttggaacgggccactctagactttaagcctctccacaagcccaacgggttcatcactttacctcagttaggcaactgtgaaaagatgagtctttcctccaaagtgagcttgccccccatcccagccgtgagcaatatcaagagtctgagcttcccaaagctcgattccgacgatagcaatcagaagaccgccaaacttgcttctacattccattcaacctcctgcctgcgaaatggcacattccagaatagtctgaaaccctcaacgcagagctctgcctcggagttaaatggccaccatacattgggactcagcgccctgaacttagacagtggtaccgaaatgcccgctctgacaagctcccaaatgccaagcctatccgtattaagcgtgtgtaccgaagaaagctcgccaccaaatactgggccaacagtcaccccccctaattttagcgtttctcaggtcccaaatatgccttcatgcccacaggcctacagtgagttgcaaatgttgagtccgtcagagcgccaatgtgtggagactgttgtgaacatgggctattcatacgaatgcgttttgcgggccatgaagaagaagggcgaaaacatagaacagatccttgactatcttttcgcacatgggcaactatgcgagaagggttttgaccccctgctcgttgaagaagcgttggagatgcaccagtgttcagaagaaaaaatgatggagtttctccagctcatgtccaaatttaaggagatgggcttcgaactaaaggatatcaaggaggtcctgttacttcataataacgatcaggataacgctttggaagacctgatggcccgtgctggggctagttag

SEQ ID NO: 67173 - DNA, 1701 bp, Artificial Sequence
  derived and/or modified sequence
atgtccggggcagtccggggacgcagacgcgaagttgggctgcagcacggcggttgtggaaccgggggaggatacggtgatggtttggcaagatctggacagagctggcgttggtggagaagcctgtctctgggggcagtgggctccagcgctggtacagagccaggacgcccagcgggtgccagtactttcaggcttctgcgcaggcggcagcagaggcacagtggcacctttagttaccttgacgacgtccccttcaaaactggcgataaatttaaaaccccagccaaggtcggcctacccattggtttctccctgcctgattgtttgcaggtagtgcgcgaagtccaatacgacttctccctggaaaaaaagacaatcgaatgggcggaagagatcaagaagatcgaggaggcagagcgcgaagccgaatgcaaaattgccgaggccgaagccaaggtgaacagtaagtccggccctgagggtgacagcaaaatgagtttctcgaagacacattcgactgctactatgccccctcccatcaaccccattttggcgtctttacaacacaactcaatcctgaccccaacaagagtttcttcttctgccaccaagcagaaggtccttagcccaccgcacattaaagctgactttaacctcgccgatttcgagtgtgaggaggatccttttgacaatctggaactgaagaccatcgacgagaaagaggaactgaggaacattctcgtgggtaccaccggtcctatcatggcccagctcctggacaacaacctcccaaggggaggtagtggtagtgtattgcaggacgaagaggtccttgcttcgctcgaacgcgctacacttgactttaaaccattacacaaaccgaacggatttataacactaccccagctagggaactgtgaaaaaatgagtctgtcctccaaggtgtcccttcctcccatcccagccgtgagtaacatcaagagcctctcttttccaaaactggatagtgacgactcgaaccaaaagacagccaagctggctagcactttccattcaacatcttgcctgcggaacgggactttccagaactccctgaaaccaagtacacagagtagtgccagcgagctaaacggtcaccatactctcggattgtcagcccttaacctggactccggcactgagatgcctgctctgacgagcagtcagatgccctcactgagcgtcctgtctgtctgcacagaagagagcagcccccctaacactggtcccacagtgacacctccgaatttctctgtgagtcaagtccctaacatgccttcttgcccccaagcctattcagaactgcagatgttgagtcccagtgagcgccagtgtgtggagacagtcgtcaacatgggctactcatatgaatgcgtacttagggccatgaaaaagaagggtgagaacatcgagcagattctggactacctgtttgcgcatgggcaactctgcgagaaaggctttgatcccctactcgtcgaggaagctctagaaatgcaccagtgctccgaggagaaaatgatggagtttttgcagctcatgagcaaatttaaggagatggggttcgagctgaaggacatcaaggaagtgttactgctgcacaacaatgaccaagacaatgctctagaagacctgatggccagagcaggtgcttcatag

SEQ ID NO: 67174 - DNA, 2702 bp, Artificial Sequence
  derived and/or modified sequence
agacgcccaaatgagtggggcggtgaggggaaggaggagggaagtaggacttcaacatggcggctgcggcactggcggtggctacggtgacggcctggcccggagcgggcagagttggaggtggtggcgttcgctctccctaggggctgtcgggagctcagcggggaccgagcctgggaggccggccggtgccagcacctttcggcttctgagacggcggcagcagcggcattcagggactttcagttaccttgatgatgtcccatttaagacaggagacaaattcaaaacaccagctaaagttggtctacctattggcttctccttgcctgattgtttgcaggttgtcagagaagtacagtatgacttctctttggaaaagaaaaccattgagtgggctgaagagattaagaaaatcgaagaagccgagcgggaagcagagtgcaaaattgcggaagcagaagctaaagtgaattctaagagtggcccagagggcgatagcaaaatgagcttctccaagactcacagtacagccacaatgccacctcctattaaccccatcctcgccagcttgcagcacaacagcatcctcacaccaactcgggtcagcagtagtgccacgaaacagaaagttctcagcccacctcacataaaggcggatttcaatcttgctgactttgagtgtgaagaagacccatttgataatctggagttaaaaactattgatgagaaggaagagctgagaaatattctggtaggaaccactggacccattatggctcagttattggacaataacttgcccaggggaggctctgggtctgtgttacaggatgaggaggtcctggcatccttggaacgggcaaccctagatttcaagcctcttcataaacccaatggctttataaccttaccacagttgggcaactgtgaaaagatgtcactgtcttccaaagtgtccctcccccctatacctgcagtaagcaatatcaaatccctgtctttccccaaacttgactctgatgacagcaatcagaagacagccaagctggcgagcactttccatagcacatcctgcctccgcaatggcacgttccagaattccctaaagccttccacccaaagcagtgccagtgagctcaatgggcatcacactcttgggctttcagctttgaacttggacagtggcacagagatgccagccctgacatcctcccagatgccttccctctctgttttgtctgtgtgcacagaggaatcatcacctccaaatactggtcccacggtcacccctcctaatttctcagtgtcacaagtgcccaacatgcccagctgtccccaggcctattctgaactgcagatgctgtcccccagcgagcggcagtgtgtggagacggtggtcaacatgggctactcgtacgagtgtgtcctcagagccatgaagaagaaaggagagaatattgagcagattctcgactatctctttgcacatggacagctttgtgagaagggcttcgaccctcttttagtggaagaggctctggaaatgcaccagtgttcagaagaaaagatgatggagtttcttcagttaatgagcaaatttaaggagatgggctttgagctgaaagacattaaggaagttttgctattacacaacaatgaccaggacaatgctttggaagacctcatggctcgggcaggagccagctgagaccaggccctgcctaggccctgccgcagaaccaccatccctgggaggccctgcagagcccacctgtggggaaagagaaggggcagcttccggattttcttttgggggttagaaggtcaggtgtggagactgctcgccagtctctgtgagcctaggccctgagctggggaggtggggaagattcgggcatgtgagtgcccccagaactgtcctggctccttccgtattaaacgcatttgcattttgagaagtgtccttcccacttcagccctccggagagactaccctagtctttctggggtgtttatgtcctcagctgaagcctggcctagttgctgagaggggctggggagatggggcgggagggccagactcagtgctgctgtggagctaggtgcttcccccttcccctgagactggtggactgaactccagtcaagttgagttcaagtgaaagattcttccagggttttattttttcccctcctaacaaagtctcatagtgttaacactggttctgcaatatctctgaggtgcaaagaatgcacttttccctatggggcccagagtttgccttttctgccaggcagtcaccatgcttccctaccccagcctgtttcttttggcttggtttggaccacagtcctctgctacccagggttttagagcccctgctctaggaaacagtttaagaaatcattggccccttcccagcacattgaatgggtaagcagacaggccatgatttagttggccagcactaactccacctctgttctccttgaacagcttcccctccagcccactgctttaggatgacacaatgaataacacctagtcatagaaatcagtctctctggtttgttttgtattatgttgtacatcattaaagatctaaatacaaaggatatacagtcttgaatctaaaataatttgctaactaactattttgattcttcagagagaactactaataaaaatctaaaaggta

SEQ ID NO: 67175 - protein, 538 aa, Artificial Sequence
  derived and/or modified sequence
MSGAVRGRRREVGLQHGGCGTGGGYGDGLARSGQSWRWWRSLSLGAVGSSAGTEPGRPAGASTFRLLRRRQQRHSGSKWLLRSWVQIFMYDFSLEKKTIEWAEEIKKIEEAEREAECKIAEAEAKVNSKSGPEGDSKMSFSKTHSTATMPPPINPILASLQHNSILTPTRVSSSATKQKVLSPPHIKADFNLADFECEEDPFDNLELKTIDEKEELRNILVGTTGPIMAQLLDNNLPRGGSGSVLQDEEVLASLERATLDFKPLHKPNGFITLPQLGNCEKMSLSSKVSLPPIPAVSNIKSLSFPKLDSDDSNQKTAKLASTFHSTSCLRNGTFQNSLKPSTQSSASELNGHHTLGLSALNLDSGTEMPALTSSQMPSLSVLSVCTEESSPPNTGPTVTPPNFSVSQVPNMPSCPQAYSELQMLSPSERQCVETVVNMGYSYECVLRAMKKKGENIEQILDYLFAHGQLCEKGFDPLLVEEALEMHQCSEEKMMEFLQLMSKFKEMGFELKDIKEVLLLHNNDQDNALEDLMARAGAS

SEQ ID NO: 67176 - DNA, 1617 bp, Artificial Sequence
  derived and/or modified sequence
atgagcggcgccgtgagaggcagaagaagagaggtgggcctgcagcacggcggctgcggcaccggcggcggctacggcgacggcctggccagaagcggccagagctggagatggtggagaagcctgagcctgggcgccgtgggcagcagcgccggcaccgagcccggcagacccgccggcgccagcaccttcagactgctgagaagaagacagcagagacacagcggcagcaagtggctgctgagaagctgggtgcagatcttcatgtacgacttcagcctggagaagaagaccatcgagtgggccgaggagatcaagaagatcgaggaggccgagagagaggccgagtgcaagatcgccgaggccgaggccaaggtgaacagcaagagcggccccgagggcgacagcaagatgagcttcagcaagacccacagcaccgccaccatgcccccccccatcaaccccatcctggccagcctgcagcacaacagcatcctgacccccaccagagtgagcagcagcgccaccaagcagaaggtgctgagccccccccacatcaaggccgacttcaacctggccgacttcgagtgcgaggaggaccccttcgacaacctggagctgaagaccatcgacgagaaggaggagctgagaaacatcctggtgggcaccaccggccccatcatggcccagctgctggacaacaacctgcccagaggcggcagcggcagcgtgctgcaggacgaggaggtgctggccagcctggagagagccaccctggacttcaagcccctgcacaagcccaacggcttcatcaccctgccccagctgggcaactgcgagaagatgagcctgagcagcaaggtgagcctgccccccatccccgccgtgagcaacatcaagagcctgagcttccccaagctggacagcgacgacagcaaccagaagaccgccaagctggccagcaccttccacagcaccagctgcctgagaaacggcaccttccagaacagcctgaagcccagcacccagagcagcgccagcgagctgaacggccaccacaccctgggcctgagcgccctgaacctggacagcggcaccgagatgcccgccctgaccagcagccagatgcccagcctgagcgtgctgagcgtgtgcaccgaggagagcagcccccccaacaccggccccaccgtgaccccccccaacttcagcgtgagccaggtgcccaacatgcccagctgcccccaggcctacagcgagctgcagatgctgagccccagcgagagacagtgcgtggagaccgtggtgaacatgggctacagctacgagtgcgtgctgagagccatgaagaagaagggcgagaacatcgagcagatcctggactacctgttcgcccacggccagctgtgcgagaagggcttcgaccccctgctggtggaggaggccctggagatgcaccagtgcagcgaggagaagatgatggagttcctgcagctgatgagcaagttcaaggagatgggcttcgagctgaaggacatcaaggaggtgctgctgctgcacaacaacgaccaggacaacgccctggaggacctgatggccagagccggcgccagctag

SEQ ID NO: 67177 - DNA, 1617 bp, Artificial Sequence
  derived and/or modified sequence
atgtcgggagccgtgcggggccggcgtcgagaggtgggcctccaacatgggggttgtggaaccggtggagggtatggagatgggttagcacggagtggacagtcctggcggtggtggcggtctttgtccctcggtgcagtaggctcctcagctggcaccgaacctgggagaccagccggagcttccaccttccggctgctcaggcgacggcagcaaagacactctggaagcaagtggctcctccgctcttgggtgcagatcttcatgtatgacttttcattagagaagaagactattgagtgggctgaggagatcaagaagattgaagaggcagaacgtgaagccgaatgtaaaatcgccgaagccgaggctaaggtcaacagcaagtcgggccctgagggagactctaagatgagctttagtaaaacacattccacggccactatgcctccacctataaatcctatacttgccagcttgcagcataatagcattctgactccaactagagtctcgagctcagcaactaaacagaaagtgctctctcctcctcatataaaagcggatttcaaccttgccgatttcgaatgcgaagaagaccctttcgacaacttagagttgaaaacaattgatgagaaggaagaactacggaatattttggtcggaactaccggacccattatggcccagctcctggataataacctccctcgggggggctctggatccgtgctgcaggacgaagaagtgttggcctcactggagcgggccaccctggatttcaagcccctccacaaacccaacggatttatcacattgccacaactaggcaactgcgaaaagatgagcctgtcgagcaaggtgtctttgccacctattccagctgttagtaacatcaaaagcctcagctttcccaagcttgattcagatgacagcaatcagaaaactgccaagctggcttcgacgtttcactcgacctcctgcttgcggaatgggacattccagaacagcctgaagccaagcacccaatcgagcgcttccgagctcaacggccaccacacattaggactgtccgctctaaacctcgactcaggaactgagatgcctgcactcacctcaagccaaatgcccagcttgagcgtgctttcagtgtgcacagaggagtcaagtcctcccaacacaggtcctacagttacaccacccaatttctccgtttctcaggtgcccaacatgccttcctgcccacaggcttacagcgaactgcaaatgctgtcgccttctgagcgccagtgtgtagagactgttgtgaacatgggctacagttacgaatgtgtgctgagagctatgaagaagaagggcgagaacattgaacagatcttggattacctgttcgcacatggacaattgtgtgaaaagggattcgatcctctgctggtcgaggaggcactcgagatgcatcaatgtagcgaagagaaaatgatggagtttctccagctcatgagtaaatttaaggaaatgggctttgagctcaaggacatcaaggaggttttacttctgcacaacaatgatcaggataatgcacttgaggacttgatggctcgcgcaggagcttcttag

SEQ ID NO: 67178 - DNA, 1617 bp, Artificial Sequence
  derived and/or modified sequence
atgtctggagctgtgcggggcagaagaagagaggtgggcctgcagcacggcggctgcggcactggaggcggctatggagatggcctggcccggagcggccagagctggcgctggtggaggagcctgagcctgggcgctgtgggcagcagcgctggaacagagcccggccggcctgctggggccagcaccttccggctgctgcggcggcggcagcagaggcacagcggcagcaagtggctgctgcgctcctgggtgcagatcttcatgtatgacttcagcctggagaagaagaccatcgagtgggccgaggagatcaagaagattgaggaggccgagcgggaggccgagtgcaagattgctgaggccgaggccaaggtgaacagcaagagcggccctgagggggacagcaagatgtccttcagcaagacccacagcacagccaccatgcccccacccatcaaccccatcctggccagcctgcagcacaacagcatcctgacccccaccagggtgagcagcagcgccaccaagcagaaggtgctgagccccccccacatcaaggctgacttcaacctggccgactttgaatgtgaggaggacccctttgacaacctggagctgaagaccattgatgagaaggaggagctgaggaacatcctggtgggcaccaccggccccatcatggcccagctgctggacaacaacctgccccggggcggcagcggctctgtgctgcaggatgaggaggtgctggccagcctggagcgggccaccctggacttcaagcccctgcacaagcccaacggcttcatcaccctgccccagctgggcaactgtgagaagatgagcctgagcagcaaggtgtccctgccccccatcccagctgtgagcaacatcaagagcctgtccttccccaagctggacagtgatgacagcaaccagaagacagccaagctggccagcaccttccacagcaccagctgcctgagaaatggcaccttccagaacagcctgaagcccagcacccagagcagcgccagcgagctgaatggccaccacaccctgggcctgagcgccctgaacctggacagcggcacagagatgcctgccctgaccagcagccagatgcccagcctgtctgtgctgtctgtgtgcacagaggagagcagcccccccaacacaggccccaccgtgaccccacccaacttctctgtgtcccaggtgcccaacatgcccagctgcccccaggcctacagcgagctgcagatgctgagccccagcgagcggcagtgtgtggagaccgtggtgaacatgggctacagctatgaatgtgtgctgcgggccatgaagaagaagggggagaacatcgagcagatcctggactacctgtttgcccacggccagctgtgtgagaagggctttgaccccctgctggtggaggaggccctggagatgcaccagtgcagcgaggagaagatgatggagttcctgcagctgatgagcaagttcaaggagatgggctttgagctgaaggacatcaaggaggtgctgctgctgcacaacaatgaccaggacaatgccctggaggacctgatggcccgggccggggccagctag

SEQ ID NO: 67179 - DNA, 1617 bp, Artificial Sequence
  derived and/or modified sequence
atgagcggcgccgtgcggggccggcggcgggaggtgggcctgcagcacggtggatgtggcactggtggaggttatggcgacggcctagccaggtccggccaaagttggcggtggtggcgatccctttccctgggcgcggtgggaagtagcgccggtaccgagcctggtaggccagctggagctagtaccttccgtctcctgaggcgcagacagcagaggcactcaggcagtaaatggttgttgcggtcctgggtccagatttttatgtatgattttagtctagagaaaaagactatcgagtgggcagaagaaattaaaaaaatcgaggaggccgagcgcgaggcggagtgcaagatcgcagaggcagaagctaaggtgaatagtaaaagcggccccgaaggcgattcaaagatgagtttcagcaaaacccactctaccgccaccatgcccccacccataaaccccatactcgcatcgctgcagcacaatagcatactcactcccacacgcgtgagcagctcagccacaaaacagaaagtcttgtcccccccccacataaaagcagatttcaatctcgccgattttgagtgtgaggaggatccttttgataacttggagttaaaaactattgacgagaaagaggagctgagaaacatcctagtggggaccaccggtccaatcatggcacaactactggacaataatctgccacgcggaggctccggcagcgtgctccaggatgaagaagtgttggccagcctggagagggccactctggattttaaaccgctgcataagccaaatggttttataacactcccgcagctcggtaactgcgagaaaatgtcgcttagctcgaaggtttccttgccccctataccggcggtgtcgaacattaaatcactctcattcccaaagctggattcagacgactcaaatcagaagacagcgaaactggcctctacatttcactctacttcttgccttagaaatggtacctttcaaaactcactcaaaccatccacccagtcaagcgccagtgagctcaatggtcatcatactttgggtctttcagcactcaatctggactctggcactgagatgcccgccttgacttcatctcagatgcctagcttaagtgtgctgtctgtgtgcaccgaggaaagttcacctcctaacacaggtcctacggtgacgcctccaaatttcagcgtgtctcaggtaccaaacatgccttcttgtccccaggcctactcagaattgcaaatgctttcaccgagtgagcgacaatgtgtggagacggtggtgaacatggggtactcctatgaatgcgtcctgagagctatgaaaaagaagggcgagaatatcgaacagatactggattacctcttcgcgcacggccaactgtgtgagaagggattcgacccgttgctcgtagaggaagctttggagatgcaccagtgcagcgaggagaagatgatggaattcttacaactcatgtcaaagtttaaggaaatgggtttcgagctgaaggacattaaggaggttctgctcttgcacaataacgatcaggacaatgcactagaggacctgatggctcgcgccggcgcgtcttag

SEQ ID NO: 67180 - DNA, 1617 bp, Artificial Sequence
  derived and/or modified sequence
atgagtggagccgtgagaggacgaagaagggaggttggtttgcagcacggaggctgtggaactggaggagggtatggagacggactggcaaggagcggccagtcctggcggtggtggaggtctctgtctcttggagccgtggggtcatctgccggtacggaaccgggacggcctgccggagcgtcaacttttcgactcctgcgcaggaggcagcagcgacatagcggctccaagtggctgctgcggtcatgggtgcagatcttcatgtatgacttcagtttggagaagaagaccatcgagtgggccgaggaaatcaagaagatcgaagaggccgagagagaggccgaatgcaaaattgcggaggccgaggcaaaggtgaactctaagtccggcccagagggcgacagtaaaatgagtttctctaaaactcattccacagctacaatgccacctcctatcaatccaatactggccagtctgcagcacaatagcatcctgacacctactagggtctccagctccgccactaaacagaaagttctttctcctcctcacataaaggcagattttaatttagctgattttgaatgtgaggaggacccttttgacaatttagaactaaaaaccatcgatgagaaggaggagttgaggaatatcctcgtcggcacgaccggacccatcatggctcagttgcttgacaacaacctgccacggggagggtcagggagcgtactgcaggatgaagaggtgttggcttcgctcgagcgcgctaccctagactttaagcccctgcacaagccaaacggctttattacgcttccacaattgggtaactgtgagaagatgtctctgtcctctaaggtgtcactgccgcctatccccgcagtgagcaacatcaagtctcttagctttcctaaactggacagcgacgattccaatcagaaaacggccaagctggcttcaacttttcactcaacctcctgcctccgcaatggcacgttccagaacagcctgaaaccatcaacccaaagttctgccagtgaattaaatggacaccataccctgggactgtcagctctcaacctggactcggggaccgaaatgcctgcgttaaccagtagccaaatgccctccctgagtgttctcagcgtgtgtactgaggagtcttctccacctaacactgggccaacagtgaccccacccaacttctcagtcagccaggtacccaacatgccaagctgccctcaagcctatagtgagctgcagatgctatccccgtcggagcggcagtgtgtggaaacagtcgttaatatgggttattcgtatgaatgtgtcctgagggccatgaagaaaaaaggcgaaaatatcgaacagattctagattatcttttcgcccacggacaactgtgcgaaaagggattcgaccccctgctcgttgaagaagcactggagatgcatcagtgctccgaagagaagatgatggaattcctccagttaatgtccaaatttaaagagatgggattcgagctcaaggacattaaggaggtgttgttgctccataacaacgatcaggataacgccctggaggacctgatggcacgtgcaggagccagctag

SEQ ID NO: 67181 - DNA, 2618 bp, Artificial Sequence
  derived and/or modified sequence
agacgcccaaatgagtggggcggtgaggggaaggaggagggaagtaggacttcaacatggcggctgcggcactggcggtggctacggtgacggcctggcccggagcgggcagagttggaggtggtggcgttcgctctccctaggggctgtcgggagctcagcggggaccgagcctgggaggccggccggtgccagcacctttcggcttctgagacggcggcagcagcggcattcaggttctaaatggcttctaagaagttgggtgcagattttcatgtatgacttctctttggaaaagaaaaccattgagtgggctgaagagattaagaaaatcgaagaagccgagcgggaagcagagtgcaaaattgcggaagcagaagctaaagtgaattctaagagtggcccagagggcgatagcaaaatgagcttctccaagactcacagtacagccacaatgccacctcctattaaccccatcctcgccagcttgcagcacaacagcatcctcacaccaactcgggtcagcagtagtgccacgaaacagaaagttctcagcccacctcacataaaggcggatttcaatcttgctgactttgagtgtgaagaagacccatttgataatctggagttaaaaactattgatgagaaggaagagctgagaaatattctggtaggaaccactggacccattatggctcagttattggacaataacttgcccaggggaggctctgggtctgtgttacaggatgaggaggtcctggcatccttggaacgggcaaccctagatttcaagcctcttcataaacccaatggctttataaccttaccacagttgggcaactgtgaaaagatgtcactgtcttccaaagtgtccctcccccctatacctgcagtaagcaatatcaaatccctgtctttccccaaacttgactctgatgacagcaatcagaagacagccaagctggcgagcactttccatagcacatcctgcctccgcaatggcacgttccagaattccctaaagccttccacccaaagcagtgccagtgagctcaatgggcatcacactcttgggctttcagctttgaacttggacagtggcacagagatgccagccctgacatcctcccagatgccttccctctctgttttgtctgtgtgcacagaggaatcatcacctccaaatactggtcccacggtcacccctcctaatttctcagtgtcacaagtgcccaacatgcccagctgtccccaggcctattctgaactgcagatgctgtcccccagcgagcggcagtgtgtggagacggtggtcaacatgggctactcgtacgagtgtgtcctcagagccatgaagaagaaaggagagaatattgagcagattctcgactatctctttgcacatggacagctttgtgagaagggcttcgaccctcttttagtggaagaggctctggaaatgcaccagtgttcagaagaaaagatgatggagtttcttcagttaatgagcaaatttaaggagatgggctttgagctgaaagacattaaggaagttttgctattacacaacaatgaccaggacaatgctttggaagacctcatggctcgggcaggagccagctgagaccaggccctgcctaggccctgccgcagaaccaccatccctgggaggccctgcagagcccacctgtggggaaagagaaggggcagcttccggattttcttttgggggttagaaggtcaggtgtggagactgctcgccagtctctgtgagcctaggccctgagctggggaggtggggaagattcgggcatgtgagtgcccccagaactgtcctggctccttccgtattaaacgcatttgcattttgagaagtgtccttcccacttcagccctccggagagactaccctagtctttctggggtgtttatgtcctcagctgaagcctggcctagttgctgagaggggctggggagatggggcgggagggccagactcagtgctgctgtggagctaggtgcttcccccttcccctgagactggtggactgaactccagtcaagttgagttcaagtgaaagattcttccagggttttattttttcccctcctaacaaagtctcatagtgttaacactggttctgcaatatctctgaggtgcaaagaatgcacttttccctatggggcccagagtttgccttttctgccaggcagtcaccatgcttccctaccccagcctgtttcttttggcttggtttggaccacagtcctctgctacccagggttttagagcccctgctctaggaaacagtttaagaaatcattggccccttcccagcacattgaatgggtaagcagacaggccatgatttagttggccagcactaactccacctctgttctccttgaacagcttcccctccagcccactgctttaggatgacacaatgaataacacctagtcatagaaatcagtctctctggtttgttttgtattatgttgtacatcattaaagatctaaatacaaaggatatacagtcttgaatctaaaataatttgctaactaactattttgattcttcagagagaactactaataaaaatctaaaaggta

SEQ ID NO: 67182 - protein, 146 aa, Artificial Sequence
  derived and/or modified sequence
MTMRSLLRTPFLCGLLWAFCAPGARAEEPAASFSQPGSMGLDKNTVHDQEHIMEHLEGVINKPEAEMSPQELQLHYFKMHDYDGNNLLDGLELSTAITHVHKEEGSEQAPLMSEDELINIIDGVLRDDDKNNDGYIDYAEFAKSLQ

SEQ ID NO: 67183 - protein, 61 aa, Artificial Sequence
  derived and/or modified sequence
MTMRSLLRTPFLCGLLWAFCAPGARAEEPAASFSQPGSMGLDKNTVHDQEHIMEHLEGVIN

SEQ ID NO: 67184 - DNA, 441 bp, Artificial Sequence
  derived and/or modified sequence
atgacaatgagatctctactccggacgccattcctgtgtggcctcctgtgggctttctgtgcccctggtgcacgagctgaagaacccgccgctagtttttcccagcccggcagtatgggcttagacaaaaataccgtgcacgatcaggagcatataatggaacacctcgaaggagtaatcaacaagcccgaagctgaaatgagccctcaggaattgcagttgcactactttaagatgcacgattacgacggcaataacttactggatggattggaactttctacagcaatcacccatgtccataaggaagagggctctgaacaggcgcctctgatgtcggaggacgagctaattaacattatcgacggagtcctcagagacgacgacaaaaacaacgatgggtatatcgactacgcagagttcgcaaagagtctgcaatag

SEQ ID NO: 67185 - DNA, 441 bp, Artificial Sequence
  derived and/or modified sequence
atgaccatgcggagtcttcttcgaacaccattcctgtgtggcttgctgtgggcattctgtgcacccggcgctcgcgcagaagaacccgcagccagcttttctcagcctgggtctatgggactggacaagaatacagtgcatgaccaagagcacatcatggaacacctagagggagtgattaacaaaccagaagccgagatgtcccctcaggagctgcagcttcactactttaagatgcatgactacgacggcaataatctactagatgggctggaactctccacagccattacccacgtgcataaggaagaaggatccgagcaggccccacttatgtcagaagacgagctgatcaatatcatcgatggcgtactgagggacgacgacaagaataatgacggatatatcgactatgccgagttcgccaaaagcctgcagtag

SEQ ID NO: 67186 - DNA, 441 bp, Artificial Sequence
  derived and/or modified sequence
atgacaatgcgatcattgctgagaacgcccttcttgtgtgggttgttgtgggctttttgtgctcccggtgccagggctgaggaacccgctgcaagctttagccagccgggatcgatgggattggataaaaatacagttcacgaccaggaacatatcatggaacatctggagggcgtgatcaataagcctgaagccgagatgtcaccacaggagctacaactacactacttcaagatgcacgactatgacggcaacaacctgctcgatggcctcgaactcagcaccgcaatcacccacgtccacaaagaagagggaagcgagcaggctcctttgatgtcagaggacgaactgatcaatatcattgacggagtgctgagagacgatgacaaaaacaatgacgggtatatcgactatgccgagttcgccaagtccctgcaatag

SEQ ID NO: 67187 - DNA, 441 bp, Artificial Sequence
  derived and/or modified sequence
atgacgatgaggtctcttctgcggactccttttctgtgcggtctcctgtgggctttttgcgcacctggagcaagggcggaggagccagccgcaagcttttcccagcccgggtctatgggcctggacaagaacaccgtgcacgatcaggagcacatcatggagcacctggagggagtgattaacaagccagaagctgagatgagcccccaggagcttcaacttcactactttaaaatgcacgattacgacggaaacaacctactggacggcctggagctttctactgcaattacccatgtgcataaagaggaaggaagcgaacaggcacccctgatgtccgaagacgagctgattaatatcattgacggggtgctccgcgacgacgataaaaacaacgacgggtatattgattatgccgagttcgccaagtctttacaatag

SEQ ID NO: 67188 - DNA, 441 bp, Artificial Sequence
  derived and/or modified sequence
atgactatgcgctccctgctgcggacgccttttctatgcggattgctgtgggcattctgtgctcccggtgctagagctgaggagcccgccgcgtcctttagtcagcccggctccatgggactcgataaaaacaccgtacatgaccaggaacacattatggagcacttggagggtgtgatcaacaagccggaagccgaaatgtctcctcaggaactgcagcttcactatttcaaaatgcatgattacgatggcaataatctcctcgatggcctggagctgagtactgccatcacacacgtgcacaaagaagaaggctctgagcaagcgccactaatgtcagaggacgagcttattaacatcatcgatggcgtcttaagggacgatgataaaaataacgacggctatatcgattacgctgagttcgcaaagtcgctgcagtag

SEQ ID NO: 67189 - DNA, 441 bp, Artificial Sequence
  derived and/or modified sequence
atgaccatgcgcagcctacttcgaaccccattcctgtgtggactgctctgggcattctgtgcccctggggcccgggcagaggaacccgccgcttcgtttagtcaacccggctccatgggccttgataaaaataccgtgcacgatcaggaacacatcatggaacaccttgaaggcgttattaataaacctgaggcggaaatgagtcctcaggaactgcagctgcattattttaagatgcatgattacgacggcaacaatctgcttgatggactggagctgagcactgcaatcacgcatgtacacaaggaggagggctcggagcaggctcccctaatgtccgaagatgagctgatcaacattatcgatggagtactgcgggacgacgataagaataacgacgggtacattgattatgcggaatttgccaagagtcttcagtag

SEQ ID NO: 67190 - DNA, 186 bp, Artificial Sequence
  derived and/or modified sequence
atgaccatgagatcgctgcttaggaccccatttttatgcggtcttctctgggccttctgcgcccccggagcccgcgcagaagaacctgctgcatcattttctcagccaggcagcatgggattagataagaatactgtccacgatcaagagcatatcatggaacaccttgaaggggttatcaattag

SEQ ID NO: 67191 - DNA, 441 bp, Artificial Sequence
  derived and/or modified sequence
atgaccatgaggagcctgctgcggacccccttcctgtgtggcctgctgtgggccttctgtgcccctggggcccgggcagaggagcctgctgccagcttcagccagcccggctccatgggcctggacaagaacacagtgcatgaccaggagcacatcatggagcacctggagggcgtcatcaacaagccagaggccgagatgagcccccaggagctgcagctgcactacttcaagatgcatgactatgatggcaacaacctgctggatggcctggagctgagcacagccatcacccacgtgcacaaggaggagggcagcgagcaggcccccctgatgtctgaagatgagctgatcaacatcattgatggagtgctgagagatgatgacaagaacaatgatggctacatcgactatgcagagtttgccaagagcctgcagtag

SEQ ID NO: 67192 - DNA, 186 bp, Artificial Sequence
  derived and/or modified sequence
atgaccatgaggagcctgctgcggacccccttcctgtgtggcctgctgtgggccttctgtgcccctggggcccgggcagaggagcctgctgccagcttcagccagcccggctccatgggcctggacaagaacacagtgcatgaccaggagcacatcatggagcacctggagggcgtcatcaactag

SEQ ID NO: 67193 - DNA, 4182 bp, Artificial Sequence
  derived and/or modified sequence
aatgggcgggcggcagggagcgcgcgtgcgcagggcaggtcggggggggggggggggcggggcgaagccgaggaagagcgttttggggacgggggctggtgaggctcacgttggagggcttcgcgtctgcttcggagaccgtaaggatattgatgaccatgagatccctgctcagaacccccttcctgtgtggcctgctctgggccttttgtgccccaggcgccagggctgaggagcctgcagccagcttctcccaacccggcagcatgggcctggataagaacacagtgcacgaccaagagcatatcatggagcatctagaaggtgtcatcaacaaaccagaggcggagatgtcgccacaagaattgcagctccattacttcaaaatgcatgattatgatggcaataatttgcttgatggcttagaactctccacagccatcactcatgtccataaggaggaagggagtgaacaggcaccactaatgagtgaagatgaactgattaacataatagatggtgttttgagagatgatgacaagaacaatgatggatacattgactatgctgaatttgcaaaatcactgcagtagatgttatttggccatctcctggttatatacaaatgtgacccgtgataatgtgattgaacactttagtaatgcaaaataactcatttccaactactgctgcagcattttggtaaaaacctgtagcgattcgttacactggggtgagaagagataagagaaatgaaagagaagagaaatgggacatctaatagtccctaagtgctattaaataccttattggacaagggcttgcttcaagcatctgtattagtctgtattaatgctgctgataaagacgtacccgagactgggaagaaaaagaggtttacttggacttacagttccacatggctggggaggcctcagaatcatggcgggaggtgaaaggcacttcttacatggcagcaagagaaaatgaggaagaagcaaaagtggaaacccctgataagccatcagatcttgtgaaacttattcactatcacaagaatagcatgggaaagactggcccccatgattcaattacctccccttgggtctctcccacaacacgtgggaattctggtagatacaatttcaagttgagatttgggtggggacatagccaaaccatatcattctacccctggcccctccaaatctcatgtcctcactattcaaaaccaatcatgccttcctaacagtcccccaaagtcttaactcttttcagcattaacgcaaaaatccacagtccaaagtctcatctgagacaaggcaagtcccttccacctatgagcctgtaaaatcaaaagcaagctagttacttcctagataccaacaggggtacaggtattgattaaagacggctgttccaaatgggagaaattggccaaaataaaggggttacagggcccatgcaagtccgaaatccagcagggctgtcaaattttaaagttccagaataatctcctttgactccaggtctcacatccaggtcatactgatgcaagaagtgggttcccatggtcttgggcagctctgcccctgtggctttgtagggtacagcctccctcctggctgctttcacggctgttgttcagtgcctgcggcttttccaggtgcacggtgcaagctgttggtggatctaccattctggggtctggaggacggtggccctcttctcacagctccactaggcagtgccccagtagggactctgtgtgggggctcccacaccacatttcccttctgcactgccctagcagaggttctctcccctgccgctgagagggcctctcccctgcagcaaacgtttgcctgggcattgaggcatttccatacatcttctgaaaactaggcggaggtttccaaatctcaattcttgacttctgtgcacctgcaggcttaacagcacatagaagctgccaaggcttggggcttccactctgaagccacagcccgagctgtatgttggcccctttcagccatggctggagtggctgggacacaagacaccaagtccctaggctgcacacacatgtcaggggctgccctgacatggcctggagacattttccccatggtgttggggattaacattaggctccttgctacttatgcaaatttctgcagctggcttgaatttctccccagaaaatgggtttttcttttctattgcatagtcaggctgcaaatttccaaacttttatgctttgcttcccttatttataagggaatgcctttaaaagcacccaagtcacctgttgaacactttgctgcttagaaatttcttccgctagttaacctaaatcatctctctcaagttcaaagttccacaaatccctatggaaggggcaaaatgctgccagtctctttgctaaaacataacaagagtcacctttactccagttcccaacaagttcctcatcttcatctgaggccacctcagcctggactttgttgtccatattgctatcagcatttggggcaaagccattcaacaagtctgtaggaagttccaaactttcccacattttcctgttttcttctgagccctccaaactgttccagcctctgcctgttacccagttccaaagtcacttccacattttgggtatttcttcagcaggtcccaatctactggtaccaatttactgtattagtccgttttcacgctgctgataaagacatacccgagactgggaagaaaaagtggtttaattggacttaaagttccacatggctggggaggcctcagaatcatggtgggaggcaaaagacacttcttacattgtggcaagaaaaaatgaggaagaagcaaaagcagaaacccctgataaactgatcagatctcatgagacttattcactgtcacgagaatagcacgggaaagactggcccccatgattcaattacctccccctgggtctgtcccacaacacgtgggaattctgggagatacaattcaagttgagatttgtggggggacacaaccaaaccatatcagcatcctttcaagaatattagataattggagctgagtactcaggaacttgactgtagtagaatactgctagtttcttaattttaattcacatcacctgaaaagtaaaacaacaggctttgccaagtggatgcttttcagtaacagtgaagtggagtgaataccaaatgtttgccctggtggttcctatctcttcaggcaaacatggtcagtattctgtaaagttcccctggcctaaatgattacttgctctgggcaagtggatatttattaggctatttcaaagccacagcataagaatgtcagcctagccacagagtctgagattctgagttcagcctagccacagagtctaagattctgtatcctctgacattttggaaatgatacactactggcttaagtgatgactctttcagattttcagtattttatacaactactgccacatccttatactttattgcttttctgtcttcttcaacctgggagagaccctgaatttgagtgtgttctctaatcaatagtggtttagctttcttttctatttcactcgtttctagggttttttatttgcagtttaggaactattaggaatgtcaggactttatcagcaggggtaaaactaccacctggcctagcctaagtaggaagtgaaaagataattcaccaaacaatgattaatcagatagaagttctagtcaagagggatattgttgaagttacctcttttagcctagatacatggattcttttcaaatcaggaaagattagaaaaggaacccaaaaaaccctttaacagtgtgaatctttatagtatttgaaaatgagaagaagcagcagattgtaatttggtttattggatgtgatggacgttctgtaatagaaaacctgaaacgatgattgaatgggaaaaagagactacaaaatttgtcgtaggatgtatacagacttattttctttattacagtattataagaaaacatatgtatttgtaaaaatggtttcctgtgtcaagtatttgtgcagtcagagctgacttgtaaactattcttgtaatagctcattattttgaaagatttatatatgatgaattctggatatatgaccaataaaactgatgaagcaaaa

SEQ ID NO: 67194 - DNA, 4210 bp, Artificial Sequence
  derived and/or modified sequence
acgggggctggtgaggctcacgttggagggcttcgcgtctgcttcggagaccgtaaggctgtcatcagctgtggacgggagccttctgaagggaagcacttgggagcctgcaggacgaatacctacaccagacttggaattgaaaagacctcactggagaaagagacatttgatatattgatgaccatgagatccctgctcagaacccccttcctgtgtggcctgctctgggccttttgtgccccaggcgccagggctgaggagcctgcagccagcttctcccaacccggcagcatgggcctggataagaacacagtgcacgaccaagagcatatcatggagcatctagaaggtgtcatcaacaaaccagaggcggagatgtcgccacaagaattgcagctccattacttcaaaatgcatgattatgatggcaataatttgcttgatggcttagaactctccacagccatcactcatgtccataaggaggaagggagtgaacaggcaccactaatgagtgaagatgaactgattaacataatagatggtgttttgagagatgatgacaagaacaatgatggatacattgactatgctgaatttgcaaaatcactgcagtagatgttatttggccatctcctggttatatacaaatgtgacccgtgataatgtgattgaacactttagtaatgcaaaataactcatttccaactactgctgcagcattttggtaaaaacctgtagcgattcgttacactggggtgagaagagataagagaaatgaaagagaagagaaatgggacatctaatagtccctaagtgctattaaataccttattggacaagggcttgcttcaagcatctgtattagtctgtattaatgctgctgataaagacgtacccgagactgggaagaaaaagaggtttacttggacttacagttccacatggctggggaggcctcagaatcatggcgggaggtgaaaggcacttcttacatggcagcaagagaaaatgaggaagaagcaaaagtggaaacccctgataagccatcagatcttgtgaaacttattcactatcacaagaatagcatgggaaagactggcccccatgattcaattacctccccttgggtctctcccacaacacgtgggaattctggtagatacaatttcaagttgagatttgggtggggacatagccaaaccatatcattctacccctggcccctccaaatctcatgtcctcactattcaaaaccaatcatgccttcctaacagtcccccaaagtcttaactcttttcagcattaacgcaaaaatccacagtccaaagtctcatctgagacaaggcaagtcccttccacctatgagcctgtaaaatcaaaagcaagctagttacttcctagataccaacaggggtacaggtattgattaaagacggctgttccaaatgggagaaattggccaaaataaaggggttacagggcccatgcaagtccgaaatccagcagggctgtcaaattttaaagttccagaataatctcctttgactccaggtctcacatccaggtcatactgatgcaagaagtgggttcccatggtcttgggcagctctgcccctgtggctttgtagggtacagcctccctcctggctgctttcacggctgttgttcagtgcctgcggcttttccaggtgcacggtgcaagctgttggtggatctaccattctggggtctggaggacggtggccctcttctcacagctccactaggcagtgccccagtagggactctgtgtgggggctcccacaccacatttcccttctgcactgccctagcagaggttctctcccctgccgctgagagggcctctcccctgcagcaaacgtttgcctgggcattgaggcatttccatacatcttctgaaaactaggcggaggtttccaaatctcaattcttgacttctgtgcacctgcaggcttaacagcacatagaagctgccaaggcttggggcttccactctgaagccacagcccgagctgtatgttggcccctttcagccatggctggagtggctgggacacaagacaccaagtccctaggctgcacacacatgtcaggggctgccctgacatggcctggagacattttccccatggtgttggggattaacattaggctccttgctacttatgcaaatttctgcagctggcttgaatttctccccagaaaatgggtttttcttttctattgcatagtcaggctgcaaatttccaaacttttatgctttgcttcccttatttataagggaatgcctttaaaagcacccaagtcacctgttgaacactttgctgcttagaaatttcttccgctagttaacctaaatcatctctctcaagttcaaagttccacaaatccctatggaaggggcaaaatgctgccagtctctttgctaaaacataacaagagtcacctttactccagttcccaacaagttcctcatcttcatctgaggccacctcagcctggactttgttgtccatattgctatcagcatttggggcaaagccattcaacaagtctgtaggaagttccaaactttcccacattttcctgttttcttctgagccctccaaactgttccagcctctgcctgttacccagttccaaagtcacttccacattttgggtatttcttcagcaggtcccaatctactggtaccaatttactgtattagtccgttttcacgctgctgataaagacatacccgagactgggaagaaaaagtggtttaattggacttaaagttccacatggctggggaggcctcagaatcatggtgggaggcaaaagacacttcttacattgtggcaagaaaaaatgaggaagaagcaaaagcagaaacccctgataaactgatcagatctcatgagacttattcactgtcacgagaatagcacgggaaagactggcccccatgattcaattacctccccctgggtctgtcccacaacacgtgggaattctgggagatacaattcaagttgagatttgtggggggacacaaccaaaccatatcagcatcctttcaagaatattagataattggagctgagtactcaggaacttgactgtagtagaatactgctagtttcttaattttaattcacatcacctgaaaagtaaaacaacaggctttgccaagtggatgcttttcagtaacagtgaagtggagtgaataccaaatgtttgccctggtggttcctatctcttcaggcaaacatggtcagtattctgtaaagttcccctggcctaaatgattacttgctctgggcaagtggatatttattaggctatttcaaagccacagcataagaatgtcagcctagccacagagtctgagattctgagttcagcctagccacagagtctaagattctgtatcctctgacattttggaaatgatacactactggcttaagtgatgactctttcagattttcagtattttatacaactactgccacatccttatactttattgcttttctgtcttcttcaacctgggagagaccctgaatttgagtgtgttctctaatcaatagtggtttagctttcttttctatttcactcgtttctagggttttttatttgcagtttaggaactattaggaatgtcaggactttatcagcaggggtaaaactaccacctggcctagcctaagtaggaagtgaaaagataattcaccaaacaatgattaatcagatagaagttctagtcaagagggatattgttgaagttacctcttttagcctagatacatggattcttttcaaatcaggaaagattagaaaaggaacccaaaaaaccctttaacagtgtgaatctttatagtatttgaaaatgagaagaagcagcagattgtaatttggtttattggatgtgatggacgttctgtaatagaaaacctgaaacgatgattgaatgggaaaaagagactacaaaatttgtcgtaggatgtatacagacttattttctttattacagtattataagaaaacatatgtatttgtaaaaatggtttcctgtgtcaagtatttgtgcagtcagagctgacttgtaaactattcttgtaatagctcattattttgaaagatttatatatgatgaattctggatatatgaccaataaaactgatgaagcaaaa

SEQ ID NO: 67195 - DNA, 1113 bp, Artificial Sequence
  derived and/or modified sequence
tactcaccggtgtccggaaaggtgaacgctgcgctcgggctgcctcgcctgttacctccgccgccgggcatgctcagcgtctgcagctgccggaccagctccggcatgcggtcccagtggccctcggcgcggcagcgctccagctcgctctccaccttcagatattgatgaccatgagatccctgctcagaacccccttcctgtgtggcctgctctgggccttttgtgccccaggcgccagggctgaggagcctgcagccagcttctcccaacccggcagcatgggcctggataagaacacagtgcacgaccaagagcatatcatggagcatctagaaggtgtcatcaacaaaccagaggcggagatgtcgccacaagaattgcagctccattacttcaaaatgcatgattatgatggcaataatttgcttgatggcttagaactctccacagccatcactcatgtccataaggaggaagggagtgaacaggcaccactaatgagtgaagatgaactgattaacataatagatggtgttttgagagatgatgacaagaacaatgatggatacattgactatgctgaatttgcaaaatcactgcagtagatgttatttggccatctcctggttatatacaaatgtgacccgtgataatgtgattgaacactttagtaatgcaaaataactcatttccaactactgctgcagcattttggtaaaaacctgtagcgattcgttacactggggtgagaagagataagagaaatgaaagagaagagaaatgggacatctaatagtccctaagtgctattaaataccttattggacaagggcttgcttcaagcatctgtattagtctgtattaatgctgctgataaagacgtacccgagactgggaagaaaaagaggtttacttggacttacagttccacatggctggggaggcctcagaatcatggcgggaggtgaaaggcacttcttacatggcagcaagagaaaatgaggaagaagcaaaagtggaaacccctgataagccatcagatcttgtgaaacttattcactatcacaagaatagcatgggaaagactggcccccatgattcaattacctc

SEQ ID NO: 67196 - DNA, 648 bp, Artificial Sequence
  derived and/or modified sequence
ggatccgccatcctacgtcgcccgtggaactacgttcctgagggcttccggcgttgcctagcaactgccgggcccctagggcgtccagcggcccaactggagtggagccgagtgtcgcccttgggaaagcagatattgatgaccatgagatccctgctcagaacccccttcctgtgtggcctgctctgggccttttgtgccccaggcgccagggctgaggagcctgcagccagcttctcccaacccggcagcatgggcctggataagaacacagtgcacgaccaagagcatatcatggagcatctagaaggtgtcatcaacaaaccagaggcggagatgtcgccacaagaattgcagctccattacttcaaaatgcatgattatgatggcaataatttgcttgatggcttagaactctccacagccatcactcatgtccataaggaggaagggagtgaacaggcaccactaatgagtgaagatgaactgattaacataatagatggtgttttgagagatgatgacaagaacaatgatggatacattgactatgctgaatttgcaaaatcactgcagtagatgttatttggccatctcctggttatatacaaatgtgacccgtgataatgtgattgaacactttagtaa

SEQ ID NO: 67197 - DNA, 821 bp, Artificial Sequence
  derived and/or modified sequence
ggggcgaagccgaggaagagcgttttggggacgggggctggtgaggctcacgttggagggcttcgcgtctgcttcggagaccgtaaggagatgggggtctgactgtgttgtctaggctgatctcaaactcctggcctcaagtgatcctcctgcctcagcctcccaaagtgctgggattacagatattgatgaccatgagatccctgctcagaacccccttcctgtgtggcctgctctgggccttttgtgccccaggcgccagggctgaggagcctgcagccagcttctcccaacccggcagcatgggcctggataagaacacagtgcacgaccaagagcatatcatggagcatctagaaggtgtcatcaacaaaccagaggcggagatgtcgccacaagaattgcagctccattacttcaaaatgcatgattatgatggcaataatttgcttgatggcttagaactctccacagccatcactcatgtccataaggaggaagggagtgaacaggcaccactaatgagtgaagatgaactgattaacataatagatggtgttttgagagatgatgacaagaacaatgatggatacattgactatgctgaatttgcaaaatcactgcagtagatgttatttggccatctcctggttatatacaaatgtgacccgtgataatgtgattgaacactttagtaatgcaaaataactcatttccaactactgctgcagcattttggtaaaaacctgtagcgattcgttacactggggtgagaagagataagagaaatgaaagagaagagaaatgggacatctaatagt

SEQ ID NO: 67198 - DNA, 588 bp, Artificial Sequence
  derived and/or modified sequence
acttccctgattcagcgatgagccaggtcagctcagcagagatcagtaagagatgggggtctgactgtgttgtctaggctgatctcaaactcctggcctcaagtgatcctcctgcctcagcctcccaaagtgctgggattacagatattgatgaccatgagatccctgctcagaacccccttcctgtgtggcctgctctgggccttttgtgccccaggcgccagggctgaggagcctgcagccagcttctcccaacccggcagcatgggcctggataagaacacagtgcacgaccaagagcatatcatggagcatctagaaggtgtcatcaacaaaccagaggcggagatgtcgccacaagaattgcagctccattacttcaaaatgcatgattatgatggcaataatttgcttgatggcttagaactctccacagccatcactcatgtccataaggaggaagggagtgaacaggcaccactaatgagtgaagatgaactgattaacataatagatggtgttttgagagatgatgacaagaacaatgatggatacattgactatgctgaatttgcaaaatcactgcag

SEQ ID NO: 67199 - DNA, 565 bp, Artificial Sequence
  derived and/or modified sequence
agtaaggtaaatgagagccagaggagagagggtcctgactctcagagagggaggaaaagagaaaaatggaaaaggagaacaacctgtgatcgtatgttcaggtcaaatgagtgtgagaggctacagactgaggtcggatgagagagcaattggtcttggctggaagaatcctgaggtgacatttgaacctgtcctggaaggaagttggagatggacagatggaaccagtaggagcggaggctgtggtacaggaagaggctggcagagcaggaggggagcactgtgacagccaaggcactgggaggcgcactgctcctgatggtccagcactgccctcccaggactgaggctgcgccttgtgagggctgtctcaagatattgatgaccatgagatccctgctcagaacccccttcctgtgtggcctgctctgggccttttgtgccccaggcgccagggctgaggagcctgcagccagcttctcccaacccggcagcatgggcctggataagaacacagtgcacgaccaagagcatatcatggagcatctagaaggtgtcatcaaca

SEQ ID NO: 67200 - DNA, 441 bp, Artificial Sequence
  derived and/or modified sequence
atgaccatgcggagcctgctgcggacccccttcctgtgcggcctgctctgggccttttgcgcccccggggcaagggcggaggagccagctgcctcatttagccagcctggttccatgggcctagacaagaacacagtacacgatcaagagcacatcatggaacaccttgaaggagtgatcaataaacccgaagcagagatgtccccccaggaacttcaactgcattatttcaagatgcatgattatgacggcaataatctgctggatggtctcgaacttagcactgctatcactcacgtgcataaggaggagggtagcgaacaagcaccactcatgtctgaagacgaattgataaatataattgacggggtactgcgagatgatgataagaacaacgatggttacatagattacgccgagtttgctaaatcattgcagtag

SEQ ID NO: 67201 - DNA, 441 bp, Artificial Sequence
  derived and/or modified sequence
atgaccatgcggagcctgctgcggacccccttcctgtgcggcctgctctgggccttctgcgcacccggggcccgagccgaagagccagcagcctctttctcacaaccgggctctatggggcttgacaaaaataccgtgcacgaccaggagcatatcatggagcacttggagggcgtcattaataaaccagaagctgagatgagtcctcaggaacttcagctgcattactttaaaatgcacgactacgacggcaataatctgcttgatgggctggagcttagtactgccatcacacatgtgcacaaagaagaaggcagcgaacaggcccccctgatgtctgaagatgaactgatcaacattatagacggcgtgctacgcgacgatgacaaaaacaatgacggatatattgattacgccgaattcgccaaatctcttcaatag

SEQ ID NO: 67202 - DNA, 441 bp, Artificial Sequence
  derived and/or modified sequence
atgaccatgcggagcctgctgcggacccccttcctgtgcggcctgttgtgggctttttgtgcaccaggcgcccgggctgaagaaccagctgcttcattctcccagccaggatcaatgggcttggataaaaacaccgtgcatgaccaagaacatatcatggaacacctggagggtgtcataaataaacccgaggctgagatgtccccgcaggagttgcagctgcattactttaagatgcacgattatgacgggaataatttgctggacggacttgagctaagcactgctatcacgcacgtccataaagaggagggctccgagcaagcacccctcatgagcgaagacgagttaattaacataatcgatggtgttcttagggacgatgataagaacaacgatggatatatagactacgcagaattcgccaaatccctgcaatag

SEQ ID NO: 67203 - DNA, 441 bp, Artificial Sequence
  derived and/or modified sequence
atgaccatgcggagcctgctgcggacccccttcctgtgcggcctgttgtgggccttctgcgcacccggagcccgcgcggaggagcccgccgctagcttctcacagccaggcagcatggggctcgataaaaacactgtgcacgaccaggagcacatcatggagcacttagagggcgttatcaataagccagaggctgagatgtcaccccaagagctacagttgcactactttaaaatgcatgactatgatggcaataacttactcgatggactcgagttgagcaccgccattacccatgtgcacaaagaagaaggtagcgaacaggctccgctcatgagcgaagacgagctcattaacataatcgatggcgtacttcgagacgacgacaagaataatgacgggtacatcgactacgccgagttcgcaaagtctcttcagtag

SEQ ID NO: 67204 - DNA, 441 bp, Artificial Sequence
  derived and/or modified sequence
atgaccatgcggagcctgctgcggacccccttcctgtgcggcctgttatgggctttttgtgcaccaggcgcacgggccgaggagcccgcagcaagcttttctcaaccaggatcaatgggcttggacaagaatacggtccacgatcaagaacatattatggagcatctggagggtgtgatcaacaagccagaagccgaaatgtctccccaggagctccagctccactactttaaaatgcatgactatgatgggaacaatctccttgacggtcttgaactgagcacagcaattactcatgtgcacaaggaggaagggtctgagcaggctccacttatgagcgaagatgagctgatcaatatcatcgacggcgtgctccgtgatgacgataaaaacaacgacggttacatcgattacgccgaattcgctaagagcctccagtag

SEQ ID NO: 67205 - DNA, 441 bp, Artificial Sequence
  derived and/or modified sequence
atgaccatgcggagcctgctgcggacccccttcctgtgcggcctgctctgggcgttctgtgcgccaggggccagagccgaggagccagcagcaagcttttcgcagccaggatcgatgggcttagacaagaacactgtgcatgaccaagagcatatcatggaacacttagaaggggttatcaacaagccagaagctgagatgagccctcaggaactacaacttcactacttcaagatgcacgactacgacggcaacaacttactcgacggtttagagctaagcacagctatcacccatgtacacaaggaagagggctcagagcaggccccacttatgtcggaggacgaactgattaatataatcgacggcgtgctccgtgatgatgacaagaataatgacggctacattgattacgcggagttcgctaagtccctccagtag

SEQ ID NO: 67206 - DNA, 186 bp, Artificial Sequence
  derived and/or modified sequence
atgaccatgcggagcctgctgcggacccccttcctgtgcggcctgctgtgggccttttgtgccccaggcgcacgggccgaggagcccgccgcatcattttcacagcccggctctatgggactcgacaaaaacacagtgcacgaccaggagcatattatggagcacctcgaaggggtgattaactag

SEQ ID NO: 67207 - DNA, 441 bp, Artificial Sequence
  derived and/or modified sequence
atgacaatgcgcagtctgctgcgcaccccatttttatgcggcctgctttgggctttttgcgctcctggtgccagagcagaggagcccgctgcctcttttagtcagccgggtagcatgggattggataaaaacacggtgcatgatcaagagcatattatggaacatttggaaggcgtgattaacaagcccgaagcggagatgtcccctcaggaactgcagctgcactacttcaagatgcacgattatgacggtaacaatctcctcgatggcctggaactctccacagccataacccacgtgcacaaggaagaagggtccgaacaggctcccctgatgtccgaggatgagttgatcaacattatcgacggagtgctgcgcgatgatgacaaaaataatgacggatacatcgactacgccgagttcgccaagtcactgcaatag

SEQ ID NO: 67208 - DNA, 441 bp, Artificial Sequence
  derived and/or modified sequence
atgaccatgcgtagcctgctgcggactccctttctctgtggtctcttatgggcgttctgtgcccctggtgccagagcagaggaaccagcagcgtctttctctcagcctggtagcatgggcctggataaaaacaccgtgcacgaccaggaacacatcatggaacacctcgaaggtgttattaataagcctgaagcggagatgtcccctcaagagctccagctgcactacttcaagatgcacgattacgacggcaataaccttctagatggcctggagttgtcaacagccatcacacatgttcacaaggaggaaggctctgagcaagcccctcttatgtcagaagacgagttgatcaatatcatcgacggcgttcttcgggacgatgacaaaaataacgatggctacatcgattatgctgaattcgctaaatctctacagtag

SEQ ID NO: 67209 - DNA, 441 bp, Artificial Sequence
  derived and/or modified sequence
atgactatgcgtagcctcttacgcacacctttcctttgcgggttactttgggccttctgcgctcccggagctagagccgaagagcccgctgcgagcttcagccagcctggatctatgggcctggacaaaaataccgtgcacgatcaggagcacatcatggagcacttagagggtgtgatcaacaaacccgaggccgagatgagcccccaggaactgcagttgcactattttaaaatgcatgactatgacggtaataacctgctggacggcttagaactgagcaccgctatcacccacgtacacaaggaagagggctcagagcaggctccccttatgtcagaagatgaattgataaacatcattgatggagttctgagggatgacgacaagaacaatgacggctacatagattatgcggagttcgccaagtctctgcagtag

SEQ ID NO: 67210 - DNA, 441 bp, Artificial Sequence
  derived and/or modified sequence
atgacgatgcgatcattactgagaacccctttcctgtgcggcctgctgtgggcgttctgcgccccaggcgctcgagccgaagagcccgctgccagcttctcacagccaggcagtatgggactcgataaaaacaccgtgcacgatcaggagcatatcatggagcacctcgagggcgtgattaacaagccggaggccgagatgtcacctcaggaactccagctgcattacttcaagatgcatgattacgacgggaataatctgctcgacgggttggagctgtcaaccgccatcacgcacgttcacaaagaggagggcagtgaacaggcgcctctgatgagtgaagatgaattaatcaacataatcgatggcgttttgagagatgatgacaagaataacgacgggtacatcgattatgctgagttcgcgaagtctcttcaatag

SEQ ID NO: 67211 - DNA, 441 bp, Artificial Sequence
  derived and/or modified sequence
atgacaatgcgcagcttgttgcgcaccccctttctgtgtggtctgctgtgggcattttgcgcgccaggggctcgggctgaggagcctgccgcttcattttcacagcctggttccatgggtttggacaagaacactgtccacgatcaggagcacattatggaacatttggagggcgttataaataagccagaagctgagatgagccctcaagaactccagctccactactttaagatgcacgactatgacggaaataacctgcttgacggattggagctgagcacagcgatcacacacgtgcataaagaagagggctccgagcaggcacctctgatgtctgaggatgaactgatcaacattatcgacggggttttgagggacgatgacaagaacaatgacgggtacatcgattacgccgagtttgcaaagtcactccagtag

SEQ ID NO: 67212 - DNA, 441 bp, Artificial Sequence
  derived and/or modified sequence
atgaccatgagatctctcctccgcacccctttcttatgtggactgctttgggctttctgcgcgccaggggctcgcgctgaagaaccggctgcatcttttagccagcccggaagcatggggttggacaagaataccgttcatgatcaagaacacatcatggagcacctggagggggtgatcaataagcccgaagccgagatgtcaccccaagagctacaattgcattacttcaagatgcacgattatgacggtaacaacttacttgacgggcttgaactttctactgccatcacacacgtccataaggaagaaggctctgagcaggctcccttgatgtccgaagatgagttaatcaatatcatagatggggtattgcgggatgatgataaaaacaatgacggatatattgattatgctgagttcgcgaagtccttgcagtag

SEQ ID NO: 67213 - DNA, 186 bp, Artificial Sequence
  derived and/or modified sequence
atgactatgcggtccctgctcaggacaccctttttgtgtggcctgctttgggccttttgtgctcccggagcccgagccgaagaacctgccgctagcttctctcagcccggtagcatgggactggacaaaaacaccgtgcacgaccaggaacacattatggagcacctagagggcgtgattaactag

SEQ ID NO: 67214 - DNA, 441 bp, Artificial Sequence
  derived and/or modified sequence
atgacgatgagatccctgctgaggacaccttttttgtgtgggctcctttgggctttttgtgcacctggtgctcgcgccgaagagccagcggcatcctttagccagcctggcagtatgggtctggataaaaacacagtgcatgaccaagaacacattatggaacacttagagggggtcatcaacaagcccgaggcagagatgtcaccccaagagctgcaactgcattattttaagatgcacgattatgacgggaataatcttctagatggtttagagctttcaacagcaataacacacgtacataaagaagagggatctgaacaagcccccctcatgtcagaagacgagcttatcaacatcatcgacggtgtgcttagagacgatgacaagaacaatgatggctatattgactacgccgaattcgccaagagcctccagtag

SEQ ID NO: 67215 - DNA, 441 bp, Artificial Sequence
  derived and/or modified sequence
atgaccatgcgatctctcctccgaacacccttcctatgcgggcttttgtgggccttctgcgcgccaggtgcacgtgcagaagagccagcggcctcgtttagtcaacctggatcaatgggcctggacaaaaatactgtgcacgatcaggaacacataatggaacacctcgagggcgtcatcaacaagcctgaagccgagatgtcaccacaagaacttcagctgcactacttcaaaatgcacgactacgacggcaacaacctgttagacggtctggaactgtcaacagccatcacacacgttcacaaggaggaagggagtgagcaggccccccttatgtccgaagacgaattgattaacatcatcgacggcgttctcagggacgatgataagaacaatgacgggtacatcgactatgccgagtttgccaaatcccttcaatag

SEQ ID NO: 67216 - DNA, 441 bp, Artificial Sequence
  derived and/or modified sequence
atgacaatgcgatctctgctacgaacccctttcttgtgcggcctgttatgggcattttgcgctcctggcgctagggcagaggaacccgcagcttctttctctcaacccggatccatggggctggataagaataccgtacatgaccaggagcacataatggaacacctcgagggcgtgattaacaagccagaggctgaaatgtctccccaagaattgcagctgcattactttaaaatgcatgactatgacggaaataacctcctagatggactggagctcagcaccgcaatcacgcacgtgcacaaggaggaaggatccgaacaagcaccattgatgagcgaagatgaactgattaatatcatagacggtgtcctccgggacgacgataagaacaacgacggatatattgactacgccgaattcgcgaaaagcctgcagtag

SEQ ID NO: 67217 - DNA, 441 bp, Artificial Sequence
  derived and/or modified sequence
atgacgatgagaagtttgcttagaacacccttcttatgtggactgctttgggctttctgcgcccccggcgctcgcgctgaagaacctgcagctagtttctcccaacccggctcaatgggccttgacaaaaacactgtgcacgatcaggagcatattatggaacatctggagggcgtaatcaacaaacctgaagcggagatgtcaccacaagaacttcagttacattactttaagatgcacgattatgacggtaacaacctgttggatgggctcgaactctcaacagccatcacacacgtgcacaaggaagaaggctcggagcaggcccctttgatgagtgaagatgaacttataaacatcattgacggcgtgttgcgggatgacgacaaaaacaatgacggttatatagactatgctgaattcgctaaatctctccagtag

SEQ ID NO: 67218 - DNA, 441 bp, Artificial Sequence
  derived and/or modified sequence
atgacgatgaggtctctgcttcgcacacccttcctttgtggcttactctgggccttctgtgcaccaggagcacgcgctgaggagcctgctgccagcttttcacaacccgggagtatggggctcgataaaaacacagtccacgaccaagaacacattatggagcaccttgagggcgtaatcaacaaacctgaggctgaaatgagtcctcaagaactgcagcttcattattttaagatgcatgactatgacggcaataaccttctcgatggcctcgaactgtctactgcaatcacccacgttcataaagaggagggaagcgagcaggcacctctgatgagtgaagatgaattaattaacataattgacggcgtacttcgagatgatgataaaaacaacgatggctacatagactacgctgagtttgctaagtccttgcagtag

SEQ ID NO: 67219 - DNA, 441 bp, Artificial Sequence
  derived and/or modified sequence
atgacaatgagatccttgctaaggacacccttcctctgcggtttgctttgggccttttgtgctccaggcgcccgggccgaagaacctgccgcaagtttctctcagcccggctctatgggactagacaaaaatactgttcatgatcaggaacacatcatggaacatttggagggcgtgataaataaaccggaagctgaaatgtccccccaggagctccagttacactactttaagatgcacgattacgatggaaataatctgcttgatgggctcgaattatccacagcaatcacccacgtgcataaagaagaaggttcagaacaagcaccattgatgagtgaggacgaactgatcaacatcattgacggcgtacttagggatgatgataagaataacgatggctacatagattatgccgaattcgccaagagcctacaatag

SEQ ID NO: 67220 - DNA, 186 bp, Artificial Sequence
  derived and/or modified sequence
atgacaatgagatccctattgcgaacccccttcctctgcggccttttgtgggcattctgcgcgccaggagccagagccgaagaaccagcagcgagcttctcccaacctggctccatgggacttgacaagaatactgtgcatgaccaagagcacattatggagcatctggagggcgtgatcaattag

SEQ ID NO: 67221 - DNA, 441 bp, Artificial Sequence
  derived and/or modified sequence
atgactatgcgctcactgctacgcaccccctttctgtgtggtctactttgggctttttgtgctccaggagcccgtgctgaggagcccgccgcatccttttcccagccaggatctatgggcttagacaagaacacagtgcatgatcaggaacacattatggagcacttagagggggtcattaacaaacctgaagccgaaatgtcacctcaagaattacagctccattatttcaagatgcacgactacgatgggaataatctgctggacggattagagttgagtactgcaatcacccacgttcataaagaggagggatcggaacaggcgcctttaatgagtgaagacgaactgattaatattattgacggagtcctcagagatgatgataagaataacgacgggtacatagattacgctgagttcgcgaaaagcttacagtag

SEQ ID NO: 67222 - DNA, 441 bp, Artificial Sequence
  derived and/or modified sequence
atgaccatgcgatctctcctccgaacacccttcctatgcgggcttttgtgggccttctgcgcgccaggtgcacgtgcagaagagccagcggcctcgtttagtcaacctggatcaatgggcctggacaaaaatactgtgcacgatcaggaacacataatggaacacctcgagggcgtcatcaacaagcctgaagccgagatgtcaccacaagaacttcagctgcactacttcaaaatgcacgactacgacggcaacaacctgttagacggtctggaactgtcaacagccatcacacacgttcacaaagaggaaggaagtgaacaagccccacttatgtcagaagacgagcttatcaatatcattgacggcgtgctgagggacgatgacaagaacaacgatggatacatagattacgcagagtttgcaaaaagcttgcagtag

SEQ ID NO: 67223 - DNA, 441 bp, Artificial Sequence
  derived and/or modified sequence
atgactatgaggagtttactgcgtactccatttctatgcggacttctatgggctttctgcgcgcccggtgctcgagccgaagagcccgcggcatccttcagccaacctgggagcatggggcttgataaaaatacagttcatgaccaggaacacattatggaacatctagagggcgtgattaataaacctgaagccgaaatgagcccccaggaattacagctacactatttcaagatgcatgattacgacggcaataacctcttggatggactggagctatccacggcaatcacacacgtccataaagaagagggaagcgagcaggcaccactcatgagcgaggacgagctgatcaacatcatagacggagtacttagggatgacgacaaaaataatgacggctatatcgactacgcggaattcgccaaatcgttacagtag

SEQ ID NO: 67224 - DNA, 441 bp, Artificial Sequence
  derived and/or modified sequence
atgacgatgagaagtttgcttagaacacccttcttatgtggactgctttgggctttctgcgcccccggcgctcgcgctgaagaacctgcagctagtttctcccaacccggctcaatgggccttgacaaaaacactgtgcacgatcaggagcatattatggaacatctggagggcgtaatcaacaaacctgaagcggagatgtcaccacaagaacttcagttacattactttaagatgcacgattatgacggtaacaacctgttggatgggctcgaactctcaacagccatcacacacgtgcacaaagaggagggatccgaacaagccccactgatgtctgaggatgagttgattaacattattgacggcgtattaagggacgacgacaaaaacaacgacgggtacatagactatgcagaatttgccaaaagtctacagtag

SEQ ID NO: 67225 - DNA, 441 bp, Artificial Sequence
  derived and/or modified sequence
atgacgatgaggtctctgcttcgcacacccttcctttgtggcttactctgggccttctgtgcaccaggagcacgcgctgaggagcctgctgccagcttttcacaacccgggagtatggggctcgataaaaacacagtccacgaccaagaacacattatggagcaccttgagggcgtaatcaacaaacctgaggctgaaatgagtcctcaagaactgcagcttcattattttaagatgcatgactatgacggcaataaccttctcgatggcctcgaactgtctactgcaatcacccacgttcacaaagaagaaggttctgaacaggcaccattaatgtccgaggatgagctaataaatattatcgacggcgttctgagggatgacgacaagaataacgacgggtacatcgattacgctgagtttgcaaaatccttacaatag

SEQ ID NO: 67226 - DNA, 441 bp, Artificial Sequence
  derived and/or modified sequence
atgacaatgagatccttgctaaggacacccttcctctgcggtttgctttgggccttttgtgctccaggcgcccgggccgaagaacctgccgcaagtttctctcagcccggctctatgggactagacaaaaatactgttcatgatcaggaacacatcatggaacatttggagggcgtgataaataaaccggaagctgaaatgtccccccaggagctccagttacactactttaagatgcacgattacgatggaaataatctgcttgatgggctcgaattatccacagcaatcacccacgtgcacaaggaagagggatcagaacaggcacctcttatgagcgaagacgagctaatcaacattattgatggagtgttacgagacgatgataaaaataacgacggctacatagattacgcggagtttgccaaatcactccagtag

SEQ ID NO: 67227 - DNA, 441 bp, Artificial Sequence
  derived and/or modified sequence
atgaccatgagaagcctgctgagaacccccttcctgtgcggcctgctgtgggccttctgcgcccccggcgccagagccgaggagcccgccgccagcttcagccagcccggcagcatgggcctggacaagaacaccgtgcacgaccaggagcacatcatggagcacctggagggcgtgatcaacaagcccgaggccgagatgagcccccaggagctgcagctgcactacttcaagatgcacgactacgacggcaacaacctgctggacggcctggagctgagcaccgccatcacccacgtgcacaaggaggagggcagcgagcaggcccccctgatgagcgaggacgagctgatcaacatcatcgacggcgtgctgagagacgacgacaagaacaacgacggctacatcgactacgccgagttcgccaagagcctgcagtag

SEQ ID NO: 67228 - DNA, 186 bp, Artificial Sequence
  derived and/or modified sequence
atgaccatgagaagcctgctgagaacccccttcctgtgcggcctgctgtgggccttctgcgcccccggcgccagagccgaggagcccgccgccagcttcagccagcccggcagcatgggcctggacaagaacaccgtgcacgaccaggagcacatcatggagcacctggagggcgtgatcaactag

SEQ ID NO: 67229 - RNA, 186 nt, Artificial Sequence
  derived and/or modified sequence
augacaaugagaucccuauugcgaacccccuuccucugcggccuuuugugggcauucugcgcgccaggagccagagccgaagaaccagcagcgagcuucucccaaccuggcuccaugggacuugacaagaauacugugcaugaccaagagcacauuauggagcaucuggagggcgugaucaauuag

SEQ ID NO: 67230 - DNA, 285 bp, Artificial Sequence
  derived and/or modified sequence
atggaacacctggagggggtcatcaataagccagaggccgaaatgtctccacaagagctccagttacactacttcaagatgcacgactatgacggtaacaatcttctggatggtcttgagctgtccacagctatcacacacgtgcacaaagaagagggatccgaacaagcccccctgatgagtgaggacgaactcatcaatatcattgacggtgtgctgcgggacgacgataagaataatgacggttatatagactacgccgaattcgccaaatcattacagtag

SEQ ID NO: 67231 - DNA, 285 bp, Artificial Sequence
  derived and/or modified sequence
atggagcatcttgagggagtgataaataagcctgaggcagagatgagtccgcaagaactgcagctgcactattttaaaatgcatgactatgacgggaataacttgctggatgggctggagctctctaccgctataacccacgtgcataaagaagaagggtccgagcaggcccctcttatgagcgaagacgagcttatcaatataatcgacggtgtacttcgagacgacgataagaacaacgatggttacattgactacgccgagttcgcaaagagcctgcagtag

SEQ ID NO: 67232 - DNA, 285 bp, Artificial Sequence
  derived and/or modified sequence
atggagcatctcgagggggtgattaacaagccagaggcggagatgagcccccaggaactgcagcttcattatttcaagatgcacgactacgacggtaataacctgctggacggacttgagctaagcacagcaatcactcacgtgcataaggaggaaggctcggagcaagcacccttgatgtctgaggatgagctcattaacataatcgatggcgttctgcgcgacgacgacaagaacaacgatggatacattgattatgccgaattcgctaagagtttgcagtag

SEQ ID NO: 67233 - DNA, 285 bp, Artificial Sequence
  derived and/or modified sequence
atggagcacctggagggcgtcatcaacaagccagaggccgagatgagcccccaggagctgcagctgcactacttcaagatgcatgactatgatggcaacaacctgctggatggcctggagctgagcacagccatcacccacgtgcacaaggaggagggcagcgagcaggcccccctgatgtctgaagatgagctgatcaacatcattgatggagtgctgagagatgatgacaagaacaatgatggctacatcgactatgcagagtttgccaagagcctgcagtag

SEQ ID NO: 67234 - DNA, 285 bp, Artificial Sequence
  derived and/or modified sequence
atggagcacctggagggcgtgatcaacaagcccgaggccgagatgagtccccaagaattgcagttgcactatttcaagatgcacgactacgacggcaataacttgctcgacggattggaattaagcacagccattacccacgtgcacaaggaagaaggctctgaacaggcgcccctgatgtccgaagacgagctgattaacataatcgatggggttttgcgcgacgatgacaagaataacgacggttacattgactacgccgagttcgctaagagtttgcaatag

SEQ ID NO: 67235 - DNA, 285 bp, Artificial Sequence
  derived and/or modified sequence
atggagcacctggagggcgtgatcaacaagcccgaggccgagatgtccccccaggagcttcagctccattatttcaagatgcatgactatgacggcaacaacctgttagacggcttagagctaagtactgcaatcacccatgtgcataaagaagagggatccgagcaagcgccactgatgagtgaagacgagttaatcaacatcattgatggtgtgttgcgcgatgacgacaagaacaacgacggatacattgattacgcggagtttgccaagtctctccaatag

SEQ ID NO: 67236 - DNA, 285 bp, Artificial Sequence
  derived and/or modified sequence
atggagcacctggagggcgtgatcaacaagcccgaggccgagatgtctccacaggaacttcaactgcattactttaagatgcacgactacgatggaaacaatctgctcgacggtctggagctctctactgccatcactcatgtgcacaaggaggagggctctgaacaggccccattgatgagtgaggacgagctgattaatatcatcgacggggttttgagggacgacgacaagaacaacgatggatatatagattatgcagagttcgcaaagtcactgcaatag

SEQ ID NO: 67237 - DNA, 285 bp, Artificial Sequence
  derived and/or modified sequence
atggagcaccttgaaggcgtcatcaacaagcccgaggccgaaatgtcaccacaggagctgcagctccactactttaagatgcatgactacgacgggaacaatcttttggacggactagagttaagcacagccataacgcacgttcacaaagaggagggatccgagcaggctccactaatgtcagaggatgaactcattaacattatagacggtgtgctccgcgatgatgataaaaacaacgatggctacattgattatgccgaatttgctaagtcgcttcagtag

SEQ ID NO: 67238 - DNA, 285 bp, Artificial Sequence
  derived and/or modified sequence
atggagcacctggagggtgtgattaacaaacctgaggctgagatgtcaccccaagaactgcaacttcactatttcaagatgcacgactatgacggcaacaacttgctggatgggctcgagctgtcaaccgccattacccacgttcacaaagaagaagggagtgagcaggctcctctgatgtccgaagacgaactgattaacatcatcgacggggtactcagagatgacgacaaaaataacgatggctatattgactatgccgagttcgcaaagtccctgcaatag

SEQ ID NO: 67239 - DNA, 285 bp, Artificial Sequence
  derived and/or modified sequence
atggagcacttagagggagtgattaacaaacccgaggcagaaatgtcacctcaggagctccagttacattacttcaagatgcacgattatgacgggaacaatctcctggacggcctggaactgagcactgcaatcactcacgtgcataaggaggaaggctcggaacaggcaccactgatgagtgaggatgagctaatcaatatcattgacggggttctgcgagacgatgataagaataacgatggctacatcgattatgccgaattcgcaaagtcgcttcagtag

SEQ ID NO: 67240 - DNA, 285 bp, Artificial Sequence
  derived and/or modified sequence
atggagcacctggaaggagtgatcaataagccggaagctgagatgtcgcctcaagaacttcaattacattacttcaaaatgcacgactacgatggcaacaaccttctcgacggattagagctgagtacggctatcacccacgtccataaagaagaaggcagcgaacaagcaccgcttatgtcagaggacgaacttattaatattatagatggcgtgctaagggacgacgataaaaataacgatggttatattgactacgccgagtttgccaagtcattgcagtag

SEQ ID NO: 67241 - DNA, 285 bp, Artificial Sequence
  derived and/or modified sequence
atggaacatttggagggtgtgatcaacaaacctgaagcagaaatgtccccacaagaactgcagctacattactttaaaatgcacgactatgatggcaacaacttgttggatggtttagaactgagcaccgcgattactcacgtccacaaagaggagggttccgagcaggcaccactcatgagtgaagacgaattaattaatatcatcgacggggtcttgagggacgacgacaagaataatgatggctatattgactatgcagaatttgcaaagagcctgcaatag

SEQ ID NO: 67242 - DNA, 285 bp, Artificial Sequence
  derived and/or modified sequence
atggaacacctggagggtgtaataaacaaaccagaggccgaaatgagcccacaggagttgcagcttcactatttcaagatgcacgattacgatgggaataacctgcttgacggtttagaactgtctaccgcaatcacccacgtacataaggaggaaggctctgaacaagcaccactgatgtccgaggacgaactgataaacataatcgacggtgtattgagggatgacgataaaaataacgatgggtacattgactatgctgagttcgcaaagtcgctacagtag

SEQ ID NO: 67243 - DNA, 285 bp, Artificial Sequence
  derived and/or modified sequence
atggagcacctggagggcgtgatcaacaagcccgaggccgagatgagcccccaggagctgcagctgcactacttcaagatgcacgactacgacggcaacaacctgctggacggcctggagctgagcaccgccatcacccacgtgcacaaggaggagggcagcgagcaggcccccctgatgagcgaggacgagctgatcaacatcatcgacggcgtgctgagagacgacgacaagaacaacgacggctacatcgactacgccgagttcgccaagagcctgcagtag

SEQ ID NO: 67244 - RNA, 285 nt, Artificial Sequence
  derived and/or modified sequence
auggagcaccuggaaggagugaucaauaagccggaagcugagaugucgccucaagaacuucaauuacauuacuucaaaaugcacgacuacgauggcaacaaccuucucgacggauuagagcugaguacggcuaucacccacguccauaaagaagaaggcagcgaacaagcaccgcuuaugucagaggacgaacuuauuaauauuauagauggcgugcuaagggacgacgauaaaaauaacgaugguuauauugacuacgccgaguuugccaagucauugcaguag

SEQ ID NO: 67245 - RNA, 285 nt, Artificial Sequence
  derived and/or modified sequence
auggaacauuuggagggugugaucaacaaaccugaagcagaaauguccccacaagaacugcagcuacauuacuuuaaaaugcacgacuaugauggcaacaacuuguuggaugguuuagaacugagcaccgcgauuacucacguccacaaagaggaggguuccgagcaggcaccacucaugagugaagacgaauuaauuaauaucaucgacggggucuugagggacgacgacaagaauaaugauggcuauauugacuaugcagaauuugcaaagagccugcaauag

SEQ ID NO: 67246 - RNA, 285 nt, Artificial Sequence
  derived and/or modified sequence
auggaacaccuggaggguguaauaaacaaaccagaggccgaaaugagcccacaggaguugcagcuucacuauuucaagaugcacgauuacgaugggaauaaccugcuugacgguuuagaacugucuaccgcaaucacccacguacauaaggaggaaggcucugaacaagcaccacugauguccgaggacgaacugauaaacauaaucgacgguguauugagggaugacgauaaaaauaacgauggguacauugacuaugcugaguucgcaaagucgcuacaguag

SEQ ID NO: 67247 - protein, 94 aa, Artificial Sequence
  derived and/or modified sequence
MEHLEGVINKPEAEMSPQELQLHYFKMHDYDGNNLLDGLELSTAITHVHKEEGSEQAPLMSEDELINIIDGVLRDDDKNNDGYIDYAEFAKSLQ

SEQ ID NO: 67248 - protein, 127 aa, Artificial Sequence
  derived and/or modified sequence
MLSVCSCRTSSGMRSQWPSARQRSSSLSTFRHIMEHLEGVINKPEAEMSPQELQLHYFKMHDYDGNNLLDGLELSTAITHVHKEEGSEQAPLMSEDELINIIDGVLRDDDKNNDGYIDYAEFAKSLQ

SEQ ID NO: 67249 - DNA, 384 bp, Artificial Sequence
  derived and/or modified sequence
atgttatcggtctgttcatgtcgcacctctagcggtatgcggagccaatggccctccgctcgtcagaggtcttcttccctgagcacatttcgccatattatggagcatctggagggggtaatcaacaagcccgaggctgagatgtcccctcaggagctccagcttcactattttaaaatgcatgattatgatggcaacaatctccttgatggcctcgagctgtcaaccgcaatcacccacgtccataaggaggagggatcagagcaagcccccctgatgtccgaggacgaactgatcaacatcattgatggcgtgctgcgagacgacgataagaacaacgacggctacattgactacgccgagttcgcaaagtcactccagtag

SEQ ID NO: 67250 - DNA, 384 bp, Artificial Sequence
  derived and/or modified sequence
atgctgtctgtgtgcagctgcaggaccagcagcggcatgaggagccagtggcccagcgcccggcagaggagcagcagcctgagcaccttccgccacatcatggagcacctggagggcgtcatcaacaagccagaggccgagatgagcccccaggagctgcagctgcactacttcaagatgcatgactatgatggcaacaacctgctggatggcctggagctgagcacagccatcacccacgtgcacaaggaggagggcagcgagcaggcccccctgatgtctgaagatgagctgatcaacatcattgatggagtgctgagagatgatgacaagaacaatgatggctacattgattatgcagagtttgccaagagcctgcagtag

SEQ ID NO: 67251 - DNA, 671 bp, Artificial Sequence
  derived and/or modified sequence
gctcttaagactagcacggtgggctggcaggcgcccgctgtcggccgaggactgtctgggcgcgcttcctggaggaggcggtgcgtttcgcgcgctcgctgccggcgagccagcctcttcccttactcaccggtgtccggaaaggtgaacgctgcgctcgggctgcctcgcctgttacctccgccgccgggcatgctcagcgtctgcagctgccggaccagctccggcatgcggtcccagtggccctcggcgcggcagcgctccagctcgctctccaccttcaggcatatcatggagcatctagaaggtgtcatcaacaaaccagaggcggagatgtcgccacaagaattgcagctccattacttcaaaatgcatgattatgatggcaataatttgcttgatggcttagaactctccacagccatcactcatgtccataaggaggaagggagtgaacaggcaccactaatgagtgaagatgaactgattaacataatagatggtgttttgagagatgatgacaagaacaatgatggatacattgactatgctgaatttgcaaaatcactgcagtagatgttatttggccatctcctggttatatacaaatgtgacccgtgataatgtgattgaacactttagtaatgcaaaataactcatttccaactact

SEQ ID NO: 67252 - DNA, 3955 bp, Artificial Sequence
  derived and/or modified sequence
tagcaactgccgggcccctagggcgtccagcggcccaactggagtggagccgagtgtcgcccttgggaaagcaggcatatcatggagcatctagaaggtgtcatcaacaaaccagaggcggagatgtcgccacaagaattgcagctccattacttcaaaatgcatgattatgatggcaataatttgcttgatggcttagaactctccacagccatcactcatgtccataaggaggaagggagtgaacaggcaccactaatgagtgaagatgaactgattaacataatagatggtgttttgagagatgatgacaagaacaatgatggatacattgactatgctgaatttgcaaaatcactgcagtagatgttatttggccatctcctggttatatacaaatgtgacccgtgataatgtgattgaacactttagtaatgcaaaataactcatttccaactactgctgcagcattttggtaaaaacctgtagcgattcgttacactggggtgagaagagataagagaaatgaaagagaagagaaatgggacatctaatagtccctaagtgctattaaataccttattggacaagggcttgcttcaagcatctgtattagtctgtattaatgctgctgataaagacgtacccgagactgggaagaaaaagaggtttacttggacttacagttccacatggctggggaggcctcagaatcatggcgggaggtgaaaggcacttcttacatggcagcaagagaaaatgaggaagaagcaaaagtggaaacccctgataagccatcagatcttgtgaaacttattcactatcacaagaatagcatgggaaagactggcccccatgattcaattacctccccttgggtctctcccacaacacgtgggaattctggtagatacaatttcaagttgagatttgggtggggacatagccaaaccatatcattctacccctggcccctccaaatctcatgtcctcactattcaaaaccaatcatgccttcctaacagtcccccaaagtcttaactcttttcagcattaacgcaaaaatccacagtccaaagtctcatctgagacaaggcaagtcccttccacctatgagcctgtaaaatcaaaagcaagctagttacttcctagataccaacaggggtacaggtattgattaaagacggctgttccaaatgggagaaattggccaaaataaaggggttacagggcccatgcaagtccgaaatccagcagggctgtcaaattttaaagttccagaataatctcctttgactccaggtctcacatccaggtcatactgatgcaagaagtgggttcccatggtcttgggcagctctgcccctgtggctttgtagggtacagcctccctcctggctgctttcacggctgttgttcagtgcctgcggcttttccaggtgcacggtgcaagctgttggtggatctaccattctggggtctggaggacggtggccctcttctcacagctccactaggcagtgccccagtagggactctgtgtgggggctcccacaccacatttcccttctgcactgccctagcagaggttctctcccctgccgctgagagggcctctcccctgcagcaaacgtttgcctgggcattgaggcatttccatacatcttctgaaaactaggcggaggtttccaaatctcaattcttgacttctgtgcacctgcaggcttaacagcacatagaagctgccaaggcttggggcttccactctgaagccacagcccgagctgtatgttggcccctttcagccatggctggagtggctgggacacaagacaccaagtccctaggctgcacacacatgtcaggggctgccctgacatggcctggagacattttccccatggtgttggggattaacattaggctccttgctacttatgcaaatttctgcagctggcttgaatttctccccagaaaatgggtttttcttttctattgcatagtcaggctgcaaatttccaaacttttatgctttgcttcccttatttataagggaatgcctttaaaagcacccaagtcacctgttgaacactttgctgcttagaaatttcttccgctagttaacctaaatcatctctctcaagttcaaagttccacaaatccctatggaaggggcaaaatgctgccagtctctttgctaaaacataacaagagtcacctttactccagttcccaacaagttcctcatcttcatctgaggccacctcagcctggactttgttgtccatattgctatcagcatttggggcaaagccattcaacaagtctgtaggaagttccaaactttcccacattttcctgttttcttctgagccctccaaactgttccagcctctgcctgttacccagttccaaagtcacttccacattttgggtatttcttcagcaggtcccaatctactggtaccaatttactgtattagtccgttttcacgctgctgataaagacatacccgagactgggaagaaaaagtggtttaattggacttaaagttccacatggctggggaggcctcagaatcatggtgggaggcaaaagacacttcttacattgtggcaagaaaaaatgaggaagaagcaaaagcagaaacccctgataaactgatcagatctcatgagacttattcactgtcacgagaatagcacgggaaagactggcccccatgattcaattacctccccctgggtctgtcccacaacacgtgggaattctgggagatacaattcaagttgagatttgtggggggacacaaccaaaccatatcagcatcctttcaagaatattagataattggagctgagtactcaggaacttgactgtagtagaatactgctagtttcttaattttaattcacatcacctgaaaagtaaaacaacaggctttgccaagtggatgcttttcagtaacagtgaagtggagtgaataccaaatgtttgccctggtggttcctatctcttcaggcaaacatggtcagtattctgtaaagttcccctggcctaaatgattacttgctctgggcaagtggatatttattaggctatttcaaagccacagcataagaatgtcagcctagccacagagtctgagattctgagttcagcctagccacagagtctaagattctgtatcctctgacattttggaaatgatacactactggcttaagtgatgactctttcagattttcagtattttatacaactactgccacatccttatactttattgcttttctgtcttcttcaacctgggagagaccctgaatttgagtgtgttctctaatcaatagtggtttagctttcttttctatttcactcgtttctagggttttttatttgcagtttaggaactattaggaatgtcaggactttatcagcaggggtaaaactaccacctggcctagcctaagtaggaagtgaaaagataattcaccaaacaatgattaatcagatagaagttctagtcaagagggatattgttgaagttacctcttttagcctagatacatggattcttttcaaatcaggaaagattagaaaaggaacccaaaaaaccctttaacagtgtgaatctttatagtatttgaaaatgagaagaagcagcagattgtaatttggtttattggatgtgatggacgttctgtaatagaaaacctgaaacgatgattgaatgggaaaaagagactacaaaatttgtcgtaggatgtatacagacttattttctttattacagtattataagaaaacatatgtatttgtaaaaatggtttcctgtgtcaagtatttgtgcagtcagagctgacttgtaaactattcttgtaatagctcattattttgaaagatttatatatgatgaattctggatatatgaccaataaaactgatgaagcaaaa

SEQ ID NO: 67253 - DNA, 3975 bp, Artificial Sequence
  derived and/or modified sequence
gggggcggggcgaagccgaggaagagcgttttggggacgggggctggtgaggctcacgttggagggcttcgcgtctgcttcggagaccgtaagggcatatcatggagcatctagaaggtgtcatcaacaaaccagaggcggagatgtcgccacaagaattgcagctccattacttcaaaatgcatgattatgatggcaataatttgcttgatggcttagaactctccacagccatcactcatgtccataaggaggaagggagtgaacaggcaccactaatgagtgaagatgaactgattaacataatagatggtgttttgagagatgatgacaagaacaatgatggatacattgactatgctgaatttgcaaaatcactgcagtagatgttatttggccatctcctggttatatacaaatgtgacccgtgataatgtgattgaacactttagtaatgcaaaataactcatttccaactactgctgcagcattttggtaaaaacctgtagcgattcgttacactggggtgagaagagataagagaaatgaaagagaagagaaatgggacatctaatagtccctaagtgctattaaataccttattggacaagggcttgcttcaagcatctgtattagtctgtattaatgctgctgataaagacgtacccgagactgggaagaaaaagaggtttacttggacttacagttccacatggctggggaggcctcagaatcatggcgggaggtgaaaggcacttcttacatggcagcaagagaaaatgaggaagaagcaaaagtggaaacccctgataagccatcagatcttgtgaaacttattcactatcacaagaatagcatgggaaagactggcccccatgattcaattacctccccttgggtctctcccacaacacgtgggaattctggtagatacaatttcaagttgagatttgggtggggacatagccaaaccatatcattctacccctggcccctccaaatctcatgtcctcactattcaaaaccaatcatgccttcctaacagtcccccaaagtcttaactcttttcagcattaacgcaaaaatccacagtccaaagtctcatctgagacaaggcaagtcccttccacctatgagcctgtaaaatcaaaagcaagctagttacttcctagataccaacaggggtacaggtattgattaaagacggctgttccaaatgggagaaattggccaaaataaaggggttacagggcccatgcaagtccgaaatccagcagggctgtcaaattttaaagttccagaataatctcctttgactccaggtctcacatccaggtcatactgatgcaagaagtgggttcccatggtcttgggcagctctgcccctgtggctttgtagggtacagcctccctcctggctgctttcacggctgttgttcagtgcctgcggcttttccaggtgcacggtgcaagctgttggtggatctaccattctggggtctggaggacggtggccctcttctcacagctccactaggcagtgccccagtagggactctgtgtgggggctcccacaccacatttcccttctgcactgccctagcagaggttctctcccctgccgctgagagggcctctcccctgcagcaaacgtttgcctgggcattgaggcatttccatacatcttctgaaaactaggcggaggtttccaaatctcaattcttgacttctgtgcacctgcaggcttaacagcacatagaagctgccaaggcttggggcttccactctgaagccacagcccgagctgtatgttggcccctttcagccatggctggagtggctgggacacaagacaccaagtccctaggctgcacacacatgtcaggggctgccctgacatggcctggagacattttccccatggtgttggggattaacattaggctccttgctacttatgcaaatttctgcagctggcttgaatttctccccagaaaatgggtttttcttttctattgcatagtcaggctgcaaatttccaaacttttatgctttgcttcccttatttataagggaatgcctttaaaagcacccaagtcacctgttgaacactttgctgcttagaaatttcttccgctagttaacctaaatcatctctctcaagttcaaagttccacaaatccctatggaaggggcaaaatgctgccagtctctttgctaaaacataacaagagtcacctttactccagttcccaacaagttcctcatcttcatctgaggccacctcagcctggactttgttgtccatattgctatcagcatttggggcaaagccattcaacaagtctgtaggaagttccaaactttcccacattttcctgttttcttctgagccctccaaactgttccagcctctgcctgttacccagttccaaagtcacttccacattttgggtatttcttcagcaggtcccaatctactggtaccaatttactgtattagtccgttttcacgctgctgataaagacatacccgagactgggaagaaaaagtggtttaattggacttaaagttccacatggctggggaggcctcagaatcatggtgggaggcaaaagacacttcttacattgtggcaagaaaaaatgaggaagaagcaaaagcagaaacccctgataaactgatcagatctcatgagacttattcactgtcacgagaatagcacgggaaagactggcccccatgattcaattacctccccctgggtctgtcccacaacacgtgggaattctgggagatacaattcaagttgagatttgtggggggacacaaccaaaccatatcagcatcctttcaagaatattagataattggagctgagtactcaggaacttgactgtagtagaatactgctagtttcttaattttaattcacatcacctgaaaagtaaaacaacaggctttgccaagtggatgcttttcagtaacagtgaagtggagtgaataccaaatgtttgccctggtggttcctatctcttcaggcaaacatggtcagtattctgtaaagttcccctggcctaaatgattacttgctctgggcaagtggatatttattaggctatttcaaagccacagcataagaatgtcagcctagccacagagtctgagattctgagttcagcctagccacagagtctaagattctgtatcctctgacattttggaaatgatacactactggcttaagtgatgactctttcagattttcagtattttatacaactactgccacatccttatactttattgcttttctgtcttcttcaacctgggagagaccctgaatttgagtgtgttctctaatcaatagtggtttagctttcttttctatttcactcgtttctagggttttttatttgcagtttaggaactattaggaatgtcaggactttatcagcaggggtaaaactaccacctggcctagcctaagtaggaagtgaaaagataattcaccaaacaatgattaatcagatagaagttctagtcaagagggatattgttgaagttacctcttttagcctagatacatggattcttttcaaatcaggaaagattagaaaaggaacccaaaaaaccctttaacagtgtgaatctttatagtatttgaaaatgagaagaagcagcagattgtaatttggtttattggatgtgatggacgttctgtaatagaaaacctgaaacgatgattgaatgggaaaaagagactacaaaatttgtcgtaggatgtatacagacttattttctttattacagtattataagaaaacatatgtatttgtaaaaatggtttcctgtgtcaagtatttgtgcagtcagagctgacttgtaaactattcttgtaatagctcattattttgaaagatttatatatgatgaattctggatatatgaccaataaaactgatgaagcaaaa

SEQ ID NO: 67254 - DNA, 4169 bp, Artificial Sequence
  derived and/or modified sequence
gctcttaagactagcacggtgggctggcaggcgcccgctgtcggccgaggactgtctgggcgcgcttcctggaggaggcggtgcgtttcgcgcgctcgctgccggcgagccagcctcttcccttactcaccggtgtccggaaaggtgaacgctgcgctcgggctgcctcgcctgttacctccgccgccgggcatgctcagcgtctgcagctgccggaccagctccggcatgcggtcccagtggccctcggcgcggcagcgctccagctcgctctccaccttcaggcatatcatggagcatctagaaggtgtcatcaacaaaccagaggcggagatgtcgccacaagaattgcagctccattacttcaaaatgcatgattatgatggcaataatttgcttgatggcttagaactctccacagccatcactcatgtccataaggaggaagggagtgaacaggcaccactaatgagtgaagatgaactgattaacataatagatggtgttttgagagatgatgacaagaacaatgatggatacattgactatgctgaatttgcaaaatcactgcagtagatgttatttggccatctcctggttatatacaaatgtgacccgtgataatgtgattgaacactttagtaatgcaaaataactcatttccaactactgctgcagcattttggtaaaaacctgtagcgattcgttacactggggtgagaagagataagagaaatgaaagagaagagaaatgggacatctaatagtccctaagtgctattaaataccttattggacaagggcttgcttcaagcatctgtattagtctgtattaatgctgctgataaagacgtacccgagactgggaagaaaaagaggtttacttggacttacagttccacatggctggggaggcctcagaatcatggcgggaggtgaaaggcacttcttacatggcagcaagagaaaatgaggaagaagcaaaagtggaaacccctgataagccatcagatcttgtgaaacttattcactatcacaagaatagcatgggaaagactggcccccatgattcaattacctccccttgggtctctcccacaacacgtgggaattctggtagatacaatttcaagttgagatttgggtggggacatagccaaaccatatcattctacccctggcccctccaaatctcatgtcctcactattcaaaaccaatcatgccttcctaacagtcccccaaagtcttaactcttttcagcattaacgcaaaaatccacagtccaaagtctcatctgagacaaggcaagtcccttccacctatgagcctgtaaaatcaaaagcaagctagttacttcctagataccaacaggggtacaggtattgattaaagacggctgttccaaatgggagaaattggccaaaataaaggggttacagggcccatgcaagtccgaaatccagcagggctgtcaaattttaaagttccagaataatctcctttgactccaggtctcacatccaggtcatactgatgcaagaagtgggttcccatggtcttgggcagctctgcccctgtggctttgtagggtacagcctccctcctggctgctttcacggctgttgttcagtgcctgcggcttttccaggtgcacggtgcaagctgttggtggatctaccattctggggtctggaggacggtggccctcttctcacagctccactaggcagtgccccagtagggactctgtgtgggggctcccacaccacatttcccttctgcactgccctagcagaggttctctcccctgccgctgagagggcctctcccctgcagcaaacgtttgcctgggcattgaggcatttccatacatcttctgaaaactaggcggaggtttccaaatctcaattcttgacttctgtgcacctgcaggcttaacagcacatagaagctgccaaggcttggggcttccactctgaagccacagcccgagctgtatgttggcccctttcagccatggctggagtggctgggacacaagacaccaagtccctaggctgcacacacatgtcaggggctgccctgacatggcctggagacattttccccatggtgttggggattaacattaggctccttgctacttatgcaaatttctgcagctggcttgaatttctccccagaaaatgggtttttcttttctattgcatagtcaggctgcaaatttccaaacttttatgctttgcttcccttatttataagggaatgcctttaaaagcacccaagtcacctgttgaacactttgctgcttagaaatttcttccgctagttaacctaaatcatctctctcaagttcaaagttccacaaatccctatggaaggggcaaaatgctgccagtctctttgctaaaacataacaagagtcacctttactccagttcccaacaagttcctcatcttcatctgaggccacctcagcctggactttgttgtccatattgctatcagcatttggggcaaagccattcaacaagtctgtaggaagttccaaactttcccacattttcctgttttcttctgagccctccaaactgttccagcctctgcctgttacccagttccaaagtcacttccacattttgggtatttcttcagcaggtcccaatctactggtaccaatttactgtattagtccgttttcacgctgctgataaagacatacccgagactgggaagaaaaagtggtttaattggacttaaagttccacatggctggggaggcctcagaatcatggtgggaggcaaaagacacttcttacattgtggcaagaaaaaatgaggaagaagcaaaagcagaaacccctgataaactgatcagatctcatgagacttattcactgtcacgagaatagcacgggaaagactggcccccatgattcaattacctccccctgggtctgtcccacaacacgtgggaattctgggagatacaattcaagttgagatttgtggggggacacaaccaaaccatatcagcatcctttcaagaatattagataattggagctgagtactcaggaacttgactgtagtagaatactgctagtttcttaattttaattcacatcacctgaaaagtaaaacaacaggctttgccaagtggatgcttttcagtaacagtgaagtggagtgaataccaaatgtttgccctggtggttcctatctcttcaggcaaacatggtcagtattctgtaaagttcccctggcctaaatgattacttgctctgggcaagtggatatttattaggctatttcaaagccacagcataagaatgtcagcctagccacagagtctgagattctgagttcagcctagccacagagtctaagattctgtatcctctgacattttggaaatgatacactactggcttaagtgatgactctttcagattttcagtattttatacaactactgccacatccttatactttattgcttttctgtcttcttcaacctgggagagaccctgaatttgagtgtgttctctaatcaatagtggtttagctttcttttctatttcactcgtttctagggttttttatttgcagtttaggaactattaggaatgtcaggactttatcagcaggggtaaaactaccacctggcctagcctaagtaggaagtgaaaagataattcaccaaacaatgattaatcagatagaagttctagtcaagagggatattgttgaagttacctcttttagcctagatacatggattcttttcaaatcaggaaagattagaaaaggaacccaaaaaaccctttaacagtgtgaatctttatagtatttgaaaatgagaagaagcagcagattgtaatttggtttattggatgtgatggacgttctgtaatagaaaacctgaaacgatgattgaatgggaaaaagagactacaaaatttgtcgtaggatgtatacagacttattttctttattacagtattataagaaaacatatgtatttgtaaaaatggtttcctgtgtcaagtatttgtgcagtcagagctgacttgtaaactattcttgtaatagctcattattttgaaagatttatatatgatgaattctggatatatgaccaataaaactgatgaagcaaaacctc

SEQ ID NO: 67255 - DNA, 384 bp, Artificial Sequence
  derived and/or modified sequence
atgctgagcgtgtgcagctgccggaccagcagcggcatgcggagccagtggccttccgcgcgtcagcggagcagttcgctgtctacgttcagacatataatggaacacctggaaggcgttatcaataagccagaggcagagatgagcccccaagagctgcaactgcactacttcaaaatgcacgactacgatggcaataacctccttgacggactcgaacttagcaccgccatcactcacgtacacaaagaggaagggagtgaacaggcaccactgatgtcggaggacgaactcatcaacatcatcgacggagtgctacgagatgacgacaagaacaacgacggttacatagattatgcggaatttgcaaaaagtctccagtag

SEQ ID NO: 67256 - DNA, 384 bp, Artificial Sequence
  derived and/or modified sequence
atgctgagcgtgtgctcatgcagaaccagctcaggaatgagatctcagtggccatccgctcggcaacgctcctcctccttgagtacgttccgtcacataatggagcacttagagggagtcattaacaagcccgaagcagagatgagccctcaggaactgcaactgcactacttcaaaatgcatgattacgatgggaataatctgctcgatggtttggagctatccaccgcaataactcacgtccataaggaggagggttccgagcaggctccccttatgtcagaggacgaactgatcaatattatcgacggcgtgctgcgggacgatgacaagaacaacgacggctacatcgactacgccgagttcgccaaatctttacagtag

SEQ ID NO: 67257 - DNA, 384 bp, Artificial Sequence
  derived and/or modified sequence
atgctttctgtatgttcctgccggaccagtagcggaatgagatcacaatggcctagtgctcgccaacgctcgagcagtttaagcacattcagacacataatggaacacctggagggtgttatcaacaagcctgaggcggaaatgagcccccaggaacttcagttacactattttaaaatgcacgattacgatggaaataacttacttgacggtttggagctctcaactgcaattacacatgtccacaaagaagagggatcggagcaggccccccttatgtctgaggatgaactcattaacatcattgacggagtgcttcgagacgacgataagaacaatgacggctacattgactacgctgaattcgcaaagtctctgcaatag

SEQ ID NO: 67258 - DNA, 384 bp, Artificial Sequence
  derived and/or modified sequence
atgctatctgtgtgctcttgcaggacatcctccggaatgagatcccagtggcctagcgcacgacagcggagctctagtcttagtacttttaggcacataatggaacacctcgagggagtgattaacaaacctgaagctgagatgtccccccaggagctgcagctacattacttcaaaatgcatgactatgacggcaacaacctcttggacggccttgaactgagtaccgccattacccacgtgcataaggaagaaggaagcgaacaagcccccctgatgagcgaagacgaattgatcaacatcatcgatggagtgttgagggatgatgataaaaacaacgatggttatatagattatgccgaatttgccaaatccctgcagtag

SEQ ID NO: 67259 - DNA, 384 bp, Artificial Sequence
  derived and/or modified sequence
atgctgagcgtgtgcagctgcagaaccagcagcggcatgagaagccagtggcccagcgccagacagagaagcagcagcctgagcaccttcagacacatcatggagcacctggagggcgtgatcaacaagcccgaggccgagatgagcccccaggagctgcagctgcactacttcaagatgcacgactacgacggcaacaacctgctggacggcctggagctgagcaccgccatcacccacgtgcacaaggaggagggcagcgagcaggcccccctgatgagcgaggacgagctgatcaacatcatcgacggcgtgctgagagacgacgacaagaacaacgacggctacatcgactacgccgagttcgccaagagcctgcagtag

SEQ ID NO: 67260 - protein, 1501 aa, Artificial Sequence
  derived and/or modified sequence
MMAKNKEPRPPSYTISIVGLSGTEKDKGNCGVGKSCLCNRFVRSKADEYYPEHTSVLSTIDFGGRVVNNDHFLYWGDIIQNSEDGVECKIHVIEQTEFIDDQTFLPHRSTNLQPYIKRAAASKLQSAEKLMYICTDQLGLEQDFEQKQMPEGKLNVDGFLLCIDVSQGCNRKFDDQLKFVNNLFVQLSKSKKPVIIAATKCDECVDHYLREVQAFASNKKNLLVVETSARFNVNIETCFTALVQMLDKTRSKPKIIPYLDAYKTQRQLVVTATDKFEKLVQTVRDYHATWKTVSNKLKNHPDYEEYINLEGTRKARNTFSKHIEQLKQEHIRKRREEYINTLPRAFNTLLPNLEEIEHLNWSEALKLMEKRADFQLCFVVLEKTPWDETDHIDKINDRRIPFDLLSTLEAEKVYQNHVQHLISEKRRVEMKEKFKKTLEKIQFISPGQPWEEVMCFVMEDEAYKYITEADSKEVYGRHQREIVEKAKEEFQEMLFEHSELFYDLDLNATPSSDKMSEIHTVLSEEPRYKALQKLAPDRESLLLKHIGFVYHPTKETCLSGQNCTDIKVEQLLASSLLQLDHGRLRLYHDSTNIDKVNLFILGKDGLAQELANEIRTQSTDDEYALDGKIYELDLRPVDAKSPYFLSQLWTAAFKPHGCFCVFNSIESLSFIGEFIGKIRTEASQIRKDKYMANLPFTLILANQRDSISKNLPILRHQGQQLANKLQCPFVDVPAGTYPRKFNETQIKQALRGVLESVKHNLDVVSPIPANKDLSEADLRIVMCAMCGDPFSVDLILSPFLDSHSCSAAQAGQNNSLMLDKIIGEKRRRIQITILSYHSSIGVRKDELVHGYILVYSAKRKASMGMLRAFLSEVQDTIPVQLVAVTDSQADFFENEAIKELMTEGEHIATEITAKFTALYSLSQYHRQTEVFTLFFSDVLEKKNMIENSYLSDNTRESTHQSEDVFLPSPRDCFPYNNYPDSDDDTEAPPPYSPIGDDVQLLPTPSDRSRYRLDLEGNEYPIHSTPNCHDHERNHKVPPPIKPKPVVPKTNVKKLDPNLLKTIEAGIGKNPRKQTSRVPLAHPEDMDPSDNYAEPIDTIFKQKGYSDEIYVVPDDSQNRIKIRNSFVNNTQGDEENGFSDRTSKSHGERRPSKYKYKSKTLFSKAKSYYRRTHSDASDDEAFTTSKTKRKGRHRGSEEDPLLSPVETWKGGIDNPAITSDQELDDKKMKKKTHKVKEDKKKKKTKNFNPPTRRNWESNYFGMPLQDLVTAEKPIPLFVEKCVEFIEDTGLCTEGLYRVSGNKTDQDNIQKQFDQDHNINLVSMEVTVNAVAGALKAFFADLPDPLIPYSLHPELLEAAKIPDKTERLHALKEIVKKFHPVNYDVFRYVITHLNRVSQQHKINLMTADNLSICFWPTLMRPDFENREFLSTTKIHQSVVETFIQQCQFFFYNGEIVETTNIVAPPPPSNPGQLVEPMVPLQLPPPLQPQLIQPQLQTDPLGII

SEQ ID NO: 67261 - protein, 137 aa, Artificial Sequence
  derived and/or modified sequence
MPLQDLVTAEKPIPLFVEKCVEFIEDTGLCTEGLYRVSGNKTDQDNIQKQFDQDHNINLVSMEVTVNAVAGALKAFFADLPDPLIPYSLHPELLEAAKIPDKTERLHALKEIVKKFHPVNYDVFRYVITHLNRVSQQ

SEQ ID NO: 67262 - protein, 219 aa, Artificial Sequence
  derived and/or modified sequence
MVKIAFNTPTAVQKEEARQDVEALLSRTVRTQILTGKSTIYRGEMCFFDSEDPANSLRGGEPNFLPVTEEADIREDDNIAIIDVPVPSFSDSDPAAIIHDFEKGMTAYLDLLLGNCYLMPLNTSIVMPPKNLVELFGKLASGRYLPQTYVVREDLVAVEEIRDVSNLGIFIYQLCNNRKSFRLRRRDLLLGFNKRAIDKCWKIRHFPNEFIVETKICQE

SEQ ID NO: 67263 - DNA, 660 bp, Artificial Sequence
  derived and/or modified sequence
atggtgaaaattgcctttaatacaccaaccgctgtacaaaaagaagaggctcgccaggatgtagaggcgctcttgagcaggacagttcgaacacagatcctgactgggaaatcaacaatctatcggggtgaaatgtgcttttttgactcggaagatcccgccaactcactccgcggtggcgaacctaattttctgccagtgactgaggaagccgacattagggaagacgacaatatagccataatcgatgtacctgtgccttccttttctgactcggacccagccgccattatccatgacttcgaaaaaggtatgacggcgtaccttgacctattattggggaattgttatctgatgcccctgaatacgagtatcgtcatgccgcccaagaacctcgtagagctcttcgggaagctcgcttccggcaggtacttgccccaaacttacgtggtgcgtgaagacctagtggccgtcgaggagatcagggatgtgtccaacctggggatattcatctatcagctctgtaacaatcgcaaaagctttcgattacgacggcgggacctattgcttggctttaataaaagggcgatcgataagtgttggaagatccggcacttccccaacgagtttatcgtggaaacgaaaatctgtcaggagtag

SEQ ID NO: 67264 - DNA, 1698 bp, Artificial Sequence
  derived and/or modified sequence
gtgcaggtgaggcacgtttagcctgagccggccacggactccacttcccctgctcttcccccagtggcaaatccgcgccacctcgcaaacccccaactcaggcacttgggccccttttgggccccctctcgctcctccctttaggcacctccctgggcccgcccacggtctccccccagtttgggactgcgtcataagtatcccagacctcggcttgcagtagtgttagactgaagataaagtaagtgctgtttgggctaacaggatctcctcttgcagtctgcagcccaggacgctgattccagcagcgccttaccgcgcagcccgaagattcactatggtgaaaatcgccttcaatacccctaccgccgtgcaaaaggaggaggcgcggcaagacgtggaggccctcctgagccgcacggtcagaactcagatactgaccggcaagagcaccatttaccgtggagagatgtgcttttttgattctgaggatcctgcaaattcccttcgtggaggagagcctaacttcctgcctgtgactgaggaggctgacattcgtgaggatgacaacattgcaatcattgatgtgcctgtccccagtttctctgatagtgaccctgcagcaattattcatgactttgaaaagggaatgactgcttacctggacttgttgctggggaactgctatctgatgcccctcaatacttctattgttatgcctccaaaaaatctggtagagctctttggcaaactggcgagtggcagatatctgcctcaaacttatgtggttcgagaagacctagttgctgtggaggaaattcgtgatgttagtaaccttggcatctttatttaccaactttgcaataacagaaagtccttccgccttcgtcgcagagacctcttgctgggtttcaacaaacgtgccattgataaatgctggaagattagacacttccccaacgaatttattgttgagaccaagatctgtcaagagtaagaggcaacagatagagtgtccttggtaataagaagtcagagatttacaatatgactttaacattaaggtttatgggatactcaagatatttactcatgcatttactctattgcttatgctttaaaaaaaggaaaaaaaaaaactactaaccactgcaagctcttgtcaaattttagtttaattggcattgcttgttttttgaaactgaaattacatgagtttcattttttctttgaatttatagggtttagatttctgaaagcagcatgaatatatcacctaacatcctgacaataaattccatccgttgttttttttgtttgtttgttttttcttttcctttaagtaagctctttattcatcttatggtggagcaattttaaaatttgaaatattttaaattgtttttgaactttttgtgtaaaatatatcagatctcaacattgttggtttcttttgtttttcattttgtacaactttcttgaatttagaaattacatctttgcagttctgttaggtgctctgtaattaacctgacttatatgtgaacaattttcatgagacagtcatttttaactaatgcagtgattctttctcactactatctgtattgtggaatgcacaaaattgtgtaggtgctgaatgctgtaaggagtttaggttgtatgaattctacaaccctataataaattttactctat

SEQ ID NO: 67265 - DNA, 660 bp, Artificial Sequence
  derived and/or modified sequence
atggtgaagatcgccttcaacacccccacagctgtgcagaaggaggaggcccggcaggatgtggaggccctgctgagcaggacagtgaggacccagatcctgaccgggaagagcaccatctacagaggagagatgtgcttctttgacagtgaagatcctgccaacagcctgcggggcggggagcccaacttcctgcctgtgacagaggaggccgacatcagagaagatgacaacatcgccatcattgatgtgcctgtgcccagcttcagtgacagcgaccctgctgccatcatccatgactttgagaagggcatgacagcctacctggacctgctgctgggcaactgctacctgatgcccctgaacaccagcatcgtgatgccacccaagaacctggtggagctgtttgggaagctggccagcggccgctacctgccccagacctacgtggtgcgggaggacctggtggccgtggaggagatcagagatgtgagcaacctgggcatcttcatctaccagctgtgcaacaacaggaagagcttccggctgcggcggcgggacctgctgctgggcttcaacaagagggccatcgacaagtgctggaagatccgccacttccccaatgagttcatcgtggagaccaagatctgccaggagtag

SEQ ID NO: 67266 - DNA, 660 bp, Artificial Sequence
  derived and/or modified sequence
atggtgaagatcgccttcaacacccccaccgccgtgcagaaggaggaagcaagacaggacgtggaagccctgttatcacgcactgtgcggactcagattctaacagggaaatctaccatctatcggggcgagatgtgctttttcgattccgaagaccccgcgaattcactacgaggtggggaacctaatttcctgccagtgaccgaggaggcagatatcagagaggacgataatattgctataatcgacgttcctgtgccctccttctccgatagcgatccagccgccatcattcatgattttgagaaaggaatgacggcatacttggacctattactgggcaattgctatctgatgcccctcaatacatccatcgtaatgcctccaaagaatctggtggaactgttcggcaaactggcctctgggaggtacttacctcaaacatacgttgtgcgggaggacctggttgctgtcgaggaaatcagagacgtgtccaatcttggcatcttcatctatcaactctgtaataatagaaagtctttcaggcttcggcgcagggatttgctgctgggctttaataagcgtgcaatcgataagtgctggaaaattcggcatttccctaacgagtttatcgttgagaccaagatctgtcaggagtag

SEQ ID NO: 67267 - DNA, 660 bp, Artificial Sequence
  derived and/or modified sequence
atggtaaagatcgctttcaacacacccactgccgtgcagaaggaagaggcccgacaggatgtcgaggcactgctgagccggactgtgcggacacagattctaaccggcaagagcacgatctatcgaggcgaaatgtgtttcttcgattctgaggacccagccaactctctgcggggaggcgaacccaactttctcccagtgactgaggaggcagacattagagaagacgacaatatagccattattgacgtgcccgtgccctccttctccgatagtgacccggctgcaatcattcacgacttcgagaaaggaatgaccgcctatctggatctgctcctggggaattgctacctgatgcctctgaatacctcaattgtgatgcctcctaagaatctggttgagctattcggcaaactcgcctctggcagatatctgcctcagacatacgtggttcgcgaagacctagtagctgtcgaggaaatcagggatgtctccaacttgggtatattcatttatcaactctgtaacaacaggaaaagctttaggctgaggaggcgtgaccttttattagggttcaataaacgcgctatcgataaatgctggaaaatcaggcactttcctaatgagttcattgtggaaaccaagatttgccaggaatag

SEQ ID NO: 67268 - DNA, 660 bp, Artificial Sequence
  derived and/or modified sequence
atggtgaagatcgccttcaacacccccaccgccgtgcagaaggaggaggccagacaggacgtggaggccctgctgagcagaaccgtgagaacccagatcctgaccggcaagagcaccatctacagaggcgagatgtgcttcttcgacagcgaggaccccgccaacagcctgagaggcggcgagcccaacttcctgcccgtgaccgaggaggccgacatcagagaggacgacaacatcgccatcatcgacgtgcccgtgcccagcttcagcgacagcgaccccgccgccatcatccacgacttcgagaagggcatgaccgcctacctggacctgctgctgggcaactgctacctgatgcccctgaacaccagcatcgtgatgccccccaagaacctggtggagctgttcggcaagctggccagcggcagatacctgccccagacctacgtggtgagagaggacctggtggccgtggaggagatcagagacgtgagcaacctgggcatcttcatctaccagctgtgcaacaacagaaagagcttcagactgagaagaagagacctgctgctgggcttcaacaagagagccatcgacaagtgctggaagatcagacacttccccaacgagttcatcgtggagaccaagatctgccaggagtag

SEQ ID NO: 67269 - protein, 732 aa, Artificial Sequence
  derived and/or modified sequence
MSYSVTLTGPGPWGFRLQGGKDFNMPLTISRITPGSKAAQSQLSQGDLVVAIDGVNTDTMTHLEAQNKIKSASYNLSLTLQKSKRPIPISTTAPPVQTPLPVIPHQKDPALDTNGSLVAPSPSPEARASPGTPGTPELRPTFSPAFSRPSAFSSLAEASDPGPPRASLRAKTSPEGARDLLGPKALPGSSQPRQYNNPIGLYSAETLREMAQMYQMSLRGKASGVGLPGGADYQERFNPSALKDSALSTHKPIEVKGLGGKATIIHAQYNTPISMYSQDAIMDAIAGQAQAQGSDFSGSLPIKDLAVDSASPVYQAVIKSQNKPEDEADEWARRSSNLQSRSFRILAQMTGTEFMQDPDEEALRRSRPQASSYSPAVAASSAPATHTSYSEGPAAPAPKPRVVTTASIRPSVYQPVPASTYSPSPGANYSPTPYTPSPAPAYTPSPAPAYTPSPVPTYTPSPAPAYTPSPAPNYNPAPSVAYSGGPAEPASRPPWVTDDSFSQKFAPGKSTTSISKQTLPRGGPAYTPAGPQVPPLARGTVQRAERFPASSRTPLCGHCNNVIRGPFLVAMGRSWHPEEFTCAYCKTSLADVCFVEEQNNVYCERCYEQFFAPLCAKCNTKIMGEVMHALRQTWHTTCFVCAACKKPFGNSLFHMEDGEPYCEKDYINLFSTKCHGCDFPVEAGDKFIEALGHTWHDTCFICAVCHVNLEGQPFYSKKDRPLCKKHAHTINL

SEQ ID NO: 67270 - DNA, 2199 bp, Artificial Sequence
  derived and/or modified sequence
atgtcttacagtgtcacactgacaggccctggcccatggggttttaggctgcagggaggcaaggatttcaacatgcccctcacaatctcacgcatcaccccggggagcaaggcggctcagagccaactcagtcaaggcgacttggtggtggcaatcgatggggtaaataccgacactatgacacacctagaggctcagaacaaaattaaaagtgcttcatacaacttgtccctgacattgcagaagagtaaacgccctattccgattagtaccactgcccccccggtgcagacccctttacctgtcattccgcaccagaaggaccccgccctggacacgaatggttctctggtggcaccatcaccgtctccagaggcacgggcgagcccagggacgccaggaacacctgagctgcgacccactttctcaccagcttttagtcgccctagtgccttctcttccctagccgaagcttcggatccaggtcccccaagagcaagtctgagggcaaagactagcccagagggggcccgcgaccttctgggccctaaagccttacccggcagtagtcagccaagacagtacaataaccccataggcctgtactcagccgagactttgcgcgagatggctcagatgtaccagatgagcctgagaggaaaggcctccggtgtaggcctacctggaggcgcagattaccaggaacgatttaacccgtcagcactcaaagattccgctctgtcaacacacaagccaatcgaggtgaaagggctaggaggaaaagctacaatcatccacgctcagtataataccccaatctccatgtacagtcaggatgctatcatggatgccatcgcgggccaggcccaagcacagggttcggacttttccggatcgctgccgataaaggacctcgccgtagacagcgctagtcctgtgtatcaggcggtgatcaagagccagaacaagcccgaagacgaagctgatgagtgggccaggaggtcttccaacctgcagtcacgctccttccggattcttgcacagatgaccggaacggagttcatgcaagatccagacgaagaggcacttcgcaggtcccgaccccaagcctctagctactcaccagcggtcgccgcttcgtctgctcctgcaacacataccagctatagcgagggacccgccgccccagctcccaaaccccgggtggttaccaccgcgagcattcgcccttccgtttaccaacccgtgcccgcatctacctacagccccagccctggtgctaattacagccctactccttatacgccctcacccgcccctgcttacaccccatctcctgcacccgcctacaccccctcacctgtgcccacatatacacccagtccggcccccgcttacactcccagccctgcgcccaactataatcctgctcctagtgtcgcttactctggcggacctgccgaacctgccagtcgaccgccttgggtcactgacgacagcttcagtcagaagtttgcacccggaaagtccaccaccagcattagtaagcaaactctgccgcggggtgggccggcttataccccagctggtccccaagttcccccccttgcccggggcacagtgcagcgggcagaaagatttcctgcttccagtaggaccccactctgcggccactgtaacaacgtgattcgggggccgttcctagtggccatgggtagaagctggcaccccgaggagttcacctgtgcgtactgtaagaccagtctggccgatgtatgcttcgtagaagagcagaacaatgtttactgtgaaagatgttatgaacagttctttgcgcccctgtgtgctaagtgcaatactaagattatgggagaagttatgcacgctctccggcagacttggcatacaacatgctttgtatgtgccgcttgcaagaaaccttttggaaactctctcttccacatggaagatggcgagccctattgcgaaaaagactatatcaacctcttctcaactaaatgtcatggctgtgacttccctgtcgaagcaggagataagtttatagaggcattgggccacacctggcatgacacctgcttcatctgtgccgtatgtcacgtgaatttagaaggtcagccattttattctaaaaaagataggccactgtgcaagaagcatgcgcatactatcaatctttag

SEQ ID NO: 67271 - DNA, 2199 bp, Artificial Sequence
  derived and/or modified sequence
atgagctacagcgtgaccctgaccggccctggcccctggggcttccggctgcagggcggcaaggacttcaacatgcccctgaccatcagccgcatcaccccaggcagcaaggccgcccagagccagctgagccagggcgacctggtggtggccattgatggagtgaacacagacaccatgacccacctggaggcccagaacaagatcaagagcgccagctacaacctgagcctgaccctgcagaagagcaagaggcccatccccatcagcaccacagcccctcctgtgcagacccccctgcctgtgatcccccaccagaaggaccctgccctggacaccaacggcagcctggtggcccccagccccagccctgaggcccgggccagccctggcaccccaggcaccccagagctgcggcccaccttcagccctgccttcagccggcccagcgccttcagcagcctggccgaggccagtgaccccggccccccccgggccagcctgcgggccaagaccagccctgagggcgcccgggacctgctgggccccaaggccctgcccggcagcagccagccccggcagtacaacaaccccatcggcctgtacagcgctgagaccctgcgggagatggcccagatgtaccagatgagcctgcggggcaaggccagcggcgtgggcctgcccggcggcgctgactaccaggagcgcttcaaccccagcgccctgaaggacagcgccctgagcacccacaagcccatcgaggtgaagggcctgggcggcaaggccaccatcatccacgcccagtacaacacccccatctccatgtacagccaggatgccatcatggatgccatcgccggccaggcccaggcccagggcagtgacttcagcggcagcctgcccatcaaggacctggccgtggacagcgccagccctgtgtaccaggccgtcatcaagagccagaacaagccagaagatgaagcagatgagtgggcccggcgcagcagcaacctgcagagccgctccttccgcatcctggcccagatgactggaacagagttcatgcaggaccctgatgaggaggccctgcggcgcagccggccccaggccagcagctacagccctgctgtggccgccagcagcgccccagccacccacaccagctacagcgagggccctgctgccccagcccccaagccccgggtggtgaccacagccagcatccggcccagcgtgtaccagcctgtgcctgccagcacctacagccccagccctggggccaactacagccccaccccctacacccccagccctgccccagcctacacccccagccctgccccagcctacacccccagccctgtgcccacctacacccccagccctgccccagcctacacccccagccctgcccccaactacaacccagcccccagcgtggcctacagcggcggccctgctgagcccgccagcaggcctccctgggtgacagatgacagcttcagccagaagtttgcccctgggaagagcaccaccagcatcagcaagcagaccctgccccggggcggccctgcctacaccccagctggcccccaggtgccccccctggcccggggcaccgtgcagagagctgagcgcttccctgccagcagcaggacccccctgtgtggccactgcaacaacgtcatccggggccccttcctggtggccatgggccgctcctggcaccctgaggagttcacctgtgcctactgcaagaccagcctggctgatgtgtgctttgtggaggagcagaacaacgtgtactgtgagcgctgctatgagcagttctttgcccccctgtgtgccaagtgcaacaccaagatcatgggagaggtgatgcacgccctgcggcagacctggcacaccacctgctttgtgtgtgccgcctgcaagaagcccttcggcaacagcctcttccacatggaggatggagagccctactgtgagaaggactacatcaacctcttcagcaccaagtgccacggctgtgacttccctgtggaggccggggacaagttcatcgaggccctgggccacacctggcatgacacctgcttcatctgtgctgtgtgccacgtgaacctggagggccagcccttctacagcaagaaggaccggcccctgtgcaagaagcacgcccacaccatcaacctgtag

SEQ ID NO: 67272 - DNA, 5436 bp, Artificial Sequence
  derived and/or modified sequence
acagtccatttatgggcgcagccgaaggcagatatcagtgtcgatggcattcgctcccagctattcttaggagcctctcaagagctccacgcagcccggctgggcagcaagggacagaacagaggcggccgctgacagcaccagcatgtcttacagtgtgaccctgactgggcccgggccctggggcttccgtctgcaggggggcaaggacttcaacatgcccctcactatctcccggatcacaccaggcagcaaggcagcccagtcccagctcagccagggtgacctcgtggtggccattgacggcgtcaacacagacaccatgacccacctggaagcccagaacaagatcaagtctgccagctacaacttgagcctcaccctgcagaaatcaaagcgtcccattcccatctccacgacagcacctccagtccagacccctctgccggtgatccctcaccagaaggaccccgctctggacacgaacggcagcctggtggcacccagccccagccctgaggcgagggccagcccaggcaccccaggcaccccggagctcaggcccacctttagccctgccttctcccggccctccgccttctcctcactcgccgaggcctctgaccctggccctccgcgggccagcctgagggccaagaccagcccagagggggcccgggacctactcggcccaaaagccctgccgggctcgagccagccgaggcaatataacaaccccattggcctgtactcggcagagaccctgagggagatggctcagatgtaccagatgagcctccgagggaaggcctcgggtgtcggactcccaggaggcgccgactaccaggaacgcttcaaccccagtgccctgaaggactcggccctgtccacccacaagcccatcgaggtgaaggggctgggcggcaaggccaccatcatccatgcgcagtacaacacgcccatcagcatgtattcccaggatgccatcatggatgccatcgctgggcaggcccaagcccaaggcagtgacttcagtgggagcctccctattaaggaccttgccgtagacagcgcctctcccgtctaccaggctgtgattaagagccagaacaagccagaagatgaggctgacgagtgggcacgccgttcctccaacctgcagtctcgctccttccgcatcctggcccagatgacggggacagaattcatgcaagaccctgatgaagaagctctgcgaaggtcaaggccccaggcctcttcctacagccccgcagtggccgcctcttcagcacctgccacccacaccagctacagtgagggccccgccgcccctgcacccaagccccgggttgtcaccactgccagcatccggccttctgtctaccagccagtgcctgcatctacctacagcccgtccccaggggccaattacagtcccactccctacaccccctcccctgcccctgcctacaccccctcccctgcccctgcctacaccccctcacctgtccccacctacactccatccccagcaccagcctataccccctcacctgcccccaactataaccctgcaccctcggtggcctacagcgggggccctgcggagcctgccagccgtccaccctgggtgacagatgatagcttctcccagaagtttgccccgggcaagagcaccacctccatcagcaagcagaccctgccccggggaggcccagcctacaccccagcgggtcctcaggtgccaccacttgccagggggaccgtccagagggctgagcgattcccagccagcagccggactccactctgcggtcactgcaacaatgtcatccggggcccatttctggtagccatgggccgttcttggcaccctgaagagttcacctgtgcctactgcaagacttccctggcagatgtgtgctttgtggaagagcagaacaacgtttactgtgagcgatgttatgagcaattctttgccccgctgtgtgccaagtgcaacaccaaaattatgggggaagtaatgcatgccttgagacagacatggcacaccacctgcttcgtctgtgcggcctgcaagaagccttttgggaacagcctcttccacatggaagacggggagccctactgcgagaaagactacatcaatctgttcagcaccaagtgccatggctgcgatttccccgtggaggctggcgacaagtttatcgaagccctgggccacacttggcacgacacctgcttcatttgcgcagtctgccatgtgaatctggaggggcagccgttctactccaagaaggacagacccctgtgcaagaagcacgcacacaccatcaacttgtaggcggccaaggccgcctgtgctgacgaggcccggagctgctcctgctgctggcaacaaaggattcgggaggctgatgtttcttctgaggggaatggggagagagaggaagcgactgagccctttggaagtataattttaggttttttcttctgtacacagatcgtgcatttgcatagttcagactaggagccaaatgaagactcaaaaccaagctagttattaatccaagactggaattgtacttcagacatttagagcagaattccaagaactcaaaagtgaaaagcaacaagcagctttcccaaagcgatacacttgctttggtcaccagaggaggacagagcttagagcagctgtggagaatctgaagcattctgcggagttcttaagcgctcccctggcaaacaaattgaagtgccaaacagcactcgctgcagggtatttttagagtcatagctgagagcttgttagctaagacccattgggctttcctcaccaaaaaaggaagtgttattccattactagcgtcatggagctacctctgcgcatcagacttcagaccttgaacaaacttaaaaccttcttgggagcccggacgtccaaagagatgtcttctgggagccactgggcaattgccagggctccaggaagggctctggctcaggttgcagacagctgagaaaagatggccctgtcagccaccctctctcagtctgaaacatccaacatccccagaaggcttagctcctttttgaattgtgatgggaaagtagagttgggtttttccagttttgctctgtggtgtgtgagagatttttttaaaggctttgggttgtctttggcctttgtttagctttaagggttcgttagcatgagtgtccagtcgtgtgcatgaatttcaccccaacttgtgactgctcacttatgacgtctcccccagtaccctccatctcaaataggcttggtggcctgtggaaaagaagagagacagagagacagtgtctgaaacaggatggcagaataggctcacatgcccaaactctgggtggggaagaggaaacttactttctgccaccctcagtaagaacacacgaggaggcaggacctcccaccttcaggtctgcatcatccttttcaaatgttcctttaaatgcagcacactgagtttgtacaattgtgttaactgctggaagggacagatgcactgatatatatgcatttgctgttttggccaatattttgaaaatgtatgagctgagttgatctagctattatttaagtatttattgaagtagaggggccttcaaactactttatactagtgatagtttgagttaggtaagcatcttaaagctgtttggtgataaagaaggcagcttagattctgtggttggaaacagtgtagtcgcttccctttttaggaagccctgttaatatgctcattgaaaacatggcattgaagcaggcacttgcgtggatgtttctcacttgagcacgatatttaggctctcttccaactcactctattctgtcctcactcctgttttggatttttctctttgcatgtttgaaatgttttatgggaatgtattagaactcttttcttctaaggactgagacttccaggggattgccatcttacctgtctcttctccatgagggagaaggaagcagctagctatgtccctagctgcaggaagcccctattttttccaagcacgaagccaccagtctcccccagggagcatcaggaagggacatggatgtgctcctgccacagggcccttcctacctttggatctgtgagaaggtgaatacaaagcagcaggcagagtaaaatctgctgggactgcctggagatttgtcaggagctgcagacaagtaccttggagcattctgttatttttggaaagttcaaatatgcagggacaaggaggttgctgactgtactgacaggctctaagtcattttctccaaaaactatctattcaattatcaggggctggtcttgaggaaggaaaaaaaaaaaaaaacgttcccagaattcagtttccaaaatctctttttaaagggtttacacacacacacacacacacacacacacacacacacacacacacacacgatcattaaaaagtgtatgctctttaagaagaaaagtaaaatatctcaaaggacggtttcaccaccgtcctttattgaatcaatttttctacatttcagagcaagtgtagattctgagggactcctatttgccaaaaagacaaaactagcaaaaaaaaaacaaaaaaacaaaaaaaaaaccacttaaaaggtagcaggaaaagaaggtagttttgagtgtggttcactcagtgtctgtgagtctggtgtagtgtcaggagtaaggccgtgtctagctcaagtttacatttggatgtcctacaacactaaacaaaatttttcataatccatggtggggagcacactttggagctacatttcttgtctcctcattgttgacattaattaaacatttataggccaggcacagtggctcacgcctgttatcccagcactttgggaggccgaggcaggtgaatcacctgaggtcaggagtttgaaaccagcctggccaatatggtgaaaccccatctctactaaaaatacacaaaattagccaggtgtggtggcaggcgcctgtagttccagctacttgggaggctgaggcaggaatctcctgaatcctggaggcggaggttgcagtgagccgagattatgccattgcactccagcctgggcaacaggagcgaaactccgttgcaaaaaaaaaaaaaaaaaaaaaattataatcacaactttttgcaatggagtgacttatatctgcagcttatatctgcagtgtttgtgttaggaacctagcttttataatgtgttaactttttaactcagtattctggctttgggattttttgttttgtttttggaaacatttcagaagtggaatgtagcctgttaaaggtgtgcacaaaaatattttgcatgtgtttttttttttgcctgtgtgaattctactttttagcaaaaataaagccccccaaaggatgtgcaaa

SEQ ID NO: 67273 - DNA, 2199 bp, Artificial Sequence
  derived and/or modified sequence
atgagctacagcgtgaccctgaccggccccggcccctggggcttccgactacaagggggcaaggacttcaacatgcccttgacaataagcagaatcactccaggtagcaaggccgcccagagccaactttcccaaggcgatctggttgtggctatcgacggagtgaacacagatacaatgactcatctcgaggcacagaataagattaaaagcgcatcttataatctgagtctgacactgcaaaagtccaaaaggcctattccaattagtacaacagcacctcccgtccagacccctctcccggtgatcccacaccaaaaagaccctgctctggacaccaatgggtcactcgtagccccctcgccctcccctgaagccagggccagcccaggaacgcctggaactcccgaactgcggcctaccttcagtcctgccttttcccggccctctgccttttctagtctggccgaggcttccgatccgggtccgccaagagcaagcctgcgtgccaagacgtcccctgaaggcgcccgcgacctgctgggcccgaaggctctccctggatccagccagccccgccaatataacaacccaataggactgtattcagccgaaacactgcgagaaatggcccaaatgtaccaaatgtccctaaggggcaaggcaagtggcgtcggtcttcctgggggagcagactaccaagaacggtttaatccctctgccttgaaggatagtgccttgtccacacacaagccaatagaagttaaagggctgggcggcaaagccacaataattcacgcccagtataatacaccaatatccatgtattcccaggacgcaatcatggatgccattgctgggcaggcgcaggctcaaggaagtgacttttctggctccctgccaattaaagacctggctgtagacagcgctagtcctgtttaccaagccgtgatcaagtcacaaaacaaacctgaggatgaagctgatgagtgggccaggaggtcgtctaacctgcaatctaggtcgtttcgaatcctcgcccagatgactggcaccgaattcatgcaggaccctgatgaggaagctctcaggcgcagccggccgcaagcttcttcatacagtcccgctgtagccgcctccagcgcccctgccacccacaccagctactcagaaggccccgctgctcccgcccctaaaccaagagttgtgacaacagcctccattcggccgagtgtgtaccagcctgtgcctgcttccacttatagtccttcccctggtgcgaactattcccctactccgtatacaccatcgcccgcacccgcatataccccatccccggcccctgcctatactcctagtcctgtgccaacttacaccccttccccagctcccgcgtataccccctcgccggcccccaattataatcccgccccaagtgtcgcatattcagggggcccagctgagcccgcatccaggccaccttgggtgaccgatgacagcttctcccagaaattcgctcccggtaaaagcactactagcataagcaagcagaccctgcctcgcggcggacccgcttacactcccgctggccctcaggtcccccccctggcacgtggcacagtgcagcgagccgagcgtttcccagcctctagccgcactccactatgtggccattgcaacaacgtgatcagaggtccatttctcgtcgctatggggaggtcatggcacccagaggaattcacgtgtgcttattgtaagacctctcttgccgacgtgtgctttgtggaggagcagaataatgtgtactgtgagcgttgttatgagcagttctttgccccactgtgcgccaagtgtaatactaaaattatgggagaagtgatgcacgcattgcgccagacttggcacaccacatgctttgtgtgtgcagcctgtaaaaagccattcggaaattcactcttccacatggaagacggcgaaccatattgcgagaaggattatatcaatctgttctcaacgaagtgccacggctgtgactttcctgtggaagctggcgacaaatttatcgaggcattagggcatacatggcacgatacctgcttcatctgcgcggtgtgccacgtgaacctggaggggcagccattttattctaaaaaagatcggccgctgtgtaaaaagcatgcccacaccattaacctctag

SEQ ID NO: 67274 - DNA, 2199 bp, Artificial Sequence
  derived and/or modified sequence
atgtcttactcagtgactcttacaggccctggaccgtgggggttcagactccagggcggaaaggattttaacatgcctcttacaatctccaggattacaccgggatctaaagccgctcaatcacagctgtcccagggtgatctggtcgtggccatcgatggagtcaataccgatactatgacacatttggaagcccagaataagataaaatcagcctcatacaatctttcattaacactacagaagtccaaaagaccaatccctatttctaccaccgcaccccctgttcagacccccttacctgttataccacaccagaaagacccagccctcgacactaatgggagtcttgtcgcaccatcaccgtcgcccgaggccagagcttcaccaggcacacctggcacgcctgaactgagacctacctttagtcctgccttttccagacctagtgccttcagctcccttgccgaagcctcagatcctggcccaccccgagcgtccctgcgtgctaagactagtccagagggagcacgcgatctgttaggtccaaaggccctccctggctctagtcagccacggcaatacaataacccgatcggcctttacagcgccgagacactcagagaaatggctcagatgtaccagatgtccttacggggaaaggcatccggggttggtctcccagggggtgccgattatcaggaacggttcaatcctagtgccctgaaggattccgctctctccacccataagcctattgaggtcaagggcctgggtggaaaggcaacaattattcacgcccagtacaatactcccatttcaatgtacagccaggacgccatcatggacgctatcgccggacaagcacaggcacagggctccgactttagtgggtccctgcccattaaagacttagcagtggacagcgcgtcgccagtgtaccaggccgtcattaagtcgcagaataaacccgaggacgaagcagatgagtgggcaaggcgctcatcgaatctccagtctcgctcctttcgcatacttgcccagatgacggggacagagttcatgcaagatcctgacgaagaagcgctcaggcgctctaggcctcaagcaagctcttactcccccgctgtcgctgccagctcagcccctgccacccacacatcgtacagcgaaggcccagcagcccctgcccctaagccgagagttgttacaacagctagcatacgtccaagcgtgtatcagcccgtccctgcttccacatatagtccgtctcccggagccaactatagtccgaccccatacaccccttctccagctcccgcttacaccccatcaccagcacccgcatacactccaagccccgtgcccacttacactccctcccctgcccctgcctacacaccttccccggctcccaattacaaccctgctccttctgtggcgtacagtggcggtccagccgaaccggcttcccgccctccgtgggttaccgatgacagtttcagccaaaagttcgcccctggaaagtcaacaacatctatcagtaagcagacactgccacgcggaggcccagcctataccccagccggaccacaggtccccccactggcgcgaggcacagtgcagagggccgaaagattccccgcttcaagtagaacacccctgtgcggtcattgtaataatgtgatccgcggaccatttctggtggcaatggggaggtcatggcaccctgaggaattcacgtgtgcctattgcaagacatcattagctgatgtgtgcttcgtagaagagcaaaataatgtttattgtgagcgttgctatgaacagtttttcgccccattatgtgccaaatgcaacacaaagatcatgggcgaggtgatgcacgcactccgccagacctggcacactacctgcttcgtctgcgcagcgtgtaaaaagccttttggcaactctctgtttcacatggaagacggcgagccatactgtgaaaaggattatatcaatttgttcagcactaagtgtcacggctgcgactttcccgtggaagcaggagacaagttcatcgaggccctgggccatacatggcacgatacctgtttcatttgtgccgtttgccatgtcaatctggaaggccagcccttctacagcaagaaggatcgaccactgtgtaagaagcacgctcatactatcaatctgtag

SEQ ID NO: 67275 - DNA, 2199 bp, Artificial Sequence
  derived and/or modified sequence
atgagctacagcgtgaccctgaccggccccggcccctggggcttcagactgcagggcggcaaggacttcaacatgcccctgaccatcagcagaatcacccccggcagcaaggccgcccagagccagctgagccagggcgacctggtggtggccatcgacggcgtgaacaccgacaccatgacccacctggaggcccagaacaagatcaagagcgccagctacaacctgagcctgaccctgcagaagagcaagagacccatccccatcagcaccaccgccccccccgtgcagacccccctgcccgtgatcccccaccagaaggaccccgccctggacaccaacggcagcctggtggcccccagccccagccccgaggccagagccagccccggcacccccggcacccccgagctgagacccaccttcagccccgccttcagcagacccagcgccttcagcagcctggccgaggccagcgaccccggcccccccagagccagcctgagagccaagaccagccccgagggcgccagagacctgctgggccccaaggccctgcccggcagcagccagcccagacagtacaacaaccccatcggcctgtacagcgccgagaccctgagagagatggcccagatgtaccagatgagcctgagaggcaaggccagcggcgtgggcctgcccggcggcgccgactaccaggagagattcaaccccagcgccctgaaggacagcgccctgagcacccacaagcccatcgaggtgaagggcctgggcggcaaggccaccatcatccacgcccagtacaacacccccatcagcatgtacagccaggacgccatcatggacgccatcgccggccaggcccaggcccagggcagcgacttcagcggcagcctgcccatcaaggacctggccgtggacagcgccagccccgtgtaccaggccgtgatcaagagccagaacaagcccgaggacgaggccgacgagtgggccagaagaagcagcaacctgcagagcagaagcttcagaatcctggcccagatgaccggcaccgagttcatgcaggaccccgacgaggaggccctgagaagaagcagaccccaggccagcagctacagccccgccgtggccgccagcagcgcccccgccacccacaccagctacagcgagggccccgccgcccccgcccccaagcccagagtggtgaccaccgccagcatcagacccagcgtgtaccagcccgtgcccgccagcacctacagccccagccccggcgccaactacagccccaccccctacacccccagccccgcccccgcctacacccccagccccgcccccgcctacacccccagccccgtgcccacctacacccccagccccgcccccgcctacacccccagccccgcccccaactacaaccccgcccccagcgtggcctacagcggcggccccgccgagcccgccagcagacccccctgggtgaccgacgacagcttcagccagaagttcgcccccggcaagagcaccaccagcatcagcaagcagaccctgcccagaggcggccccgcctacacccccgccggcccccaggtgccccccctggccagaggcaccgtgcagagagccgagagattccccgccagcagcagaacccccctgtgcggccactgcaacaacgtgatcagaggccccttcctggtggccatgggcagaagctggcaccccgaggagttcacctgcgcctactgcaagaccagcctggccgacgtgtgcttcgtggaggagcagaacaacgtgtactgcgagagatgctacgagcagttcttcgcccccctgtgcgccaagtgcaacaccaagatcatgggcgaggtgatgcacgccctgagacagacctggcacaccacctgcttcgtgtgcgccgcctgcaagaagcccttcggcaacagcctgttccacatggaggacggcgagccctactgcgagaaggactacatcaacctgttcagcaccaagtgccacggctgcgacttccccgtggaggccggcgacaagttcatcgaggccctgggccacacctggcacgacacctgcttcatctgcgccgtgtgccacgtgaacctggagggccagcccttctacagcaagaaggacagacccctgtgcaagaagcacgcccacaccatcaacctgtag

SEQ ID NO: 67276 - protein, 398 aa, Artificial Sequence
  derived and/or modified sequence
MSYSVTLTGPGPWGFRLQGGKDFNMPLTISRITPGSKAAQSQLSQGDLVVAIDGVNTDTMTHLEAQNKIKSASYNLSLTLQKSKRPIPISTTAPPVQTPLPVIPHQKDPALDTNGSLVAPSPSPEARASPGTPGTPELRPTFSPAFSRPSAFSSLAEASDPGPPRASLRAKTSPEGARDLLGPKALPGSSQPRQYNNPIGLYSAETLREMAQMYQMSLRGKASGVGLPGGADYQERFNPSALKDSALSTHKPIEVKGLGGKATIIHAQYNTPISMYSQDAIMDAIAGQAQAQGSDFSGSLPIKDLAVDSASPVYQAVIKSQNKPEDEADEWARRSSNLQSRSFRILAQMTGTEFMQDPDEEALRRSRERFETERNSPRFAKLRNWHHGLSAQILNVKS

SEQ ID NO: 67277 - protein, 231 aa, Artificial Sequence
  derived and/or modified sequence
MSYSVTLTGPGPWGFRLQGGKDFNMPLTISRITPGSKAAQSQLSQGDLVVAIDGVNTDTMTHLEAQNKIKSASYNLSLTLQKSKRPIPISTTAPPVQTPLPVIPHQKDPALDTNGSLVAPSPSPEARASPGTPGTPELRPTFSPAFSRPSAFSSLAEASDPGPPRASLRAKTSPEGARDLLGPKALPGSSQPRQYNNPIGLYSAETLREMAQMYQMSLRGKASGVGLPGGW

SEQ ID NO: 67278 - DNA, 1197 bp, Artificial Sequence
  derived and/or modified sequence
atgtcatactctgtgacattgacaggacccggaccttggggattccgtctccaaggagggaaagactttaatatgcccctcacaatctcccggatcaccccagggtctaaagccgcccagagccaactatcacaaggcgatttagtggtcgctatagacggtgtgaacacagacacaatgacccacttagaggcccagaataagatcaagtcagctagctataacttgtctctgacccttcagaaaagtaagaggccaatccccatcagtaccactgcaccacccgtccaaactccactcccagtgatcccccaccagaaagatcccgccctggataccaatggtagtttagtggctccgtcgccgagccctgaagcccgagcaagcccaggtacgcccggcactccagagctgaggccaacctttagtcccgcgttctcccggccaagcgcattctccagccttgcagaggcctctgacccaggccctccacgggcaagcctcagagctaagacatcgcccgaaggagcgagggatctgttgggaccaaaggctcttcctggctcgtctcaaccacggcagtacaataaccctatcgggctgtacagtgctgaaacgctgagagagatggcacagatgtatcagatgagtctccgcggcaaagcctccggggtaggccttcctggcggtgctgattaccaggaacgttttaatccttcagccttgaaagactccgccctgtcaacacataagccaatcgaagtgaagggcttagggggcaaggctactattatccatgctcagtataatacaccaataagcatgtattcccaggatgcaatcatggacgccatagcagggcaggctcaggcgcaggggtcagactttagcggtagtcttcccatcaaggacctcgctgtggacagtgcatctccggtttaccaggcagtgatcaagagccagaacaaaccagaggacgaagctgatgagtgggcacggaggagctccaacttgcaatctcggagctttaggatccttgcacagatgaccgggaccgaattcatgcaggatcccgacgaggaggccctgcgacgcagtcgcgagaggtttgaaactgagcgcaacagtccgcgattcgccaaattacgcaactggcaccatggactgagcgctcagattctcaatgttaagtcctag

SEQ ID NO: 67279 - DNA, 1197 bp, Artificial Sequence
  derived and/or modified sequence
atgagctacagcgtgaccctgaccggccctggcccctggggcttccggctgcagggcggcaaggacttcaacatgcccctgaccatcagccgcatcaccccaggcagcaaggccgcccagagccagctgagccagggcgacctggtggtggccattgatggagtgaacacagacaccatgacccacctggaggcccagaacaagatcaagagcgccagctacaacctgagcctgaccctgcagaagagcaagaggcccatccccatcagcaccacagcccctcctgtgcagacccccctgcctgtgatcccccaccagaaggaccctgccctggacaccaacggcagcctggtggcccccagccccagccctgaggcccgggccagccctggcaccccaggcaccccagagctgcggcccaccttcagccctgccttcagccggcccagcgccttcagcagcctggccgaggccagtgaccccggccccccccgggccagcctgcgggccaagaccagccctgagggcgcccgggacctgctgggccccaaggccctgcccggcagcagccagccccggcagtacaacaaccccatcggcctgtacagcgctgagaccctgcgggagatggcccagatgtaccagatgagcctgcggggcaaggccagcggcgtgggcctgcccggcggcgctgactaccaggagcgcttcaaccccagcgccctgaaggacagcgccctgagcacccacaagcccatcgaggtgaagggcctgggcggcaaggccaccatcatccacgcccagtacaacacccccatctccatgtacagccaggatgccatcatggatgccatcgccggccaggcccaggcccagggcagtgacttcagcggcagcctgcccatcaaggacctggccgtggacagcgccagccctgtgtaccaggccgtcatcaagagccagaacaagccagaagatgaagcagatgagtgggcccggcgcagcagcaacctgcagagccgctccttccgcatcctggcccagatgactggaacagagttcatgcaggaccctgatgaggaggccctgcggcgcagccgggagagatttgaaacagagaggaacagccccaggtttgccaagctgaggaactggcaccacggcctgagcgcccagatcctgaatgtgaagagctag

SEQ ID NO: 67280 - DNA, 1899 bp, Artificial Sequence
  derived and/or modified sequence
aggcggccgctgacagcaccagcatgtcttacagtgtgaccctgactgggcccgggccctggggcttccgtctgcaggggggcaaggacttcaacatgcccctcactatctcccggatcacaccaggcagcaaggcagcccagtcccagctcagccagggtgacctcgtggtggccattgacggcgtcaacacagacaccatgacccacctggaagcccagaacaagatcaagtctgccagctacaacttgagcctcaccctgcagaaatcaaagcgtcccattcccatctccacgacagcacctccagtccagacccctctgccggtgatccctcaccagaaggaccccgctctggacacgaacggcagcctggtggcacccagccccagccctgaggcgagggccagcccaggcaccccaggcaccccggagctcaggcccacctttagccctgccttctcccggccctccgccttctcctcactcgccgaggcctctgaccctggccctccgcgggccagcctgagggccaagaccagcccagagggggcccgggacctactcggcccaaaagccctgccgggctcgagccagccgaggcaatataacaaccccattggcctgtactcggcagagaccctgagggagatggctcagatgtaccagatgagcctccgagggaaggcctcgggtgtcggactcccaggaggcgccgactaccaggaacgcttcaaccccagtgccctgaaggactcggccctgtccacccacaagcccatcgaggtgaaggggctgggcggcaaggccaccatcatccatgcgcagtacaacacgcccatcagcatgtattcccaggatgccatcatggatgccatcgctgggcaggcccaagcccaaggcagtgacttcagtgggagcctccctattaaggaccttgccgtagacagcgcctctcccgtctaccaggctgtgattaagagccagaacaagccagaagatgaggctgacgagtgggcacgccgttcctccaacctgcagtctcgctccttccgcatcctggcccagatgacggggacagaattcatgcaagaccctgatgaagaagctctgcgaaggtcaagggaaaggtttgaaacggaacgtaacagcccacgttttgccaaattgcgcaactggcaccatggcctttcagcccaaatccttaatgttaaaagctaaaaggctgcctggaatccccccaccccaacaggctggactccctccatccttacccccacacagatctggcatgtgagccccacggtgatgcttgacaatgtataactctgctgggggcacctctgatggccaaccgcagcatttctgtcctctgcccaccccagagctgatgctggggcccagccccctgcagctctgtacccaccaaacctccccagggcaaccctcgccaccccccaaatagcccgtagcccaatcccctgccctctgcacagggccttagctgtagaccagagagggcaggaggggtttgctggcataacaccccagaaccaagggaaatggatgggccgctgctcagtttcccaccatcctcagctcctggcctcatcccctcctagaatgagtcacccgtagatcagggtctggggaagaggctgatccctggcgctgcccggctccctcgctgccctctggagctcagggcagcccggaatagggctctttgaagaggaagtagaagccccagggtaatgaggcagagacccctcctggcagtggtgaggtgggggcatgcaccctcctttctgtaccgtgtgtgctggctccatagttctctcttctgtacatataagcatgcttgttctgaaataaagaagatttgaagtgaaccacacca

SEQ ID NO: 67281 - DNA, 1889 bp, Artificial Sequence
  derived and/or modified sequence
atgtcttacagtgtgaccctgactgggcccgggccctggggcttccgtctgcaggggggcaaggacttcaacatgcccctcactatctcccggatcacaccaggcagcaaggcagcccagtcccagctcagccagggtgacctcgtggtggccattgacggcgtcaacacagacaccatgacccacctggaagcccagaacaagatcaagtctgccagctacaacttgagcctcaccctgcagaaatcaaagcgtcccattcccatctccacgacagcacctccagtccagacccctctgccggtgatccctcaccagaaggaccccgctctggacacgaacggcagcctggtggcacccagccccagccctgaggcgagggccagcccaggcaccccaggcaccccggagctcaggcccacctttagccctgccttctcccggccctccgccttctcctcactcgccgaggcctctgaccctggccctccgcgggccagcctgagggccaagaccagcccagagggggcccgggacctactcggcccaaaagccctgccgggctcgagccagccgaggcaatataacaaccccattggcctgtactcggcagagaccctgagggagatggctcagatgtaccagatgagcctccgagggaaggcctcgggtgtcggactcccaggagggtggtagtcaactctccagccaacgccgactaccaggaacgcttcaaccccagtgccctgaaggactcggccctgtccacccacaagcccatcgaggtgaaggggctgggcggcaaggccaccatcatccatgcgcagtacaacacgcccatcagcatgtattcccaggatgccatcatggatgccatcgctgggcaggcccaagcccaaggcagtgacttcagtgggagcctccctattaaggaccttgccgtagacagcgcctctcccgtctaccaggctgtgattaagagccagaacaagccagaagatgaggctgacgagtgggcacgccgttcctccaacctgcagtctcgctccttccgcatcctggcccagatgacggggacagaattcatgcaagaccctgatgaagaagctctgcgaaggtcaagggaaaggtttgaaacggaacgtaacagcccacgttttgccaaattgcgcaactggcaccatggcctttcagcccaaatccttaatgttaaaagctaaaaggctgcctggaatccccccaccccaacaggctggactccctccatccttacccccacacagatctggcatgtgagccccacggtgatgcttgacaatgtataactctgctgggggcacctctgatggccaaccgcagcatttctgtcctctgcccaccccagagctgatgctggggcccagccccctgcagctctgtacccaccaaacctccccagggcaaccctcgccaccccccaaatagcccgtagcccaatcccctgccctctgcacagggccttagctgtagaccagagagggcaggaggggtttgctggcataacaccccagaaccaagggaaatggatgggccgctgctcagtttcccaccatcctcagctcctggcctcatcccctcctagaatgagtcacccgtagatcagggtctggggaagaggctgatccctggcgctgcccggctccctcgctgccctctggagctcagggcagcccggaatagggctctttgaagaggaagtagaagccccagggtaatgaggcagagacccctcctggcagtggtgaggtgggggcatgcaccctcctttctgtaccgtgtgtgctggctccatagttctctcttctgtacatataagcatgcttgttctgaaataaagaagatttgaagtg

SEQ ID NO: 67282 - DNA, 1197 bp, Artificial Sequence
  derived and/or modified sequence
atgagctacagcgtgaccctgaccggccccggcccctggggcttcagactccaaggcggcaaagatttcaatatgcctctgacgatcagccggattacaccaggatctaaggctgctcaatcccagctgagccagggcgatcttgtggtggccatcgacggcgttaatacagacacaatgacacatctggaagcgcaaaacaaaatcaagtccgcaagctataaccttagtctgaccctgcaaaagtccaagcgaccaattccaatcagtaccactgccccccccgtacagacgcccttacctgttatcccgcaccaaaaggacccagctctggacactaatggctctttggtggctccaagcccgagcccggaggcaagagcatcgcccggcacacccggtacgccagaactgcgcccgacatttagccctgccttctctcggccttcagcattttcatccctcgcggaggcaagtgaccccggcccgcctagggcttccctgcgcgccaagacgtcacccgagggcgccagggaccttctcggacccaaagcgctacctggcagctcacagccccgccagtacaacaatcctatcgggctgtactcagccgagactcttcgggagatggcccagatgtaccagatgtcacttcgggggaaagccagtggcgtgggccttcctggcggagccgattatcaggaaagatttaacccaagtgccttaaaggattccgccctgtcaactcacaaacctatcgaagttaaaggtctcggtgggaaagctaccattattcacgcacaatacaatacaccaatcagtatgtatagccaggacgctatcatggacgccatcgcagggcaggcacaggctcaagggagcgatttctccgggagcctaccaataaaagatctagcggtggatagcgcctctccggtgtatcaggcagtcatcaagtcccagaataaaccagaagatgaggctgacgagtgggcgcggcgctccagcaatctccaatcccggagttttagaatcctggcccaaatgaccggtaccgagttcatgcaagaccccgacgaggaggccttgcgcaggtccagggagaggttcgaaaccgaacgcaacagcccaagattcgcaaaactaaggaactggcaccacggcttgtccgctcaaatcctgaatgtaaaatcctag

SEQ ID NO: 67283 - DNA, 1197 bp, Artificial Sequence
  derived and/or modified sequence
atgagctattctgtgaccctcaccgggcctggaccctggggattcaggttgcagggaggcaaggactttaacatgcctcttaccatctcccgcattacccccggttctaaggctgcccaatctcagctgtcgcaaggggacctggtagtggccattgatggtgttaatacagatactatgacccatctggaagcccagaacaagattaaaagcgcttcatataatctatccctgacgttgcagaaaagcaagcggccaattcctatatccacaaccgctccacccgtccaaaccccattgcctgtgatcccgcaccagaaggaccccgcactggatacgaatggtagcctcgtggcacctagcccttctccggaagccagagcttcacccggaactccaggcactcctgagctgcgacctactttcagccccgcattctcccgccctagtgccttctcctcccttgccgaggcctcagacccagggcctccccgagcttctttgagggctaagacctcccccgaaggggcacgtgatttgctggggccaaaggcactgccaggcagcagtcagcctcgacagtataacaacccgattggactctattccgcggagactctgcgcgaaatggcacaaatgtaccagatgtctctccggggtaaagctagtggcgtcggcctgccgggaggcgctgactaccaggaaaggtttaacccttccgcactcaaagatagcgccttatctacacacaagcctatagaggtgaaaggcctagggggaaaagctacgatcatccacgctcagtataacactcccatttctatgtatagtcaagacgccatcatggacgctatcgccggtcaggcgcaggcacaggggagcgacttttctggaagtcttccaattaaggacttagcagtagattcggccagcccggtgtatcaagctgtgattaaatcacaaaataaaccagaagatgaagccgatgagtgggccaggaggagtagcaacctccaatccaggagctttaggattctggcccagatgactgggaccgagttcatgcaggaccctgacgaagaggctctacggcgatccagggagcggttcgaaaccgagcgtaattcccctcggtttgctaagcttcgcaattggcaccacggattaagtgctcaaatcctaaatgtcaagtcctag

SEQ ID NO: 67284 - DNA, 1197 bp, Artificial Sequence
  derived and/or modified sequence
atgagctacagcgtgaccctgaccggccccggcccctggggcttcagactgcagggcggcaaggacttcaacatgcccctgaccatcagcagaatcacccccggcagcaaggccgcccagagccagctgagccagggcgacctggtggtggccatcgacggcgtgaacaccgacaccatgacccacctggaggcccagaacaagatcaagagcgccagctacaacctgagcctgaccctgcagaagagcaagagacccatccccatcagcaccaccgccccccccgtgcagacccccctgcccgtgatcccccaccagaaggaccccgccctggacaccaacggcagcctggtggcccccagccccagccccgaggccagagccagccccggcacccccggcacccccgagctgagacccaccttcagccccgccttcagcagacccagcgccttcagcagcctggccgaggccagcgaccccggcccccccagagccagcctgagagccaagaccagccccgagggcgccagagacctgctgggccccaaggccctgcccggcagcagccagcccagacagtacaacaaccccatcggcctgtacagcgccgagaccctgagagagatggcccagatgtaccagatgagcctgagaggcaaggccagcggcgtgggcctgcccggcggcgccgactaccaggagagattcaaccccagcgccctgaaggacagcgccctgagcacccacaagcccatcgaggtgaagggcctgggcggcaaggccaccatcatccacgcccagtacaacacccccatcagcatgtacagccaggacgccatcatggacgccatcgccggccaggcccaggcccagggcagcgacttcagcggcagcctgcccatcaaggacctggccgtggacagcgccagccccgtgtaccaggccgtgatcaagagccagaacaagcccgaggacgaggccgacgagtgggccagaagaagcagcaacctgcagagcagaagcttcagaatcctggcccagatgaccggcaccgagttcatgcaggaccccgacgaggaggccctgagaagaagcagagagagattcgagaccgagagaaacagccccagattcgccaagctgagaaactggcaccacggcctgagcgcccagatcctgaacgtgaagagctag

SEQ ID NO: 67285 - DNA, 1917 bp, Artificial Sequence
  derived and/or modified sequence
atggatgcctttgagaaagtgcgcactaagttagagactcagccccaggaggagtatgaaattattaacgtggaggtgaaacatgggggcttcgtgtattatcaggagggatgctgcctagtgcgttccaaggatgaggaagccgataacgataactatgaggtcctgtttaatctggaagagctaaaactggaccagcccttcatcgattgcataagagtggcccctgacgagaagtatgtcgccgccaagattcggacagaagatagtgaggccagcacgtgtgtgattatcaagctatcagaccagccagtcatggaagcctcctttcccaatgtgagcagcttcgagtgggtgaaggacgaggaagatgaagacgtgctgttttatacgtttcaacgtaacctgcgctgccacgacgtgtatagagctacttttggggacaacaaaaggaacgagcgcttctacacagaaaaagacccttcctactttgtcttcttgtacctgactaaagatagcagattccttaccataaacattatgaataagacgacctctgaagtctggctgattgacgggctgtccccgtgggatccacccgttctcatccaaaaaaggatccacggcgtcctgtactacgtcgagcatcgggatgatgaactctacatcctgacgaatgtgggcgagccgactgagttcaagctcatgcggaccgccgcagatacgcccgctattatgaattgggatctcttcttcacgatgaagagaaacactaaagtgatcgatctggatatgttcaaagatcattgcgtgttgttcctgaagcacagcaacctgctatacgtcaatgttatcggtctggctgatgatagtgtaaggagcctcaagctgcctccgtgggcttgtggcttcatcatggataccaacagcgaccccaaaaactgtccatttcaactgtgtagccctattagaccgcccaagtattatacatataagttcgcagaaggcaaactgttcgaggagactggccatgaggacccaattacaaaaacctccagagtgctccggttggaggcaaagagtaaagacggaaagctggtgcctatgacagtctttcataaaaccgacagcgaggatctgcagaagaagccgttattagtgcacgtgtacggtgcgtatggcatggatcttaagatgaactttaggccggaaagaagagtgctcgtggacgacgggtggattttggcttattgccatgtgcgcggcgggggtgagctaggcctgcaatggcacgctgacgggcgactgacgaagaagctcaacggtcttgctgatttagaggcttgtattaaaacccttcacgggcaggggttctctcagccctccctgaccaccctgaccgccttcagcgcgggaggggtgctggcaggggccctctgcaactcgaaccctgaattggtgcgggctgtaactctcgaggcacctttccttgatgttctgaacaccatgatggacacgacactacctctcaccctggaggagctggaagagtggggtaatccatcaagtgacgagaaacacaagaactatatcaagaggtactgtccttatcagaatataaaaccacagcattatcctagcatccatatcacggcctatgagaatgatgaaagggttcccctgaaagggatcgtcagttataccgagaagcttaaggaggccattgcagaacatgctaaggacaccggggaggggtaccaaactccgaatatcattctggatatccagcctggagggaaccatgtgattgaagatagtcataaaaagattactgcacagatcaagtttctatacgaggagctgggcctggactctacttcagtattcgaagaccttaagaaatacctgaagttttag

SEQ ID NO: 67286 - DNA, 1917 bp, Artificial Sequence
  derived and/or modified sequence
atggatgcctttgagaaggtgaggaccaagctggagacccagccccaggaggagtatgagatcatcaacgtggaggtgaagcacggcggctttgtgtactaccaggagggctgctgcctggtgcgcagcaaggatgaggaggccgacaatgacaactatgaggtgctcttcaacctggaggagctgaagctggaccagcccttcatcgactgcatccgggtggccccagatgagaagtatgtggccgccaagatcagaacagaggacagcgaggccagcacctgtgtgatcatcaagctgagtgaccagcctgtgatggaggccagcttccccaacgtgtcctcctttgagtgggtgaaggatgaagaagatgaagatgtgctcttctacaccttccagaggaacctgcgctgccatgatgtgtaccgggccaccttcggggacaacaagagaaatgaacgcttctacacagagaaggaccccagctactttgtgttcctgtacctgaccaaggacagccgcttcctgaccatcaacatcatgaacaagaccaccagcgaggtgtggctgattgatggcctgagcccctgggacccccctgtgctgatccagaagaggatccacggcgtgctgtactacgtggagcacagagatgatgagctgtacatcctgaccaacgtgggggagcccacagagttcaagctgatgaggacagctgctgacaccccagccatcatgaactgggacctcttcttcaccatgaagaggaacaccaaggtgattgacctggacatgttcaaggaccactgtgtgctcttcctgaagcacagcaacctgctgtatgtgaatgtgattggcctggctgatgattctgtgcgcagcctgaagctgcccccctgggcctgtggcttcatcatggacaccaacagcgaccccaagaactgccccttccagctgtgcagccccatccggccccccaagtactacacctacaagtttgctgagggcaagctgtttgaggagaccggccacgaggaccccatcaccaagaccagccgggtgctgcggctggaggccaagagcaaggatggcaagctggtgcccatgaccgtcttccacaagacagattctgaggacctgcagaagaagcccctgctggtgcacgtgtatggagcctacggcatggacctgaagatgaacttccggcctgagaggagagtgctggtggatgatggctggatcctggcctactgccacgtgcggggcggcggggagctgggcctgcagtggcacgcagatggccgcctgaccaagaagctgaatggcctggccgacctggaggcctgcatcaagaccctgcacggccagggcttcagccagcccagcctgaccaccctgacagccttctctgctggaggagtgctggccggggccctgtgcaacagcaaccctgagctggtgcgggctgtgaccctggaggcccccttcctggatgtgctgaacaccatgatggacaccaccctgcccctgaccctggaggagctggaggagtggggcaaccccagcagtgatgagaagcacaagaactacatcaagcgctactgcccctaccagaacatcaagccccagcactaccccagcatccacatcacagcctatgaaaatgatgagcgggtgcccctgaagggcatcgtgtcctacacagagaagctgaaggaggccatcgccgagcacgccaaggacaccggggagggctaccagacccccaacatcatcctggacatccagcccggcggcaaccacgtgattgaggacagccacaagaagatcacagcccagatcaagttcctgtatgaggagctgggcctggacagcacctctgtgtttgaggacctgaagaagtacctgaagttctag

SEQ ID NO: 67287 - DNA, 1917 bp, Artificial Sequence
  derived and/or modified sequence
atggacgccttcgagaaggtgcggaccaagctggagacccagccccaggaggagtacgagatcattaatgtggaggtcaaacacggagggtttgtctactaccaggaaggctgttgccttgtaaggagtaaggatgaggaggctgataatgataactatgaggtactctttaatttagaagagttgaagttagaccaaccattcatagactgcatcagggtggcccccgatgagaagtacgtggctgcgaaaattcgaaccgaagactctgaagctagtacatgtgtgatcattaaactatccgatcagcctgtcatggaagcttctttccccaacgtgtcttccttcgagtgggtcaaagatgaagaggatgaggacgtgttgttttatacttttcagcgcaatctacgatgtcatgacgtttatagggccaccttcggcgacaataaaaggaacgaacggttctatacagagaaagatccaagctactttgtgttcctgtatctgacaaaggacagcagattcttgaccatcaatattatgaataaaactacttccgaagtatggctgatcgatgggctgtccccttgggaccctcccgtgctgattcagaaaagaatccatggtgtcttgtactacgttgagcaccgggacgatgagctctatattctgaccaacgtcggtgaacctacagaattcaagctcatgcggacggcagccgacacccctgcaattatgaactgggacttgtttttcacgatgaaaagaaatactaaggtcattgacttggatatgttcaaagaccactgtgtgctatttctcaaacactcaaatcttctctacgtcaacgtaattgggctggccgacgactctgtccgctctctcaaactgcctccttgggcctgtggtttcataatggatactaatagtgacccaaaaaattgcccctttcagttgtgctctcccattcggcctccaaaatattatacctacaagttcgccgaaggcaagttatttgaggagaccggacacgaggatccaatcaccaagacgtcacgagtcctaagactggaagcaaagagcaaggacgggaagctggtgcctatgaccgtctttcacaaaactgactccgaagacctacagaaaaagccactgctcgtccacgtttatggagcatacgggatggatttgaaaatgaactttcgcccggaaagaagggtactcgttgacgatgggtggattttggcctattgccacgtgagggggggcggagaactcggtctgcagtggcacgctgacggcagactaaccaaaaaattaaatgggcttgccgatctcgaggcctgcattaaaacgctgcacgggcaggggtttagccagccttcactcaccactctgacggccttctccgccggcggtgttttagctggggctctgtgcaattctaatcccgagctcgtgagagctgtgacactggaggcaccatttctggatgttttaaatacaatgatggataccaccctgccactgacacttgaagagctggaagaatggggcaacccgtcatctgatgagaaacacaaaaattacatcaagcggtactgcccctatcagaatatcaaacctcagcattacccgagtattcatataaccgcctacgaaaatgacgagagagtccctctgaaggggatcgtctcatacacagaaaagttaaaagaagcaatcgctgagcatgctaaggacaccggcgaagggtatcagacccccaatattattctggacattcagccaggaggtaaccacgttattgaggattcacataagaaaatcaccgctcagatcaagtttctgtacgaggagctgggcctcgactctacttcggtctttgaggatctgaagaaataccttaagttctag

SEQ ID NO: 67288 - DNA, 1917 bp, Artificial Sequence
  derived and/or modified sequence
atggatgcctttgagaaggtgcgaactaagctcgaaacccagcctcaagaggaatatgaaataattaatgtggaagtgaagcacggagggtttgtatattaccaagaaggttgttgtctggtgcgaagtaaagacgaggaggccgataacgacaactatgaggtcctgtttaatcttgaggagcttaaactggatcaacctttcattgactgtatacgggtcgcccctgacgagaagtacgtggctgctaagataagaacagaagattctgaggcctcaacctgcgtcatcattaagctctcagaccagcccgtgatggaggcttctttcccgaatgtgtcctccttcgaatgggtgaaggatgaggaggacgaggatgtactgttctacacattccagcggaatttgcggtgtcacgatgtttacagggctaccttcggtgacaacaaaagaaacgagagattttacacagagaaagacccctcctacttcgtgttcctatacctgacaaaggattcccgcttcttgacaatcaacatcatgaacaaaacaacctctgaagtgtggctgattgacgggttatctccatgggacccgcctgtgctcatacagaagcgtattcatggcgtgctctactatgttgagcacagagacgatgagctgtacatcctcaccaacgtgggggaaccaaccgaatttaaattaatgaggacggccgctgacacacctgcaatcatgaattgggacctgttctttactatgaagagaaatacgaaggtcatcgacctcgacatgtttaaggatcactgcgtcttgttcttgaaacactcaaatttgctctatgttaacgtgattggcctggctgacgactccgttagatcccttaagttgccaccctgggcatgtggttttatcatggataccaacagcgaccccaaaaattgcccgtttcagctgtgttcacctattcgcccaccgaaatattatacgtataaattcgccgaaggaaaattgtttgaggagactggtcacgaggatcctattactaagacgagtagagtcctgcggcttgaggctaaatctaaggatggcaagctggtccccatgaccgtgttccacaagacagactctgaagacctccaaaagaagcccctcctcgtccatgtgtacggggcatacggaatggacttaaagatgaactttagaccagagcgcagagtgctggtcgacgacggttggatcctggcttattgtcatgtcaggggtgggggagagctgggtttgcagtggcatgcagatggacgcctcaccaaaaagttgaacggtctggctgatcttgaggcatgtatcaagactttgcacggccaaggtttctcccagccttcacttactaccctgacagctttctcagccggtggggttttggcaggagctttgtgtaatagcaaccctgagctggttcgcgctgttactctggaagcaccattcctcgatgttctcaatactatgatggacaccacactcccactgactctagaggaactcgaagagtggggcaacccctcttctgatgaaaagcacaaaaattacatcaagagatactgcccgtatcagaacatcaagccccagcattaccccagcatccacatcaccgcatacgaaaatgacgaaagggtgccgctgaagggcatcgtttcttacactgaaaagttgaaggaagccatagccgaacatgcgaaagatactggggagggctaccaaacaccgaacattatactggacattcagccagggggtaatcatgtgatcgaagattcccacaagaagattaccgcccagataaagttcctgtacgaggagcttggcctggattcaacctctgtgttcgaggatctaaaaaaatatctgaaattctag

SEQ ID NO: 67289 - DNA, 1917 bp, Artificial Sequence
  derived and/or modified sequence
atggacgccttcgagaaggtgagaaccaagctggagacccagccccaggaggagtacgagatcatcaacgtggaggtgaagcacggcggcttcgtgtactaccaggagggctgctgcctggtgagaagcaaggacgaggaggccgacaacgacaactacgaggtgctgttcaacctggaggagctgaagctggaccagcccttcatcgactgcatcagagtggcccccgacgagaagtacgtggccgccaagatcagaaccgaggacagcgaggccagcacctgcgtgatcatcaagctgagcgaccagcccgtgatggaggccagcttccccaacgtgagcagcttcgagtgggtgaaggacgaggaggacgaggacgtgctgttctacaccttccagagaaacctgagatgccacgacgtgtacagagccaccttcggcgacaacaagagaaacgagagattctacaccgagaaggaccccagctacttcgtgttcctgtacctgaccaaggacagcagattcctgaccatcaacatcatgaacaagaccaccagcgaggtgtggctgatcgacggcctgagcccctgggacccccccgtgctgatccagaagagaatccacggcgtgctgtactacgtggagcacagagacgacgagctgtacatcctgaccaacgtgggcgagcccaccgagttcaagctgatgagaaccgccgccgacacccccgccatcatgaactgggacctgttcttcaccatgaagagaaacaccaaggtgatcgacctggacatgttcaaggaccactgcgtgctgttcctgaagcacagcaacctgctgtacgtgaacgtgatcggcctggccgacgacagcgtgagaagcctgaagctgcccccctgggcctgcggcttcatcatggacaccaacagcgaccccaagaactgccccttccagctgtgcagccccatcagaccccccaagtactacacctacaagttcgccgagggcaagctgttcgaggagaccggccacgaggaccccatcaccaagaccagcagagtgctgagactggaggccaagagcaaggacggcaagctggtgcccatgaccgtgttccacaagaccgacagcgaggacctgcagaagaagcccctgctggtgcacgtgtacggcgcctacggcatggacctgaagatgaacttcagacccgagagaagagtgctggtggacgacggctggatcctggcctactgccacgtgagaggcggcggcgagctgggcctgcagtggcacgccgacggcagactgaccaagaagctgaacggcctggccgacctggaggcctgcatcaagaccctgcacggccagggcttcagccagcccagcctgaccaccctgaccgccttcagcgccggcggcgtgctggccggcgccctgtgcaacagcaaccccgagctggtgagagccgtgaccctggaggcccccttcctggacgtgctgaacaccatgatggacaccaccctgcccctgaccctggaggagctggaggagtggggcaaccccagcagcgacgagaagcacaagaactacatcaagagatactgcccctaccagaacatcaagccccagcactaccccagcatccacatcaccgcctacgagaacgacgagagagtgcccctgaagggcatcgtgagctacaccgagaagctgaaggaggccatcgccgagcacgccaaggacaccggcgagggctaccagacccccaacatcatcctggacatccagcccggcggcaaccacgtgatcgaggacagccacaagaagatcaccgcccagatcaagttcctgtacgaggagctgggcctggacagcaccagcgtgttcgaggacctgaagaagtacctgaagttctag

SEQ ID NO: 67290 - protein, 317 aa, Artificial Sequence
  derived and/or modified sequence
LTDRQTDTAPSPSYHLLPGRRRTVDAAASRGQGPEPAPGGGVEGVGARGVALKLFVQLLGCSRFGGAVVRAGEAEPSGAARSASSGREEPQPEEGEEEEEKEEERGPQWRLGARKPGSWTGEAAVCADSAPAARAPQALARASGRGGRVARRGAEESGPPHSPSRRGSASRAGPGRASETMNFLLSWVHWSLALLLYLHHAKWSQAAPMAEGGGQNHHEVVKFMDVYQRSYCHPIETLVDIFQEYPDEIEYIFKPSCVPLMRCGGCCNDEGLECVPTEESNITMQIMRIKPHQGQHIGEMSFLQHNKCECRCDKPRR

SEQ ID NO: 67291 - protein, 137 aa, Artificial Sequence
  derived and/or modified sequence
MNFLLSWVHWSLALLLYLHHAKWSQAAPMAEGGGQNHHEVVKFMDVYQRSYCHPIETLVDIFQEYPDEIEYIFKPSCVPLMRCGGCCNDEGLECVPTEESNITMQIMRIKPHQGQHIGEMSFLQHNKCECRCDKPRR

SEQ ID NO: 67292 - protein, 317 aa, Artificial Sequence
  derived and/or modified sequence
MTDRQTDTAPSPSYHLLPGRRRTVDAAASRGQGPEPAPGGGVEGVGARGVALKLFVQLLGCSRFGGAVVRAGEAEPSGAARSASSGREEPQPEEGEEEEEKEEERGPQWRLGARKPGSWTGEAAVCADSAPAARAPQALARASGRGGRVARRGAEESGPPHSPSRRGSASRAGPGRASETMNFLLSWVHWSLALLLYLHHAKWSQAAPMAEGGGQNHHEVVKFMDVYQRSYCHPIETLVDIFQEYPDEIEYIFKPSCVPLMRCGGCCNDEGLECVPTEESNITMQIMRIKPHQGQHIGEMSFLQHNKCECRCDKPRR

SEQ ID NO: 67293 - DNA, 3392 bp, Artificial Sequence
  derived and/or modified sequence
tcgcggaggcttggggcagccgggtagctcggaggtcgtggcgctgggggctagcaccagcgctctgtcgggaggcgcagcggttaggtggaccggtcagcggactcaccggccagggcgctcggtgctggaatttgatattcattgatccgggttttatccctcttcttttttcttaaacatttttttttaaaactgtattgtttctcgttttaatttatttttgcttgccattccccacttgaatcgggccgacggcttggggagattgctctacttccccaaatcactgtggattttggaaaccagcagaaagaggaaagaggtagcaagagctccagagagaagtcgaggaagagagagacggggtcagagagagcgcgcgggcgtgcgagcagcgaaagcgacaggggcaaagtgagtgacctgcttttgggggtgaccgccggagcgcggcgtgagccctcccccttgggatcccgcagctgaccagtcgcgctgacggacagacagacagacaccgcccccagccccagctaccacctcctccccggccggcggcggacagtggacgcggcggcgagccgcgggcaggggccggagcccgcgcccggaggcggggtggagggggtcggggctcgcggcgtcgcactgaaacttttcgtccaacttctgggctgttctcgcttcggaggagccgtggtccgcgcgggggaagccgagccgagcggagccgcgagaagtgctagctcgggccgggaggagccgcagccggaggagggggaggaggaagaagagaaggaagaggagagggggccgcagtggcgactcggcgctcggaagccgggctcatggacgggtgaggcggcggtgtgcgcagacagtgctccagccgcgcgcgctccccaggccctggcccgggcctcgggccggggaggaagagtagctcgccgaggcgccgaggagagcgggccgccccacagcccgagccggagagggagcgcgagccgcgccggccccggtcgggcctccgaaaccatgaactttctgctgtcttgggtgcattggagccttgccttgctgctctacctccaccatgccaagtggtcccaggctgcacccatggcagaaggaggagggcagaatcatcacgaagtggtgaagttcatggatgtctatcagcgcagctactgccatccaatcgagaccctggtggacatcttccaggagtaccctgatgagatcgagtacatcttcaagccatcctgtgtgcccctgatgcgatgcgggggctgctgcaatgacgagggcctggagtgtgtgcccactgaggagtccaacatcaccatgcagattatgcggatcaaacctcaccaaggccagcacataggagagatgagcttcctacagcacaacaaatgtgaatgcagatgtgacaagccgaggcggtgagccgggcaggaggaaggagcctccctcagggtttcgggaaccagatctctcaccaggaaagactgatacagaacgatcgatacagaaaccacgctgccgccaccacaccatcaccatcgacagaacagtccttaatccagaaacctgaaatgaaggaagaggagactctgcgcagagcactttgggtccggagggcgagactccggcggaagcattcccgggcgggtgacccagcacggtccctcttggaattggattcgccattttatttttcttgctgctaaatcaccgagcccggaagattagagagttttatttctgggattcctgtagacacacccacccacatacatacatttatatatatatatattatatatatataaaaataaatatctctattttatatatataaaatatatatattctttttttaaattaacagtgctaatgttattggtgtcttcactggatgtatttgactgctgtggacttgagttgggaggggaatgttcccactcagatcctgacagggaagaggaggagatgagagactctggcatgatcttttttttgtcccacttggtggggccagggtcctctcccctgcccaggaatgtgcaaggccagggcatgggggcaaatatgacccagttttgggaacaccgacaaacccagccctggcgctgagcctctctaccccaggtcagacggacagaaagacagatcacaggtacagggatgaggacaccggctctgaccaggagtttggggagcttcaggacattgctgtgctttggggattccctccacatgctgcacgcgcatctcgcccccaggggcactgcctggaagattcaggagcctgggcggccttcgcttactctcacctgcttctgagttgcccaggagaccactggcagatgtcccggcgaagagaagagacacattgttggaagaagcagcccatgacagctccccttcctgggactcgccctcatcctcttcctgctccccttcctggggtgcagcctaaaaggacctatgtcctcacaccattgaaaccactagttctgtccccccaggagacctggttgtgtgtgtgtgagtggttgaccttcctccatcccctggtccttcccttcccttcccgaggcacagagagacagggcaggatccacgtgcccattgtggaggcagagaaaagagaaagtgttttatatacggtacttatttaatatccctttttaattagaaattaaaacagttaatttaattaaagagtagggttttttttcagtattcttggttaatatttaatttcaactatttatgagatgtatcttttgctctctcttgctctcttatttgtaccggtttttgtatataaaattcatgtttccaatctctctctccctgatcggtgacagtcactagcttatcttgaacagatatttaattttgctaacactcagctctgccctccccgatcccctggctccccagcacacattcctttgaaataaggtttcaatatacatctacatactatatatatatttggcaacttgtatttgtgtgtatatatatatatatatgtttatgtatatatgtgattctgataaaatagacattgctattctgttttttatatgtaaaaacaaaacaagaaaaaatagagaattctacatactaaatctctctccttttttaattttaatatttgttatcatttatttattggtgctactgtttatccgtaataattgtggggaaaagatattaacatcacgtctttgtctctagtgcagtttttcgagatattccgtagtacatatttatttttaaacaacgacaaagaaatacagatatatcttaaaaaaaaaaaagcattttgtattaaagaatttaattctgatctcaaaaaaaaaaaaaaaaaa

SEQ ID NO: 67294 - DNA, 951 bp, Artificial Sequence
  derived and/or modified sequence
ctgaccgaccgccagaccgacaccgcccccagccccagctaccacctgctgcccggccgccgccgcaccgtggacgccgccgccagccgcggccagggccccgagcccgcccccggcggcggcgtggagggcgtgggcgcccgcggcgtggccctgaagctgttcgtgcagctgctgggctgcagccgcttcggcggcgccgtggtgcgcgccggcgaggccgagcccagcggcgccgcccgcagcgccagcagcggccgcgaggagccccagcccgaggagggcgaggaggaggaggagaaggaggaggagcgcggcccccagtggcgcctgggcgcccgcaagcccggcagctggaccggcgaggccgccgtgtgcgccgacagcgcccccgccgcccgcgccccccaggccctggcccgcgccagcggccgcggcggccgcgtggcccgccgcggcgccgaggagagcggccccccccacagccccagccgccgcggcagcgccagccgcgccggccccggccgcgccagcgagaccatgaacttcctgctgagctgggtgcactggagcctggccctgctgctgtacctgcaccacgccaagtggagccaggccgcccccatggccgagggcggcggccagaaccaccacgaggtggtgaagttcatggacgtgtaccagcgcagctactgccaccccatcgagaccctggtggacatcttccaggagtaccccgacgagatcgagtacatcttcaagcccagctgcgtgcccctgatgcgctgcggcggctgctgcaacgacgagggcctggagtgcgtgcccaccgaggagagcaacatcaccatgcagatcatgcgcatcaagccccaccagggccagcacatcggcgagatgagcttcctgcagcacaacaagtgcgagtgccgctgcgacaagccccgccgc

SEQ ID NO: 67295 - DNA, 954 bp, Artificial Sequence
  derived and/or modified sequence
ctgaccgacagacagaccgacaccgcccccagccccagctaccacctgctgcccggcagaagaagaaccgtggacgccgccgccagcagaggccagggccccgagcccgcccccggcggcggcgtggagggcgtgggcgccagaggcgtggccctgaagctgttcgtgcagctgctgggctgcagcagattcggcggcgccgtggtgagagccggcgaggccgagcccagcggcgccgccagaagcgccagcagcggcagagaggagccccagcccgaggagggcgaggaggaggaggagaaggaggaggagagaggcccccagtggagactgggcgccagaaagcccggcagctggaccggcgaggccgccgtgtgcgccgacagcgcccccgccgccagagccccccaggccctggccagagccagcggcagaggcggcagagtggccagaagaggcgccgaggagagcggccccccccacagccccagcagaagaggcagcgccagcagagccggccccggcagagccagcgagaccatgaacttcctgctgagctgggtgcactggagcctggccctgctgctgtacctgcaccacgccaagtggagccaggccgcccccatggccgagggcggcggccagaaccaccacgaggtggtgaagttcatggacgtgtaccagagaagctactgccaccccatcgagaccctggtggacatcttccaggagtaccccgacgagatcgagtacatcttcaagcccagctgcgtgcccctgatgagatgcggcggctgctgcaacgacgagggcctggagtgcgtgcccaccgaggagagcaacatcaccatgcagatcatgagaatcaagccccaccagggccagcacatcggcgagatgagcttcctgcagcacaacaagtgcgagtgcagatgcgacaagcccagaagatag

SEQ ID NO: 67296 - DNA, 954 bp, Artificial Sequence
  derived and/or modified sequence
ctgaccgacaggcagactgacactgcaccatccccatcgtaccacttgctcccagggaggcggcggacagtcgatgccgccgctagcagaggccaaggacctgaacccgcccctgggggcggggttgaaggagtgggggcccggggagtggccctgaaactgttcgtccagctgctcgggtgcagcagattcggaggggccgtggtcagagccggggaggccgaaccctctggagccgcacggagtgccagctcagggcgcgaagaaccacagcctgaggagggagaggaggaagaggaaaaggaagaggaaaggggcccacagtggagactgggggcccgaaagcctgggtcttggaccggagaggctgctgtctgtgctgattccgcacctgcggctcgcgcacctcaggctctcgctcgagcaagcggtcggggaggcagagtagcacggcgcggtgccgaggagtctgggccgccccactccccctcccggaggggttccgcttcacgcgctggccctggccgcgcctctgagactatgaactttctcctgagctgggtgcattggagcctggccctactcctgtacctccaccacgcaaaatggtcccaggccgcccctatggctgagggaggggggcaaaatcaccacgaagttgtgaaatttatggacgtgtaccagagatcatattgccatccaatagagacactcgtcgatatctttcaggagtatccagacgaaatcgaatacatctttaagccctcatgtgtcccgcttatgcgctgtgggggttgctgtaacgatgaaggcctagagtgtgtccccacggaagaaagcaatatcaccatgcaaataatgagaattaagcctcaccaggggcagcacattggggaaatgagctttctgcagcataataagtgcgaatgtcgctgcgacaagcctcggcgctag

SEQ ID NO: 67297 - DNA, 954 bp, Artificial Sequence
  derived and/or modified sequence
ctgacagaccggcagacagacacagcccccagccccagctaccacctgctgcccggcagaagaagaacagtggatgctgctgccagccggggccagggccctgagcccgcccctgggggcggcgtggagggcgtgggcgcccggggcgtggccctgaagctgtttgtgcagctgctgggctgcagcagatttggaggagctgtggtgcgggccggggaggccgagcccagcggggccgcccggagcgccagcagcggccgggaggagccccagcctgaggagggggaggaggaggaggagaaggaggaggagcggggcccccagtggaggctgggcgccaggaagccaggctcctggacaggagaggccgctgtgtgtgccgacagcgccccagctgcccgggccccccaggccctggcccgggccagcggccggggcggccgggtggccaggagaggagctgaggagagcggccccccccacagccccagcagaagaggcagcgccagccgggccggccctggccgggccagcgagaccatgaacttcctgctgtcctgggtgcactggagcctggccctgctgctgtacctgcaccacgccaagtggagccaggccgcccccatggccgagggcggcggccagaaccaccacgaggtggtgaagttcatggatgtgtaccagaggagctactgccaccccatcgagaccctggtggacatcttccaggagtacccagatgaaattgagtacatcttcaagcccagctgtgtgcccctgatgagatgtggcggctgctgcaatgatgagggcctggagtgtgtgcccacagaggagagcaacatcaccatgcagatcatgaggatcaagccccaccagggccagcacatcggggagatgtccttcctgcagcacaacaagtgtgaatgtcgctgtgacaagcccaggaggtag

SEQ ID NO: 67298 - DNA, 954 bp, Artificial Sequence
  derived and/or modified sequence
ctgaccgaccggcagaccgacaccgcccccagccccagctaccacctgctgccgggacgcaggcggacagtggatgcagcagcttctcggggacaggggcccgaaccagctccgggaggaggagtcgagggagttggagcccgaggcgtcgccttgaaattgtttgtgcagcttctgggctgctcacggttcggtggggcagtagtgagagccggcgaagccgagcccagcggtgcagccagaagtgcaagttccgggcgcgaggagccccaacccgaggagggtgaggaggaggaggagaaggaagaagagagggggccacagtggaggttaggagcccggaaacccggaagctggactggagaggcagccgtctgtgccgacagtgcccccgcggctcgggctcctcaggcattagcaagggcctccggccgtggagggcgtgtggcccggcggggggctgaggaatctggccctccccactcgccatctaggcgcgggagcgcctcccgagcagggcccggtagagctagcgagaccatgaatttcttactctcttgggtgcattggtctctggctctcctgttgtacctccaccacgcaaaatggagccaggctgcacccatggccgaaggcggcggtcaaaaccaccatgaagtggtaaagttcatggatgtgtatcagagaagttactgccacccaattgagactctcgtggacatctttcaggaatatccagatgagatcgaatacatattcaaaccaagctgcgttccccttatgcgctgcggcggatgttgcaatgacgaaggattggaatgtgttcccaccgaagagtctaacataaccatgcagattatgcggatcaaacctcatcaaggccaacacattggggaaatgtcctttctccagcataacaagtgtgagtgccggtgcgataaaccgcggcgttag

SEQ ID NO: 67299 - DNA, 954 bp, Artificial Sequence
  derived and/or modified sequence
ttgactgatagacaaacggataccgccccaagcccttcttaccacctgctgccagggagaagaaggactgtagacgccgctgcctcccggggtcagggccctgagccagccccaggaggcggagttgaaggcgtgggagctaggggcgtggcactcaaactgttcgttcagctgctgggctgttcccggttcggcggtgccgtggtgcgggcaggagaggcagaacctagcggcgcagcccgaagcgcgagttcaggccgtgaagagccacagccagaggagggggaggaagaggaggagaaggaggaggaacggggtcctcagtggcgactgggagctcgcaaacccggatcatggacaggggaggcagccgtctgtgccgactccgcacccgctgccagagcgccacaggccttagctcgtgcttccggcagaggtggtagagtggcccgacgcggtgccgaagagtccggccctcctcactccccttccagacgcggatcggcatcgcgagctggaccagggagggcctctgagacaatgaattttctcctgagctgggtccactggtctctggcgcttctcttgtatctgcaccacgcaaagtggtcacaggccgctcccatggcagaaggcggtggacagaatcatcacgaggtcgtcaaatttatggatgtttaccaacggagctactgtcatcctattgaaaccctggtcgacatatttcaggaatatcctgatgaaatcgagtacatattcaaaccctcatgtgtgccccttatgcggtgtggagggtgttgtaacgatgagggcctggagtgcgtgcctacggaggagagcaatattaccatgcaaatcatgcgcatcaagccccatcagggccaacacatcggggaaatgagcttcctccagcataataaatgtgagtgcaggtgtgacaaacctcgccgatag

SEQ ID NO: 67300 - DNA, 954 bp, Artificial Sequence
  derived and/or modified sequence
ctgaccgaccgacagacagacactgcacctagtcccagctatcatctgctccctggacggagaagaaccgtcgacgctgctgcctctagaggacagggccccgaaccagcccccgggggcggcgttgagggggtgggcgctcgaggggtggccctcaaactgttcgtgcaattgctgggctgttcacggtttggaggggccgtagtgagggcaggggaagcagaacctagcggcgccgcccgttcagctagctcaggacgtgaagaaccgcaaccagaagaaggcgaggaggaggaagaaaaagaagaagagcgcggcccccagtggaggctgggagcgcggaaacctggatcctggactggcgaggctgcagtctgcgccgacagtgcccccgctgccagggcacctcaggcactggcccgggcaagcgggagagggggccgggttgcccgtcgcggggccgaagagtccggcccacctcactccccatctcggcggggaagtgcttcacgcgcagggccaggtagagcttcagaaaccatgaatttcctactttcttgggttcattggtctctcgcactcctgctttacttacatcatgctaagtggtcccaggctgctccgatggctgagggaggagggcagaaccaccatgaagtggttaagtttatggatgtgtaccagcggtcctactgccacccaatcgagacactcgttgacatttttcaggaatatccagatgagattgagtatattttcaagccttcatgtgtgcccctcatgcgctgcggaggctgttgcaacgacgaaggcctcgaatgcgtgcctaccgaagagtcaaacatcacaatgcagattatgaggattaaaccacaccagggccaacacatcggggagatgagtttcttgcagcataacaagtgcgagtgcagatgtgacaaaccccgtaggtag

SEQ ID NO: 67301 - DNA, 954 bp, Artificial Sequence
  derived and/or modified sequence
ttgacagaccggcagacggatacggcaccttccccatcttatcatctgttacctgggcgaagaaggactgttgacgccgccgctagccgtgggcaagggccagagcccgcacccgggggaggagttgagggcgtgggcgcaagaggagtggcgctgaaactctttgtccaactcttagggtgcagtaggttcggcggggccgtggtaagagcaggagaagctgaaccatccggggctgctagaagcgcttcaagcggcagagaggaaccacagcccgaagagggggaggaggaggaggagaaggaggaggaacgcgggcctcaatggagactgggggccagaaaacctggttcatggaccggcgaggctgcggtctgtgcggacagtgcaccagccgccagagccccccaagcactggccagagcttctggcaggggtggaagagttgcaagacgcggagctgaggagagtggacctcctcattctccctcgagacgaggtagcgccagtcgagcgggacccgggcgtgctagcgaaactatgaatttcctgctgtcatgggtacattggagcctggctttactcctgtaccttcaccacgccaagtggtcccaggctgccccaatggctgaagggggagggcagaaccaccacgaagtcgttaagtttatggacgtgtatcagcggtcatactgtcatcctatagaaacattggtcgacatcttccaggaataccctgatgaaattgagtatatctttaaacctagctgcgttccactgatgaggtgcggtggatgttgtaatgacgagggtttggaatgtgtccctaccgaggaaagcaatataacaatgcagatcatgagaatcaaaccacatcaaggccagcatataggcgaaatgtccttcctccagcacaataaatgcgaatgtagatgcgataagccaagacgatag

SEQ ID NO: 67302 - DNA, 954 bp, Artificial Sequence
  derived and/or modified sequence
ctgacggacagacagacagacaccgcccccagccccagctaccacctcctccccggccggcggcggacagtggacgcggcggcgagccgcgggcaggggccggagcccgcgcccggaggcggggtggagggggtcggggctcgcggcgtcgcactgaaacttttcgtccaacttctgggctgttctcgcttcggaggagccgtggtccgcgcgggggaagccgagccgagcggagccgcgagaagtgctagctcgggccgggaggagccgcagccggaggagggggaggaggaagaagagaaggaagaggagagggggccgcagtggcgactcggcgctcggaagccgggctcatggacgggtgaggcggcggtgtgcgcagacagtgctccagccgcgcgcgctccccaggccctggcccgggcctcgggccggggaggaagagtagctcgccgaggcgccgaggagagcgggccgccccacagcccgagccggagagggagcgcgagccgcgccggccccggtcgggcctccgaaaccatgaactttctgctgtcttgggtgcattggagccttgccttgctgctctacctccaccatgccaagtggtcccaggctgcacccatggcagaaggaggagggcagaatcatcacgaagtggtgaagttcatggatgtctatcagcgcagctactgccatccaatcgagaccctggtggacatcttccaggagtaccctgatgagatcgagtacatcttcaagccatcctgtgtgcccctgatgcgatgcgggggctgctgcaatgacgagggcctggagtgtgtgcccactgaggagtccaacatcaccatgcagattatgcggatcaaacctcaccaaggccagcacataggagagatgagcttcctacagcacaacaaatgtgaatgcagatgtgacaagccgaggcggtga

SEQ ID NO: 67303 - RNA, 954 nt, Artificial Sequence
  derived and/or modified sequence
cugaccgaccgacagacagacacugcaccuagucccagcuaucaucugcucccuggacggagaagaaccgucgacgcugcugccucuagaggacagggccccgaaccagcccccgggggcggcguugagggggugggcgcucgagggguggcccucaaacuguucgugcaauugcugggcuguucacgguuuggaggggccguagugagggcaggggaagcagaaccuagcggcgccgcccguucagcuagcucaggacgugaagaaccgcaaccagaagaaggcgaggaggaggaagaaaaagaagaagagcgcggcccccaguggaggcugggagcgcggaaaccuggauccuggacuggcgaggcugcagucugcgccgacagugcccccgcugccagggcaccucaggcacuggcccgggcaagcgggagagggggccggguugcccgucgcggggccgaagaguccggcccaccucacuccccaucucggcggggaagugcuucacgcgcagggccagguagagcuucagaaaccaugaauuuccuacuuucuuggguucauuggucucucgcacuccugcuuuacuuacaucaugcuaaguggucccaggcugcuccgauggcugagggaggagggcagaaccaccaugaagugguuaaguuuauggauguguaccagcgguccuacugccacccaaucgagacacucguugacauuuuucaggaauauccagaugagauugaguauauuuucaagccuucaugugugccccucaugcgcugcggaggcuguugcaacgacgaaggccucgaaugcgugccuaccgaagagucaaacaucacaaugcagauuaugaggauuaaaccacaccagggccaacacaucggggagaugaguuucuugcagcauaacaagugcgagugcagaugugacaaaccccguagguag

SEQ ID NO: 67304 - RNA, 954 nt, Artificial Sequence
  derived and/or modified sequence
uugacagaccggcagacggauacggcaccuuccccaucuuaucaucuguuaccugggcgaagaaggacuguugacgccgccgcuagccgugggcaagggccagagcccgcacccgggggaggaguugagggcgugggcgcaagaggaguggcgcugaaacucuuuguccaacucuuagggugcaguagguucggcggggccgugguaagagcaggagaagcugaaccauccggggcugcuagaagcgcuucaagcggcagagaggaaccacagcccgaagagggggaggaggaggaggagaaggaggaggaacgcgggccucaauggagacugggggccagaaaaccugguucauggaccggcgaggcugcggucugugcggacagugcaccagccgccagagccccccaagcacuggccagagcuucuggcagggguggaagaguugcaagacgcggagcugaggagaguggaccuccucauucucccucgagacgagguagcgccagucgagcgggacccgggcgugcuagcgaaacuaugaauuuccugcugucauggguacauuggagccuggcuuuacuccuguaccuucaccacgccaaguggucccaggcugccccaauggcugaagggggagggcagaaccaccacgaagucguuaaguuuauggacguguaucagcggucauacugucauccuauagaaacauuggucgacaucuuccaggaauacccugaugaaauugaguauaucuuuaaaccuagcugcguuccacugaugaggugcgguggauguuguaaugacgaggguuuggaaugugucccuaccgaggaaagcaauauaacaaugcagaucaugagaaucaaaccacaucaaggccagcauauaggcgaaauguccuuccuccagcacaauaaaugcgaauguagaugcgauaagccaagacgauag

SEQ ID NO: 67305 - DNA, 696 bp, Artificial Sequence
  derived and/or modified sequence
atgaacttcctgctgagctgggtgcactggagcctggccctgctgctgtacctgcaccacgccaagtggagccaggccgcccccatggccgagggcggcggccagaaccaccacgaggtggtgaagttcatggacgtgtaccagcgcagctactgccaccccatcgagaccctggtggacatcttccaggagtaccccgacgagatcgagtacatcttcaagcccagctgcgtgcccctgatgcgctgcggcggctgctgcaacgacgagggcctggagtgcgtgcccaccgaggagagcaacatcaccatgcagatcatgcgcatcaagccccaccagggccagcacatcggcgagatgagcttcctgcagcacaacaagtgcgagtgccgccccaagaaggaccgcgcccgccaggagaagaagagcgtgcgcggcaagggcaagggccagaagcgcaagcgcaagaagagccgctacaagagctggagcgtgtacgtgggcgcccgctgctgcctgatgccctggagcctgcccggcccccacccctgcggcccctgcagcgagcgccgcaagcacctgttcgtgcaggacccccagacctgcaagtgcagctgcaagaacaccgacagccgctgcaaggcccgccagctggagctgaacgagcgcacctgccgctgcgacaagccccgccgc

SEQ ID NO: 67306 - DNA, 699 bp, Artificial Sequence
  derived and/or modified sequence
atgaacttcctgctgagctgggtgcactggagcctggccctgctgctgtacctgcaccacgccaagtggagccaggccgcccccatggccgagggcggcggccagaaccaccacgaggtggtgaagttcatggacgtgtaccagagaagctactgccaccccatcgagaccctggtggacatcttccaggagtaccccgacgagatcgagtacatcttcaagcccagctgcgtgcccctgatgagatgcggcggctgctgcaacgacgagggcctggagtgcgtgcccaccgaggagagcaacatcaccatgcagatcatgagaatcaagccccaccagggccagcacatcggcgagatgagcttcctgcagcacaacaagtgcgagtgcagacccaagaaggacagagccagacaggagaagaagagcgtgagaggcaagggcaagggccagaagagaaagagaaagaagagcagatacaagagctggagcgtgtacgtgggcgccagatgctgcctgatgccctggagcctgcccggcccccacccctgcggcccctgcagcgagagaagaaagcacctgttcgtgcaggacccccagacctgcaagtgcagctgcaagaacaccgacagcagatgcaaggccagacagctggagctgaacgagagaacctgcagatgcgacaagcccagaagatag

SEQ ID NO: 67307 - DNA, 699 bp, Artificial Sequence
  derived and/or modified sequence
atgaactttctgctaagctgggtccattggagtttagctctgctactgtacctgcaccacgccaaatggagtcaggctgcccccatggcagagggtggaggccagaatcatcacgaggtggttaagttcatggacgtataccaaagatcctattgccacccaatcgagacacttgtggacatttttcaggaataccctgatgagatcgaatatatctttaaaccttcctgcgttcccttgatgcgctgcggcggttgttgcaacgatgagggactggagtgcgtcccaaccgaggaatctaacatcacaatgcaaatcatgagaataaaacctcatcagggtcaacatattggcgagatgagctttctccagcacaacaaatgcgaatgtagacctaagaaggaccgggcccggcaggagaaaaaaagcgtgagaggcaaaggcaaggggcagaagcggaagcggaagaaaagccgatataaatcatggtctgtgtacgttggagctcgttgttgtttgatgccttggagccttcccgggccacacccttgtggtccatgtagtgaacggagaaaacacttgtttgtgcaagatcctcaaacctgcaagtgctcctgcaaaaacacggattcaaggtgcaaggctcgtcagttggaactaaacgaaaggacctgccgttgtgataagccacgccgatag

SEQ ID NO: 67308 - DNA, 699 bp, Artificial Sequence
  derived and/or modified sequence
atgaacttcctgctgtcctgggtgcactggagcctggccctgctgctgtacctgcaccacgccaagtggagccaggccgcccccatggccgagggcggcggccagaaccaccacgaggtggtgaagttcatggatgtgtaccagaggagctactgccaccccatcgagaccctggtggacatcttccaggagtacccagatgaaattgagtacatcttcaagcccagctgtgtgcccctgatgagatgtggcggctgctgcaatgatgagggcctggagtgtgtgcccacagaggagagcaacatcaccatgcagatcatgaggatcaagccccaccagggccagcacatcggggagatgtccttcctgcagcacaacaagtgtgaatgtcggcccaagaaggaccgggcccggcaggagaagaagtctgtgcggggcaagggcaagggccagaagaggaagaggaagaagagccgctacaagtcctggagcgtgtatgtgggcgcccgctgctgcctgatgccctggagcctgcccggcccccacccctgtggcccctgcagcgagaggaggaagcacctgtttgtgcaggacccccagacctgcaagtgcagctgcaagaacacagacagccgctgcaaggcccggcagctggagctgaatgaaagaacctgccgctgtgacaagcccaggaggtag

SEQ ID NO: 67309 - DNA, 699 bp, Artificial Sequence
  derived and/or modified sequence
atgaacttcctgctgagctgggtgcactggagcctggccctgctgctgtacctacaccacgcaaagtggtcccaggctgcacccatggccgagggaggcgggcagaaccatcacgaagtcgtgaaattcatggatgtatatcaaaggtcctactgccaccccatcgaaacgctggttgatatctttcaggaatatccagatgagattgagtatattttcaaaccaagctgcgtacctttgatgaggtgtggcggctgttgtaatgatgaaggactcgaatgcgtgccaacggaagagtcaaacataacgatgcaaatcatgcgcatcaaaccacaccagggccaacatatcggagaaatgtcctttctccagcacaacaagtgtgaatgtcgccccaaaaaggatcgtgcaagacaggaaaaaaagagtgtgaggggaaaggggaagggccagaagcgcaagcgaaagaaaagccggtacaaatcatggtccgtctacgttggtgcaagatgctgcctgatgccttggtctctgcctggtcctcatccttgcgggccgtgttcagagcggcgtaaacatctgttcgtgcaggacccgcaaacttgtaagtgctcttgtaaaaatacagactctcgatgcaaggcccgccaattagagttgaacgagcggacatgtcggtgcgataaaccgcgccggtag

SEQ ID NO: 67310 - DNA, 699 bp, Artificial Sequence
  derived and/or modified sequence
atgaatttcttactgtcctgggtacactggtctcttgcactgctcctatatctgcaccacgctaaatggtcccaggccgcacccatggctgaagggggaggtcagaatcatcacgaggtggtgaaattcatggacgtttatcaacggtcttattgccaccccatcgaaacactggtggatatattccaggagtatccagacgaaatagaatacatttttaagccgagctgcgttccacttatgcgatgcggaggctgctgcaatgacgagggtctggaatgcgtgcctacagaggaaagcaacatcacaatgcagatcatgcgcataaaacctcaccaagggcagcatattggagagatgagtttcctgcagcacaacaagtgcgaatgccgccctaaaaaagaccgcgcacgccaggagaagaagagcgtgaggggaaaggggaagggacagaaaaggaaacggaagaaaagtagatataaatcctggagtgtgtacgtgggcgcacgctgttgtttgatgccttggtctttacccggtccacacccatgcggcccatgcagtgagcggcgtaagcacctgtttgttcaagaccctcagacctgtaaatgtagctgtaagaacacggactcaagatgtaaagccagacagctggagctcaacgagcgaacatgccgttgcgataagcccaggcgctag

SEQ ID NO: 67311 - DNA, 699 bp, Artificial Sequence
  derived and/or modified sequence
atgaatttcctcctgtcctgggtgcactggtccctagcacttctcctttacctacaccacgcaaaatggtcgcaagcggccccaatggccgaaggtggaggacaaaaccaccacgaggtggtgaaattcatggatgtgtatcagcggtcttattgccatcctattgagaccttggtggacatttttcaagaataccccgacgaaatagaatatatttttaagccctcatgcgtgcctcttatgagatgtggcggctgttgtaacgatgaaggcctggagtgcgtgcccactgaggagtccaatattacaatgcagataatgagaatcaaaccccaccagggtcaacatattggcgaaatgtcttttctccaacacaataaatgcgaatgcaggcctaagaaagatagggcgcgccaagaaaaaaagtcagtcagaggaaagggaaaagggcagaagagaaagagaaagaaaagccgttacaaatcttggagtgtctacgtgggggcgcggtgctgccttatgccatggagcctccctggacctcatccctgcggtccctgtagcgaaagacgcaagcacctgtttgttcaggacccccaaacatgtaaatgtagctgtaagaacacagatagtcggtgtaaagcccgacagctggaactgaacgaacgcacgtgtcgctgtgacaagcccagaaggtag

SEQ ID NO: 67312 - DNA, 699 bp, Artificial Sequence
  derived and/or modified sequence
atgaacttcctgttgagttgggtgcattggagcctggctctgcttttgtacctgcatcatgcgaaatggtcacaggcggcgcctatggcagaagggggagggcagaatcaccacgaagtagtcaaatttatggacgtttatcagagatcatactgtcaccctattgagacacttgtggatatctttcaggagtatcccgacgaaatcgagtacatattcaaaccttcttgtgtcccactgatgagatgtggggggtgttgtaacgatgagggcctggagtgcgtgccaaccgaagagtccaatattacaatgcagataatgagaatcaaaccccaccagggtcaacatattggcgaaatgtcttttctccaacacaataaatgcgaatgcaggcctaagaaagatagggcgcgccaagaaaaaaagtcagtcagaggaaagggaaaagggcagaagagaaagagaaagaaaagccgttacaaatcttggagtgtctacgtgggggcgcggtgctgccttatgccatggagcctccctggacctcatccctgcggtccctgtagcgaaagacgcaagcacctgtttgttcaggacccccaaacatgtaaatgtagctgcaaaaacaccgattcacgatgtaaagcgagacaacttgaactgaacgagagaacgtgtagatgtgacaaacctaggagatag

SEQ ID NO: 67313 - RNA, 699 nt, Artificial Sequence
  derived and/or modified sequence
augaauuuccuccuguccugggugcacuggucccuagcacuucuccuuuaccuacaccacgcaaaauggucgcaagcggccccaauggccgaagguggaggacaaaaccaccacgagguggugaaauucauggauguguaucagcggucuuauugccauccuauugagaccuugguggacauuuuucaagaauaccccgacgaaauagaauauauuuuuaagcccucaugcgugccucuuaugagauguggcggcuguuguaacgaugaaggccuggagugcgugcccacugaggaguccaauauuacaaugcagauaaugagaaucaaaccccaccagggucaacauauuggcgaaaugucuuuucuccaacacaauaaaugcgaaugcaggccuaagaaagauagggcgcgccaagaaaaaaagucagucagaggaaagggaaaagggcagaagagaaagagaaagaaaagccguuacaaaucuuggagugucuacgugggggcgcggugcugccuuaugccauggagccucccuggaccucaucccugcggucccuguagcgaaagacgcaagcaccuguuuguucaggacccccaaacauguaaauguagcuguaagaacacagauagucgguguaaagcccgacagcuggaacugaacgaacgcacgugucgcugugacaagcccagaagguag

SEQ ID NO: 67314 - RNA, 699 nt, Artificial Sequence
  derived and/or modified sequence
augaacuuccuguugaguugggugcauuggagccuggcucugcuuuuguaccugcaucaugcgaaauggucacaggcggcgccuauggcagaagggggagggcagaaucaccacgaaguagucaaauuuauggacguuuaucagagaucauacugucacccuauugagacacuuguggauaucuuucaggaguaucccgacgaaaucgaguacauauucaaaccuucuugugucccacugaugagaugugggggguguuguaacgaugagggccuggagugcgugccaaccgaagaguccaauauuacaaugcagauaaugagaaucaaaccccaccagggucaacauauuggcgaaaugucuuuucuccaacacaauaaaugcgaaugcaggccuaagaaagauagggcgcgccaagaaaaaaagucagucagaggaaagggaaaagggcagaagagaaagagaaagaaaagccguuacaaaucuuggagugucuacgugggggcgcggugcugccuuaugccauggagccucccuggaccucaucccugcggucccuguagcgaaagacgcaagcaccuguuuguucaggacccccaaacauguaaauguagcugcaaaaacaccgauucacgauguaaagcgagacaacuugaacugaacgagagaacguguagaugugacaaaccuaggagauag

SEQ ID NO: 67315 - DNA, 645 bp, Artificial Sequence
  derived and/or modified sequence
atgaacttcctgctgagctgggtgcactggagcctggccctgctgctgtacctgcaccacgccaagtggagccaggccgcccccatggccgagggcggcggccagaaccaccacgaggtggtgaagttcatggacgtgtaccagcgcagctactgccaccccatcgagaccctggtggacatcttccaggagtaccccgacgagatcgagtacatcttcaagcccagctgcgtgcccctgatgcgctgcggcggctgctgcaacgacgagggcctggagtgcgtgcccaccgaggagagcaacatcaccatgcagatcatgcgcatcaagccccaccagggccagcacatcggcgagatgagcttcctgcagcacaacaagtgcgagtgccgccccaagaaggaccgcgcccgccaggagaagaagagcgtgcgcggcaagggcaagggccagaagcgcaagcgcaagaagagccgctacaagagctggagcgtgccctgcggcccctgcagcgagcgccgcaagcacctgttcgtgcaggacccccagacctgcaagtgcagctgcaagaacaccgacagccgctgcaaggcccgccagctggagctgaacgagcgcacctgccgctgcgacaagccccgccgc

SEQ ID NO: 67316 - DNA, 648 bp, Artificial Sequence
  derived and/or modified sequence
atgaacttcctgctgagctgggtgcactggagcctggccctgctgctgtacctgcaccacgccaagtggagccaggccgcccccatggccgagggcggcggccagaaccaccacgaggtggtgaagttcatggacgtgtaccagagaagctactgccaccccatcgagaccctggtggacatcttccaggagtaccccgacgagatcgagtacatcttcaagcccagctgcgtgcccctgatgagatgcggcggctgctgcaacgacgagggcctggagtgcgtgcccaccgaggagagcaacatcaccatgcagatcatgagaatcaagccccaccagggccagcacatcggcgagatgagcttcctgcagcacaacaagtgcgagtgcagacccaagaaggacagagccagacaggagaagaagagcgtgagaggcaagggcaagggccagaagagaaagagaaagaagagcagatacaagagctggagcgtgccctgcggcccctgcagcgagagaagaaagcacctgttcgtgcaggacccccagacctgcaagtgcagctgcaagaacaccgacagcagatgcaaggccagacagctggagctgaacgagagaacctgcagatgcgacaagcccagaagatag

SEQ ID NO: 67317 - DNA, 648 bp, Artificial Sequence
  derived and/or modified sequence
atgaactttctgcttagctgggtgcactggtcccttgctcttttgttataccttcaccacgcaaaatggtctcaagccgctcccatggccgaaggcggcggacaaaaccaccatgaggtagtaaaattcatggacgtgtatcagcggagttattgtcatccaatcgaaactctagttgacatatttcaagagtatcctgacgaaattgagtacatctttaaaccttcttgcgtgcccctgatgcggtgcggcggctgttgtaatgacgagggacttgagtgcgtgcccactgaagagtcgaacataacaatgcaaattatgaggatcaagccacaccaaggacaacacattggtgagatgtcgtttcttcagcacaataagtgcgaatgtcgcccaaaaaaggatagggcaaggcaggagaagaagtccgtgcgcggtaaagggaaaggccagaagagaaagagaaagaagagccgctataaatcttggagcgtgccatgtgggccctgttctgagagacgcaaacacttgtttgtacaggaccctcagacctgtaaatgtagctgcaagaacacagactctagatgtaaagcccgacagcttgaattaaatgagcgcacctgccgatgcgacaagcccaggaggtag

SEQ ID NO: 67318 - DNA, 648 bp, Artificial Sequence
  derived and/or modified sequence
atgaacttcctgctgtcctgggtgcactggagcctggccctgctgctgtacctgcaccacgccaagtggagccaggccgcccccatggccgagggcggcggccagaaccaccacgaggtggtgaagttcatggatgtgtaccagaggagctactgccaccccatcgagaccctggtggacatcttccaggagtacccagatgaaattgagtacatcttcaagcccagctgtgtgcccctgatgagatgtggcggctgctgcaatgatgagggcctggagtgtgtgcccacagaggagagcaacatcaccatgcagatcatgaggatcaagccccaccagggccagcacatcggggagatgtccttcctgcagcacaacaagtgtgaatgtcggcccaagaaggaccgggcccggcaggagaagaagtctgtgcggggcaagggcaagggccagaagaggaagaggaagaagagccgctacaagtcctggagcgtgccctgtggcccctgcagcgagaggaggaagcacctgtttgtgcaggacccccagacctgcaagtgcagctgcaagaacacagacagccgctgcaaggcccggcagctggagctgaatgaaagaacctgccgctgtgacaagcccaggaggtag

SEQ ID NO: 67319 - DNA, 648 bp, Artificial Sequence
  derived and/or modified sequence
atgaacttcctgctgagctgggtgcactggagcctggccctgctgctctaccttcaccacgcgaagtggagccaggccgctcctatggcagagggaggcggccaaaatcatcatgaagtggtaaaatttatggatgtgtaccagagaagctactgccacccaatagaaaccctggtggacatttttcaggaatatcctgatgagattgaatatatcttcaagccaagctgcgtccctctgatgaggtgtggcggctgctgtaatgacgagggcttggagtgtgtgccaacagaagaatccaacatcacaatgcagatcatgagaataaagccacaccaaggccagcacattggcgagatgtctttcctgcaacacaataaatgtgaatgtcggcctaagaaggatcgcgctaggcaggaaaagaagagcgtgagaggcaagggaaagggtcaaaagagaaaaaggaaaaagagcagatataaatcctggagcgtgccttgcggcccctgttctgaacgacggaagcacctctttgtgcaggatcctcaaacttgcaaatgctcgtgcaagaatacagacagtcggtgtaaggcccgacagctagagctgaatgaaaggacctgtcgatgtgataagccccggcgctag

SEQ ID NO: 67320 - DNA, 648 bp, Artificial Sequence
  derived and/or modified sequence
atgaactttctgttatcctgggtgcactggagcctcgcactgctcttatatctgcaccacgcaaaatggtctcaggccgctcctatggcggaagggggaggccaaaaccatcatgaagtcgtgaagttcatggatgtgtatcagcgcagctactgccacccaatcgagaccttggtagatatctttcaggagtatcctgacgaaattgagtacatattcaagcccagttgtgtgcctctgatgcgatgtggaggctgctgcaacgatgaaggactcgaatgtgtacctactgaagagtccaacatcacaatgcagatcatgaggattaaacctcaccagggacaacacattggtgagatgtcatttttgcagcataacaagtgtgaatgccgtccaaagaaggatagagccaggcaggaaaaaaagtctgtgagaggcaaaggaaaggggcagaaacgcaaacgcaaaaaaagccggtataaaagctggtccgttccctgtgggccttgctccgaacggaggaaacatctgttcgttcaggaccctcaaacctgtaaatgctcatgcaagaataccgacagtaggtgcaaggcaagacaactcgagttgaacgagagaacgtgtcgatgcgataagcccagacgttag

SEQ ID NO: 67321 - DNA, 648 bp, Artificial Sequence
  derived and/or modified sequence
atgaattttctgttatcttgggtgcactggtcgctggcactcctgctctacttacatcatgccaagtggagtcaggctgcaccgatggccgagggaggcggccaaaaccatcacgaagtggtgaagtttatggacgtgtatcagaggagctactgccaccctatagaaaccctcgtcgacatattccaggaatatcctgacgaaatcgagtacatcttcaaaccatcctgcgtgcccctgatgagatgcgggggctgttgcaatgacgagggcctcgaatgcgttcctacagaagagagtaatatcaccatgcaaattatgagaatcaaaccacaccaaggtcagcacattggcgagatgtccttcttacaacacaataagtgcgaatgtcgccccaaaaaagatcgagctaggcaggagaagaagagtgtcagaggtaaaggaaagggtcagaaaagaaaaagaaagaagtctcgatataaaagttggtcagtaccctgtggcccatgttcggagaggagaaagcacctgttcgtccaggatccacagacatgtaagtgtagctgcaagaatacagactccagatgcaaagcccggcagttggagctaaacgaacgcacgtgccggtgtgacaagcctcgcaggtag

SEQ ID NO: 67322 - DNA, 648 bp, Artificial Sequence
  derived and/or modified sequence
atgaacttcctgcttagctgggttcactggtcccttgccttattgctttatctgcaccatgctaagtggtcacaggctgcacccatggctgagggaggcgggcagaatcaccatgaggtggtgaaatttatggacgtgtatcagcgatcctattgccaccctatcgaaacactggtcgatatcttccaagagtaccccgatgaaatcgaatatatttttaaaccatcttgcgtcccgttaatgcggtgcgggggctgctgcaacgacgagggtctggaatgtgttcctacagaagagagtaatatcaccatgcaaattatgagaatcaaaccacaccaaggtcagcacattggcgagatgtccttcttacaacacaataagtgcgaatgtcgccccaaaaaagatcgagctaggcaggagaagaagagtgtcagaggtaaaggaaagggtcagaaaagaaaaagaaagaagtctcgatataaaagttggtcagtaccctgtggcccatgttcggagaggagaaagcacctgttcgtccaggatccacagacatgtaagtgtagctgcaagaatacagactccagatgcaaagcccggcagctggaactcaatgagcgaacatgtaggtgcgacaaaccgcgtagatag

SEQ ID NO: 67323 - RNA, 648 nt, Artificial Sequence
  derived and/or modified sequence
augaauuuucuguuaucuugggugcacuggucgcuggcacuccugcucuacuuacaucaugccaaguggagucaggcugcaccgauggccgagggaggcggccaaaaccaucacgaaguggugaaguuuauggacguguaucagaggagcuacugccacccuauagaaacccucgucgacauauuccaggaauauccugacgaaaucgaguacaucuucaaaccauccugcgugccccugaugagaugcgggggcuguugcaaugacgagggccucgaaugcguuccuacagaagagaguaauaucaccaugcaaauuaugagaaucaaaccacaccaaggucagcacauuggcgagauguccuucuuacaacacaauaagugcgaaugucgccccaaaaaagaucgagcuaggcaggagaagaagagugucagagguaaaggaaagggucagaaaagaaaaagaaagaagucucgauauaaaaguuggucaguacccuguggcccauguucggagaggagaaagcaccuguucguccaggauccacagacauguaaguguagcugcaagaauacagacuccagaugcaaagcccggcaguuggagcuaaacgaacgcacgugccggugugacaagccucgcagguag

SEQ ID NO: 67324 - RNA, 648 nt, Artificial Sequence
  derived and/or modified sequence
augaacuuccugcuuagcuggguucacuggucccuugccuuauugcuuuaucugcaccaugcuaaguggucacaggcugcacccauggcugagggaggcgggcagaaucaccaugagguggugaaauuuauggacguguaucagcgauccuauugccacccuaucgaaacacuggucgauaucuuccaagaguaccccgaugaaaucgaauauauuuuuaaaccaucuugcgucccguuaaugcggugcgggggcugcugcaacgacgagggucuggaauguguuccuacagaagagaguaauaucaccaugcaaauuaugagaaucaaaccacaccaaggucagcacauuggcgagauguccuucuuacaacacaauaagugcgaaugucgccccaaaaaagaucgagcuaggcaggagaagaagagugucagagguaaaggaaagggucagaaaagaaaaagaaagaagucucgauauaaaaguuggucaguacccuguggcccauguucggagaggagaaagcaccuguucguccaggauccacagacauguaaguguagcugcaagaauacagacuccagaugcaaagcccggcagcuggaacucaaugagcgaacauguaggugcgacaaaccgcguagauag

SEQ ID NO: 67325 - DNA, 627 bp, Artificial Sequence
  derived and/or modified sequence
atgaacttcctgctgagctgggtgcactggagcctggccctgctgctgtacctgcaccacgccaagtggagccaggccgcccccatggccgagggcggcggccagaaccaccacgaggtggtgaagttcatggacgtgtaccagcgcagctactgccaccccatcgagaccctggtggacatcttccaggagtaccccgacgagatcgagtacatcttcaagcccagctgcgtgcccctgatgcgctgcggcggctgctgcaacgacgagggcctggagtgcgtgcccaccgaggagagcaacatcaccatgcagatcatgcgcatcaagccccaccagggccagcacatcggcgagatgagcttcctgcagcacaacaagtgcgagtgccgccccaagaaggaccgcgcccgccaggagaagaagagcgtgcgcggcaagggcaagggccagaagcgcaagcgcaagaagagccgcccctgcggcccctgcagcgagcgccgcaagcacctgttcgtgcaggacccccagacctgcaagtgcagctgcaagaacaccgacagccgctgcaaggcccgccagctggagctgaacgagcgcacctgccgctgcgacaagccccgccgc

SEQ ID NO: 67326 - DNA, 630 bp, Artificial Sequence
  derived and/or modified sequence
atgaacttcctgctgagctgggtgcactggagcctggccctgctgctgtacctgcaccacgccaagtggagccaggccgcccccatggccgagggcggcggccagaaccaccacgaggtggtgaagttcatggacgtgtaccagagaagctactgccaccccatcgagaccctggtggacatcttccaggagtaccccgacgagatcgagtacatcttcaagcccagctgcgtgcccctgatgagatgcggcggctgctgcaacgacgagggcctggagtgcgtgcccaccgaggagagcaacatcaccatgcagatcatgagaatcaagccccaccagggccagcacatcggcgagatgagcttcctgcagcacaacaagtgcgagtgcagacccaagaaggacagagccagacaggagaagaagagcgtgagaggcaagggcaagggccagaagagaaagagaaagaagagcagaccctgcggcccctgcagcgagagaagaaagcacctgttcgtgcaggacccccagacctgcaagtgcagctgcaagaacaccgacagcagatgcaaggccagacagctggagctgaacgagagaacctgcagatgcgacaagcccagaagatag

SEQ ID NO: 67327 - DNA, 630 bp, Artificial Sequence
  derived and/or modified sequence
atgaatttcctgttgagttgggtccactggtcactggctcttttgctttatctgcaccatgccaaatggagccaagccgcccctatggctgagggcggcggtcagaatcaccacgaggtagtcaaatttatggatgtctatcagcggtcctattgtcaccctattgagacgttagtggacatttttcaagagtatccagatgagattgagtacatcttcaagccatcgtgtgtgcctctgatgcgttgtggagggtgttgcaacgatgaaggtctggaatgcgtaccgactgaagaatcaaatattacgatgcagataatgagaattaagcctcatcagggccagcacatcggtgagatgtcgttcttgcagcacaataagtgcgagtgtaggcctaaaaaagatcgagccaggcaggagaaaaaatccgtgaggggcaaagggaagggtcagaaacgaaagcgcaagaagagcagaccttgcggcccgtgctccgagagaaggaagcacctttttgtacaagaccctcagacctgtaagtgtagctgcaaaaacacagattcacggtgcaaggcacgtcaacttgagctcaacgaaaggacatgtagatgcgataagcctagacgatag

SEQ ID NO: 67328 - DNA, 630 bp, Artificial Sequence
  derived and/or modified sequence
atgaacttcctgctgtcctgggtgcactggagcctggccctgctgctgtacctgcaccacgccaagtggagccaggccgcccccatggccgagggcggcggccagaaccaccacgaggtggtgaagttcatggatgtgtaccagaggagctactgccaccccatcgagaccctggtggacatcttccaggagtacccagatgaaattgagtacatcttcaagcccagctgtgtgcccctgatgagatgtggcggctgctgcaatgatgagggcctggagtgtgtgcccacagaggagagcaacatcaccatgcagatcatgaggatcaagccccaccagggccagcacatcggggagatgtccttcctgcagcacaacaagtgtgaatgtcggcccaagaaggaccgggcccggcaggagaagaagtctgtgcggggcaagggcaagggccagaagaggaagaggaagaagagccggccctgtggcccctgcagcgagaggaggaagcacctgtttgtgcaggacccccagacctgcaagtgcagctgcaagaacacagacagccgctgcaaggcccggcagctggagctgaatgaaagaacctgccgctgtgacaagcccaggaggtag

SEQ ID NO: 67329 - DNA, 630 bp, Artificial Sequence
  derived and/or modified sequence
atgaacttcctgctgagctgggtgcactggagcctggccctgctgctgtatctccatcatgccaaatggagtcaggcagcccctatggcagaggggggcggccagaaccaccatgaggttgtcaagttcatggatgtgtaccagcgctcttattgccatcctattgagactctcgtcgatattttccaggagtacccagatgagattgaatacatttttaaacccagttgtgtccctttgatgcgctgcggagggtgttgcaatgacgagggtcttgaatgcgtgcccactgaggaatctaacatcacaatgcaaataatgcgaattaagcctcatcagggacagcatataggcgagatgagcttcctccaacacaacaaatgcgaatgccggccaaagaaagaccgggcccgacaggaaaagaagtctgtgcggggaaagggcaaagggcagaagagaaaacggaaaaaatcgaggccttgcggcccctgttcggagcgccggaagcacctctttgtccaggacccacagacatgtaagtgctcatgcaaaaacaccgactcaaggtgcaaggcccggcaattggaactgaacgaaaggacctgccggtgtgacaagcctcgccggtag

SEQ ID NO: 67330 - DNA, 630 bp, Artificial Sequence
  derived and/or modified sequence
atgaatttcctcttgagttgggttcactggtccctcgccctgctgctctacctgcatcatgcgaagtggagccaggccgcacccatggcggaaggtggaggtcaaaatcatcatgaagttgtgaagttcatggacgtttaccagcggtcatattgccacccgatcgagactttagtcgacatcttccaggaataccctgacgagatagagtacattttcaagccgagttgtgtgcctttgatgaggtgcggaggctgctgcaacgatgaggggttagagtgcgtgcctactgaggagagcaatattacaatgcaaatcatgcgcattaaacctcatcagggccagcacattggcgagatgtccttcctgcagcataacaagtgtgaatgtaggccaaagaaagatcgggcaagacaggagaagaagtccgttcgtggtaaagggaagggccagaagaggaagcgcaaaaagtcccgtccatgtggcccttgctctgagagacgcaaacatctgttcgttcaggacccccagacctgtaagtgctcgtgtaagaatacagattcaagatgtaaggctagacagttagaactcaacgaacgcacctgtagatgcgacaaacccagacggtag

SEQ ID NO: 67331 - DNA, 630 bp, Artificial Sequence
  derived and/or modified sequence
atgaactttctgctgtcatgggtgcattggtctctcgccctgctgttgtacctacatcatgccaagtggtcccaagcagcgcctatggctgagggcggcggtcaaaaccaccacgaagtggtgaagtttatggacgtataccaacggagctattgtcacccgattgaaaccctggtggatatttttcaggagtaccccgacgagattgagtacatttttaaaccatcctgcgtaccgctgatgaggtgcggcggctgttgcaatgacgaaggactggagtgcgttcctacagaagaaagtaacatcacgatgcagatcatgaggatcaagcctcatcaaggccaacacattggtgaaatgtccttcctgcaacataataagtgtgagtgtcgacccaagaaggatagggctcgacaggagaaaaagtccgtacgaggaaaaggcaagggacagaagcgcaaacgtaaaaagagtagaccctgtggtccctgttcagagaggagaaagcatctgttcgttcaggatcctcagacatgcaaatgcagctgtaaaaacactgatagccgctgtaaggcgcgacaactagagctaaacgaacgcacctgccggtgtgataagccacggagatag

SEQ ID NO: 67332 - DNA, 630 bp, Artificial Sequence
  derived and/or modified sequence
atgaactttctgctgagctgggtgcactggtcactcgcccttctgctgtatttacatcatgccaaatggtcccaggctgccccaatggccgaaggtggcgggcagaatcaccatgaagtagttaagtttatggacgtttaccagcgcagctattgccaccctattgaaactctggtcgatatcttccaggagtatccagatgagatcgaatacatcttcaagccttcctgcgtcccactcatgagatgcggcggctgttgcaatgacgagggcctggagtgcgtacctactgaagagtcgaacataacgatgcaaattatgagaataaaaccccaccagggccaacatatcggcgagatgagttttctgcagcacaataaatgcgagtgccgacctaagaaggaccgcgctaggcaggaaaaaaaatctgtcagaggcaaaggtaaaggacaaaaacgcaagagaaagaagagcagaccgtgcgggccgtgtagcgaaaggcgaaaacatttgtttgttcaggatccccagacctgtaagtgttcttgcaaaaacacagattcacgatgtaaggctcgccagctggaactgaatgagagaacgtgccgttgtgacaagccaagaagatag

SEQ ID NO: 67333 - DNA, 630 bp, Artificial Sequence
  derived and/or modified sequence
atgaactttctgctgtcttgggtgcattggagccttgccttgctgctctacctccaccatgccaagtggtcccaggctgcacccatggcagaaggaggagggcagaatcatcacgaagtggtgaagttcatggatgtctatcagcgcagctactgccatccaatcgagaccctggtggacatcttccaggagtaccctgatgagatcgagtacatcttcaagccatcctgtgtgcccctgatgcgatgcgggggctgctgcaatgacgagggcctggagtgtgtgcccactgaggagtccaacatcaccatgcagattatgcggatcaaacctcaccaaggccagcacataggagagatgagcttcctacagcacaacaaatgtgaatgcagaccaaagaaagatagagcaagacaagaaaaaaaatcagttcgaggaaagggaaaggggcaaaaacgaaagcgcaagaaatcccgtccctgtgggccttgctcagagcggagaaagcatttgtttgtacaagatccgcagacgtgtaaatgttcctgcaaaaacacagactcgcgttgcaaggcgaggcagcttgagttaaacgaacgtacttgcagatgtgacaagccgaggcggtga

SEQ ID NO: 67334 - RNA, 630 nt, Artificial Sequence
  derived and/or modified sequence
augaacuuucugcugucaugggugcauuggucucucgcccugcuguuguaccuacaucaugccaaguggucccaagcagcgccuauggcugagggcggcggucaaaaccaccacgaaguggugaaguuuauggacguauaccaacggagcuauugucacccgauugaaacccugguggauauuuuucaggaguaccccgacgagauugaguacauuuuuaaaccauccugcguaccgcugaugaggugcggcggcuguugcaaugacgaaggacuggagugcguuccuacagaagaaaguaacaucacgaugcagaucaugaggaucaagccucaucaaggccaacacauuggugaaauguccuuccugcaacauaauaagugugagugucgacccaagaaggauagggcucgacaggagaaaaaguccguacgaggaaaaggcaagggacagaagcgcaaacguaaaaagaguagacccuguggucccuguucagagaggagaaagcaucuguucguucaggauccucagacaugcaaaugcagcuguaaaaacacugauagccgcuguaaggcgcgacaacuagagcuaaacgaacgcaccugccggugugauaagccacggagauag

SEQ ID NO: 67335 - RNA, 630 nt, Artificial Sequence
  derived and/or modified sequence
augaacuuucugcugagcugggugcacuggucacucgcccuucugcuguauuuacaucaugccaaauggucccaggcugccccaauggccgaagguggcgggcagaaucaccaugaaguaguuaaguuuauggacguuuaccagcgcagcuauugccacccuauugaaacucuggucgauaucuuccaggaguauccagaugagaucgaauacaucuucaagccuuccugcgucccacucaugagaugcggcggcuguugcaaugacgagggccuggagugcguaccuacugaagagucgaacauaacgaugcaaauuaugagaauaaaaccccaccagggccaacauaucggcgagaugaguuuucugcagcacaauaaaugcgagugccgaccuaagaaggaccgcgcuaggcaggaaaaaaaaucugucagaggcaaagguaaaggacaaaaacgcaagagaaagaagagcagaccgugcgggccguguagcgaaaggcgaaaacauuuguuuguucaggauccccagaccuguaaguguucuugcaaaaacacagauucacgauguaaggcucgccagcuggaacugaaugagagaacgugccguugugacaagccaagaagauag

SEQ ID NO: 67336 - DNA, 716 bp, Artificial Sequence
  derived and/or modified sequence
gggaaataagagagaaaagaagagtaagaagaaatataagagccaccatgaactttctcttgtcatgggtgcactggagccttgcgctgctgctgtatcttcatcacgctaagtggagccaggccgcacccatggcggagggtggcggacagaatcaccacgaagtagtcaaattcatggacgtgtaccagaggtcgtattgccatccgattgaaactcttgtggatatctttcaagaataccccgatgaaatcgagtacattttcaaaccgtcgtgtgtccctctcatgaggtgcgggggatgctgcaatgatgaagggttggagtgtgtccccacggaggagtcgaatatcacaatgcaaatcatgcgcatcaaaccacatcagggtcagcatattggagagatgtcctttctccagcacaacaaatgtgagtgtagaccgaagaaggaccgagcccgacaggaaaacccatgcggaccgtgctccgagcggcgcaaacacttgttcgtacaagacccccagacatgcaagtgctcatgtaagaataccgattcgcggtgtaaggcgagacagctggaattgaacgagcgcacgtgtaggtgcgacaagcctagacggtgagctgccttctgcggggcttgccttctggccatgcccttcttctctcccttgcacctgtacctcttggtctttgaataaagcctgagtaggaag

SEQ ID NO: 67337 - DNA, 758 bp, Artificial Sequence
  derived and/or modified sequence
taatacgactcactatagggaaataagagagaaaagaagagtaagaagaaatataagagccaccatgaactttctcttgtcatgggtgcactggagccttgcgctgctgctgtatcttcatcacgctaagtggagccaggccgcacccatggcggagggtggcggacagaatcaccacgaagtagtcaaattcatggacgtgtaccagaggtcgtattgccatccgattgaaactcttgtggatatctttcaagaataccccgatgaaatcgagtacattttcaaaccgtcgtgtgtccctctcatgaggtgcgggggatgctgcaatgatgaagggttggagtgtgtccccacggaggagtcgaatatcacaatgcaaatcatgcgcatcaaaccacatcagggtcagcatattggagagatgtcctttctccagcacaacaaatgtgagtgtagaccgaagaaggaccgagcccgacaggaaaacccatgcggaccgtgctccgagcggcgcaaacacttgttcgtacaagacccccagacatgcaagtgctcatgtaagaataccgattcgcggtgtaaggcgagacagctggaattgaacgagcgcacgtgtaggtgcgacaagcctagacggtgagctgccttctgcggggcttgccttctggccatgcccttcttctctcccttgcacctgtacctcttggtctttgaataaagcctgagtaggaaggcggccgctcgagcatgcatctaga

SEQ ID NO: 67338 - DNA, 573 bp, Artificial Sequence
  derived and/or modified sequence
atgaacttcctgctgagctgggtgcactggagcctggccctgctgctgtacctgcaccacgccaagtggagccaggccgcccccatggccgagggcggcggccagaaccaccacgaggtggtgaagttcatggacgtgtaccagcgcagctactgccaccccatcgagaccctggtggacatcttccaggagtaccccgacgagatcgagtacatcttcaagcccagctgcgtgcccctgatgcgctgcggcggctgctgcaacgacgagggcctggagtgcgtgcccaccgaggagagcaacatcaccatgcagatcatgcgcatcaagccccaccagggccagcacatcggcgagatgagcttcctgcagcacaacaagtgcgagtgccgccccaagaaggaccgcgcccgccaggagaacccctgcggcccctgcagcgagcgccgcaagcacctgttcgtgcaggacccccagacctgcaagtgcagctgcaagaacaccgacagccgctgcaaggcccgccagctggagctgaacgagcgcacctgccgctgcgacaagccccgccgc

SEQ ID NO: 67339 - DNA, 573 bp, Artificial Sequence
  derived and/or modified sequence
atgaatttcctgttgtcttgggttcattggagtctggctttacttctatatctgcatcacgccaagtggagccaggccgctccgatggccgagggcggagggcagaaccatcatgaggtagtgaaattcatggacgtgtatcaaaggtcttactgtcatccaatcgagactctggtggacatatttcaggagtacccagacgagatcgaatatattttcaagccaagctgcgttccactaatgagatgcgggggctgctgtaacgatgaaggactggagtgtgtgccgacggaggaaagtaacatcacaatgcagattatgaggatcaagccacaccagggccagcacatcggagagatgagctttctccagcataacaaatgtgaatgtagaccaaaaaaggaccgtgcccgccaggagaatccatgcgggccgtgttccgagcggcggaagcatctattcgtccaggacccacagacgtgcaaatgcagttgcaaaaacaccgactctcgttgtaaggccagacagttggagcttaacgagagaacttgtagatgcgataagccgcgcaga

SEQ ID NO: 67340 - DNA, 573 bp, Artificial Sequence
  derived and/or modified sequence
atgaacttccttctgtcctgggtccattggagcctcgctctcctgctgtacctccaccacgcaaagtggtcccaagccgcgcccatggcagaagggggaggacagaaccatcacgaggtcgtgaaattcatggatgtgtaccagcggtcctattgccaccccatcgagaccctggtggacatcttccaggagtaccctgatgaaatagagtacatcttcaaaccttcctgcgttcctctgatgagatgtggtggctgttgtaatgacgagggactcgagtgtgtgcccacggaagagtccaacatcactatgcagatcatgcgcatcaaaccccaccaagggcaacacatcggggagatgtcattcctccaacacaataagtgcgagtgccgcccaaagaaggatagggcgagacaagagaatccttgtggaccctgcagtgaaagaagaaaacacctcttcgtccaagacccgcagacctgcaagtgctcatgcaaaaataccgactcccggtgtaaggctcggcagctggagcttaacgaacgaacctgtcgttgcgacaaaccgcggcga

SEQ ID NO: 67341 - DNA, 573 bp, Artificial Sequence
  derived and/or modified sequence
atgaactttcttttgtcttgggtccattggtcgttggctctgttgctctatctccaccacgccaagtggagccaggctgctcctatggccgagggtggaggacaaaatcatcacgaggtcgtcaagttcatggatgtctaccagaggtcctattgccaccccatcgagaccctggtcgatatttttcaggagtatccggatgagatcgagtacattttcaaaccttcttgcgtcccccttatgcgttgtggcgggtgttgcaatgacgaggggctcgaatgcgtccctaccgaagagtctaacatcaccatgcaaatcatgcgtatcaaaccccaccagggtcagcacatcggtgaaatgtcctttctccagcataacaaatgcgaatgccgaccaaaaaaagaccgtgctcgtcaggagaacccatgcgggccttgctccgagcgtcggaagcatttgttcgtccaggacccacagacctgtaagtgctcttgtaagaataccgattcccgctgcaaagccagacagctggaattgaatgagcgcacctgccgctgtgataagcctcgtcgc

SEQ ID NO: 67342 - DNA, 573 bp, Artificial Sequence
  derived and/or modified sequence
atgaactttctcctgtcttgggtgcactggagcctcgccctactgctgtacttgcaccatgcaaaatggagccaagctgctccaatggccgaaggagggggccagaaccaccatgaagttgtaaaattcatggacgtgtaccagcgctcctactgtcacccaatcgagacactggtggatatcttccaggaataccccgacgagatcgaatatatctttaagccttcctgtgtgcccttgatgagatgcggcgggtgttgcaacgatgagggcttagagtgcgttccaaccgaggagagcaacataaccatgcagataatgcgaataaagccccaccagggccagcatatcggggaaatgagcttcctgcaacacaacaagtgtgagtgtcgcccaaagaaagacagagcacggcaagaaaatccttgcggcccctgctctgaacgtagaaagcacctgttcgtgcaggatccacaaacctgtaagtgcagctgtaagaacaccgattcccgatgtaaggcccgccagctggaactgaatgagcggacctgtcgatgcgacaaacctagacgt

SEQ ID NO: 67343 - DNA, 573 bp, Artificial Sequence
  derived and/or modified sequence
atgaatttcctgctttcttgggttcactggtcacttgcattgcttttatatctccatcatgcaaagtggtcccaagctgcaccaatggccgaaggaggggggcaaaatcaccacgaagtcgttaaattcatggacgtctatcaaagatcttattgtcacccaattgagactttggttgatatatttcaggagtatccagatgaaatcgagtacatcttcaagccttcgtgcgtaccgcttatgagatgtggaggatgctgcaatgatgaaggattggaatgcgtcccgactgaagaatccaatattactatgcaaataatgcgaatcaaaccacatcagggccagcacattggcgagatgagtttcttgcaacataataagtgcgaatgtagacctaaaaaagaccgcgcacggcaagaaaatccatgtggtccatgtagcgagcgacgaaagcacctctttgtgcaagatccacaaacttgtaaatgctcatgcaaaaataccgatagccgatgtaaagctcgacagttggaacttaacgaacgaacatgtagatgtgacaagccacgacgg

SEQ ID NO: 67344 - DNA, 573 bp, Artificial Sequence
  derived and/or modified sequence
atgaacttcctgctctcatgggtccattggagcctggctcttcttctctacctgcatcacgccaaatggtcgcaggctgcgccaatggcagagggaggcggacagaaccaccatgaggtggtgaagtttatggacgtgtaccagcggagctactgccacccgatcgaaaccctcgtggacatcttccaggagtacccggacgaaatcgaatacattttcaagccatcgtgtgtgccgctgatgcgctgtggaggatgctgcaatgatgaaggtttggaatgtgtcccgactgaggaatcgaacatcactatgcagatcatgagaatcaaaccccaccaaggacaacacatcggtgagatgtcgtttctgcaacacaacaaatgcgaatgcagaccaaagaaggaccgggctagacaagaaaacccgtgtggaccatgctcagagaggaggaagcatctctttgtgcaggatccgcagacttgtaagtgttcgtgtaagaacaccgactcccgctgcaaagccagacagctcgaactgaacgagagaacttgtcgctgcgataaacccagacgg

SEQ ID NO: 67345 - DNA, 573 bp, Artificial Sequence
  derived and/or modified sequence
atgaattttttattatcgtgggttcattggtcgttagcgttactattatatctacatcatgcgaaatggtcgcaagcggcgccgatggcggaaggtggtggtcaaaatcatcatgaagtagtaaaatttatggatgtatatcaacgttcgtattgtcatccgatagaaacgttagttgatatatttcaagaatatccggatgaaatagaatatatatttaaaccgtcgtgtgtaccgctaatgcgttgtggtggttgttgtaatgatgaaggtctagaatgtgttccgacggaagaatcgaatataacgatgcaaataatgcgaataaaaccgcatcaaggtcaacatataggtgaaatgtcgtttctacaacataataaatgtgaatgtcgtccgaaaaaagatcgtgcgcgtcaagaaaatccgtgtggtccgtgttcggaacgacgtaaacatttatttgtacaagatccgcaaacgtgtaaatgttcgtgtaaaaatacggattcgcgatgtaaagcgcgacaattagaattaaatgaacgtacgtgtcgatgtgataaaccgcgacga

SEQ ID NO: 67346 - DNA, 573 bp, Artificial Sequence
  derived and/or modified sequence
atgaacttcctgctctcgtgggtgcattggtcactggcactcttgctctacctgcatcacgctaagtggtcgcaggccgcccccatggccgaaggcggaggacagaatcatcacgaggtcgtcaagttcatggacgtgtaccagcggtcctactgtcaccctattgaaacccttgtcgatatcttccaggagtaccctgatgaaatcgagtacattttcaagccatcgtgcgtgccgttgatgcggtgcggtggatgctgcaatgacgagggactcgagtgcgtcccaactgaagaaagcaacatcaccatgcaaatcatgcggatcaagccacaccagggccaacacatcggtgaaatgtccttcctccaacacaataagtgcgaatgtagaccgaaaaaggaccgcgcacgtcaagagaacccttgcggtccgtgcagcgaaagacgaaagcatctgttcgtccaagacccgcagacctgtaagtgctcctgcaagaacactgactcaagatgcaaggcccggcagctcgaactgaacgaacgcacttgcaggtgtgataagcctagacgg

SEQ ID NO: 67347 - DNA, 573 bp, Artificial Sequence
  derived and/or modified sequence
atgaacttcctgctgtcctgggtgcattggtcactggccttgttgctttacctccaccatgccaaatggtcccaggcggccccaatggcggagggaggaggtcaaaaccatcatgaagtcgtgaagtttatggacgtttaccagcggtcctactgtcaccctatcgaaactctcgtggacatctttcaggagtacccggacgaaatcgagtatatctttaaaccgtcgtgcgtgccgctgatgcggtgcggaggatgctgcaacgatgaaggcctggagtgcgtcccgaccgaggaatcaaacatcacgatgcagatcatgcgcattaaaccgcaccagggacagcacatcggcgaaatgtcatttctgcaacataacaaatgtgaatgccggccgaagaaggaccgcgcccggcaggaaaatccgtgtgggccctgttcggagcgccgcaaacatcttttcgtgcaagatccgcagacctgcaagtgttcatgcaagaacactgattcaagatgtaaggcacgccagctggaacttaacgaacgcacctgccgctgcgacaagccgaggaga

SEQ ID NO: 67348 - DNA, 573 bp, Artificial Sequence
  derived and/or modified sequence
atgaatttccttctgagctgggtacactggtcactcgcacttctgctctatctgcaccacgccaaatggtcacaagccgcaccaatggccgagggcggtggtcaaaatcatcacgaggtggtgaagtttatggatgtgtaccagagaagctattgtcacccaattgaaactttggtggatatctttcaagagtaccccgacgaaatagagtacatcttcaaaccatcctgcgtgccacttatgcgctgcggcggttgttgcaacgacgagggtctggagtgcgtccccactgaagaatcaaacatcacaatgcagattatgcgtatcaaaccacaccagggtcaacacatcggcgagatgagctttcttcagcacaataagtgtgagtgcaggcctaagaaagaccgcgcccgccaggagaatccctgcggtccttgtagtgagaggcgcaagcatctgtttgttcaggacccccaaacttgtaagtgttcctgtaaaaacacagattctcgttgcaaggctcgccagctggagcttaacgaacgtacctgccgttgcgacaagccaaggcgc

SEQ ID NO: 67349 - DNA, 573 bp, Artificial Sequence
  derived and/or modified sequence
atgaacttcctcttgtcgtgggtgcactggtcactggccctgctcctctatctgcatcacgccaagtggagccaagctgcgccgatggccgaaggaggaggacaaaatcaccatgaggtcgtgaagttcatggacgtgtaccagcgctcatactgtcacccgattgaaaccctcgtggacattttccaggaatacccagacgaaatcgaatacatcttcaagcctagttgcgtgccgttgatgcgctgtgggggctgctgtaacgacgagggactggaatgcgtgcctaccgaagagagcaatatcactatgcaaatcatgagaatcaagccccaccagggccaacatattggagaaatgtctttcctgcaacacaacaaatgcgaatgcagaccaaagaaagatcgcgctagacaagaaaatccatgcggcccttgctccgagagaaggaaacatcttttcgtccaggacccgcaaacctgcaagtgttcgtgtaagaacactgactcaagatgcaaggcaagacagctcgaactgaacgagagaacctgccggtgcgacaagccgcgccgc

SEQ ID NO: 67350 - DNA, 573 bp, Artificial Sequence
  derived and/or modified sequence
atgaactttctgctttcttgggtgcattggtcgctggccctgttgctctacctgcatcacgccaaatggtcccaggccgcaccaatggcggagggaggaggccagaaccatcatgaggtggtcaagttcatggacgtgtaccaaaggagctactgccaccctatcgaaacgctcgtcgatatcttccaagaatatccggacgaaatcgaatacattttcaaaccgtcatgcgtgccgctgatgcggtgcggtggatgctgcaatgacgaggggttggagtgcgtgcctactgaagaatccaacatcaccatgcagattatgcgcattaagccacaccaaggacaacacatcggagagatgtcgttcctccagcacaacaaatgcgagtgccgaccgaagaaggacagagctcggcaagaaaatccctgtggcccgtgctccgaacggcgcaagcacttgttcgtgcaggatcctcagacttgcaaatgctcatgcaagaatacggatagccgttgtaaagcacggcaactggaattgaacgagcgcacctgtcgttgtgacaagcccagacgc

SEQ ID NO: 67351 - DNA, 573 bp, Artificial Sequence
  derived and/or modified sequence
atgaatttcctgctcagttgggtgcactggagcctagccttgttgctgtatttgcaccacgccaaatggtctcaggcggcacccatggctgaagggggtggacagaatcaccatgaagtggtgaaattcatggacgtgtaccaacgatcttattgccacccgattgagacactggtagatattttccaggagtaccccgatgagattgagtacatcttcaaaccttcctgtgtacctctgatgcgctgtggggggtgctgtaatgacgagggactcgagtgtgtaccaacagaggagagcaatatcaccatgcagatcatgcggataaagcctcatcagggccagcatatcggcgaaatgagtttccttcaacacaataagtgtgagtgccgaccgaaaaaggatcgcgcccgccaggaaaatccgtgcggtccttgtagtgaacggcgcaaacatctcttcgtgcaggatccccagacatgcaaatgcagctgcaagaatacggactctcggtgtaaggcccgccagctggagctgaacgagaggacatgcagatgtgacaaacctagacga

SEQ ID NO: 67352 - DNA, 573 bp, Artificial Sequence
  derived and/or modified sequence
atgaattttctcctgtcatgggtccattggtcgctggcacttcttctgtaccttcaccatgcgaaatggtcgcaagcagcgcctatggccgaaggcgggggtcaaaaccatcatgaagtggtcaagtttatggatgtgtaccagaggagctactgtcaccctattgagactcttgtcgacatttttcaggaatatccagatgaaatcgaatacatctttaagccgtcgtgtgttcccctcatgcgctgcggtgggtgctgtaacgatgaaggtctggaatgcgtgcctactgaagaaagcaatatcacgatgcagattatgagaattaagcctcatcaaggacaacatattggagaaatgtcgtttctgcagcataacaagtgcgaatgcaggccaaagaaagatagggcacgtcaggagaacccttgcggaccttgtagcgagagacgaaaacatctctttgttcaagaccctcaaacttgcaagtgtagctgcaagaacacggattctcgatgtaaggcacggcagttggaactgaacgaaagaacctgtcgatgtgacaaacccagacga

SEQ ID NO: 67353 - DNA, 573 bp, Artificial Sequence
  derived and/or modified sequence
atgaacttcctcctgtcctgggtccattggtcactcgcactgctcctttacctgcatcacgccaaatggtcgcaggcagcccctatggctgaaggcggaggccagaatcatcatgaagttgtcaaattcatggatgtgtaccaacgctcgtactgtcacccgatcgaaaccctggtggacatcttccaggaatatcctgacgagatcgaatacatctttaagccgagctgcgtgcccctcatgaggtgcggaggatgctgcaatgatgagggcctggagtgtgtgccgaccgaagagagcaacattactatgcaaatcatgcggatcaagcctcaccagggacagcacatcggagagatgtccttcttgcaacacaacaagtgcgaatgccggccgaaaaaggatcgggcgcggcaagaaaatccgtgcggtccatgctcagaacgccgtaagcacttgtttgtacaggacccgcagacgtgcaagtgctcctgtaaaaacacggactcgcgctgcaaggctcgccaactcgagctcaacgaaagaacctgtcggtgcgacaagcctagacgt

SEQ ID NO: 67354 - DNA, 573 bp, Artificial Sequence
  derived and/or modified sequence
atgaactttctgttgagctgggttcactggtctcttgcattgctgctttatctccaccatgcgaagtggtcgcaggccgcccctatggcagaaggaggaggccagaatcaccacgaggtggtcaaattcatggatgtatatcagagatcctattgccacccgattgagacgctggtcgacatatttcaggagtatcccgatgaaatcgagtacatatttaaacccagctgtgttcctctaatgcgttgcgggggatgttgtaacgatgaggggttggagtgtgtgcctacggaggagagtaatatcaccatgcagattatgcgaatcaagccgcatcaggggcaacacataggggaaatgtcatttctgcaacacaacaagtgcgaatgtagaccaaaaaaagaccgcgccagacaggaaaacccatgtggtccctgctcagagcgcagaaagcacctgttcgtgcaggatcctcagacgtgcaagtgttcttgcaagaatacggactctcggtgcaaggcccggcaactcgagttgaacgaaagaacctgtagatgcgacaagccgcggaga

SEQ ID NO: 67355 - DNA, 573 bp, Artificial Sequence
  derived and/or modified sequence
atgaattttctgctgtcatgggtgcattggtcgttagctcttcttctctacctccaccacgctaagtggagccaggcagctcccatggcagagggaggtggccagaaccatcacgaagtggtgaaatttatggacgtataccagagaagctattgtcatccaattgagacccttgtggatatttttcaggaatatcccgacgaaatagaatacatcttcaaaccatcatgtgtgcctctgatgcgatgtggaggctgctgtaatgacgaaggcctggagtgcgtgcccacagaggaatcaaatattacaatgcaaatcatgaggatcaaacctcaccagggtcagcatattggagaaatgagcttcctccaacataataagtgtgagtgtcggccgaagaaagatcgcgcccgccaggagaatccttgcggaccatgctcagaacgccggaaacacctcttcgtccaagatcctcaaacctgtaaatgttcttgcaagaataccgactcccgctgcaaagcccgacagctggagttgaatgagagaacctgccgttgtgataagccaagacgc

SEQ ID NO: 67356 - DNA, 573 bp, Artificial Sequence
  derived and/or modified sequence
atgaattttcttctctcgtgggtgcactggtccctcgcccttcttctctacctgcatcacgcaaaatggagccaggcagcaccaatggctgagggtggcgggcagaatcaccatgaagtggtgaagttcatggatgtgtaccaacggtcgtactgtcatccaattgaaactttggtggacatatttcaagagtacccagatgagattgaatacattttcaagccctcctgcgtgcctctcatgcgttgtggtggctgctgtaacgatgaaggactggagtgtgtgccaaccgaagagtccaacataactatgcagattatgcgtatcaagcctcatcaaggacagcacataggagaaatgagctttctgcaacataacaagtgtgaatgcagacccaagaaagatcgcgcacgccaggaaaatccgtgcggtccatgttccgaacgtaggaaacatctgttcgtgcaagatcctcagacctgcaagtgtagctgcaagaataccgatagccgttgcaaagcaagacagcttgaacttaatgaaagaacgtgtcggtgtgataagcctagacga

SEQ ID NO: 67357 - DNA, 573 bp, Artificial Sequence
  derived and/or modified sequence
atgaacttcctgctctcctgggtgcactggtccctggcgcttctgctgtacttgcatcacgcgaagtggtcgcaagcggcgccgatggcagagggagggggacagaaccatcacgaagtggtgaaattcatggatgtgtaccagcggtcgtactgccaccccattgaaactctggtggacatcttccaggagtacccggacgagatcgaatacatctttaaaccttcttgcgtgccacttatgcggtgcggcggctgctgcaatgacgaggggctcgaatgtgtcccgactgaggaaagcaacatcactatgcagatcatgcgcatcaaaccgcatcaaggtcagcacatcggcgagatgtcgttcctgcaacacaacaagtgcgagtgccggccaaagaaggaccgcgcacggcaggagaatccatgcggaccttgttcagaaaggcgcaagcacctttttgtgcaggatccacaaacctgcaagtgctcatgcaagaacacggacagcagatgtaaagccagacagttggagcttaatgagaggacttgccggtgcgataagccacgccgt

SEQ ID NO: 67358 - DNA, 573 bp, Artificial Sequence
  derived and/or modified sequence
atgaatttcttgttgagttgggttcactggagcctcgcccttctgttgtatttgcaccacgctaaatggtcacaagctgcgcccatggctgagggtggtggtcagaatcaccatgaggtcgtaaaatttatggacgtctatcagagatcctattgtcatcctattgagacattggttgacatcttccaggagtaccctgatgagatcgagtacattttcaaacccagctgcgtcccattaatgcgctgcggagggtgctgtaacgatgaaggtttggaatgtgtgcctactgaggaaagtaatattacgatgcaaattatgcgtatcaagcctcaccagggacagcatattggagagatgtcattcttgcagcataacaaatgcgagtgccggccaaaaaaggatagagctagacaggaaaatccttgtggcccttgctctgagcggaggaaacatctctttgtccaagatccacaaacttgcaagtgctcttgcaaaaatacggatagtcgttgcaaggctcgtcagttagagttgaacgagagaacctgtcggtgtgataaacctaggaga

SEQ ID NO: 67359 - DNA, 573 bp, Artificial Sequence
  derived and/or modified sequence
atgaactttcttcttagctgggttcattggtcgttggctctgttgctgtatctgcatcatgccaaatggtcgcaagccgcccccatggccgaaggaggtggccaaaatcatcacgaagtcgtgaagtttatggacgtgtaccagcggagctactgtcatccaattgaaaccttggtcgatatcttccaggaataccccgatgaaattgaatacattttcaagccttcctgtgttcctctgatgcgttgtggtggatgctgtaatgacgagggactggaatgtgtgcctactgaagagagcaacattactatgcaaatcatgcgcattaagcctcatcaaggtcagcatataggagaaatgtccttcctgcagcacaacaagtgcgaatgtaggcctaaaaaggaccgagcacgccaggaaaacccgtgtgggccgtgctcggaaaggagaaagcacctctttgtgcaggatccacaaacctgtaagtgctcgtgtaaaaacaccgattcccgctgcaaggcacgccagctggaacttaatgaacgtacgtgcagatgtgataagcctcggcgg

SEQ ID NO: 67360 - DNA, 573 bp, Artificial Sequence
  derived and/or modified sequence
atgaatttcctgctgtcatgggtgcattggtccttggcccttctgctgtaccttcaccatgcaaagtggtcccaggctgcgccaatggcggaggggggcggtcagaatcatcacgaagtggtgaagttcatggacgtgtaccagcggtcctactgtcaccccatagagaccctggttgatatattccaggaataccccgatgaaatcgagtatatctttaaaccctcatgcgttccattgatgcgctgtggggggtgctgcaatgacgaaggccttgagtgtgtgcctaccgaggagtcgaatatcactatgcaaattatgaggatcaaaccacatcaagggcagcatattggggagatgtcattcctacagcacaataagtgtgagtgcagaccgaagaaagacagggccagacaggaaaatccttgcggaccttgttccgagcgcagaaaacacctttttgtgcaggaccctcagacatgcaagtgttcctgtaagaacaccgacagcaggtgtaaggctcggcagctcgagctgaacgagcggacatgtaggtgcgataagcccagacga

SEQ ID NO: 67361 - DNA, 573 bp, Artificial Sequence
  derived and/or modified sequence
atgaattttctgctttcgtgggtccattggtcgctggcacttctgctgtacttgcatcacgccaagtggtcacaggcagcccccatggcagaaggaggaggtcagaaccatcatgaagtggtcaaattcatggacgtgtaccagcgttcctactgtcatccgattgaaaccctggtggacatatttcaggaataccccgatgagattgagtacatctttaagccatcatgcgtgcctcttatgcgctgtggtggatgctgcaatgacgaggggctggaatgtgtgcctaccgaagaatcgaacatcactatgcagataatgcgtatcaagcctcatcaaggacaacatatcggcgagatgagctttcttcaacataacaaatgtgaatgtagacctaagaaggatcgcgcacggcaagaaaacccttgcggaccctgcagcgaacgacggaagcatctgttcgtccaggatccccagacttgcaagtgttcatgcaagaataccgattcgagatgcaaggctcggcaactcgagctgaacgaacgcacctgtcggtgtgacaaacctagacga

SEQ ID NO: 67362 - DNA, 573 bp, Artificial Sequence
  derived and/or modified sequence
atgaactttctgctttcgtgggtgcattggagccttgcacttctgctctaccttcatcacgcaaagtggagccaagcagcgcctatggcagaaggtggcggtcaaaatcaccatgaagtcgtgaaattcatggatgtctaccagagatcatactgtcatccaatcgaaactctggtggatatcttccaagagtaccctgacgaaatcgagtacatctttaaaccatcgtgtgtgccactcatgcggtgtggagggtgctgcaacgatgaagggctggagtgtgtgccaaccgaagaatccaacattaccatgcaaatcatgagaatcaagcctcaccagggacaacatatcggtgagatgtcatttttgcaacataacaaatgcgaatgtcgcccgaagaaagacagggcgcggcaggaaaatccttgtgggccttgttcggaaagacgaaaacatctgtttgtgcaagatccgcagacgtgcaagtgctcttgtaagaataccgatagccgatgtaaagcaaggcagctggagctgaacgagaggacctgccgttgtgataagccaagacgc

SEQ ID NO: 67363 - DNA, 573 bp, Artificial Sequence
  derived and/or modified sequence
atgaattttctcctgtcctgggtccattggtccctggccctgctcctgtatcttcatcatgccaaatggtcccaagcagcccctatggccgaaggtggcggtcagaatcatcatgaagtagtcaaattcatggacgtataccaacggtcctactgtcatccaatcgagaccctggtcgacatctttcaagagtatccagacgagattgagtacattttcaaaccatcttgtgtcccactcatgagatgtggtgggtgttgtaacgatgaaggactagaatgcgtgccaaccgaggagagtaacattaccatgcagataatgaggataaagccacaccaggggcagcacattggtgagatgtccttccttcagcacaacaagtgtgagtgccgcccaaagaaagacagggcaagacaggagaatccttgcggcccctgcagcgagcgcagaaaacatttgtttgtacaggatccccaaacttgtaaatgttcatgtaaaaataccgactcgagatgtaaggccagacagcttgagctcaacgagcgaacatgtaggtgcgataaacctcggaga

SEQ ID NO: 67364 - DNA, 573 bp, Artificial Sequence
  derived and/or modified sequence
atgaacttcctgctgtcttgggtacattggagtctggccctgctgctgtatcttcaccacgcgaagtggagccaagcggcaccaatggcagaggggggcggtcagaatcatcacgaggtcgttaagttcatggacgtctatcagagatcttactgtcatccaattgagactctggtggatatcttccaggagtacccagacgagattgaatatattttcaaaccctcctgcgtccccctgatgaggtgcggtggttgttgtaacgacgaggggctggaatgcgtgcccactgaggagagcaacatcactatgcaaatcatgagaatcaaacctcatcaaggccagcacattggagagatgtccttcctgcagcacaacaagtgcgagtgccgtcctaagaaggacagagctaggcaggaaaatccatgcgggccgtgttctgagaggaggaagcacctgtttgtacaggatccccagacttgcaagtgtagttgtaaaaacaccgactcaagatgcaaggcaaggcagctggaacttaatgaacggacctgtcgatgcgataaaccgcgtagg

SEQ ID NO: 67365 - DNA, 573 bp, Artificial Sequence
  derived and/or modified sequence
atgaatttcttactgtcctgggtgcattggtctctggcgctgcttttgtacctgcaccacgctaaatggagtcaagcagccccaatggctgagggaggcggacagaaccaccatgaagtggtgaagtttatggatgtatatcaacgttcttactgccatccaatcgaaacccttgttgatatctttcaggagtaccccgatgaaattgagtatatctttaaacctagctgcgtgccgcttatgagatgcgggggctgctgtaacgatgaaggcctggagtgcgtacctaccgaggaatctaacattacaatgcagattatgcgcatcaagccacaccagggccagcatattggtgagatgagctttctccaacacaacaagtgcgaatgcagacccaaaaaggatagggcacggcaggagaatccgtgtgggccttgctccgagagacgcaagcatctgttcgtacaggaccctcaaacttgtaagtgctcttgtaagaatactgactcacgctgtaaggcccgtcagctggagcttaatgagcgaacgtgccgatgtgacaaaccgcgtagg

SEQ ID NO: 67366 - DNA, 573 bp, Artificial Sequence
  derived and/or modified sequence
atgaactttttactgagctgggtccactggagcttggctctattgttgtacctgcaccacgcgaaatggagccaagctgcgccgatggcagaaggtggcgggcagaaccatcacgaggttgtgaagttcatggatgtgtaccagcgctcttactgtcatcctattgagacattggtggatatcttccaggaatatccggacgagatcgaatacatcttcaaaccgagctgcgtgcctctcatgagatgtggtggttgttgcaacgacgaaggtctcgagtgtgtgccaactgaggaaagcaatataacaatgcaaattatgcgcatcaaaccgcaccaaggtcaacacattggagaaatgagttttctgcaacacaacaagtgcgagtgtcgtccaaagaaggatcgagcccgccaggagaatccgtgtggcccatgctccgagcgcaggaaacaccttttcgttcaggatccacagacttgcaaatgttcatgtaagaacactgactcccggtgcaaagcgcgccaattggaactgaacgaaaggacctgccgttgcgataagccgcgtcgg

SEQ ID NO: 67367 - DNA, 573 bp, Artificial Sequence
  derived and/or modified sequence
atgaacttcctgctgtcgtgggtccattggagtctggcgttgctgctctatctccaccatgccaaatggtcccaggccgcgccgatggctgaaggaggaggtcagaaccatcacgaagtggtgaagttcatggacgtgtaccagcgctcgtactgccacccgatcgagactctggtggatatcttccaagaatacccggacgaaattgaatacatcttcaagccgtcgtgtgtgccacttatgcgctgtggaggatgctgcaatgacgagggactggagtgcgtcccgaccgaagaatcgaacatcactatgcagattatgcggatcaagccacaccagggccagcacatcggtgagatgtcattcctccagcataacaagtgcgaatgcagacccaagaaagatcgtgcacgccaggaaaacccctgcggcccatgctcggagaggcggaagcacctcttcgtgcaggacccgcagacctgtaagtgctcatgcaagaacacggattctcgatgcaaagcgcgccaactggaattgaatgaacgcacctgccgctgcgacaagccgcgccgc

SEQ ID NO: 67368 - DNA, 573 bp, Artificial Sequence
  derived and/or modified sequence
atgaacttcctcctgagctgggtccattggtctttggcgctcctgctttatttgcaccatgcgaagtggagtcaagcagcccccatggccgaaggtgggggccagaatcatcatgaagtagttaagttcatggacgtgtaccagaggtcatattgccatcccattgagacccttgttgacatcttccaagagtatccagatgaaattgaatatattttcaagcccagctgcgtgccgctgatgaggtgcggaggatgctgcaatgacgagggcctggaatgcgttccaaccgaggaatctaatatcaccatgcaaatcatgcgtattaagcctcaccagggacagcatattggggaaatgagttttctgcaacacaacaaatgtgagtgtaggccaaagaaggatcgagctcggcaggagaatccttgtgggccctgttctgagcgccggaaacacctgtttgttcaagatccgcagacgtgtaagtgctcatgtaaaaataccgactcaaggtgcaaagcccgccagctcgagctgaatgagagaacatgtcggtgcgacaagccacgccgt

SEQ ID NO: 67369 - DNA, 573 bp, Artificial Sequence
  derived and/or modified sequence
atgaacttcctcctgagctgggtgcattggtcgcttgcactccttctttacctgcatcatgcgaagtggtcccaagccgcaccaatggcagaaggaggtgggcagaatcaccatgaagtggtcaagtttatggatgtgtaccaacgttcctactgtcatcctattgaaaccctggtcgacatttttcaggaataccctgatgaaattgaatacatctttaagccaagctgcgttcctctgatgcgatgtggggggtgttgcaacgatgagggactggagtgtgtgcccaccgaagagtcgaacataactatgcagattatgcgtatcaaaccccaccaaggacaacacatcggagagatgagttttctgcagcataacaaatgtgaatgtcggccgaagaaagacagagcacgccaagaaaatccctgcggcccttgcagtgaacggcggaagcacctcttcgtgcaggacccacaaacctgcaagtgttcctgtaagaacactgattccagatgcaaggcacggcagctggaacttaatgagaggacctgtcgctgtgacaaacctcgtaga

SEQ ID NO: 67370 - DNA, 573 bp, Artificial Sequence
  derived and/or modified sequence
atgaactttcttctctcttgggtgcattggtctctggctctgctgctctatttgcaccacgccaaatggtcacaggcggcaccaatggctgagggaggcggccaaaatcatcatgaagtggtgaagttcatggatgtgtatcagagatcgtactgtcatccgattgaaactctcgttgatatttttcaggagtatccggacgagatcgaatacattttcaagccctcttgcgtgcctcttatgcgatgcggcggctgctgtaacgacgagggcctggaatgtgtgcccactgaggagagcaatataaccatgcagattatgagaatcaagccgcaccaggggcaacacattggtgagatgtcgttcctgcagcacaacaaatgcgagtgccggccgaagaaggatagagcgagacaggagaatccctgtggcccatgctctgagcgccggaagcacctgttcgtgcaggacccacagacgtgcaagtgtagctgtaagaatacggactcccgttgtaaggcaagacagttagagctgaatgagcggacctgcaggtgcgataaaccaaggagg

SEQ ID NO: 67371 - DNA, 573 bp, Artificial Sequence
  derived and/or modified sequence
atgaacttccttctctcctgggtccactggtcactggcactcctgttgtacctgcaccatgccaagtggtctcaggcagccccaatggcggaaggaggaggtcagaaccaccatgaagttgtgaagttcatggatgtgtaccagaggtcttattgtcatccaattgaaaccttagtcgacatattccaagaatatcccgatgagatcgagtacatcttcaaaccctcatgtgtgccactcatgagatgcggcgggtgctgcaatgatgagggattggagtgcgtgcccactgaagaatcaaatattaccatgcagattatgaggatcaaaccccaccaaggtcagcatattggagagatgagcttcctgcagcacaacaagtgcgagtgtagacccaaaaaggatcgagccagacaggagaatccctgcggaccctgttccgagagacgcaaacatttgtttgtgcaggacccccagacatgtaagtgttcttgcaagaacaccgattccaggtgtaaggcccgacagctggagctgaacgagagaacctgtagatgcgataaacctcgaaga

SEQ ID NO: 67372 - DNA, 573 bp, Artificial Sequence
  derived and/or modified sequence
atgaattttcttttgtcgtgggtccattggtccctggccctgttgctgtacttgcaccatgccaagtggtcccaagcagcacctatggcggaaggcggtggacagaaccatcacgaagtggtcaaattcatggatgtgtaccagagatcctactgtcaccctattgagactttggtggacattttccaggaatacccagatgagatcgaatacatctttaagccttcgtgtgtcccactgatgcgctgtggaggttgttgcaacgacgaaggactggagtgcgtgccaactgaagaatccaacattactatgcaaatcatgagaattaagccgcatcaaggacaacatataggtgaaatgtcattccttcagcataacaagtgtgaatgtcggcctaagaaggaccgggccagacaggagaatccatgcggcccatgctccgagcgccgcaaacatctctttgtgcaggatcctcaaacctgcaagtgttcatgtaagaacaccgattctcgttgtaaagcgcggcaacttgaactgaacgaaagaacctgtcgctgtgataagcctcggcgg

SEQ ID NO: 67373 - DNA, 573 bp, Artificial Sequence
  derived and/or modified sequence
atgaattttcttctgtcctgggtccattggtcgctcgccctgctgctctatttgcatcatgctaaatggtcacaagcagcaccaatggcggaagggggaggacaaaaccaccatgaagttgtgaaattcatggatgtgtaccaaagatcatattgtcatcctatagaaacccttgttgatatcttccaggaataccccgatgaaattgagtacattttcaagcctagctgtgtcccactgatgcggtgtggtggctgttgtaatgacgaaggactcgaatgcgtgccgaccgaagaatccaacattaccatgcagattatgcggataaagccacatcaaggacaacacataggtgagatgtcattccttcagcataacaaatgtgaatgcaggcctaagaaggaccgagcaagacaagaaaacccgtgtggaccatgttccgagagacggaagcacctgtttgtgcaggacccacaaacctgcaaatgtagctgtaaaaacacggatagcaggtgtaaggcacggcaacttgaacttaacgaacgtacttgtcggtgtgataagcctagacgt

SEQ ID NO: 67374 - DNA, 573 bp, Artificial Sequence
  derived and/or modified sequence
atgaattttctcctgagctgggtgcattggtcgctggcactgctcctttacctgcatcacgcgaagtggtcgcaggctgcgccgatggccgagggcgggggtcaaaaccaccacgaagtcgtgaagttcatggacgtgtaccagagatcgtactgccacccgatcgaaactctggttgacatcttccaggaataccccgatgaaatcgagtatatctttaaaccgtcctgtgtgccactgatgcggtgcggaggatgttgcaatgacgagggactggaatgcgtgcccaccgaggagtcaaacattaccatgcaaatcatgaggattaagcctcatcaggggcaacacatcggcgaaatgagcttcctccagcacaacaaatgcgaatgtcgcccaaagaaagaccgcgcccggcaagagaacccttgcggaccgtgctccgaaagacgcaagcatttgttcgtccaggatccgcagacctgcaaatgttcctgtaagaatactgattcacgatgcaaggccagacagctcgaattgaacgagcggacgtgccggtgcgacaagccacgtcgc

SEQ ID NO: 67375 - DNA, 573 bp, Artificial Sequence
  derived and/or modified sequence
atgaatttcctactttcgtgggtgcactggtctctggcattactactgtacttgcaccacgctaagtggtctcaggctgctcccatggctgaaggggggggacagaaccaccacgaggtagtaaagttcatggatgtatatcaacggtcatactgccacccaatcgaaacactggtggatatcttccaggaatatccggatgagatcgaatatatcttcaaaccctcatgtgtgccccttatgaggtgtggggggtgctgtaacgacgaagggttagaatgcgtgcccacagaggaatcaaacatcactatgcagattatgcggataaaaccccaccagggacagcatataggagaaatgtcgtttctccagcacaataaatgcgaatgtcgtccaaaaaaagatcgggcgcgccaggaaaatccctgcggaccctgctcagaaaggcgaaaacatctttttgttcaggacccccagacatgtaagtgttcttgtaaaaacacagattcaaggtgcaaagctcggcagttagaactaaacgaacggacttgccgatgcgataaacctagaaga

SEQ ID NO: 67376 - DNA, 573 bp, Artificial Sequence
  derived and/or modified sequence
atgaacttcctcctgagctgggtacactggagcctagccttgctgctatacctgcaccacgcgaagtggtcacaagccgcgccaatggccgaaggcggtggacaaaatcaccacgaggtcgtcaagttcatggatgtttatcagcgcagttattgtcacccaatcgaaacactggtggatatcttccaagagtaccctgatgaaattgagtacatctttaagccttcctgcgtgccgctgatgcgctgcggtggctgttgtaacgatgaaggactagaatgcgtgccgactgaagaaagcaatatcaccatgcaaattatgcggatcaagccccaccagggccaacacattggtgagatgagttttctccagcataataaatgtgagtgccgccccaaaaaggatagggcaagacaggaaaacccatgcggaccatgctcggagcggcggaagcacttgtttgtccaggatcctcagacatgcaagtgctcgtgtaaaaatacagactctcgttgtaaggcccgccaactggagctgaacgagagaacgtgccgatgcgacaagcctcgacgc

SEQ ID NO: 67377 - DNA, 573 bp, Artificial Sequence
  derived and/or modified sequence
atgaacttcctgctttcttgggtgcactggtctttggccctcctcctgtacctgcatcacgccaagtggagtcaggctgcccctatggccgaggggggaggacagaatcaccatgaggtggttaagttcatggacgtgtatcaaagatcatactgtcaccctattgagacactggtggatattttccaggaataccctgacgaaatcgagtacattttcaagccctcttgtgtgcctctgatgcgctgtggcggatgctgcaacgacgaaggtctggaatgtgtcccaacggaagagtccaacattactatgcagataatgcggataaagcctcaccaggggcaacacattggcgagatgtctttcctgcagcacaacaagtgcgaatgcagacctaaaaaagatcgggcaaggcaggagaatccctgcggaccttgcagcgagaggcggaaacacctctttgtacaggaccctcagacctgcaagtgttcttgtaaaaacacagactcccggtgtaaagctagacagttggagctgaacgagaggacttgcagatgtgacaaacctagaagg

SEQ ID NO: 67378 - DNA, 573 bp, Artificial Sequence
  derived and/or modified sequence
atgaactttctgttgtcctgggtgcattggtccctggctcttctcttgtacctgcaccacgcaaaatggagccaggccgccccgatggcagagggagggggccagaaccaccatgaagtcgtgaagttcatggacgtctaccagcgctcctactgccatccgatcgaaactctggtggacatcttccaggagtacccggatgagatcgagtatatcttcaagccgagctgcgtgccactcatgcgctgtggaggatgttgcaacgacgagggactcgagtgcgtcccaactgaggaaagcaacatcaccatgcagatcatgcgaataaagccgcaccagggacagcatattggggagatgtcattcctgcaacataacaaatgcgaatgccgccctaagaaagaccgggcccgccaggaaaatccctgcggaccgtgttccgagcgcaggaagcacctgtttgtgcaggatcctcagacctgtaagtgcagctgcaagaacaccgattccagatgcaaggcaaggcagctggaactgaacgagcgcacctgcagatgcgacaagcccaggaga

SEQ ID NO: 67379 - DNA, 573 bp, Artificial Sequence
  derived and/or modified sequence
atgaacttccttctctcttgggtgcactggagcctggccctgctgctctacctccaccatgccaaatggtcgcaggccgctccgatggccgagggagggggccaaaaccatcacgaagtggtgaagttcatggatgtgtatcagagatcgtactgccaccccattgagactctggtggacatcttccaagaatacccagatgaaatcgagtacatctttaagcccagctgcgtccccctgatgcggtgcggaggatgctgcaatgacgagggcctggagtgcgtgcctaccgaagagtcgaacattaccatgcagattatgcggatcaagccgcatcaaggacaacatatcggagaaatgtcatttttgcagcacaacaaatgcgagtgtcgcccaaagaaagacagggcccgccaggaaaatccgtgtggtccgtgtagcgagcgccgcaaacacctcttcgtgcaagaccctcagacttgtaagtgttcctgcaaaaacacggattcaagatgcaaggccagacagctcgaactgaacgaacgcacctgcagatgcgacaagcctagacgc

SEQ ID NO: 67380 - DNA, 573 bp, Artificial Sequence
  derived and/or modified sequence
atgaatttcctgctttcctgggtccactggtcgctcgcacttcttttgtaccttcatcacgcgaaatggtcacaggctgctcccatggcagagggtgggggtcagaaccatcacgaggtggtcaagtttatggatgtataccaacgctcctactgtcacccaattgaaaccctggttgacatatttcaagaataccccgacgaaattgaatacattttcaagccatcgtgcgtgccacttatgcgatgtggaggatgctgtaatgatgagggcctggaatgcgtgccgacggaagaatcaaacatcaccatgcaaatcatgcgtatcaaaccacatcaggggcagcatattggagaaatgagcttcctgcagcacaacaagtgcgaatgcagaccgaaaaaagatagggcaaggcaggaaaacccttgtgggccttgtagcgaacgaaggaagcatctgtttgtgcaagatccgcaaacctgcaagtgcagctgtaagaatactgattcaagatgtaaagcacgacagctcgaattgaacgagcggacttgtaggtgtgacaagcctcggcgc

SEQ ID NO: 67381 - DNA, 573 bp, Artificial Sequence
  derived and/or modified sequence
atgaacttcttgctctcctgggtccattggagcctggctctgcttctgtatctccatcacgccaaatggtcgcaggcagctcctatggcggaaggcggaggacagaaccatcacgaagtggtgaagttcatggacgtctaccaacggagctactgccatccgatcgaaactctcgtggacatctttcaagagtacccagatgagatcgaatacatcttcaagccatcatgcgtgccgctgatgcgctgcggcggttgttgcaacgatgagggactggagtgtgtgccgaccgaagagtcgaatatcactatgcaaatcatgcgcataaagccacaccaaggtcagcacattggggaaatgtcatttctccaacacaacaagtgtgagtgcagaccaaagaaagatcgtgccaggcaagagaacccatgcggaccgtgctccgaacgacgcaagcatttgttcgtccaggacccgcagacttgcaagtgttcgtgcaagaataccgactccaggtgtaaagctcgacaattggaactcaatgagcgcacctgccgctgcgacaagcctaggaga

SEQ ID NO: 67382 - DNA, 573 bp, Artificial Sequence
  derived and/or modified sequence
atgaacttccttcttagctgggtacactggagtctggccctgctgttgtatcttcaccacgcgaaatggagccaggcagcaccgatggccgaaggaggaggtcagaatcaccacgaagtggtcaaattcatggacgtataccagagatcctattgtcatccaatcgagactctggttgacatctttcaggagtaccctgatgaaatagagtacattttcaagccaagctgcgtgccactgatgcggtgcgggggctgctgcaacgacgagggacttgagtgcgtgcccactgaagagagcaacatcacgatgcagattatgaggattaagccacaccaaggacagcacatcggcgagatgtcatttttgcaacataataagtgtgaatgtaggcccaagaaagatcgggcccgccaggagaacccatgtggcccttgtagcgagagaaggaaacaccttttcgtgcaagacccgcaaacatgcaagtgttcctgtaaaaacacggactcccggtgtaaggcacggcagctggagctcaacgagcgcacatgtagatgcgacaagcctaggcga

SEQ ID NO: 67383 - DNA, 573 bp, Artificial Sequence
  derived and/or modified sequence
atgaatttccttttaagttgggttcactggtcacttgcactgttgctgtacctccatcatgcaaagtggtcccaagcggcacctatggcggagggtggaggccagaaccatcatgaggtggtgaaattcatggatgtataccagagatcctattgccaccctattgagactttggtggacatttttcaggagtacccagatgaaatcgagtatatatttaagcctagctgcgtaccgttgatgaggtgcggtggctgctgcaacgatgagggcctggaatgcgtgccgacagaagaatccaacattaccatgcagataatgcgcatcaagccccatcaaggccaacacattggggaaatgagcttcctacagcacaacaagtgcgagtgtagacccaagaaggacagggctcggcaggagaatccatgcggaccctgttcagaaaggcggaaacatctgtttgtgcaggatccacagacctgtaagtgctcatgtaagaataccgattctagatgtaaagcacgccagctggaactcaacgagcgtacctgccggtgtgataagcctaggcgg

SEQ ID NO: 67384 - DNA, 573 bp, Artificial Sequence
  derived and/or modified sequence
atgaatttcctgctctcctgggtgcattggtctctcgcactgctcctgtacctgcaccacgccaagtggagtcaggccgcccccatggctgaaggcggaggacagaaccaccacgaggttgtcaagtttatggatgtataccagaggtcttactgtcatccaattgagaccctggttgacatcttccaggaatacccggatgagattgagtacattttcaagccatcgtgcgtgcccttgatgcggtgtggaggctgctgcaacgacgagggcctggaatgcgttccaacagaggaatctaatattaccatgcagatcatgcggataaagccacaccaaggccagcacattggcgaaatgtcattcctccagcacaacaaatgcgagtgccggccgaagaaagatcgggcacggcaggaaaacccatgcggtccttgttctgaacggaggaagcacctgtttgtccaagatcctcaaacctgcaagtgttcctgtaagaacaccgacagccggtgcaaggcacggcaactggagttaaatgaacgcacgtgccggtgtgataagccaaggagg

SEQ ID NO: 67385 - DNA, 573 bp, Artificial Sequence
  derived and/or modified sequence
atgaattttctgctgtcttgggtccattggagcctggccctactgctgtacctgcaccatgccaaatggagccaggcagctcccatggcagaaggcggcggtcagaaccaccacgaagttgtgaagttcatggatgtgtaccagcggagctactgccaccccatcgaaaccctagtagacatatttcaggaataccccgacgagattgaatacatattcaagccatcatgtgtgcccttgatgaggtgcgggggctgttgcaacgacgaaggccttgagtgtgttcccacagaagaatcgaatatcacaatgcagatcatgcggataaaacctcaccaagggcagcacatcggggagatgagctttctgcagcataataagtgcgagtgtcgtccaaaaaaagatcgggcgcgacaggagaatccttgcggcccgtgcagcgagcgtaggaagcatctgtttgttcaagacccacagacctgtaagtgctcctgcaagaataccgattcgagatgcaaggcacggcagctggagctaaacgaacgtacttgtaggtgcgataaacccaggcgc

SEQ ID NO: 67386 - DNA, 573 bp, Artificial Sequence
  derived and/or modified sequence
atgaattttctgctttcgtgggtgcactggagcctggcacttctcctttacctccaccatgccaaatggtcacaggctgcacctatggcagagggtggaggacaaaaccatcatgaagtggtgaagttcatggatgtgtatcaacggagctactgtcatcctattgagactcttgtcgatatcttccaagaataccctgatgaaattgaatacattttcaagccaagctgtgtgccactgatgagatgcggaggctgttgcaacgacgagggacttgaatgtgtcccaaccgaagagagcaacataacgatgcagataatgcgtattaagcctcatcaaggacaacatattggcgaaatgtcctttctccagcacaacaaatgcgaatgccgccctaagaaagatcgggcaagacaggaaaacccctgcggtccatgtagtgaaagaaggaaacatttgtttgttcaagatcctcaaacttgcaagtgtagctgtaagaacaccgattcgcgctgtaaggcacgtcagcttgagctcaatgaaaggacctgcaggtgcgataagccacgccgc

SEQ ID NO: 67387 - DNA, 573 bp, Artificial Sequence
  derived and/or modified sequence
atgaacttcctgctgtcctgggtccactggtcccttgcactgctgctgtacttgcatcatgcaaagtggagccaggccgcaccgatggccgaggggggtggccagaaccatcatgaggtcgtgaagttcatggacgtgtaccagcgctcttactgtcatccaatcgaaactctcgtggacatcttccaggagtacccggatgagatcgagtacatctttaagccgtcatgcgtgcctctgatgcggtgtggagggtgttgcaatgacgaagggctggaatgcgtgcctactgaggaatccaacatcaccatgcagattatgcggatcaagccgcatcagggacaacacatcggcgaaatgtcatttctgcagcacaacaagtgcgagtgccgaccgaaaaaggatcgagctcgccaggaaaacccgtgcggcccgtgttcagagcggcggaagcacctcttcgtccaagacccccagacgtgcaagtgctcgtgcaagaacaccgactcacgctgcaaagcccgccagcttgaactgaacgaaaggacctgccgctgtgataagccaagaaga

SEQ ID NO: 67388 - DNA, 573 bp, Artificial Sequence
  derived and/or modified sequence
atgaattttttgctgagttgggtgcattggtccctcgccctgctgctctacctgcatcatgctaagtggtcccaggcagctccaatggcagaaggggggggtcagaaccatcatgaagttgtcaagtttatggacgtgtaccagaggtcatattgccaccctatcgagaccttagtcgatattttccaagagtatcctgacgagattgagtatatttttaagccatcgtgtgtgcctctcatgagatgcggcggatgttgcaatgacgaagggttggaatgtgtcccgacagaggagagtaatatcacaatgcaaattatgcgtatcaaaccccatcagggtcagcacattggggaaatgagctttcttcaacataacaagtgcgaatgcagaccgaagaaggacagagcacgacaggagaatccttgcgggccctgttccgagcgacgtaaacatttgttcgttcaggacccacagacatgtaagtgttcttgcaaaaataccgattctaggtgcaaagctagacaactggagttgaacgaacgaacatgccgctgcgacaaacccaggaga

SEQ ID NO: 67389 - DNA, 573 bp, Artificial Sequence
  derived and/or modified sequence
atgaactttctgctcagctgggttcattggtccctcgccttgctcctgtatctgcaccatgcgaagtggtcacaggccgctcctatggcagaaggtggtggccagaatcaccacgaggtcgtgaaatttatggatgtctaccagagatcctactgtcatcccatcgagacactggtcgacatttttcaggaatatcccgatgagatcgagtatattttcaagccgagttgtgttcccttgatgcggtgtggcggttgttgtaacgatgaaggacttgagtgcgtgccgactgaagaatccaacatcactatgcaaattatgagaattaagccacatcaaggacagcatatcggcgaaatgagcttcctgcaacacaacaaatgcgagtgccgacctaagaaagacagggcgcgccaagagaacccatgtggcccatgttccgagaggcgcaaacatctctttgttcaagacccccagacctgtaagtgcagctgcaagaacacggactctcggtgtaaggccaggcagcttgaactcaatgagagaacctgtcggtgtgataaacctcggaga

SEQ ID NO: 67390 - DNA, 573 bp, Artificial Sequence
  derived and/or modified sequence
atgaactttcttctgtcctgggtgcattggtcattggcattgctcctttaccttcatcacgccaagtggtcgcaggcagcccccatggcagagggtggggggcaaaatcatcacgaagtggtgaagtttatggatgtctaccaacgcagttactgccaccctatcgaaacccttgtggacatctttcaggaatacccagatgaaattgaatacatcttcaagccctcgtgtgtgccgctgatgcgctgtggaggatgttgcaacgatgaaggtcttgagtgtgtgccaactgaagaatcaaacataacgatgcaaatcatgaggatcaagcctcaccaagggcaacacattggagagatgtcgttcctccaacataacaagtgcgagtgtcggccaaagaaggaccgcgcgagacaggaaaatccttgcggtccctgctcagaacgtcggaaacatctgtttgtccaggatcctcagacctgtaagtgttcctgcaaaaacactgactcccggtgcaaagcgagacaactggaactcaacgaacgcacttgccgttgcgataagcctaggaga

SEQ ID NO: 67391 - DNA, 573 bp, Artificial Sequence
  derived and/or modified sequence
atgaatttcctcctcagctgggtgcactggagcttggctctgctgctttacctacaccacgccaaatggagccaggccgccccaatggcagaggggggggggcagaaccatcacgaggtcgtcaagtttatggacgtgtatcagcgaagctattgccacccaattgagactctggtggacatattccaggaatatcccgacgagatcgaatacatattcaaacccagctgtgtgcctttaatgcgttgcggaggctgttgtaacgatgaggggttagagtgtgttccaactgaagaaagtaatatcacaatgcagataatgagaattaagccccaccaaggacaacatatcggtgagatgagcttcctgcagcataataagtgtgagtgcagacccaaaaaagaccgggcccgccaagaaaacccttgcggaccctgcagcgagcgccgcaaacatttgttcgtgcaagatccccaaacatgcaaatgctcctgcaaaaatacagactctcgatgtaaggctagacagctggaactcaacgagcgtacgtgcaggtgtgacaagccaagacgg

SEQ ID NO: 67392 - DNA, 573 bp, Artificial Sequence
  derived and/or modified sequence
atgaactttttgctttcgtgggtgcattggtcattagctcttctgctatatctgcatcatgctaagtggagtcaagcggctccaatggcggaaggaggtgggcagaaccaccatgaagttgtcaaatttatggatgtatatcaacggtcttactgccacccgatcgaaacgttggtagacatctttcaggaatatccggatgaaattgaatacattttcaaaccttcttgtgtaccccttatgcgttgtggcggatgttgtaacgatgagggccttgaatgtgtcccgacggaggaaagcaacattaccatgcagatcatgcgcatcaaaccacatcaaggccagcatattggcgaaatgagttttttgcagcataataaatgcgaatgccgcccaaagaaagaccgtgcgaggcaggagaacccgtgtggcccgtgttctgaacgtcgaaaacatctttttgttcaagatcctcaaacttgcaaatgttcatgtaaaaacaccgatagccggtgtaaagcaagacagttagaactcaacgaacgtacgtgccgttgtgataaaccgagacgt

SEQ ID NO: 67393 - DNA, 573 bp, Artificial Sequence
  derived and/or modified sequence
atgaatttcctgctgagctgggtgcactggagtctcgcactgcttctgtacttgcaccatgctaagtggtcgcaagcagcgcctatggccgaagggggaggacaaaaccatcatgaagtggtgaagttcatggatgtgtaccagagaagctattgtcacccaatcgaaactttggtggacatctttcaggaataccccgatgaaatcgagtacattttcaaaccttcctgtgtccccctgatgcgatgtggtggatgttgtaatgatgaaggattggaatgtgtgcccaccgaggaatcgaatatcactatgcagattatgcggattaaacctcaccaggggcagcatataggagagatgtcgtttcttcaacacaacaagtgcgaatgccgtcctaagaaggaccgagcacgacaagaaaacccatgtggtccttgttcagagcgccgtaaacatttgtttgtgcaggatccgcaaacgtgcaagtgtagctgtaagaacactgatagcagatgtaaggcaaggcaacttgagctcaacgaaagaacttgccgatgcgacaaaccgcggaga

SEQ ID NO: 67394 - DNA, 573 bp, Artificial Sequence
  derived and/or modified sequence
atgaactttttattgagctgggtacattggtccttagcactattactctacttgcatcatgctaaatggtcacaggccgcccccatggcggaagggggaggccagaaccaccatgaggtggtcaagtttatggacgtgtaccaacggagttattgccatcccatcgagacactagtcgatattttccaggaataccctgacgagatcgagtatatcttcaaaccgtcctgtgtgcctctgatgagatgtggaggttgttgtaacgacgaaggtcttgaatgcgtacccaccgaagaaagcaatatcaccatgcagattatgcgcattaagccccaccaggggcagcacataggagaaatgagctttctgcaacacaataaatgcgagtgtcgtccgaagaaggatcgcgctcgccaggagaatccatgcggaccgtgctccgagaggcgtaagcacttgtttgtgcaagatccacagacctgcaagtgttcctgtaagaacactgattccagatgcaaagcgagacagctggagctcaacgaaagaacttgccgatgtgacaaaccgcgacgc

SEQ ID NO: 67395 - DNA, 573 bp, Artificial Sequence
  derived and/or modified sequence
atgaatttcttgctcagctgggtgcactggtcccttgctcttctcttgtacctgcaccatgccaaatggtcacaggcagcccctatggcggagggagggggacagaatcaccacgaggttgtgaaattcatggatgtgtaccagcggtcgtactgccaccctatcgagactctagtagacatttttcaggagtaccctgacgagatagaatatatcttcaagccgagttgcgttcctcttatgaggtgcggcggctgctgcaatgacgagggtctcgaatgcgtcccgaccgaggagtctaacattacaatgcaaattatgcgcattaaacctcatcaaggtcaacacatcggggaaatgagcttcttgcagcacaacaaatgcgaatgccgccccaaaaaggacagagcacggcaggagaacccttgcgggccttgtagtgagagaaggaaacatctcttcgtccaggatcctcagacctgtaagtgttcatgcaagaacaccgacagtcgctgcaaagcacgacagctggagttgaatgaacgaacttgccggtgcgacaaaccacggcga

SEQ ID NO: 67396 - DNA, 573 bp, Artificial Sequence
  derived and/or modified sequence
atgaacttcctgctcagctgggtccactggtcgctggccctgttgctgtacctccaccacgctaagtggagccaggctgccccgatggcggaaggtggaggccagaaccaccatgaggtcgtgaagtttatggacgtgtaccagcgatcatactgccatccgatcgaaacgcttgtcgatatcttccaggagtacccggacgagatcgagtacatcttcaaaccttcgtgcgtgccgctcatgcgctgtggaggctgttgcaacgatgaaggacttgagtgtgtcccaactgaggaatctaacatcaccatgcagatcatgcgcatcaagccgcatcaggggcagcatataggagaaatgagcttcctgcagcacaataagtgcgaatgtaggccaaagaaagatagggcccgccaggagaacccatgcggcccatgctcagagcggcgaaaacacctgtttgttcaagatccgcagacctgcaagtgctcgtgcaagaacaccgactcgcggtgcaaggcaagacaactggaactgaatgaaagaacctgccgctgcgataaaccgagaaga

SEQ ID NO: 67397 - DNA, 573 bp, Artificial Sequence
  derived and/or modified sequence
atgaattttctcctcagctgggtgcactggtcactcgctttgctgttatacctgcatcacgctaaatggtcacaagctgcccctatggctgagggaggcggtcagaatcaccacgaggttgtcaagttcatggatgtttaccagcgctcatactgtcatcccatcgagaccctggttgatatcttccaagaatatcctgacgaaatagagtacatcttcaagccgtcttgcgttccactcatgaggtgtggaggttgctgtaatgatgaaggccttgagtgcgttcccacagaagaaagcaatataacaatgcagattatgcgaatcaagccccaccaggggcagcatatcggggagatgtcatttctgcagcacaacaaatgcgaatgccgtcctaagaaggatagagcacggcaggaaaacccttgcggtccttgctcagagcgtcggaaacatctcttcgtgcaggatccccaaacatgtaaatgtagctgtaagaatacagatagccgctgtaaagctaggcagcttgaattgaatgagcgtacgtgtcgctgtgacaagccgcgaagg

SEQ ID NO: 67398 - DNA, 573 bp, Artificial Sequence
  derived and/or modified sequence
atgaatttcctcctgtcttgggtgcattggagccttgcccttttgttgtacctgcaccacgcaaagtggagccaggccgcacctatggcagaaggaggcggacagaatcaccatgaggtagttaagtttatggacgtgtatcaaagatcctactgccacccaattgaaacactggttgatatcttccaagagtaccctgatgagatcgaatatatctttaagccttcttgcgtgcctctgatgcggtgtggaggatgctgtaacgacgagggactggagtgtgtgccaaccgaggagagcaatatcactatgcagatcatgcggatcaagccccaccaaggccaacatatcggggagatgagcttcctgcagcacaataaatgtgagtgcagacccaagaaagaccgcgcaaggcaggaaaatccctgcggaccttgcagtgagcgccgcaaacatttatttgtgcaggacccccagacctgtaagtgctcctgtaaaaacacggacagcaggtgcaaggcccggcagctggagctgaacgaacgcacttgccgctgtgataagcccagaaga

SEQ ID NO: 67399 - DNA, 573 bp, Artificial Sequence
  derived and/or modified sequence
atgaacttcctgctttcctgggtccattggtcgctcgcactgctcctgtacttgcatcacgccaaatggtcgcaggcagctccgatggccgaaggaggtggacagaaccaccacgaagttgtgaagtttatggacgtgtaccagcgatcgtactgtcaccctatcgagactctcgttgacatctttcaggagtatcccgacgagatcgagtacattttcaaaccatcctgtgtgcccctgatgcgctgcggagggtgctgcaatgatgaggggctcgagtgcgtcccaactgaggagtcgaacataactatgcagatcatgcgaatcaagccccatcaaggtcaacacatcggagaaatgtcatttctgcagcacaacaagtgtgagtgtaggccaaagaaggatagagctcgccaggaaaatccatgtggaccttgcagcgaacgccggaagcatctgttcgtgcaggatccacaaacctgcaagtgctcgtgcaaaaacaccgattcacggtgtaaagcccgccagctggaactcaatgagagaacctgccgctgcgacaagccgcgcaga

SEQ ID NO: 67400 - DNA, 573 bp, Artificial Sequence
  derived and/or modified sequence
atgaatttccttctctcctgggtccattggtcccttgcactcttgctgtacctccatcacgcaaagtggtcgcaggcagctcctatggccgagggaggtggccagaaccaccacgaggtggtgaagttcatggatgtgtaccaaaggtcttactgtcatcccattgagactcttgtggacatattccaagagtacccagatgagattgagtatatctttaaaccctcatgtgtgcctctgatgcgctgcggagggtgttgtaatgacgaggggttggaatgcgtgcccaccgaagaatcgaacattaccatgcaaatcatgcgcattaagcctcatcagggtcaacatattggagagatgtcctttctgcagcacaacaagtgtgaatgcagacctaaaaaggatcgagcaagacaggaaaacccctgcggtccatgttcggaacggcgcaagcatctgtttgtccaagatccgcagacctgtaagtgctcctgtaagaacaccgatagcagatgcaaagcacgacagcttgagctgaacgaacgaacttgccggtgtgataagcccaggcga

SEQ ID NO: 67401 - DNA, 573 bp, Artificial Sequence
  derived and/or modified sequence
atgaactttcttctctcctgggtccattggtccttggcgctgcttctctacctccatcacgcaaagtggtcgcaggccgctcctatggccgaagggggaggacagaatcatcatgaagtggtgaagtttatggatgtctaccaaagatcctactgtcatcctattgagactctggtcgacatatttcaggagtacccagatgagatcgaatacatctttaagccaagctgtgtgcccctcatgcgatgcggtggctgctgcaatgatgagggtttggaatgcgttcctaccgaagaatcgaacattactatgcaaatcatgcgcatcaagccacatcagggccaacatattggagaaatgtcctttcttcaacacaacaaatgtgagtgtagacctaagaaagatcgggcccggcaagaaaatccctgtggtccttgttcagagcggagaaagcaccttttcgtgcaggaccctcaaacgtgtaagtgctcgtgcaagaacaccgacagcagatgtaaggcgaggcaactggagctcaacgaacggacttgtagatgcgataagccaagaaga

SEQ ID NO: 67402 - DNA, 573 bp, Artificial Sequence
  derived and/or modified sequence
atgaactttctgttgtcttgggtgcactggtctctcgcgctgctgctctatttgcatcacgccaagtggtcccaggctgcgcctatggccgaaggcggtggccagaatcaccacgaggtagtgaagtttatggatgtctatcaaaggtcttattgtcatcctatcgagaccctggttgatatcttccaggaatacccggatgagattgagtacatattcaagccctcctgcgttcccctgatgagatgtggaggctgctgcaacgatgagggcctcgagtgcgtaccaactgaggaaagtaacatcacaatgcagattatgcgcatcaagccccaccagggacagcacatcggcgaaatgtcattcctgcaacacaacaagtgcgagtgtaggcctaagaaagacagagctcgccaggaaaacccttgcggcccttgctccgagagacgcaaacatctttttgtgcaggaccctcaaacatgtaaatgctcctgtaagaacaccgactctaggtgtaaagcgagacaactggagctgaacgaacgcacgtgtcgctgtgacaagcctaggcgc

SEQ ID NO: 67403 - DNA, 573 bp, Artificial Sequence
  derived and/or modified sequence
atgaactttctgttaagttgggtgcactggagcttggcactgcttctctatctgcatcacgctaagtggtcacaggcggctccaatggctgagggaggagggcagaaccatcatgaggttgtcaagttcatggacgtatatcagcgctcatactgtcatcctatcgaaacgctggtcgatatttttcaagaatatccagacgaaatcgaatacatatttaagccaagctgtgtgccgctgatgcgctgtggaggctgctgtaacgacgagggcctcgagtgcgtgccaaccgaggagtccaatatcaccatgcaaatcatgcgcataaagccgcaccaaggccaacacataggcgaaatgagcttccttcagcataataaatgcgaatgccggccaaaaaaagatcgggcccggcaagaaaacccatgcggaccctgtagcgagagaaggaagcacctgttcgtgcaagatcctcaaacctgtaagtgctcctgcaagaacaccgactcaaggtgcaaggccagacaattggaattgaacgaaagaacctgtagatgcgataagccgcgcaga

SEQ ID NO: 67404 - DNA, 573 bp, Artificial Sequence
  derived and/or modified sequence
atgaatttcctgctctcctgggttcattggtccttggcccttctgctatacctgcatcacgctaagtggagccaggctgcacccatggccgaggggggcggacaaaatcaccatgaagtggtcaagttcatggatgtgtatcagcgcagttactgccatccaatcgaaacactcgtagatatctttcaggagtatcccgacgagatcgagtacatctttaagcctagctgtgtgcccttgatgcgatgtggcggttgttgtaatgatgagggccttgaatgtgtaccaaccgaagagagcaatataacaatgcaaatcatgaggatcaaaccccatcaaggccagcacattggggagatgtcctttttgcagcataataagtgcgaatgcaggcctaagaaggacagggccaggcaggagaacccctgcggcccctgctctgaacgtagaaagcatctgttcgtgcaggatccacaaacatgcaagtgctcttgtaaaaacaccgattccaggtgcaaagcaagacagctcgaattgaatgagcggacatgccgttgcgacaaaccccggagg

SEQ ID NO: 67405 - DNA, 573 bp, Artificial Sequence
  derived and/or modified sequence
atgaattttcttctctcctgggtgcattggagcctcgcactactgctgtatttgcatcacgcaaaatggagtcaggccgctcccatggcagagggcgggggacaaaatcaccatgaggtggttaaattcatggacgtttatcagcggagctactgtcatccaatcgagacgctcgtcgacatctttcaggagtatcccgatgagatcgagtacatctttaaaccctcgtgtgtgcccctgatgcggtgtggtggatgttgtaacgacgaggggttggaatgcgtgccaaccgaggaatctaatatcacgatgcagattatgcgcatcaaacctcaccaggggcagcacatcggcgagatgtcctttcttcaacacaataagtgtgagtgccggccgaagaaggaccgcgcccgccaggagaatccctgcggaccatgttctgagaggaggaagcatctattcgtgcaggatccgcaaacctgcaaatgtagctgcaaaaacacagactcgcgatgcaaagcgagacaattggaactaaacgagcgcacttgtcgctgcgacaaaccccgtcgg

SEQ ID NO: 67406 - DNA, 573 bp, Artificial Sequence
  derived and/or modified sequence
atgaatttccttctgagttgggtccattggtcactggctttgctcttgtatcttcatcatgccaaatggagtcaagccgccccaatggctgagggcggtggacagaaccaccatgaagtggtgaagtttatggacgtgtatcaacggtcttattgccatcccatcgagaccctggttgatatcttccaagaatatcccgatgaaatagaatatatattcaaaccatcatgtgtgccgctcatgaggtgtgggggttgttgtaatgacgagggcctggagtgcgtccccacagaagagtccaacatcactatgcagatcatgcggatcaaaccgcaccagggtcaacatattggagagatgagctttctgcagcataacaaatgcgagtgccgtcctaaaaaagatagagcccgacaggaaaatccttgcggcccctgttctgagcgtagaaagcatctgtttgtgcaggacccccagacttgcaaatgctcatgtaagaacacagattctcgctgtaaggcgcgtcagttggaactgaatgaacggacatgtagatgcgacaaaccaagacgc

SEQ ID NO: 67407 - DNA, 573 bp, Artificial Sequence
  derived and/or modified sequence
atgaactttctccttagctgggtgcactggagtctcgctctcttgttgtacctccaccatgccaaatggagccaggctgcgccaatggcagagggggggggccagaaccatcacgaggtggtaaagttcatggatgtgtatcagcgaagctactgccaccccatcgagactctagtagatatcttccaggaatacccagatgagatcgagtacatcttcaagccgtcttgtgtccccttgatgagatgcgggggttgttgtaacgacgagggcttggaatgcgttcccacggaggagagcaatataaccatgcaaatcatgagaataaagccgcatcagggtcaacatattggagagatgtctttcctgcaacataacaagtgcgagtgtcgccccaaaaaagatcgggcgaggcaggagaacccgtgcggaccctgttccgaaaggcggaagcacctttttgtccaggatccccagacatgcaaatgttcatgcaaaaacaccgatagtagatgtaaggccagacagctggagctcaacgagagaacctgccgttgtgacaaaccaagacgg

SEQ ID NO: 67408 - DNA, 573 bp, Artificial Sequence
  derived and/or modified sequence
atgaacttccttctttcctgggtgcattggtctctggcacttctcctgtatctacatcacgccaagtggagccaagccgctccaatggctgaagggggcggacaaaaccaccacgaggtcgtaaagttcatggatgtctatcagcggagctattgtcaccccattgagacactggtggatattttccaggaatatcctgacgagatcgaatacatattcaagccttcttgcgtgccgttaatgcggtgtggtggatgctgcaacgatgagggactggaatgtgttcccacagaagaatccaacatcaccatgcaaattatgagaatcaagcctcatcagggtcagcacattggggagatgtccttcttacagcacaacaagtgcgagtgcaggcccaaaaaagatcgtgctcgacaggagaacccatgcggcccatgcagtgagagaaggaaacatctcttcgtgcaagatccccagacctgtaaatgctcctgcaaaaacacagatagccgatgcaaggccaggcaacttgagcttaacgaaaggacctgccgctgcgacaagccccgcaga

SEQ ID NO: 67409 - DNA, 573 bp, Artificial Sequence
  derived and/or modified sequence
atgaatttcctcctttcctgggtccactggtctctcgcccttctcctctatttacaccacgccaaatggtcccaggccgctcctatggcagagggcggtggccagaatcatcatgaagtagttaaatttatggacgtctatcagcgtagttattgccacccgatcgagactcttgtggacatcttccaagagtatccggatgagatagagtacatctttaaacctagctgcgtaccactcatgcgatgtggaggttgttgtaacgacgaaggtttggaatgcgtacctaccgaggagagcaatatcaccatgcaaattatgcgcatcaagccccaccagggacagcatattggggaaatgtctttcttgcagcacaacaagtgtgagtgccgtccgaagaaggaccgagctcgtcaagagaatccgtgcggaccatgctcagagaggagaaagcatttgttcgtccaggatccccagacgtgcaagtgctcatgtaaaaacacggacagtcggtgcaaggcccgccagcttgagctaaacgagaggacgtgccgatgcgacaagccgcgaagg

SEQ ID NO: 67410 - DNA, 573 bp, Artificial Sequence
  derived and/or modified sequence
atgaacttcctgctgagctgggtccattggtcactggcgctgttgctctacctgcaccatgccaagtggagccaggctgctcctatggcggagggagggggtcaaaatcatcacgaggtggtgaagtttatggacgtgtaccaaaggtcatactgccatccgattgaaaccctggtggatatctttcaagaatatcccgacgaaatcgagtacatcttcaagccgtcgtgcgtgcctctgatgaggtgcggcggatgctgtaacgatgaaggactcgagtgtgtgcctactgaagagtcgaatatcactatgcagatcatgcgcattaagccgcaccaaggacagcatatcggagaaatgtccttcctgcaacacaataagtgcgaatgcaggccgaagaaggacagagcacgccaagagaatccgtgcggaccttgtagcgagcggcgcaagcacctgtttgtccaggatccacagacctgcaaatgctcatgcaagaacactgattcgcggtgcaaggcacgccaactggaactcaacgaaaggacctgccggtgcgacaaaccacggcgg

SEQ ID NO: 67411 - DNA, 573 bp, Artificial Sequence
  derived and/or modified sequence
atgaactttcttctgtcatgggtgcattggtcccttgccctgctgctgtacctgcaccacgccaagtggtcccaagcagccccaatggccgaaggaggtgggcagaaccatcatgaggtagtgaagttcatggatgtgtaccaaaggtcctattgtcaccctatagaaaccctcgtcgacatttttcaggagtacccggacgagattgaatacattttcaaaccatcatgtgtgccactgatgcggtgtggggggtgctgcaacgatgaaggtttggaatgcgtgccaactgaggaatcaaatatcactatgcaaatcatgagaattaagcctcatcaaggacaacatattggggaaatgagctttctgcagcacaacaagtgtgaatgtcgtccaaagaaagatcgggcccggcaagagaatccctgcggtccatgcagcgaaagacgaaagcatctttttgtccaagatccacagacctgtaagtgctcttgtaaaaacacggattcgaggtgcaaggcgcgccagctcgaacttaatgagaggacttgtcgctgtgacaaacctcgccgc

SEQ ID NO: 67412 - DNA, 573 bp, Artificial Sequence
  derived and/or modified sequence
atgaatttccttctgtcgtgggtgcactggagccttgcattgcttctctacttgcaccatgcgaaatggtcccaagcggcacctatggccgaagggggagggcagaaccatcacgaagtcgtgaaattcatggacgtgtaccagcggtcttactgtcatccaattgaaaccctggtcgacatatttcaggagtacccggacgagatcgaatacatcttcaagccatcctgcgtgcctctgatgagatgcggcgggtgctgtaacgacgagggcctggagtgtgtgcccactgaagaatccaacataaccatgcagattatgcgtatcaagcctcatcagggacaacacattggagagatgagctttctccaacacaacaaatgtgaatgcaggcctaagaaagaccgagcccgtcaggagaacccttgcggtccatgctccgagcggagaaagcatctgtttgtgcaagatccacagacttgtaagtgttcgtgcaagaacaccgattcaaggtgtaaggcacgccaactggaacttaacgaaagaacttgtcggtgtgataaacctaggagg

SEQ ID NO: 67413 - DNA, 573 bp, Artificial Sequence
  derived and/or modified sequence
atgaacttcctcctgtcgtgggtgcactggagcctggcattgctgctgtacctccatcacgcaaagtggtcgcaggccgcgccgatggccgaaggaggcggacagaatcaccatgaagtggtgaagttcatggatgtctaccaacggagctactgccacccgatagagactctcgtggatatctttcaagagtacccagatgagatcgaatacattttcaagccgtcgtgtgtgccgcttatgcgctgcgggggctgctgtaacgatgagggtctggaatgcgtgccgaccgaggaatccaatatcactatgcaaatcatgcggatcaaaccgcatcaaggacagcacatcggagaaatgagctttcttcagcacaataagtgcgaatgtcgcccaaagaaagatcgcgccagacaagaaaacccctgcggcccgtgctcagaaagacggaagcacctgttcgtccaagacccacaaacttgcaagtgttcgtgcaaaaacaccgactccagatgcaaagcacgccagcttgaattgaacgagcgaacctgtagatgcgacaaaccacgcaga

SEQ ID NO: 67414 - DNA, 573 bp, Artificial Sequence
  derived and/or modified sequence
atgaattttctccttagctgggtgcattggagtctagctctgcttttgtaccttcaccatgcaaaatggtctcaggcagcccccatggccgagggcgggggacagaatcaccacgaggttgtgaagtttatggatgtttaccagcgcagttactgtcatcccatagagacactggtcgatatctttcaagagtatccagacgagatcgagtacatcttcaaaccgtcctgcgtgccattgatgcgttgtggaggatgctgtaacgacgaagggctggagtgcgtgcctaccgaagaatcaaatatcactatgcaaattatgcggattaaacctcaccaaggacaacatattggcgaaatgtccttcctgcagcataacaagtgtgagtgtagaccaaaaaaggatagggcaagacaagagaatccatgcggtccatgcagcgaaaggagaaagcatttattcgtccaggaccctcaaacctgcaaatgctcatgtaagaataccgacagccgctgcaaggcgagacagcttgagctcaacgagagaacctgtcgctgcgacaaacctcgccgg

SEQ ID NO: 67415 - DNA, 573 bp, Artificial Sequence
  derived and/or modified sequence
atgaattttctcctgtcctgggtacattggtctctggcacttttgttatatcttcatcacgctaaatggagtcaggccgctcccatggctgaagggggagggcagaaccatcatgaagtagtgaaattcatggatgtgtaccagaggtcatactgtcatcctatcgaaactctggtagatatcttccaggaatatcctgacgaaatcgagtatatattcaagcccagttgtgtgccactgatgcggtgcggagggtgttgcaatgatgaggggctggagtgcgtgcctacagaagagagtaacataacaatgcagatcatgagaattaaaccccatcagggacagcatataggggagatgtcttttctgcagcacaacaagtgtgaatgcagaccaaaaaaggatagagcaaggcaggagaacccttgtggaccttgctcagaaagaaggaaacatctttttgtgcaggatccacagacttgtaaatgtagttgcaaaaacactgatagtcggtgcaaggctcgacagctcgagctcaacgaacggacgtgcagatgcgataaacccagaagg

SEQ ID NO: 67416 - DNA, 573 bp, Artificial Sequence
  derived and/or modified sequence
atgaactttctcctctcatgggtccattggtcgctcgcactgctgttgtacctgcatcatgcaaagtggtcgcaagcggcgcccatggctgaagggggcggacagaatcatcacgaagtcgtgaagttcatggatgtctatcagagatcgtactgtcatcctattgaaactcttgtggacatatttcaagaataccccgacgaaatcgagtacatcttcaagccctcatgcgtccctcttatgcgatgcggcggttgttgcaacgatgagggtctggaatgcgttccaaccgaggaatcgaatatcacgatgcagattatgcgcatcaaaccgcatcaggggcaacacattggagaaatgtcctttctgcaacataacaagtgtgaatgcagaccaaagaaagatagggcgagacaagaaaacccttgcggaccttgtagcgaacggcggaagcatctttttgtccaggacccccaaacctgtaagtgctcctgcaagaacaccgactccagatgcaaagcgcggcagctcgaactcaacgagagaacgtgtcgttgtgataaacctagaagg

SEQ ID NO: 67417 - DNA, 573 bp, Artificial Sequence
  derived and/or modified sequence
atgaacttcttgctctcctgggtgcactggtcattagccttgcttctgtaccttcatcatgccaagtggtctcaggctgctccaatggccgaaggtgggggacagaaccaccacgaagtagttaaattcatggacgtctatcagagaagttactgccacccaatcgagacacttgtagatatatttcaggaatacccagatgaaatcgaatatatctttaaaccctcttgtgtgcccttgatgaggtgtggagggtgctgcaatgatgagggactggagtgtgtgcccaccgaggaaagcaatattacaatgcagatcatgcggatcaaaccccatcagggtcaacatataggagaaatgtcattcctgcaacacaataaatgcgaatgtaggcctaagaaggatcgcgcgaggcaagaaaatccttgcggcccttgctccgagcggaggaagcacctctttgtgcaggacccccaaacatgcaagtgctcctgcaaaaataccgactctcggtgtaaggcgaggcagctggaactcaacgagaggacatgtaggtgtgataagccccgcagg

SEQ ID NO: 67418 - DNA, 573 bp, Artificial Sequence
  derived and/or modified sequence
atgaacttcctcttgagttgggtgcactggagtttggcattgctcctatatcttcaccatgctaagtggtcccaggctgcaccaatggccgagggagggggacagaaccatcacgaggttgtaaagttcatggatgtgtaccagaggtcatattgccaccctattgaaaccctggtcgatatctttcaggagtatcccgatgaaatcgagtatatcttcaagccttcatgcgtgcctctgatgaggtgtggcggatgttgcaacgacgagggactggaatgcgtgcccactgaggaaagtaacattaccatgcagattatgagaatcaaaccccatcaagggcagcacataggagagatgtcattcctccagcataataagtgcgaatgcagaccaaaaaaagatagagctcgccaagagaacccatgtggcccatgtagcgaacggcgtaaacatctttttgtgcaggatccacagacctgcaagtgctcctgcaaaaatactgactcaagatgcaaggcacgccagctggaactgaatgaacggacatgtcgatgcgacaaacctagacgc

SEQ ID NO: 67419 - DNA, 573 bp, Artificial Sequence
  derived and/or modified sequence
atgaattttcttttaagttgggttcattggtcccttgcattattattatatttacaccatgctaaatggagtcaagctgcaccaatggcagaagggggtggacaaaatcatcatgaagttgtaaaatttatggatgtttatcaaagatcatattgtcatccaatcgaaactttagtagatattttccaagaatatccagatgaaattgaatatatattcaaaccttcttgtgtaccattaatgagatgcggaggatgttgcaatgatgaaggattagaatgtgttccaacagaagaatctaatattacaatgcaaattatgagaattaaaccacatcaaggacaacacatcggagaaatgtcattccttcaacataataagtgtgaatgtcgtccaaagaaggatagagcaagacaagaaaacccatgtggtccatgttcagagcgtagaaaacatctttttgtacaagatcctcaaacatgtaaatgttcgtgtaaaaatacagattctcgttgtaaggctagacaattagaattaaatgaaagaacatgtagatgtgataaaccaagaaga

SEQ ID NO: 67420 - DNA, 573 bp, Artificial Sequence
  derived and/or modified sequence
atgaacttcttgctgtcctgggtgcactggtccctggcactgcttctctacctgcaccacgctaagtggtcgcaggcagccccgatggcggagggcggaggtcagaaccaccatgaagtggtaaagtttatggatgtgtaccagcgctcgtactgccacccaatcgaaaccctggtggacatcttccaagagtaccctgacgagatcgaatacatcttcaaaccgtcgtgtgtgcctttgatgagatgtggaggatgctgcaatgatgaaggactggagtgtgtgcccactgaagagtcgaacattactatgcaaatcatgagaattaagccgcaccagggacaacatatcggcgagatgtcattcctccaacacaacaaatgcgaatgtaggccaaagaaagatagagccaggcaggaaaatccgtgcggtccatgctccgagcgccggaagcatctgtttgtgcaggatccgcagacgtgcaagtgctcgtgcaagaatactgactcccgctgtaaagcgagacagctggagctgaacgaacgcacctgtaggtgcgacaaacccaggcgc

SEQ ID NO: 67421 - DNA, 573 bp, Artificial Sequence
  derived and/or modified sequence
atgaacttcctgctgtcatgggtgcactggtcgctcgcactcctgctgtacctccaccacgctaaatggagccaagccgcaccaatggccgaagggggaggccagaatcaccatgaagtggtcaagttcatggacgtgtatcaacgctcgtactgtcaccctatcgagactctggtggatatcttccaagaataccctgatgaaattgagtacatcttcaaaccgtcctgcgtgcctctgatgagatgcggggggtgttgtaacgacgagggactggaatgcgtgcctacggaagagtccaatatcactatgcaaatcatgcgcatcaaacctcatcagggccaacatatcggcgaaatgagcttcctgcagcacaacaagtgcgaatgtcgccccaagaaggacagggccaggcaggagaacccgtgtggcccgtgctctgagcggcgcaaacatctgtttgtccaagatccacaaacttgtaagtgcagctgcaaaaacaccgactcgcgctgcaaggcgaggcagctcgaactgaacgaaaggacttgccgatgtgacaagccccggcgc

SEQ ID NO: 67422 - DNA, 573 bp, Artificial Sequence
  derived and/or modified sequence
atgaactttctcctaagctgggtgcactggtcattggctctgctactgtatttgcatcatgctaaatggagccaggctgcacctatggcagagggcgggggccagaatcaccatgaggtggttaaatttatggatgtctaccaacggagttactgtcaccccatcgagacgcttgttgatatattccaggagtacccagacgagatagaatacatctttaaaccttcatgcgtgcccctgatgcgatgtggggggtgttgcaacgacgaaggtttggagtgcgtccccacagaagagtcaaacatcaccatgcagatcatgcgcatcaagcctcatcaaggccagcacataggcgaaatgtcctttttacaacataataagtgcgagtgccggcccaagaaggacagggcgcgacaggagaacccatgcggcccctgcagtgagcggcggaaacatctgtttgtgcaagatcctcaaacatgtaagtgctcttgtaagaacacagactcccgatgcaaggccaggcagctcgaactcaacgagcgtacctgtcgatgtgacaagccccgcagg

SEQ ID NO: 67423 - DNA, 573 bp, Artificial Sequence
  derived and/or modified sequence
atgaatttccttctcagttgggtccattggtccctggctctcctcttgtaccttcaccatgcaaaatggagccaagcggctcctatggctgaaggcggcggccaaaaccatcacgaagtagttaaattcatggacgtttaccagaggtcttattgccaccccattgagacattagtggatattttccaagaataccctgacgagatcgaatatatctttaagcctagctgcgtgccgctcatgagatgtgggggctgctgtaacgacgaaggcctggaatgcgtgcccacagaggaaagtaatatcaccatgcagattatgcgaattaagcctcaccagggccaacatattggtgaaatgtcatttctacagcacaacaaatgcgagtgtcgcccaaagaaggaccgggcccgccaagagaacccctgcggaccttgctctgaacgccgaaagcatctgttcgtgcaggatccccagacatgcaaatgttcatgcaagaataccgactctagatgcaaagcgcgccaattggagttaaatgaacgtacttgcaggtgtgacaaaccccgtagg

SEQ ID NO: 67424 - DNA, 573 bp, Artificial Sequence
  derived and/or modified sequence
atgaatttcctgctgagctgggtccactggagtttggctttactgctgtatttgcatcatgccaagtggtcccaggccgccccaatggcggagggaggaggacaaaaccaccatgaggtggtgaagtttatggatgtgtaccaacgatcttattgtcatcccatcgaaacactcgtggatatctttcaggaatatccggatgagatcgagtacatatttaagccatcctgtgttcctctaatgaggtgtggggggtgctgtaatgacgagggtttggaatgcgtccctactgaggaaagcaatatcacaatgcagattatgagaataaagcctcaccaaggccagcatattggcgaaatgtctttcctacagcacaataagtgcgaatgccgtcctaaaaaagatcgcgcccggcaggagaacccgtgcgggccctgctcagaacgccgcaagcatctgttcgtgcaggaccctcagacatgcaagtgctcctgcaaaaatacggattcccgatgcaaagctaggcagttggagctgaacgaaagaacgtgcagatgtgataagccaagacgg

SEQ ID NO: 67425 - DNA, 576 bp, Artificial Sequence
  derived and/or modified sequence
atgaacttcctgctgagctgggtgcactggagcctggccctgctgctgtacctgcaccacgccaagtggagccaggccgcccccatggccgagggcggcggccagaaccaccacgaggtggtgaagttcatggacgtgtaccagagaagctactgccaccccatcgagaccctggtggacatcttccaggagtaccccgacgagatcgagtacatcttcaagcccagctgcgtgcccctgatgagatgcggcggctgctgcaacgacgagggcctggagtgcgtgcccaccgaggagagcaacatcaccatgcagatcatgagaatcaagccccaccagggccagcacatcggcgagatgagcttcctgcagcacaacaagtgcgagtgcagacccaagaaggacagagccagacaggagaacccctgcggcccctgcagcgagagaagaaagcacctgttcgtgcaggacccccagacctgcaagtgcagctgcaagaacaccgacagcagatgcaaggccagacagctggagctgaacgagagaacctgcagatgcgacaagcccagaagatag

SEQ ID NO: 67426 - DNA, 576 bp, Artificial Sequence
  derived and/or modified sequence
atgaactttcttttatcttgggtccactggagtttagccctgctcctatatctccaccatgcaaagtggtcgcaggctgcaccgatggccgagggaggcggtcagaaccatcacgaggtggttaagttcatggatgtataccagagatcatattgccacccaatcgaaactctggttgacatctttcaggagtaccctgatgaaattgagtacatcttcaaaccttcctgcgtccctctgatgcgctgtgggggctgctgtaacgacgaaggattggaatgcgtcccgaccgaggagtcaaacatcaccatgcagatcatgcggataaaaccccaccaggggcagcacatcggggagatgagttttttacagcacaacaagtgtgagtgtcggcccaaaaaggatagggcaaggcaggagaacccctgtggcccttgctctgaacggcggaagcacctgtttgttcaggacccccagacctgcaagtgcagctgtaaaaatacggactccagatgtaaggcaagacagctcgaattaaatgaaaggacctgccggtgtgataagcctcggagatag

SEQ ID NO: 67427 - DNA, 576 bp, Artificial Sequence
  derived and/or modified sequence
atgaacttcctgctgtcctgggtgcactggagcctggccctgctgctgtacctgcaccacgccaagtggagccaggccgcccccatggccgagggcggcggccagaaccaccacgaggtggtgaagttcatggatgtgtaccagaggagctactgccaccccatcgagaccctggtggacatcttccaggagtacccagatgaaattgagtacatcttcaagcccagctgtgtgcccctgatgagatgtggcggctgctgcaatgatgagggcctggagtgtgtgcccacagaggagagcaacatcaccatgcagatcatgaggatcaagccccaccagggccagcacatcggggagatgtccttcctgcagcacaacaagtgtgaatgtcggcccaagaaggaccgggcccggcaggagaacccctgtggcccctgcagcgagaggaggaagcacctgtttgtgcaggacccccagacctgcaagtgcagctgcaagaacacagacagccgctgcaaggcccggcagctggagctgaatgaaagaacctgccgctgtgacaagcccaggaggtag

SEQ ID NO: 67428 - DNA, 576 bp, Artificial Sequence
  derived and/or modified sequence
atgaacttcctgctgagctgggtgcactggagcctggccctgctgctctatcttcaccacgctaagtggtcgcaggccgcccccatggcggaaggcggggggcagaatcatcacgaagtagtaaaatttatggatgtctatcagaggagctactgccaccctattgagaccttggtggacattttccaagaatacccagatgaaatagagtacatctttaagccctcttgcgtaccccttatgcggtgtggaggatgttgtaacgacgaagggttggagtgcgtaccaaccgaagagtccaatatcactatgcagatcatgagaatcaaaccccaccagggtcaacacatcggcgagatgtctttcctccagcataataaatgtgagtgcaggcccaagaaggacagggcccggcaggagaacccttgcgggccctgctcggagagacgcaaacatctgttcgtgcaagatccccaaacgtgcaaatgttcctgcaaaaatacagatagtaggtgtaaggcacgacagctggaactaaacgagcggacttgccgatgtgacaagccaaggcgctag

SEQ ID NO: 67429 - DNA, 576 bp, Artificial Sequence
  derived and/or modified sequence
atgaatttcctgctgtcttgggtgcattggtctttggcattgctgctgtacttgcatcatgcaaagtggagtcaggcagctccgatggccgaagggggagggcagaaccaccacgaagttgtcaaatttatggacgtgtatcagcgttcctattgccacccgatcgagacacttgtcgatatttttcaggagtacccagacgagatagaatacatcttcaaacccagctgtgtccctctgatgcgatgtgggggttgctgtaacgacgaagggttggagtgcgtaccaaccgaggagtcaaatatcacaatgcagatcatgcgtataaagccccatcagggacaacacattggtgagatgtcttttctgcaacataataagtgtgagtgtaggcctaagaaggatagggccagacaagaaaacccttgtgggccttgtagcgaacgcagaaaacacctgttcgtgcaggacccacaaacttgtaagtgctcctgtaagaacaccgactccaggtgtaaagccaggcagttggagttaaacgaaagaacatgccgctgtgacaagcccagacgctag

SEQ ID NO: 67430 - DNA, 576 bp, Artificial Sequence
  derived and/or modified sequence
atgaacttcctgctcagttgggtgcattggtcactggctctccttctctatctgcatcatgctaaatggtcccaggctgccccgatggcagaaggggggggtcagaaccaccatgaagtggtgaaatttatggacgtctaccagcggtcgtactgccaccctattgaaacactggtggatatttttcaggaatatcccgacgaaatcgaatacatctttaaacccagctgcgttcccctcatgcgatgtggtggctgttgcaacgatgaaggtctcgaatgcgtccccaccgaagagtctaatattacaatgcagattatgcgaatcaaaccacatcagggtcagcacataggagagatgtcttttttacaacataacaaatgcgaatgtaggcccaaaaaagaccgggcccgccaagaaaatccctgcggaccttgctcagagcgccgtaaacatttgttcgtgcaagatccccagacgtgtaaatgttcctgcaaaaatacagattccagatgcaaggctcgacagctcgagcttaacgagcgcacatgtcgctgcgataagccacgcaggtag

SEQ ID NO: 67431 - DNA, 576 bp, Artificial Sequence
  derived and/or modified sequence
atgaactttctcttaagctgggtgcactggagcctggccctcctcctgtatctacatcacgctaaatggagtcaagctgctccgatggccgagggcggcggacagaatcatcacgaagtggtcaagttcatggacgtctaccagcgctcttactgtcacccaatcgagacacttgttgacatctttcaggaatatccagatgaaattgaatatatatttaagccaagttgcgtgccattgatgcggtgtggaggctgctgtaatgacgaggggttggaatgcgtgccaactgaagagtccaatattacaatgcagatcatgcgcataaagccccatcagggtcaacacattggagagatgagtttcctgcagcacaacaaatgcgagtgccggcccaagaaagatagagctaggcaggagaacccatgcggcccttgctccgaaagaaggaagcacctgttcgtccaggatccacagacttgcaaatgctcttgcaaaaatacagacagtcgatgtaaagcgaggcaacttgaactgaacgaacggacctgtcgatgcgacaaacccagaagatag

SEQ ID NO: 67432 - DNA, 576 bp, Artificial Sequence
  derived and/or modified sequence
atgaactttctcttgtcatgggtgcactggagccttgcgctgctgctgtatcttcatcacgctaagtggagccaggccgcacccatggcggagggtggcggacagaatcaccacgaagtagtcaaattcatggacgtgtaccagaggtcgtattgccatccgattgaaactcttgtggatatctttcaagaataccccgatgaaatcgagtacattttcaaaccgtcgtgtgtccctctcatgaggtgcgggggatgctgcaatgatgaagggttggagtgtgtccccacggaggagtcgaatatcacaatgcaaatcatgcgcatcaaaccacatcagggtcagcatattggagagatgtcctttctccagcacaacaaatgtgagtgtagaccgaagaaggaccgagcccgacaggaaaacccatgcggaccgtgctccgagcggcgcaaacacttgttcgtacaagacccccagacatgcaagtgctcatgtaagaataccgattcgcggtgtaaggcgagacagctggaattgaacgagcgcacgtgtaggtgcgacaagcctagacggtga

SEQ ID NO: 67433 - RNA, 716 nt, Artificial Sequence
  derived and/or modified sequence
gggaaauaagagagaaaagaagaguaagaagaaauauaagagccaccaugaacuuucucuugucaugggugcacuggagccuugcgcugcugcuguaucuucaucacgcuaaguggagccaggccgcacccauggcggaggguggcggacagaaucaccacgaaguagucaaauucauggacguguaccagaggucguauugccauccgauugaaacucuuguggauaucuuucaagaauaccccgaugaaaucgaguacauuuucaaaccgucgugugucccucucaugaggugcgggggaugcugcaaugaugaaggguuggaguguguccccacggaggagucgaauaucacaaugcaaaucaugcgcaucaaaccacaucagggucagcauauuggagagauguccuuucuccagcacaacaaaugugaguguagaccgaagaaggaccgagcccgacaggaaaacccaugcggaccgugcuccgagcggcgcaaacacuuguucguacaagacccccagacaugcaagugcucauguaagaauaccgauucgcgguguaaggcgagacagcuggaauugaacgagcgcacguguaggugcgacaagccuagacggugagcugccuucugcggggcuugccuucuggccaugcccuucuucucucccuugcaccuguaccucuuggucuuugaauaaagccugaguaggaag

SEQ ID NO: 67434 - RNA, 576 nt, Artificial Sequence
  derived and/or modified sequence
augaacuuccugcucaguugggugcauuggucacuggcucuccuucucuaucugcaucaugcuaaauggucccaggcugccccgauggcagaaggggggggucagaaccaccaugaaguggugaaauuuauggacgucuaccagcggucguacugccacccuauugaaacacugguggauauuuuucaggaauaucccgacgaaaucgaauacaucuuuaaacccagcugcguuccccucaugcgaugugguggcuguugcaacgaugaaggucucgaaugcguccccaccgaagagucuaauauuacaaugcagauuaugcgaaucaaaccacaucagggucagcacauaggagagaugucuuuuuuacaacauaacaaaugcgaauguaggcccaaaaaagaccgggcccgccaagaaaaucccugcggaccuugcucagagcgccguaaacauuuguucgugcaagauccccagacguguaaauguuccugcaaaaauacagauuccagaugcaaggcucgacagcucgagcuuaacgagcgcacaugucgcugcgauaagccacgcagguag

SEQ ID NO: 67435 - RNA, 576 nt, Artificial Sequence
  derived and/or modified sequence
augaacuuucucuuaagcugggugcacuggagccuggcccuccuccuguaucuacaucacgcuaaauggagucaagcugcuccgauggccgagggcggcggacagaaucaucacgaaguggucaaguucauggacgucuaccagcgcucuuacugucacccaaucgagacacuuguugacaucuuucaggaauauccagaugaaauugaauauauauuuaagccaaguugcgugccauugaugcgguguggaggcugcuguaaugacgagggguuggaaugcgugccaacugaagaguccaauauuacaaugcagaucaugcgcauaaagccccaucagggucaacacauuggagagaugaguuuccugcagcacaacaaaugcgagugccggcccaagaaagauagagcuaggcaggagaacccaugcggcccuugcuccgaaagaaggaagcaccuguucguccaggauccacagacuugcaaaugcucuugcaaaaauacagacagucgauguaaagcgaggcaacuugaacugaacgaacggaccugucgaugcgacaaacccagaagauag

SEQ ID NO: 67436 - DNA, 522 bp, Artificial Sequence
  derived and/or modified sequence
atgaacttcctgctgagctgggtgcactggagcctggccctgctgctgtacctgcaccacgccaagtggagccaggccgcccccatggccgagggcggcggccagaaccaccacgaggtggtgaagttcatggacgtgtaccagcgcagctactgccaccccatcgagaccctggtggacatcttccaggagtaccccgacgagatcgagtacatcttcaagcccagctgcgtgcccctgatgcgctgcggcggctgctgcaacgacgagggcctggagtgcgtgcccaccgaggagagcaacatcaccatgcagatcatgcgcatcaagccccaccagggccagcacatcggcgagatgagcttcctgcagcacaacaagtgcgagtgccgccccaagaaggaccgcgcccgccaggagaacccctgcggcccctgcagcgagcgccgcaagcacctgttcgtgcaggacccccagacctgcaagtgcagctgcaagaacaccgacagccgctgcaagatg

SEQ ID NO: 67437 - DNA, 525 bp, Artificial Sequence
  derived and/or modified sequence
atgaacttcctgctgagctgggtgcactggagcctggccctgctgctgtacctgcaccacgccaagtggagccaggccgcccccatggccgagggcggcggccagaaccaccacgaggtggtgaagttcatggacgtgtaccagagaagctactgccaccccatcgagaccctggtggacatcttccaggagtaccccgacgagatcgagtacatcttcaagcccagctgcgtgcccctgatgagatgcggcggctgctgcaacgacgagggcctggagtgcgtgcccaccgaggagagcaacatcaccatgcagatcatgagaatcaagccccaccagggccagcacatcggcgagatgagcttcctgcagcacaacaagtgcgagtgcagacccaagaaggacagagccagacaggagaacccctgcggcccctgcagcgagagaagaaagcacctgttcgtgcaggacccccagacctgcaagtgcagctgcaagaacaccgacagcagatgcaagatgtag

SEQ ID NO: 67438 - DNA, 525 bp, Artificial Sequence
  derived and/or modified sequence
atgaattttctcctcagctgggttcactggagcttggcgctcctgttgtacttgcaccatgctaagtggagccaggcagcgcccatggccgaaggtggcggacagaaccatcatgaggtcgtcaagtttatggatgtgtaccagcgtagctactgccatcccattgagacacttgtggacatttttcaagagtaccccgatgaaattgaatatatcttcaaaccgtcctgcgtgccattaatgaggtgtggtggctgctgcaacgatgagggcttagagtgcgtgcccaccgaggagtcaaacatcaccatgcagatcatgaggataaagcctcaccagggccagcacatcggcgagatgagcttcctgcagcacaataagtgtgaatgtcgcccaaagaaggaccgcgcccgccaggagaatccgtgcggcccttgcagtgaacgtcgcaagcacttattcgttcaagatcctcagacatgtaaatgtagttgtaaaaataccgattctaggtgcaaaatgtag

SEQ ID NO: 67439 - DNA, 525 bp, Artificial Sequence
  derived and/or modified sequence
atgaacttcctgctgtcctgggtgcactggagcctggccctgctgctgtacctgcaccacgccaagtggagccaggccgcccccatggccgagggcggcggccagaaccaccacgaggtggtgaagttcatggatgtgtaccagaggagctactgccaccccatcgagaccctggtggacatcttccaggagtacccagatgaaattgagtacatcttcaagcccagctgtgtgcccctgatgagatgtggcggctgctgcaatgatgagggcctggagtgtgtgcccacagaggagagcaacatcaccatgcagatcatgaggatcaagccccaccagggccagcacatcggggagatgtccttcctgcagcacaacaagtgtgaatgtcggcccaagaaggaccgggcccggcaggagaacccctgtggcccctgcagcgagaggaggaagcacctgtttgtgcaggacccccagacctgcaagtgcagctgcaagaacacagacagccgctgcaagatgtag

SEQ ID NO: 67440 - DNA, 525 bp, Artificial Sequence
  derived and/or modified sequence
atgaacttcctgctgagctgggtgcactggagcctggccctgctgctgtatcttcaccacgccaagtggagccaggccgctcccatggcagagggaggcggccagaatcatcacgaggttgtcaaatttatggacgtataccagcggagttactgtcacccaatcgaaactctggttgacatttttcaagaatatcccgatgaaatcgaatacatttttaagccatcgtgtgtgcccttgatgcggtgtggcggatgttgcaatgacgagggcctggagtgtgttcccaccgaggagtctaatataaccatgcagatcatgcgaataaagccccaccagggccagcatataggagaaatgagtttcctgcaacacaataagtgcgagtgcagacctaagaaggaccgggccaggcaggaaaacccatgcggtccttgctccgagaggagaaaacacttgtttgtgcaggatccacagacctgcaagtgttcctgtaaaaacaccgatagtagatgcaagatgtag

SEQ ID NO: 67441 - DNA, 525 bp, Artificial Sequence
  derived and/or modified sequence
atgaattttctcctctcctgggtgcactggtccctcgccctattgctgtacctccaccatgccaagtggtctcaagcagcccctatggccgaaggcggaggccagaatcaccatgaagtggtgaaattcatggatgtgtaccagcgaagttattgtcatcctatagaaactcttgtggatattttccaggagtaccctgatgaaattgaatatatctttaaaccgagttgcgtgccgcttatgaggtgcggcggatgttgtaatgatgagggattagagtgcgttcccactgaggaaagtaatatcactatgcagatcatgaggattaagccccatcaggggcagcacatcggagagatgagcttcctgcagcacaacaaatgcgagtgtcggccaaagaaagatcgggctcggcaggagaacccttgcggcccatgctccgagcggagaaaacacttatttgtgcaagaccctcagacctgcaaatgttcttgcaagaacaccgactcgcgttgcaagatgtag

SEQ ID NO: 67442 - DNA, 525 bp, Artificial Sequence
  derived and/or modified sequence
atgaacttccttctaagttgggtccattggtcccttgccttgctcctctacctgcaccacgctaaatggagccaagccgctcccatggcagagggtggggggcaaaaccatcacgaagtagttaagttcatggacgtctaccaacgatcatattgccatcccatcgagactctggtagacattttccaggagtatccggatgaaattgaatatatcttcaaaccttcgtgcgtgccattgatgagatgcgggggatgttgtaatgatgaagggctggagtgtgtgccaaccgaggagtccaacattacaatgcaaatcatgagaatcaagccccatcagggccagcatattggcgaaatgtccttcctgcagcataacaagtgcgaatgccggcctaaaaaagacagggcccgacaagagaacccctgcggaccgtgctccgaaagacgaaaacatttatttgtgcaggatccacagacatgtaaatgttcatgtaagaatactgactccaggtgcaagatgtag

SEQ ID NO: 67443 - DNA, 525 bp, Artificial Sequence
  derived and/or modified sequence
atgaattttctcctgagttgggttcattggtcgctcgcactgcttttatacttacatcatgcaaagtggtcgcaggctgctccaatggccgaggggggtggacagaaccatcatgaagtggtcaagttcatggatgtgtatcagcgctcctattgtcatcctattgaaactctggtagacatattccaggaataccccgatgagatcgagtatatctttaaaccaagctgtgttccgctgatgagatgtggtggctgctgcaacgatgaaggattggaatgtgtacctactgaagagtcaaatatcactatgcagatcatgcgaattaaacctcaccaggggcagcacattggcgagatgtcatttctgcagcacaataaatgcgagtgtcggccaaaaaaagacagagccagacaggaaaatccttgcggcccgtgttctgaacggcgcaaacacctcttcgtccaagatccccagacctgcaaatgtagctgtaaaaacacggattcacgatgcaaaatgtag

SEQ ID NO: 67444 - DNA, 541 bp, Artificial Sequence
  derived and/or modified sequence
atgaactttctgctgtcttgggtgcattggagccttgccttgctgctctacctccaccatgccaagtggtcccaggctgcacccatggcagaaggaggagggcagaatcatcacgaagtggtgaagttcatggatgtctatcagcgcagctactgccatccaatcgagaccctggtggacatcttccaggagtaccctgatgagatcgagtacatcttcaagccatcctgtgtgcccctgatgcgatgcgggggctgctgcaatgacgagggcctggagtgtgtgcccactgaggagtccaacatcaccatgcagattatgcggatcaaacctcaccaaggccagcacataggagagatgagcttcctacagcacaacaaatgtgaatgcagaccaaagaaagatagagcaagacaagaaaatccctgtgggccttgctcagagcggagaaagcatttgtttgtacaagatccgcagacgtgtaaatgttcctgcaaaaacacagactcgcgttgcaagatgtgacaagccgaggcggtga

SEQ ID NO: 67445 - RNA, 525 nt, Artificial Sequence
  derived and/or modified sequence
augaacuuccuucuaaguuggguccauuggucccuugccuugcuccucuaccugcaccacgcuaaauggagccaagccgcucccauggcagaggguggggggcaaaaccaucacgaaguaguuaaguucauggacgucuaccaacgaucauauugccaucccaucgagacucugguagacauuuuccaggaguauccggaugaaauugaauauaucuucaaaccuucgugcgugccauugaugagaugcgggggauguuguaaugaugaagggcuggagugugugccaaccgaggaguccaacauuacaaugcaaaucaugagaaucaagccccaucagggccagcauauuggcgaaauguccuuccugcagcauaacaagugcgaaugccggccuaaaaaagacagggcccgacaagagaaccccugcggaccgugcuccgaaagacgaaaacauuuauuugugcaggauccacagacauguaaauguucauguaagaauacugacuccaggugcaagauguag

SEQ ID NO: 67446 - RNA, 525 nt, Artificial Sequence
  derived and/or modified sequence
augaauuuucuccugaguuggguucauuggucgcucgcacugcuuuuauacuuacaucaugcaaaguggucgcaggcugcuccaauggccgagggggguggacagaaccaucaugaaguggucaaguucauggauguguaucagcgcuccuauugucauccuauugaaacucugguagacauauuccaggaauaccccgaugagaucgaguauaucuuuaaaccaagcuguguuccgcugaugagaugugguggcugcugcaacgaugaaggauuggaauguguaccuacugaagagucaaauaucacuaugcagaucaugcgaauuaaaccucaccaggggcagcacauuggcgagaugucauuucugcagcacaauaaaugcgagugucggccaaaaaaagacagagccagacaggaaaauccuugcggcccguguucugaacggcgcaaacaccucuucguccaagauccccagaccugcaaauguagcuguaaaaacacggauucacgaugcaaaauguag

SEQ ID NO: 67447 - DNA, 441 bp, Artificial Sequence
  derived and/or modified sequence
atgaacttcctgctgagctgggtgcactggagcctggccctgctgctgtacctgcaccacgccaagtggagccaggccgcccccatggccgagggcggcggccagaaccaccacgaggtggtgaagttcatggacgtgtaccagcgcagctactgccaccccatcgagaccctggtggacatcttccaggagtaccccgacgagatcgagtacatcttcaagcccagctgcgtgcccctgatgcgctgcggcggctgctgcaacgacgagggcctggagtgcgtgcccaccgaggagagcaacatcaccatgcagatcatgcgcatcaagccccaccagggccagcacatcggcgagatgagcttcctgcagcacaacaagtgcgagtgccgccccaagaaggaccgcgcccgccaggagaagtgcgacaagccccgccgc

SEQ ID NO: 67448 - DNA, 444 bp, Artificial Sequence
  derived and/or modified sequence
atgaacttcctgctgagctgggtgcactggagcctggccctgctgctgtacctgcaccacgccaagtggagccaggccgcccccatggccgagggcggcggccagaaccaccacgaggtggtgaagttcatggacgtgtaccagagaagctactgccaccccatcgagaccctggtggacatcttccaggagtaccccgacgagatcgagtacatcttcaagcccagctgcgtgcccctgatgagatgcggcggctgctgcaacgacgagggcctggagtgcgtgcccaccgaggagagcaacatcaccatgcagatcatgagaatcaagccccaccagggccagcacatcggcgagatgagcttcctgcagcacaacaagtgcgagtgcagacccaagaaggacagagccagacaggagaagtgcgacaagcccagaagatag

SEQ ID NO: 67449 - DNA, 444 bp, Artificial Sequence
  derived and/or modified sequence
atgaacttcctgctgtcatgggttcactggagtttggcacttctcctgtatctgcaccatgccaagtggagtcaggccgcccccatggctgagggaggtggacagaaccaccatgaggtcgtgaagttcatggacgtgtatcagcgttcttactgccaccctatagaaaccttggttgatatcttccaggaatacccggatgaaatagagtatatctttaaaccctcctgtgtgcccctgatgaggtgtgggggctgctgcaacgacgagggactggagtgcgttccaacagaggaatccaacataacaatgcagatcatgcgaattaaaccacaccagggccagcacatcggagagatgtccttcctgcagcataataagtgtgaatgcaggccgaagaaggatcgggctcggcaagagaagtgcgacaaaccacgtaggtag

SEQ ID NO: 67450 - DNA, 444 bp, Artificial Sequence
  derived and/or modified sequence
atgaacttcctgctgtcctgggtgcactggagcctggccctgctgctgtacctgcaccacgccaagtggagccaggccgcccccatggccgagggcggcggccagaaccaccacgaggtggtgaagttcatggatgtgtaccagaggagctactgccaccccatcgagaccctggtggacatcttccaggagtacccagatgaaattgagtacatcttcaagcccagctgtgtgcccctgatgagatgtggcggctgctgcaatgatgagggcctggagtgtgtgcccacagaggagagcaacatcaccatgcagatcatgaggatcaagccccaccagggccagcacatcggggagatgtccttcctgcagcacaacaagtgtgaatgtcggcccaagaaggaccgggcccggcaggagaagtgtgacaagcccaggaggtag

SEQ ID NO: 67451 - DNA, 444 bp, Artificial Sequence
  derived and/or modified sequence
atgaacttcctgctgagctgggtgcactggagcctggccctgctgctctatctccaccatgccaaatggtctcaggccgcccctatggctgagggtggagggcaaaatcaccacgaggtggttaagtttatggacgtgtaccagaggtcgtactgccaccccatagaaaccctggtcgatatctttcaggaatacccggatgaaattgagtacatttttaagccctcttgcgtgcccctaatgcgctgcggcggatgttgcaacgatgaaggccttgagtgtgtccctactgaagagtctaacatcacgatgcagataatgagaatcaagccccaccaaggacagcacattggggaaatgtccttcttacaacacaataaatgtgagtgcaggcccaagaaagaccgggcgcgtcaagaaaaatgcgataagcctaggaggtag

SEQ ID NO: 67452 - DNA, 444 bp, Artificial Sequence
  derived and/or modified sequence
atgaattttttgctgtcctgggttcattggagcttggcgttactgctttatctccaccatgctaagtggtcgcaagcagctccaatggctgaggggggaggtcagaatcaccacgaggttgttaagtttatggacgtgtatcagcgttcatactgccaccccatcgagacattggtggacatatttcaggaatacccggatgaaatcgaatatatttttaaacctagctgtgtgccactcatgcgctgtggcggatgctgcaatgatgaagggcttgaatgtgtgcccactgaggagtcgaacatcactatgcagatcatgaggatcaagccccatcagggccagcatattggggaaatgtccttccttcagcataacaaatgtgagtgtcgtccaaagaaagatcgagcccgtcaggagaagtgcgacaagcccaggcggtag

SEQ ID NO: 67453 - DNA, 444 bp, Artificial Sequence
  derived and/or modified sequence
atgaatttcttgttgtcatgggtccattggtcccttgccctcctgctgtacctccaccatgctaaatggtcacaggctgcccctatggccgaagggggaggccagaaccaccatgaggtagtgaagtttatggacgtataccagcggtcgtattgtcacccgattgaaacgctagttgacatttttcaagaataccctgacgaaatagagtatatatttaaacccagctgcgtgcctctaatgcgatgtggagggtgttgcaatgacgaaggcctcgagtgtgtgcctaccgaggagtctaatattaccatgcagatcatgcgcataaaaccccaccaaggccagcacatcggagagatgtcctttcttcagcacaataagtgtgagtgcagaccgaaaaaggatagggccaggcaggaaaaatgtgacaagcctagacgttag

SEQ ID NO: 67454 - DNA, 444 bp, Artificial Sequence
  derived and/or modified sequence
atgaactttctgttgtcttgggtccactggtctttagcgctgcttctgtatctccaccatgcaaagtggtcgcaggctgcccctatggccgagggtgggggtcagaaccatcacgaggttgttaagttcatggatgtgtaccagagatcgtactgccatcctatcgaaacactggtggacatttttcaggagtaccctgatgagatcgagtacatctttaagcctagttgtgttccgttgatgaggtgcggaggatgctgtaacgatgagggactggaatgcgtacctactgaagaatccaatattactatgcaaataatgagaatcaaaccacatcagggccaacacattggcgaaatgagctttttacaacataacaagtgtgagtgcaggcctaagaaagacagggctcgccaggagaaatgtgacaagccacgacggtag

SEQ ID NO: 67455 - RNA, 444 nt, Artificial Sequence
  derived and/or modified sequence
augaauuucuuguugucauggguccauuggucccuugcccuccugcuguaccuccaccaugcuaaauggucacaggcugccccuauggccgaagggggaggccagaaccaccaugagguagugaaguuuauggacguauaccagcggucguauugucacccgauugaaacgcuaguugacauuuuucaagaauacccugacgaaauagaguauauauuuaaacccagcugcgugccucuaaugcgauguggaggguguugcaaugacgaaggccucgagugugugccuaccgaggagucuaauauuaccaugcagaucaugcgcauaaaaccccaccaaggccagcacaucggagagauguccuuucuucagcacaauaagugugagugcagaccgaaaaaggauagggccaggcaggaaaaaugugacaagccuagacguuag

SEQ ID NO: 67456 - RNA, 444 nt, Artificial Sequence
  derived and/or modified sequence
augaacuuucuguugucuuggguccacuggucuuuagcgcugcuucuguaucuccaccaugcaaaguggucgcaggcugccccuauggccgagggugggggucagaaccaucacgagguuguuaaguucauggauguguaccagagaucguacugccauccuaucgaaacacugguggacauuuuucaggaguacccugaugagaucgaguacaucuuuaagccuaguuguguuccguugaugaggugcggaggaugcuguaacgaugagggacuggaaugcguaccuacugaagaauccaauauuacuaugcaaauaaugagaaucaaaccacaucagggccaacacauuggcgaaaugagcuuuuuacaacauaacaagugugagugcaggccuaagaaagacagggcucgccaggagaaaugugacaagccacgacgguag

SEQ ID NO: 67457 - DNA, 573 bp, Artificial Sequence
  derived and/or modified sequence
atgaacttcctgctgagctgggtgcactggagcctggccctgctgctgtacctgcaccacgccaagtggagccaggccgcccccatggccgagggcggcggccagaaccaccacgaggtggtgaagttcatggacgtgtaccagcgcagctactgccaccccatcgagaccctggtggacatcttccaggagtaccccgacgagatcgagtacatcttcaagcccagctgcgtgcccctgatgcgctgcggcggctgctgcaacgacgagggcctggagtgcgtgcccaccgaggagagcaacatcaccatgcagatcatgcgcatcaagccccaccagggccagcacatcggcgagatgagcttcctgcagcacaacaagtgcgagtgccgccccaagaaggaccgcgcccgccaggagaacccctgcggcccctgcagcgagcgccgcaagcacctgttcgtgcaggacccccagacctgcaagtgcagctgcaagaacaccgacagccgctgcaaggcccgccagctggagctgaacgagcgcacctgccgcagcctgacccgcaaggac

SEQ ID NO: 67458 - DNA, 576 bp, Artificial Sequence
  derived and/or modified sequence
atgaacttcctgctgagctgggtgcactggagcctggccctgctgctgtacctgcaccacgccaagtggagccaggccgcccccatggccgagggcggcggccagaaccaccacgaggtggtgaagttcatggacgtgtaccagagaagctactgccaccccatcgagaccctggtggacatcttccaggagtaccccgacgagatcgagtacatcttcaagcccagctgcgtgcccctgatgagatgcggcggctgctgcaacgacgagggcctggagtgcgtgcccaccgaggagagcaacatcaccatgcagatcatgagaatcaagccccaccagggccagcacatcggcgagatgagcttcctgcagcacaacaagtgcgagtgcagacccaagaaggacagagccagacaggagaacccctgcggcccctgcagcgagagaagaaagcacctgttcgtgcaggacccccagacctgcaagtgcagctgcaagaacaccgacagcagatgcaaggccagacagctggagctgaacgagagaacctgcagaagcctgaccagaaaggactag

SEQ ID NO: 67459 - DNA, 576 bp, Artificial Sequence
  derived and/or modified sequence
atgaactttcttctgagttgggtacattggtccctggccctgctgctttacttacatcatgccaaatggtctcaggcggcccctatggctgagggggggggccagaaccaccatgaggtggtcaaatttatggatgtgtaccagcggagctactgtcaccctattgagacactggtggacatttttcaagagtatcccgacgagatcgaatatatcttcaaacctagttgtgtcccacttatgcggtgtggaggatgctgcaatgacgagggcctagagtgtgttcccacagaggagtcaaacattacgatgcaaattatgcggataaagccccaccaggggcaacatatcggcgaaatgtcatttctgcagcacaataaatgtgagtgcagacctaaaaaggatagggcacggcaggagaatccatgtggtccttgttcagagaggaggaagcacctttttgttcaagacccccaaacatgtaaatgcagctgtaaaaacaccgattcacggtgtaaagctaggcagttagaattgaacgagcgcacatgccggagtttaacaaggaaagattag

SEQ ID NO: 67460 - DNA, 576 bp, Artificial Sequence
  derived and/or modified sequence
atgaacttcctgctgtcctgggtgcactggagcctggccctgctgctgtacctgcaccacgccaagtggagccaggccgcccccatggccgagggcggcggccagaaccaccacgaggtggtgaagttcatggatgtgtaccagaggagctactgccaccccatcgagaccctggtggacatcttccaggagtacccagatgaaattgagtacatcttcaagcccagctgtgtgcccctgatgagatgtggcggctgctgcaatgatgagggcctggagtgtgtgcccacagaggagagcaacatcaccatgcagatcatgaggatcaagccccaccagggccagcacatcggggagatgtccttcctgcagcacaacaagtgtgaatgtcggcccaagaaggaccgggcccggcaggagaacccctgtggcccctgcagcgagaggaggaagcacctgtttgtgcaggacccccagacctgcaagtgcagctgcaagaacacagacagccgctgcaaggcccggcagctggagctgaatgaaagaacctgccgcagcctgaccaggaaggactag

SEQ ID NO: 67461 - DNA, 576 bp, Artificial Sequence
  derived and/or modified sequence
atgaacttcctgctgagctgggtgcactggagcctggccctgctgttatatctgcatcatgcgaagtggtcacaggctgcccctatggctgaagggggtggccaaaatcaccacgaggttgtgaaatttatggacgtctatcaacggtcatactgccacccgattgagacactcgtcgatatattccaggaatatcccgacgagatcgagtacatctttaagcccagctgtgttccgctcatgaggtgcggggggtgctgcaacgatgagggccttgagtgcgttcctacagaggaatctaacatcaccatgcagatcatgcgcattaagccccatcaggggcagcatataggtgaaatgagcttcctccaacacaacaagtgcgagtgtcggcctaaaaaggatagagcaaggcaggagaacccttgcggtccctgcagcgaacggaggaagcatttgttcgttcaggatcctcaaacatgtaaatgtagctgcaaaaataccgattcccggtgcaaggctcgccagttggagctgaacgaaaggacttgtaggtcgctgacccggaaggactag

SEQ ID NO: 67462 - DNA, 576 bp, Artificial Sequence
  derived and/or modified sequence
atgaatttcttgttgtcgtgggtgcactggtctctggccttactgctctatcttcaccacgccaagtggtcccaggctgcccctatggctgaaggcggtgggcaaaaccatcacgaagttgtgaaattcatggatgtgtaccagaggtcttactgccaccccattgaaacccttgtggacatattccaagaatatccagacgaaatagaatacattttcaaacccagctgcgtgccactgatgcgctgcggagggtgttgtaacgatgagggactcgagtgcgttccaacagaggagagtaatatcactatgcagatcatgagaatcaagccacatcagggccaacatatcggtgagatgagcttcttgcaacacaataagtgtgagtgtaggcccaaaaaagatagagccaggcaggagaacccatgcggaccttgctccgaaagacggaagcaccttttcgtccaggacccgcagacatgcaaatgtagttgtaagaatactgacagcagatgcaaggcaagacagctggagttgaatgagcgtacatgtagaagccttacccggaaggattag

SEQ ID NO: 67463 - DNA, 576 bp, Artificial Sequence
  derived and/or modified sequence
atgaatttcttgttgtcctgggtccattggtcactcgccttgttgctgtacttacaccacgctaagtggtcacaggccgcacctatggctgagggaggaggccagaatcatcacgaggtggtaaaattcatggatgtataccagcgcagttattgtcaccctattgagactctggtggacatcttccaagaatatcccgacgaaatcgaatacattttcaaaccaagttgcgtgccattaatgagatgcggagggtgctgcaacgatgagggcctcgagtgcgtcccgactgaagagagcaacatcaccatgcagataatgcgcatcaagccacaccaaggccagcacatcggagaaatgtcctttcttcagcataataagtgtgagtgccgaccgaagaaggatcgagcccggcaggagaacccctgtgggccatgcagtgaaagaagaaagcatttattcgtacaggacccccagacctgcaaatgctcatgtaaaaacaccgactccagatgcaaagcacggcagctagaactgaatgaaaggacctgccgttcactcaccagaaaagactag

SEQ ID NO: 67464 - DNA, 576 bp, Artificial Sequence
  derived and/or modified sequence
atgaattttttattgtcctgggtgcactggtcccttgcgcttctgctgtatctgcatcacgcaaagtggtctcaggcggcacctatggcggagggtggaggacagaaccatcatgaagtggtcaagttcatggacgtataccaacgctcctattgccatccaatcgaaacgttggttgacatattccaagaatatcccgatgagatcgaatacatattcaaacctagctgtgttccattgatgagatgcggaggatgttgtaacgatgaaggccttgaatgcgtcccaaccgaagagtctaacattaccatgcaaatcatgcgaatcaaaccacatcaaggacaacatattggggaaatgagcttccttcagcacaataaatgcgaatgtcgcccaaagaaggatcgggctcggcaggaaaacccttgcggaccatgctccgaaaggcgtaagcatctttttgttcaggatccacagacgtgcaagtgttcctgtaaaaacacagacagcagatgtaaggcaagacaactggagctgaacgaacgaacctgtcggtctctcaccagaaaggactag

SEQ ID NO: 67465 - DNA, 606 bp, Artificial Sequence
  derived and/or modified sequence
atgaactttctgctgtcttgggtgcattggagccttgccttgctgctctacctccaccatgccaagtggtcccaggctgcacccatggcagaaggaggagggcagaatcatcacgaagtggtgaagttcatggatgtctatcagcgcagctactgccatccaatcgagaccctggtggacatcttccaggagtaccctgatgagatcgagtacatcttcaagccatcctgtgtgcccctgatgcgatgcgggggctgctgcaatgacgagggcctggagtgtgtgcccactgaggagtccaacatcaccatgcagattatgcggatcaaacctcaccaaggccagcacataggagagatgagcttcctacagcacaacaaatgtgaatgcagaccaaagaaagatagagcaagacaagaaaatccctgtgggccttgctcagagcggagaaagcatttgtttgtacaagatccgcagacgtgtaaatgttcctgcaaaaacacagactcgcgttgcaaggcgaggcagcttgagttaaacgaacgtacttgcagatctctcaccaggaaagactgatacagaacgatcgatacagaaaccacgctg

SEQ ID NO: 67466 - RNA, 576 nt, Artificial Sequence
  derived and/or modified sequence
augaauuucuuguuguccuggguccauuggucacucgccuuguugcuguacuuacaccacgcuaaguggucacaggccgcaccuauggcugagggaggaggccagaaucaucacgaggugguaaaauucauggauguauaccagcgcaguuauugucacccuauugagacucugguggacaucuuccaagaauaucccgacgaaaucgaauacauuuucaaaccaaguugcgugccauuaaugagaugcggagggugcugcaacgaugagggccucgagugcgucccgacugaagagagcaacaucaccaugcagauaaugcgcaucaagccacaccaaggccagcacaucggagaaauguccuuucuucagcauaauaagugugagugccgaccgaagaaggaucgagcccggcaggagaaccccugugggccaugcagugaaagaagaaagcauuuauucguacaggacccccagaccugcaaaugcucauguaaaaacaccgacuccagaugcaaagcacggcagcuagaacugaaugaaaggaccugccguucacucaccagaaaagacuag

SEQ ID NO: 67467 - RNA, 576 nt, Artificial Sequence
  derived and/or modified sequence
augaauuuuuuauuguccugggugcacuggucccuugcgcuucugcuguaucugcaucacgcaaaguggucucaggcggcaccuauggcggaggguggaggacagaaccaucaugaaguggucaaguucauggacguauaccaacgcuccuauugccauccaaucgaaacguugguugacauauuccaagaauaucccgaugagaucgaauacauauucaaaccuagcuguguuccauugaugagaugcggaggauguuguaacgaugaaggccuugaaugcgucccaaccgaagagucuaacauuaccaugcaaaucaugcgaaucaaaccacaucaaggacaacauauuggggaaaugagcuuccuucagcacaauaaaugcgaaugucgcccaaagaaggaucgggcucggcaggaaaacccuugcggaccaugcuccgaaaggcguaagcaucuuuuuguucaggauccacagacgugcaaguguuccuguaaaaacacagacagcagauguaaggcaagacaacuggagcugaacgaacgaaccugucggucucucaccagaaaggacuag

SEQ ID NO: 67468 - DNA, 411 bp, Artificial Sequence
  derived and/or modified sequence
atgaacttcctgctgagctgggtgcactggagcctggccctgctgctgtacctgcaccacgccaagtggagccaggccgcccccatggccgagggcggcggccagaaccaccacgaggtggtgaagttcatggacgtgtaccagcgcagctactgccaccccatcgagaccctggtggacatcttccaggagtaccccgacgagatcgagtacatcttcaagcccagctgcgtgcccctgatgcgctgcggcggctgctgcaacgacgagggcctggagtgcgtgcccaccgaggagagcaacatcaccatgcagatcatgcgcatcaagccccaccagggccagcacatcggcgagatgagcttcctgcagcacaacaagtgcgagtgccgctgcgacaagccccgccgc

SEQ ID NO: 67469 - DNA, 414 bp, Artificial Sequence
  derived and/or modified sequence
atgaacttcctgctgagctgggtgcactggagcctggccctgctgctgtacctgcaccacgccaagtggagccaggccgcccccatggccgagggcggcggccagaaccaccacgaggtggtgaagttcatggacgtgtaccagagaagctactgccaccccatcgagaccctggtggacatcttccaggagtaccccgacgagatcgagtacatcttcaagcccagctgcgtgcccctgatgagatgcggcggctgctgcaacgacgagggcctggagtgcgtgcccaccgaggagagcaacatcaccatgcagatcatgagaatcaagccccaccagggccagcacatcggcgagatgagcttcctgcagcacaacaagtgcgagtgcagatgcgacaagcccagaagatag

SEQ ID NO: 67470 - DNA, 414 bp, Artificial Sequence
  derived and/or modified sequence
atgaacttcttactaagttgggttcattggtctctcgccctgttgctctacctgcaccatgccaaatggtcccaggccgccccaatggcagaggggggggggcaaaatcatcatgaggtggttaagtttatggacgtttaccaaaggtcttactgccaccctatcgaaactctagtggatattttccaagagtatccagatgagatagaatatatcttcaagccatcatgcgtgcccctgatgcggtgcggtggatgctgtaacgacgaaggcctggagtgtgtccccactgaggagtccaatataaccatgcagatcatgcgcataaagccgcaccaggggcagcatatcggcgaaatgagttttctacagcataataagtgcgagtgtaggtgtgacaagccaaggaggtag

SEQ ID NO: 67471 - DNA, 414 bp, Artificial Sequence
  derived and/or modified sequence
atgaacttcctgctgtcctgggtgcactggagcctggccctgctgctgtacctgcaccacgccaagtggagccaggccgcccccatggccgagggcggcggccagaaccaccacgaggtggtgaagttcatggatgtgtaccagaggagctactgccaccccatcgagaccctggtggacatcttccaggagtacccagatgaaattgagtacatcttcaagcccagctgtgtgcccctgatgagatgtggcggctgctgcaatgatgagggcctggagtgtgtgcccacagaggagagcaacatcaccatgcagatcatgaggatcaagccccaccagggccagcacatcggggagatgtccttcctgcagcacaacaagtgtgaatgtcgctgtgacaagcccaggaggtag

SEQ ID NO: 67472 - DNA, 414 bp, Artificial Sequence
  derived and/or modified sequence
atgaacttcctgctgagctgggtgcactggagcctggccctgctgctgtatttacaccatgccaaatggtctcaggctgccccgatggccgaaggcgggggtcaaaatcaccacgaagttgtcaaattcatggacgtctaccagcgcagctattgccatcccattgaaactctggtggacatattccaggaataccccgacgaaatcgaatacatcttcaaacccagttgtgtcccactgatgaggtgtggggggtgctgcaacgacgaggggttagaatgcgttcctacagaagaatctaatatcaccatgcagatcatgcggataaagcctcaccaaggtcaacacatcggagagatgtctttcctccagcacaataagtgcgaatgtcgctgtgataaaccacgccgctag

SEQ ID NO: 67473 - DNA, 414 bp, Artificial Sequence
  derived and/or modified sequence
atgaacttccttttgagctgggttcactggagcctagcattacttttgtacctccaccacgcaaagtggtcacaagccgctccaatggcggagggcggtggacaaaaccaccacgaagtagtgaagtttatggacgtctatcaaagaagttattgccacccaatagagactctcgtagacattttccaagagtacccagacgagatagaatacatatttaagcctagttgtgtgcccctgatgcgatgcggaggatgctgtaacgatgaggggctggaatgcgtgcccaccgaagaatcaaatatcactatgcagatcatgaggatcaagcctcaccagggccagcatatcggggagatgagtttcctccaacacaacaagtgtgaatgccggtgtgacaaaccacgccgttag

SEQ ID NO: 67474 - DNA, 414 bp, Artificial Sequence
  derived and/or modified sequence
atgaatttcctacttagttgggttcattggtccctggcgttgctgctgtatctacatcatgctaaatggtctcaggctgcacccatggccgagggtggaggacagaaccatcacgaagtcgtcaagtttatggacgtctaccagaggagttactgccatcccattgagacattagtcgatatcttccaggaatatcctgacgagatcgaatatatctttaaaccatcctgcgtcccacttatgcgctgcggcggctgttgtaacgacgagggtctcgaatgcgtacctaccgaggaatctaacattaccatgcaaattatgcgcatcaagccacatcagggccagcatatcggtgaaatgtcctttttgcaacataacaaatgcgaatgtaggtgcgacaaacctcggcgatag

SEQ ID NO: 67475 - DNA, 414 bp, Artificial Sequence
  derived and/or modified sequence
atgaatttcctacttagttgggttcattggtccctggcgttgctgctgtatctacatcatgctaaatggtctcaggctgcacccatggccgagggtggaggacagaaccatcacgaagtcgtcaagtttatggacgtctaccagaggagttactgccatcccattgagacattagtcgatatcttccaggaatatcctgacgagatcgaatatatctttaaaccatcctgcgtcccacttatgcgctgcggcggctgttgtaacgacgagggtctcgaatgcgtacctaccgaggaatctaatattactatgcagatcatgagaattaagcctcatcaaggtcagcacatcggagagatgagtttcctgcagcataacaaatgtgagtgtagatgcgacaagcccagaagatag

SEQ ID NO: 67476 - DNA, 414 bp, Artificial Sequence
  derived and/or modified sequence
atgaactttctgctgtcttgggtgcattggagccttgccttgctgctctacctccaccatgccaagtggtcccaggctgcacccatggcagaaggaggagggcagaatcatcacgaagtggtgaagttcatggatgtctatcagcgcagctactgccatccaatcgagaccctggtggacatcttccaggagtaccctgatgagatcgagtacatcttcaagccatcctgtgtgcccctgatgcgatgcgggggctgctgcaatgacgagggcctggagtgtgtgcccactgaggagtccaacatcaccatgcagattatgcggatcaaacctcaccaaggccagcacataggagagatgagcttcctacagcacaacaaatgtgaatgcagatgtgacaagccgaggcggtga

SEQ ID NO: 67477 - RNA, 414 nt, Artificial Sequence
  derived and/or modified sequence
augaauuuccuacuuaguuggguucauuggucccuggcguugcugcuguaucuacaucaugcuaaauggucucaggcugcacccauggccgaggguggaggacagaaccaucacgaagucgucaaguuuauggacgucuaccagaggaguuacugccaucccauugagacauuagucgauaucuuccaggaauauccugacgagaucgaauauaucuuuaaaccauccugcgucccacuuaugcgcugcggcggcuguuguaacgacgagggucucgaaugcguaccuaccgaggaaucuaacauuaccaugcaaauuaugcgcaucaagccacaucagggccagcauaucggugaaauguccuuuuugcaacauaacaaaugcgaauguaggugcgacaaaccucggcgauag

SEQ ID NO: 67478 - RNA, 414 nt, Artificial Sequence
  derived and/or modified sequence
augaauuuccuacuuaguuggguucauuggucccuggcguugcugcuguaucuacaucaugcuaaauggucucaggcugcacccauggccgaggguggaggacagaaccaucacgaagucgucaaguuuauggacgucuaccagaggaguuacugccaucccauugagacauuagucgauaucuuccaggaauauccugacgagaucgaauauaucuuuaaaccauccugcgucccacuuaugcgcugcggcggcuguuguaacgacgagggucucgaaugcguaccuaccgaggaaucuaauauuacuaugcagaucaugagaauuaagccucaucaaggucagcacaucggagagaugaguuuccugcagcauaacaaaugugaguguagaugcgacaagcccagaagauag

SEQ ID NO: 67479 - protein, 563 aa, Artificial Sequence
  derived and/or modified sequence
MRDPLTDCPYNKVYKNLKEFSQNGENFCKQVTSVLQQRANLEISYAKGLQKLASKLSKALQNTRKSCVSSAWAWASEGMKSTADLHQKLGKAIELEAIKPTYQVLNVQEKKRKSLDNEVEKTANLVISNWNQQIKAKKKLMVSTKKHEALFQLVESSKQSMTEKEKRKLLNKLTKSTEKLEKEDENYYQKNMAGYSTRLKWENTLENCYQVTHSICLYAFWVKRAWGKCVSDLRYQDTFLPGNLPPLWFGYDIVKRLIMRLCSVCLQSILELEKERIQLLCNNLNQYSQHISLFGQTLTTCHTQIHCAISKIDIEKDIQAVMEETAILSTENKSEFLLTDYFEEDPNSAMDKERRKSLLKPKLLRLQRDIEKASKDKEGLERMLKTYSSTSSFSDAKSQKDTAALMDENNLKLDLLEANSYKLSSMLAELEQRPQPSHPCSNSIFRWREKEHTHSYVKISRPFLMKRLENIVSKASSGGQSNPGSSTPAPGAAQLSSRLCKALYSFQARQDDELNLEKGDIVIIHEKKEGGWWFGSLNGKKGHFPAAYVEELPSNAGNTATKA

SEQ ID NO: 67480 - DNA, 1692 bp, Artificial Sequence
  derived and/or modified sequence
atgagagaccccctgacagattgcccttataataaggtctacaagaatctgaaggaattcagccagaacggagagaatttttgcaaacaggtaacatcagtgctgcagcaaagagctaatctggaaatctcctacgctaagggtctgcaaaagctggcttccaagctgtccaaggcactgcagaatacacgtaagtcatgcgtgagcagcgcgtgggcgtgggcctcagagggtatgaagtctacagcggatcttcaccagaaacttggaaaagccattgagctcgaagctatcaagcctacttatcaggttctcaatgttcaggagaaaaagcggaagtctctcgacaacgaggttgagaaaacagctaatctggttatttcgaattggaaccagcagattaaggctaagaagaaactaatggtgtccactaaaaagcacgaggctctgttccaacttgtcgaaagtagcaagcagtctatgactgaaaaggagaagcggaagttgcttaataagttaacgaagagtaccgagaagctcgagaaagaggatgagaactactatcagaagaatatggcgggatactccactcggttgaagtgggaaaacacccttgaaaactgttatcaagtaactcacagcatctgtctgtacgccttctgggtaaagcgtgcttggggaaaatgtgtcagtgacttgaggtaccaagataccttcctgcctgggaatttgccacccctctggtttggctacgacatcgtgaaaagattaatcatgcgcctgtgcagcgtttgtctccagtccatactagagttagagaaggagcgcatacaactcctgtgcaacaacttgaatcagtattcccagcatatcagtctgttcggccaaacacttaccacatgccacactcagatccattgcgctatcagtaaaattgatatcgagaaggacattcaggctgtgatggaggagaccgccatcctgagcacggagaacaaatcagaattcttgttaaccgactattttgaagaggatccgaattcggccatggacaaggaaagaaggaagtcactcctcaagccaaagctattacgtctgcagcgggatattgagaaagccagcaaagataaagaaggcctcgaaagaatgttaaagacttacagttcaactagttcattttcggacgctaagtcccagaaagacactgctgccttgatggatgaaaataatctcaaactggatctgctggaagctaactcttataagctgagcagcatgctggctgaactggaacagaggccacagccatcccatccatgctcaaacagcattttccggtggagagaaaaagaacatacacattcatatgtcaagatatctagaccctttctaatgaaacgactggagaatattgtctctaaggcaagttcaggaggccagagtaatcccgggtcatcaaccccagcacccggagccgctcagctgagttcgcggttgtgcaaagcgctgtactcattccaagcacgccaagacgacgagctcaatctcgaaaagggggatatcgtaattatccatgagaagaaggaaggagggtggtggttcgggtccttaaacggaaagaagggccatttccccgcagcatacgtagaagagcttccttccaatgccggtaacacagcaactaaagcatag

SEQ ID NO: 67481 - DNA, 1692 bp, Artificial Sequence
  derived and/or modified sequence
atgcgtgatccactgaccgattgtccgtataacaaggtgtacaaaaatctcaaggagttctcccagaacggcgagaacttttgcaaacaggtaacatccgtgctccagcagcgagcaaacctggagattagctatgcaaagggactgcaaaagctggctagcaaactgagcaaggcgctccagaacaccaggaagagttgcgtgtccagtgcttgggcctgggcctcggagggcatgaagagtacagccgatttgcaccagaaactgggaaaggccattgagctggaagccattaaaccaacctatcaggttttgaatgtgcaggagaagaagcgaaagagcttggataacgaagtggaaaagactgcaaacctggtgattagcaattggaatcaacagatcaaagccaagaagaaacttatggtgagcactaagaagcatgaggcgctattccagttagtggaaagtagcaagcagagcatgactgagaaagaaaaacggaaacttctgaacaagctcacaaaaagcactgaaaaacttgaaaaagaggatgagaactattaccaaaagaacatggccggatactcgacaaggctaaaatgggagaacaccctcgagaattgctatcaggttacccacagtatttgcctgtacgccttttgggttaaaagggcttgggggaaatgcgtgtccgatctgaggtatcaggacactttcctgcctggcaatctgccccctctatggtttggctatgatattgtgaagcggctcataatgaggctatgcagtgtctgcctgcagtcaatccttgagctcgagaaagagaggattcaactcctgtgcaacaacctgaaccagtactctcagcacatttcactgtttggtcagacattgaccacctgccacactcagattcattgtgccatatctaaaatagatatagaaaaggacattcaggcagtgatggaagagaccgccatactgagtactgaaaataagtctgagttcttgctgaccgattatttcgaggaggaccccaacagtgccatggacaaagagcgaaggaagtctcttctaaagcccaaattactgcggttgcagagggacatcgaaaaggcctccaaggacaaggaagggctcgagcgaatgctaaagacctactccagcacgtcatccttttccgacgcaaaatcgcagaaagatactgccgcccttatggatgaaaataacctcaagcttgatctcctggaagcaaactcttataaactcagcagcatgttggccgagctagaacagcggcctcaacctagtcacccttgttctaatagcattttccgatggcgagaaaaggagcatacgcattcgtacgtgaaaatatctcgtccatttctaatgaagcgcctggagaacatagtgtcaaaggcgtcctccggcggacagtctaatcctggatcatccacccccgcacccggcgcagctcagctatcgtctagactgtgcaaggccttatactcatttcaagccagacaggacgacgagttgaatctggagaaaggggatattgtcataatacacgagaagaaggaaggtggctggtggtttggatcccttaatggaaagaaaggccatttcccagcagcctacgttgaggagcttccgagcaatgccggaaacactgccactaaagcatag

SEQ ID NO: 67482 - DNA, 1692 bp, Artificial Sequence
  derived and/or modified sequence
atgagggaccccctgacagactgcccctacaacaaggtgtacaagaacctgaaggagttcagccagaatggagagaacttctgcaagcaggtgacctctgtgctgcagcagagggccaacctggagatctcctatgccaagggcctgcagaagctggccagcaagctgagcaaggccctgcagaacaccaggaagagctgtgtgagcagcgcctgggcctgggccagcgagggcatgaagagcacagctgacctgcaccagaagctgggcaaggccatcgagctggaggccatcaagcccacctaccaggtgctgaatgtgcaggagaagaagaggaagagcctggacaatgaggtggagaagacagccaacctggtgatcagcaactggaaccagcagatcaaggccaagaagaagctgatggtgtccaccaagaagcatgaggccctcttccagctggtggagagcagcaagcagagcatgacagagaaggagaagaggaagctgctgaacaagctgaccaagagcacagagaagctggagaaggaggatgagaactactaccagaagaacatggccggctacagcacccggctgaagtgggagaacaccctggagaactgctaccaggtgacccacagcatctgcctgtatgccttctgggtgaagagggcctggggcaaatgtgtgtctgacctgcgctaccaggacaccttcctgcccggcaacctgccccccctgtggtttggctatgacatcgtgaagaggctcatcatgaggctgtgcagcgtgtgcctgcagagcatcctggagctggagaaggagcgcatccagctgctgtgcaacaacctgaaccagtacagccagcacatcagcctgtttggccagaccctgaccacctgccacacccagatccactgtgccatcagcaagattgacatcgagaaggacatccaggccgtgatggaggagacagccatcctgagcacagagaacaagtctgagttcctgctgacagactactttgaggaggaccccaacagcgccatggacaaggagaggaggaagagcctgctgaagcccaagctgctgcggctgcagagggacatcgagaaggccagcaaggacaaggagggcctggagaggatgctgaagacctacagcagcaccagcagcttcagtgatgccaagagccagaaggacacagctgccctgatggatgagaacaacctgaagctggacctgctggaggccaacagctacaagctgagctccatgctggccgagctggagcagaggccccagcccagccacccctgcagcaacagcatcttccgctggagggagaaggagcacacccacagctatgtgaagatcagccggcccttcctgatgaagaggctggagaacatcgtgtccaaggccagcagcggcggccagagcaaccctggcagcagcaccccagcccctggggccgcccagctgagcagccggctgtgcaaggccctgtacagcttccaggcccggcaggatgatgagctgaacctggagaagggggacatcgtcatcatccacgagaagaaggagggcggctggtggtttggcagcctgaatggcaagaagggccacttccctgctgcctacgtggaggagctgcccagcaatgccggcaacacagccaccaaggcctag

SEQ ID NO: 67483 - DNA, 1692 bp, Artificial Sequence
  derived and/or modified sequence
atgcgggaccccctgaccgactgcccctacaacaaggtgtacaagaatcttaaggagttcagtcagaatggggagaatttctgcaagcaagtgacaagcgttctgcagcaaagggctaatctcgagatttcttatgcgaagggcctccagaagctggcttccaagctgtcaaaggcgctgcaaaacaccaggaaatcctgcgtttcttctgcttgggcttgggctagtgagggtatgaagagtaccgctgacctgcaccagaaactgggcaaagccatcgagcttgaggcaatcaagccaacctatcaggttctgaatgtgcaggaaaaaaaacgcaagagcctcgataacgaggtcgagaaaactgcgaatctcgttatcagcaattggaatcagcagattaaggctaagaagaagttgatggtgtcaaccaagaaacacgaggcactattccaactcgttgaaagctccaagcagtcaatgactgaaaaggagaaacgcaaacttcttaataaactaactaagtccaccgagaagttagaaaaggaggacgagaattactatcagaaaaacatggccggatatagcactagactgaagtgggagaacactcttgagaattgttatcaggtgactcattccatttgtctgtatgccttctgggtcaaaagggcctggggaaagtgtgtctccgacttgaggtatcaggacacctttctccctggcaacctcccacctctttggttcggctacgatattgtcaaaaggctcattatgagactgtgttcggtgtgcttacagtccatcttagaactggagaaggaacggatccagctcctttgcaacaacctgaatcagtattcacagcatatctccctcttcgggcagacactgaccacgtgccatactcaaatacattgtgcgatctccaaaatagatatcgagaaggatattcaggcggtaatggaggaaacagctattctaagcacggagaataaatcagaattcctgttaacagattacttcgaggaagaccctaactcagcaatggataaggaaaggcgtaaatccctgttgaaacccaaactgctccgtcttcagagagacatcgagaaagcctccaaggacaaggagggcctcgagaggatgctgaaaacttacagctccacatcaagtttttcagacgccaaatcacagaaagacaccgctgctctgatggacgagaataatctgaaactggatctgctggaagctaacagttacaaactttcaagtatgcttgccgagttagaacagcggcctcaaccaagtcacccctgcagcaactccatttttcgttggagggagaaggaacatacccatagctatgtgaagatctccaggccctttctgatgaaaagactggaaaatatagtaagcaaagccagttcaggcggccagtctaatcccggttcctccactccagcacccggagctgcccagctgtcaagccgtttgtgtaaggcactttacagttttcaggcaaggcaggacgacgagctcaacctggagaaaggcgacatagtaattattcacgagaagaaggagggcgggtggtggtttggctcgctaaacgggaagaagggccacttccctgctgcttatgtggaagagctgcctagtaatgctggaaacacagccaccaaggcatag

SEQ ID NO: 67484 - DNA, 1692 bp, Artificial Sequence
  derived and/or modified sequence
atgcgggaccccctgaccgactgcccctacaacaaggtgtacaagaatttgaaagaattcagtcaaaacggggagaatttttgtaagcaggtgacatcagtgctgcagcagagagctaatctggaaatttcatacgctaagggactacaaaaacttgcctccaagctcagcaaggcactgcaaaacactcgcaagtcttgcgtgagcagtgcatgggcctgggcttccgaagggatgaaatctacagccgatctgcaccagaagctgggcaaagcaattgaattggaagctattaagcccacataccaggtgctcaatgtgcaagagaagaaacgtaaaagcctagataacgaagtggaaaagactgccaacctggtcatctccaattggaaccagcagattaaggcgaaaaagaagctcatggtgagcaccaaaaaacacgaggcactattccagcttgtcgagtcctctaagcagtcaatgactgaaaaggagaaaaggaagctgttaaacaaattgacgaagtctaccgagaaattggaaaaagaagacgaaaactactatcagaagaacatggctgggtatagtacacggctcaagtgggagaacaccctggaaaattgctaccaggtcacccactccatatgcctgtacgcgttttgggtgaagagagcctggggcaagtgcgtgagcgatctcaggtaccaagatactttcctgcctggcaacctgccccccctttggttcggctacgatatcgtgaaacgcctgatcatgcgcctgtgctctgtgtgtctccaatccatacttgaacttgagaaggagaggatacagctgttgtgcaataatctaaaccaatactctcagcatatcagtctgtttgggcagacgctgacaacctgccatacgcagattcactgcgctatttctaaaatagacattgagaaggacattcaggccgtgatggaagagacagccattctcagcactgaaaataagtcagagttcctgctgacggattattttgaagaagatcccaactctgcgatggataaagagagaaggaagagcctcctgaagcctaaactcttgaggctgcagagagatatcgaaaaagcctcaaaagacaaggagggtttggaacggatgctgaaaacctattcttctacttccagcttctctgatgcaaagtcccagaaagacacagctgctctcatggacgagaataatctgaagctggatttgctagaagcaaacagctataagttatcgagtatgttggccgagcttgagcagcggcctcagcccagtcacccatgcagtaatagcatttttcggtggcgcgagaaagaacacacccatagctacgtcaaaatctcacggccgttcctaatgaagagattagaaaatattgtgagtaaggccagctccggcggccagtccaatcctggcagtagtacacctgcgccaggtgcagcacagctgagctccaggttgtgtaaagcactgtatagtttccaagcaagacaggatgacgagttgaatcttgagaagggcgacatagtcatcatacacgagaaaaaagaaggggggtggtggttcggtagcttgaacggaaagaaaggtcacttccctgcagcctatgtggaagaactgccaagtaatgccgggaacaccgctaccaaagcatag

SEQ ID NO: 67485 - DNA, 2537 bp, Artificial Sequence
  derived and/or modified sequence
acagatgcagaacccagggatatggagagccaattgtatttgtaaaacacttagaatggtgcctgacacgtgagttgctttgtctaattctagccctgtggtagctacccaagattgttgtaacctccagtgatcaagttctttggataagcaaagagggagggcattaagtgtgtggaaaagacccctcctctccactcttgttgcaaggactcaggatcctgccctctgagggtttacagaagtcattctcactatctcacactggccgtcttgacccagagcagttctttactttctcgggacacaaacgggatgaaagtccagggctgggacttcctccttggaatgtttgacaaggactgacgtactctaggccctttgaatcccggaagtccaggacacacccaaccttgattacagtgtccagaatgctggagcgtaggtgaaaggacaaaagccagacacatttcaacatgagggacccactgacagattgtccgtataataaagtatacaagaacctaaaggagttttctcaaaatggagagaatttctgcaaacaggtcacatctgttcttcagcaaagggcaaacctggaaattagctatgccaaaggacttcagaaactggcaagcaagctgagcaaagcattacagaacacgagaaaaagttgtgttagcagtgcctgggcctgggcctcagagggaatgaaatccacagcggacctgcatcaaaaacttggcaaagcaattgaattggaagcaataaaaccgacttatcaagtcctaaatgtacaagagaagaagagaaaatcacttgacaatgaagttgaaaagacagcaaatcttgtcattagcaactggaatcagcaaattaaggccaagaagaaattaatggttagtaccaagaaacatgaagcacttttccagcttgtagaaagctccaagcaatctatgactgagaaggagaagcggaagctcctcaataaactgacaaaatcaactgaaaagttggaaaaggaagatgaaaattactaccaaaaaaacatggcgggttattctaccagactgaaatgggaaaacacactagagaactgctaccaggtaacccacagcatctgcctatatgccttttgggtcaaaagagcctggggaaagtgtgtgagtgatttaagataccaagacacattccttcctggaaatctccctccactatggtttggatatgacatagtcaagaggctaatcatgagactttgttcagtctgtcttcagagcattctggagctggagaaggaaagaattcaacttttatgcaataacttaaaccagtacagccaacatatttctctttttggccaaaccctgaccacatgccacacgcagattcactgtgccatcagcaagattgacattgaaaaagatatccaggctgtaatggaagaaactgcaattttatctacagaaaacaaatctgagttcctgttaacggattactttgaagaagatcctaacagtgcaatggataaagagagacgaaagtctttactaaaaccaaaattattgagactgcagagagacattgaaaaagcctcaaaagacaaggaaggcctggaacgaatgcttaaaacgtactccagcacctcctccttctctgatgcaaagagccagaaagacacagcagcgttaatggatgagaacaatttgaaactagaccttttggaagcgaactcctacaaactgtcatcaatgttagcagaacttgagcaaagacctcaacccagccatccttgtagtaattccatcttcaggtggagggaaaaggagcatactcatagctatgtgaaaatatctcggccttttttaatgaagagattagagaatattgtgagcaaggcatcttctggtgggcagagcaatccaggttcttcaactccagcccctggtgcagcccagctcagcagcagactttgcaaggccttgtattcttttcaagccaggcaagatgatgagttgaatttggaaaagggtgacattgtgattatacacgagaaaaaagaaggaggatggtggtttggatctttgaatgggaaaaaaggccattttcctgccgcttatgtggaggagttaccttcaaatgctggcaacacagctacaaaggcataaaacaagactctgaacatactaccttcacactcggtaatcaacaatacagtgtggttcaaataagaataaagtgctcttacctttacatgtttttcttttgaaatggatggagttctacctgcatgtcacagcactttgcattcatgattattagcttgaaacagtcagaaaaaagatggatgggtggagacagacaaggaagaggctccttggttcctagaggagtttccaaattctaggagaccctagagatgatccagtataacccctggtgtcacagaaacagacggagtccaaggtgggttcagctgcttgcctgaagtcagagttatctggtagacaacagcagtgggacttagatgtcttttt

SEQ ID NO: 67486 - DNA, 2535 bp, Artificial Sequence
  derived and/or modified sequence
gcgcatgcagcccttcccaagcactggtagggcactgggcatgcagacagcccaccagaagggaagaatcaggagaaaagggatgcaagatcccagagataaactgaagcacaagagggtaaaaactttgtccttggtcttacagccagaaagtggtgatgcaaagaacttagtccaagctttgatctgttctgcactgcctgccaaagcagaaccttgagaaatacccatgtttgggggatgagaagaagaagataaatcagcaaagaaaatagtgataagaaagatgcagaacccagggatatggagagccaattgtatttgtaaaacacttagaatggtgcctgacacgtgagttgctttgtctaattctagccctgtggtagctacccaagattgttgtaacctccagtgatcaagttctttggataagcaaagagggagggcattaagtgtgtggaaaagacccctcctctccactcttgttgcaaggactcaggatcctgccctctgagggtttacagaagtcattctcactatctcacactggccgtcttgacccagagcagttctttactttctcgggacacaaacgggatgaaagtccagggctgggacttcctccttggaatgtttgacaaggactgacgtactctaggccctttgaatcccggaagtccaggacacacccaaccttgattacagtgtccagaatgctggagcgtaggtgaaaggacaaaagccagacacatttcaacatgagggacccactgacagattgtccgtataataaagtatacaagaacctaaaggagttttctcaaaatggagagaatttctgcaaacaggtcacatctgttcttcagcaaagggcaaacctggaaattagctatgccaaaggacttcagaaactggcaagcaagctgagcaaagcattacagaacacgagaaaaagttgtgttagcagtgcctgggcctgggcctcagagggaatgaaatccacagcggacctgcatcaaaaacttggcaaagcaattgaattggaagcaataaaaccgacttatcaagtcctaaatgtacaagagaagaagagaaaatcacttgacaatgaagttgaaaagacagcaaatcttgtcattagcaactggaatcagcaaattaaggccaagaagaaattaatggttagtaccaagaaacatgaagcacttttccagcttgtagaaagctccaagcaatctatgactgagaaggagaagcggaagctcctcaataaactgacaaaatcaactgaaaagttggaaaaggaagatgaaaattactaccaaaaaaacatggcgggttattctaccagactgaaatgggaaaacacactagagaactgctaccaggtaacccacagcatctgcctatatgccttttgggtcaaaagagcctggggaaagtgtgtgagtgatttaagataccaagacacattccttcctggaaatctccctccactatggtttggatatgacatagtcaagaggctaatcatgagactttgttcagtctgtcttcagagcattctggagctggagaaggaaagaattcaacttttatgcaataacttaaaccagtacagccaacatatttctctttttggccaaaccctgaccacatgccacacgcagattcactgtgccatcagcaagattgacattgaaaaagatatccaggctgtaatggaagaaactgcaattttatctacagaaaacaaatctgagttcctgttaacggattactttgaagaagatcctaacagtgcaatggataaagagagacgaaagtctttactaaaaccaaaattattgagactgcagagagacattgaaaaagcctcaaaagacaaggaaggcctggaacgaatgcttaaaacgtactccagcacctcctccttctctgatgcaaagagccagaaagacacagcagcgttaatggatgagaacaatttgaaactagaccttttggaagcgaactcctacaaactgtcatcaatgttagcagaacttgagcaaagacctcaacccagccatccttgtagtaattccatcttcaggtggagggaaaaggagcatactcatagctatgtgaaaatatctcggccttttttaatgaagagattagagaatattgtgagcaaggcatcttctggtgggcagagcaatccaggttcttcaactccagcccctggtgcagcccagctcagcagcagactttgcaaggccttgtattcttttcaagccaggcaagatgatgagttgaatttggaaaagggtgacattgtgattatacacgagaaaaaagaaggaggatggtggtttggatctttgaatgggaaaaaaggccattttcctgccgcttatgtggaggagttaccttcaaatgctggcaacacagctacaaaggcataaaacaagactctgaacatactaccttcacactcggtaatcaacaatacagtgtggttcaaataagaataaagtgctcttaccttta

SEQ ID NO: 67487 - DNA, 1692 bp, Artificial Sequence
  derived and/or modified sequence
atgcgcgaccctctgacggattgcccctataataaggtttacaaaaacctgaaggaattttcacagaatggcgaaaatttttgcaaacaggtgaccagtgttctgcagcaaagggccaacctcgagattagttatgcgaagggactgcagaaattggccagcaagctgagtaaggcactgcagaatacccggaaatcctgcgtgagtagcgcttgggcttgggcctctgagggcatgaaaagcactgccgatctgcaccaaaagctgggtaaagcaattgagctggaagcaatcaaacctacttatcaggtgctgaacgtgcaggaaaagaaacggaaatcgctcgacaacgaggtcgagaaaaccgccaatttggtaattagcaactggaaccagcagattaaggccaaaaaaaagctgatggtctccactaagaagcacgaggccctttttcagctggtcgaaagctccaagcagagcatgaccgaaaaggagaagcggaagctgttaaataagctcactaagtcaacggagaagctcgagaaggaggatgagaattactaccagaagaatatggcgggatactccacacgtctgaagtgggagaataccctggaaaattgttatcaggtgacccacagtatttgtctgtatgccttctgggtaaagcgcgcttggggcaagtgtgtcagtgatttgcgatatcaagatacctttctccccggaaacctcccacccctgtggtttggctacgacattgttaaaagattaattatgaggttgtgttccgtgtgcctacagagtatcttggaacttgaaaaagaacgtatacagctcttgtgtaacaatctcaaccaatatagccagcacattagcctgttcggtcagacattgacaacatgtcatactcaaatacactgcgcgatcagtaagatcgatatcgaaaaagacatccaggcggttatggaggaaactgccatcctgtctaccgagaacaaatcggagttcctgttgacagactactttgaggaagatccaaactctgccatggacaaagagcgacgcaagtccctgctgaaaccaaagttgctgcggcttcaaagagatatcgagaaagcctccaaagacaaagagggcttggagaggatgttgaaaacatattcttccaccagctccttcagcgacgcgaagtctcaaaaagacactgcggcactcatggatgagaacaaccttaagctcgatctgcttgaagctaactcatacaagttaagcagcatgctggccgaactggagcaacgcccacagccctcccacccatgtagcaactccatctttagatggcgcgagaaggaacatacacacagttatgtgaagattagccggccattccttatgaaaagactcgagaatatcgtaagcaaagcgtctagcggcggtcagagcaaccccggtagcagcacaccagcgcctggagcagcacagttatcttctcgactttgcaaggcactgtactccttccaagcaagacaggacgatgaattaaacctcgagaagggagacattgtgattatccatgagaaaaaagagggtggttggtggttcggcagcctcaatggcaagaaagggcatttccccgctgcatatgtagaagaactgccctccaacgcaggaaatactgctactaaggcctag

SEQ ID NO: 67488 - DNA, 1692 bp, Artificial Sequence
  derived and/or modified sequence
atgagagaccccctgacggactgcccatataataaagtttacaaaaatttgaaggaattttcgcagaatggggaaaacttttgcaagcaggtgaccagcgtgcttcagcaaagagccaacctggagatatcctatgccaaaggacttcagaagcttgcctctaaactctccaaggctctgcagaatactcgcaaaagctgtgtctcatctgcatgggcctgggcctctgagggaatgaaatcaaccgcagatctgcatcagaagctggggaaggccatcgagctggaagctatcaagccaacttaccaggtcctcaatgttcaggagaagaagcgcaagtccctcgataacgaggtcgaaaagactgctaacttagttattagtaactggaatcagcagatcaaggccaagaagaagctaatggtatccacaaaaaaacatgaggcactgttccaactggttgaaagctctaagcaatcaatgacagaaaaagaaaagagaaaattacttaataagttaacgaagagcactgagaagctggaaaaggaggatgagaactattaccagaagaatatggcgggatactccacccgacttaagtgggagaatacgctagaaaattgctaccaggttacccacagcatatgcttatatgccttttgggtcaaaagggcatggggtaaatgtgtaagcgatctgcgataccaggacaccttcttgcccggaaatttgcctcccctctggttcggatacgatatagtcaagagactcatcatgaggctgtgttccgtctgcttgcagagtatcctggaactggaaaaggagaggatccagctgctctgtaataacctcaaccagtacagtcagcacatttccctatttggccagaccctgacgacatgccacacccagatacactgcgcgattagcaaaatcgacatcgaaaaggatattcaagctgtgatggaagagaccgcgatcttatcaacagagaacaagtctgagttcctgctgactgattacttcgaagaagatcccaacagtgccatggacaaagaacggagaaaatccctgctgaagccaaagctgctccgactgcagagggacattgagaaagcctccaaagataaagagggcctggaacgtatgctgaaaacctactcaagcacaagtagcttctctgatgccaaatcccaaaaggatactgccgcacttatggacgaaaacaacctcaagctcgatctcctggaggccaattcctacaaattgagttccatgctggcagagcttgaacaaagacctcaaccatcccacccctgtagcaactctatatttcgatggcgggaaaaggaacatacccacagctacgtcaaaatctcacgccctttcctgatgaagagattagagaatatcgtgtctaaagcctcaagcgggggtcagtcgaaccccggtagcagtacccctgctcccggagccgcacagcttagcagcaggctatgcaaagccctttattctttccaggcaagacaggacgacgagctaaacctggagaagggcgacatcgtgattatccacgagaaaaaggaagggggatggtggttcggtagtctaaacgggaaaaagggtcattttccggcagcatatgtggaagaactgcctagcaacgctggcaacacagcaactaaggcttag

SEQ ID NO: 67489 - DNA, 1692 bp, Artificial Sequence
  derived and/or modified sequence
atgagagaccccctgaccgactgcccctacaacaaggtgtacaagaacctgaaggagttcagccagaacggcgagaacttctgcaagcaggtgaccagcgtgctgcagcagagagccaacctggagatcagctacgccaagggcctgcagaagctggccagcaagctgagcaaggccctgcagaacaccagaaagagctgcgtgagcagcgcctgggcctgggccagcgagggcatgaagagcaccgccgacctgcaccagaagctgggcaaggccatcgagctggaggccatcaagcccacctaccaggtgctgaacgtgcaggagaagaagagaaagagcctggacaacgaggtggagaagaccgccaacctggtgatcagcaactggaaccagcagatcaaggccaagaagaagctgatggtgagcaccaagaagcacgaggccctgttccagctggtggagagcagcaagcagagcatgaccgagaaggagaagagaaagctgctgaacaagctgaccaagagcaccgagaagctggagaaggaggacgagaactactaccagaagaacatggccggctacagcaccagactgaagtgggagaacaccctggagaactgctaccaggtgacccacagcatctgcctgtacgccttctgggtgaagagagcctggggcaagtgcgtgagcgacctgagataccaggacaccttcctgcccggcaacctgccccccctgtggttcggctacgacatcgtgaagagactgatcatgagactgtgcagcgtgtgcctgcagagcatcctggagctggagaaggagagaatccagctgctgtgcaacaacctgaaccagtacagccagcacatcagcctgttcggccagaccctgaccacctgccacacccagatccactgcgccatcagcaagatcgacatcgagaaggacatccaggccgtgatggaggagaccgccatcctgagcaccgagaacaagagcgagttcctgctgaccgactacttcgaggaggaccccaacagcgccatggacaaggagagaagaaagagcctgctgaagcccaagctgctgagactgcagagagacatcgagaaggccagcaaggacaaggagggcctggagagaatgctgaagacctacagcagcaccagcagcttcagcgacgccaagagccagaaggacaccgccgccctgatggacgagaacaacctgaagctggacctgctggaggccaacagctacaagctgagcagcatgctggccgagctggagcagagaccccagcccagccacccctgcagcaacagcatcttcagatggagagagaaggagcacacccacagctacgtgaagatcagcagacccttcctgatgaagagactggagaacatcgtgagcaaggccagcagcggcggccagagcaaccccggcagcagcacccccgcccccggcgccgcccagctgagcagcagactgtgcaaggccctgtacagcttccaggccagacaggacgacgagctgaacctggagaagggcgacatcgtgatcatccacgagaagaaggagggcggctggtggttcggcagcctgaacggcaagaagggccacttccccgccgcctacgtggaggagctgcccagcaacgccggcaacaccgccaccaaggcctag

SEQ ID NO: 67490 - protein, 1190 aa, Artificial Sequence
  derived and/or modified sequence
MKQPIMADGPRCKRRKQANPRRKNVVNYDNVVDTGSETDEEDKLHIAEDDGIANPLDQETSPASVPNHESSPHVSQALLPREEEEDEIREGGVEHPWHNNEILQASVDGPVKNANCTSDFEEYFAKRKLEERDGHAVSIEEYLQRSDTAIIYPEAPEELSRLGTPEANGQEENDLPPGTPDAFAQLLTCPYCDRGYKRLTSLKEHIKYRHEKNEENFSCPLCSYTFAYRTQLERHMVTHKPGTDQHQMLTQGAGNRKFKCTECGKAFKYKHHLKEHLRIHSGEKPYECPNCKKRFSHSGSYSSHISSKKCIGLISVNGRMRNNIKTGSSPNSVSSSPTNSAITQLRNKLENGKPLSMSEQTGLLKIKTEPLDFNDYKVLMATHGFSGTSPFMNGGLGATSPLGVHPSAQSPMQHLGVGMEAPLLGFPTMNSNLSEVQKVLQIVDNTVSRQKMDCKAEEISKLKGYHMKDPCSQPEEQGVTSPNIPPVGLPVVSHNGATKSIIDYTLEKVNEAKACLQSLTTDSRRQISNIKKEKLRTLIDLVTDDKMIENHNISTPFSCQFCKESFPGPIPLHQHERYLCKMNEEIKAVLQPHENIVPNKAGVFVDNKALLLSSVLSEKGMTSPINPYKDHMSVLKAYYAMNMEPNSDELLKISIAVGLPQEFVKEWFEQRKVYQYSNSRSPSLERSSKPLAPNSNPPTKDSLLPRSPVKPMDSITSPSIAELHNSVTNCDPPLRLTKPSHFTNIKPVEKLDHSRSNTPSPLNLSSTSSKNSHSSSYTPNSFSSEELQAEPLDLSLPKQMKEPKSIIATKNKTKASSISLDHNSVSSSSENSDEPLNLTFIKKEFSNSNNLDNKSTNPVFSMNPFSAKPLYTALPPQSAFPPATFMPPVQTSIPGLRPYPGLDQMSFLPHMAYTYPTGAATFADMQQRRKYQRKQGFQGELLDGAQDYMSGLDDMTDSDSCLSRKKIKKTESGMYACDLCDKTFQKSSSLLRHKYEHTGKRPHQCQICKKAFKHKHHLIEHSRLHSGEKPYQCDKCGKRFSHSGSYSQHMNHRYSYCKREAEEREAAEREAREKGHLEPTELLMNRAYLQSITPQGYSDSEERESMPRDGESEKEHEKEGEDGYGKLGRQDGDEEFEEEEEESENKSMDTDPETIRDEEETGDHSMDDSSEDGKMETKSDHEEDNMEDGM

SEQ ID NO: 67491 - DNA, 276 bp, Artificial Sequence
  derived and/or modified sequence
atgaagcagcccatcatggccgacggccccagatgcaagagaagaaagcaggccaaccccagaagaaagaacgtggtgaactacgacaacgtggtggacaccggcagcgagaccgacgaggaggacaagctgcacatcgccgaggacgacggcatcgccaaccccctggaccaggagaccagccccgccagcgtgcccaaccacgagagcagcccccacgtgagccaggccctgctgcccagagaggaggaggaggacgagatcagagagggctag

SEQ ID NO: 67492 - DNA, 3573 bp, Artificial Sequence
  derived and/or modified sequence
atgaagcagcccatcatggccgacggccccagatgcaagagaagaaagcaggccaaccccagaagaaagaacgtggtgaactacgacaacgtggtggacaccggcagcgagaccgacgaggaggacaagctgcacatcgccgaggacgacggcatcgccaaccccctggaccaggagaccagccccgccagcgtgcccaaccacgagagcagcccccacgtgagccaggccctgctgcccagagaggaggaggaggacgagatcagagagggcggcgtggagcacccctggcacaacaacgagatcctgcaggccagcgtggacggccccgtgaagaacgccaactgcaccagcgacttcgaggagtacttcgccaagagaaagctggaggagagagacggccacgccgtgagcatcgaggagtacctgcagagaagcgacaccgccatcatctaccccgaggcccccgaggagctgagcagactgggcacccccgaggccaacggccaggaggagaacgacctgccccccggcacccccgacgccttcgcccagctgctgacctgcccctactgcgacagaggctacaagagactgaccagcctgaaggagcacatcaagtacagacacgagaagaacgaggagaacttcagctgccccctgtgcagctacaccttcgcctacagaacccagctggagagacacatggtgacccacaagcccggcaccgaccagcaccagatgctgacccagggcgccggcaacagaaagttcaagtgcaccgagtgcggcaaggccttcaagtacaagcaccacctgaaggagcacctgagaatccacagcggcgagaagccctacgagtgccccaactgcaagaagagattcagccacagcggcagctacagcagccacatcagcagcaagaagtgcatcggcctgatcagcgtgaacggcagaatgagaaacaacatcaagaccggcagcagccccaacagcgtgagcagcagccccaccaacagcgccatcacccagctgagaaacaagctggagaacggcaagcccctgagcatgagcgagcagaccggcctgctgaagatcaagaccgagcccctggacttcaacgactacaaggtgctgatggccacccacggcttcagcggcaccagccccttcatgaacggcggcctgggcgccaccagccccctgggcgtgcaccccagcgcccagagccccatgcagcacctgggcgtgggcatggaggcccccctgctgggcttccccaccatgaacagcaacctgagcgaggtgcagaaggtgctgcagatcgtggacaacaccgtgagcagacagaagatggactgcaaggccgaggagatcagcaagctgaagggctaccacatgaaggacccctgcagccagcccgaggagcagggcgtgaccagccccaacatcccccccgtgggcctgcccgtggtgagccacaacggcgccaccaagagcatcatcgactacaccctggagaaggtgaacgaggccaaggcctgcctgcagagcctgaccaccgacagcagaagacagatcagcaacatcaagaaggagaagctgagaaccctgatcgacctggtgaccgacgacaagatgatcgagaaccacaacatcagcacccccttcagctgccagttctgcaaggagagcttccccggccccatccccctgcaccagcacgagagatacctgtgcaagatgaacgaggagatcaaggccgtgctgcagccccacgagaacatcgtgcccaacaaggccggcgtgttcgtggacaacaaggccctgctgctgagcagcgtgctgagcgagaagggcatgaccagccccatcaacccctacaaggaccacatgagcgtgctgaaggcctactacgccatgaacatggagcccaacagcgacgagctgctgaagatcagcatcgccgtgggcctgccccaggagttcgtgaaggagtggttcgagcagagaaaggtgtaccagtacagcaacagcagaagccccagcctggagagaagcagcaagcccctggcccccaacagcaacccccccaccaaggacagcctgctgcccagaagccccgtgaagcccatggacagcatcaccagccccagcatcgccgagctgcacaacagcgtgaccaactgcgacccccccctgagactgaccaagcccagccacttcaccaacatcaagcccgtggagaagctggaccacagcagaagcaacacccccagccccctgaacctgagcagcaccagcagcaagaacagccacagcagcagctacacccccaacagcttcagcagcgaggagctgcaggccgagcccctggacctgagcctgcccaagcagatgaaggagcccaagagcatcatcgccaccaagaacaagaccaaggccagcagcatcagcctggaccacaacagcgtgagcagcagcagcgagaacagcgacgagcccctgaacctgaccttcatcaagaaggagttcagcaacagcaacaacctggacaacaagagcaccaaccccgtgttcagcatgaaccccttcagcgccaagcccctgtacaccgccctgcccccccagagcgccttcccccccgccaccttcatgccccccgtgcagaccagcatccccggcctgagaccctaccccggcctggaccagatgagcttcctgccccacatggcctacacctaccccaccggcgccgccaccttcgccgacatgcagcagagaagaaagtaccagagaaagcagggcttccagggcgagctgctggacggcgcccaggactacatgagcggcctggacgacatgaccgacagcgacagctgcctgagcagaaagaagatcaagaagaccgagagcggcatgtacgcctgcgacctgtgcgacaagaccttccagaagagcagcagcctgctgagacacaagtacgagcacaccggcaagagaccccaccagtgccagatctgcaagaaggccttcaagcacaagcaccacctgatcgagcacagcagactgcacagcggcgagaagccctaccagtgcgacaagtgcggcaagagattcagccacagcggcagctacagccagcacatgaaccacagatacagctactgcaagagagaggccgaggagagagaggccgccgagagagaggccagagagaagggccacctggagcccaccgagctgctgatgaacagagcctacctgcagagcatcaccccccagggctacagcgacagcgaggagagagagagcatgcccagagacggcgagagcgagaaggagcacgagaaggagggcgaggacggctacggcaagctgggcagacaggacggcgacgaggagttcgaggaggaggaggaggagagcgagaacaagagcatggacaccgaccccgagaccatcagagacgaggaggagaccggcgaccacagcatggacgacagcagcgaggacggcaagatggagaccaagagcgaccacgaggaggacaacatggaggacggcatgtag

SEQ ID NO: 67493 - DNA, 276 bp, Artificial Sequence
  derived and/or modified sequence
atgaagcaaccgatcatggctgacgggcctaggtgtaagcgacgcaagcaagccaaccctaggcgtaaaaacgtcgtgaactatgacaacgttgttgatactgggtccgaaaccgacgaagaggacaaactgcacatcgccgaggacgacgggattgctaaccccttggatcaagaaaccagcccagctagcgttcctaatcatgagagcagcccccacgtgtcccaggcactgctgcctagagaagaagaggaggacgaaattcgggaaggatag

SEQ ID NO: 67494 - DNA, 3573 bp, Artificial Sequence
  derived and/or modified sequence
atgaagcagcccatcatggctgatggacctcgctgtaaacgaagaaaacaggccaatccccggcgcaaaaacgtcgtcaactacgataacgtcgttgatactggaagcgagaccgatgaggaagataaattacatattgccgaggacgatgggatcgccaatccgttggaccaggagacctctccggcttcagtgcctaatcatgagtcgtcaccgcacgtttctcaagctttgctgcctcgggaagaagaggaggatgagatacgagaaggcggcgtggaacatccatggcacaataacgagatcctgcaggcctctgtggacggaccagtgaaaaacgcaaattgcacgtcagatttcgaggaatactttgccaaacgcaaattggaggaacgcgatgggcacgccgttagcatcgaagaatatctacagcgctccgacactgctattatatatcccgaggcgccggaggaactatcccgtcttggcacccctgaagccaacgggcaggaagaaaacgatctcccacctggcacgcccgacgccttcgctcaattactgacatgcccatactgtgacaggggatacaagagacttacgtctcttaaggaacatataaagtacaggcatgaaaagaatgaggaaaatttctcctgcccattatgttcctatacgtttgcctataggactcagttggaacgccatatggtcactcacaagccgggaaccgaccaacaccaaatgttgactcagggggcaggcaatcgcaaattcaaatgcactgaatgcggtaaagccttcaaatataagcaccacctgaaggagcacctgcgcatacattcgggcgaaaagccttacgagtgtcctaactgtaagaagcggttttcccacagcgggtcatacagcagccatattagcagcaaaaagtgtatcggacttatctccgtgaacggacgtatgcgcaacaacattaagacggggtctagcccaaacagcgtgtcaagttcacctaccaactccgccatcacacaacttaggaataagctggaaaatggtaaaccactgtcgatgtctgagcagaccggcctcctgaagatcaaaacagagcccctagactttaatgattataaagtgctcatggcaacccacggcttcagtggcacttcaccgttcatgaatggcggtctgggcgccacttcaccactgggcgtccatcccagcgcccagagtccgatgcaacatcttggagtcggaatggaggctccacttctaggatttccgaccatgaattctaatctgtccgaggtgcaaaaagtgcttcagatcgttgacaacactgtttcccgccagaagatggactgtaaggctgaagaaattagcaaactgaaaggttaccatatgaaagacccttgtagccaacctgaggagcagggcgtgacatctccgaacattcctccagtgggattgcccgtggtcagtcacaatggggcaactaagtccattatcgattacacactggaaaaagtgaacgaagcaaaggcatgtctacaatcactcaccaccgattctcgtagacagatatcaaatattaagaaggagaaactgagaactctcatcgacttagtcaccgacgacaaaatgatagaaaaccataatatttcaactccattttcctgccaattctgtaaggaaagctttcccggcccgataccgttacatcagcacgagaggtatctgtgtaaaatgaatgaagaaataaaagctgtgctgcagcctcacgagaacatcgtgcctaataaggccggagtgtttgtcgataacaaagctctgttattatcgtccgtcctctctgagaaaggtatgacctccccgataaacccctataaggaccatatgagtgtgctgaaagcctactatgccatgaatatggaaccaaactctgacgagctgctcaaaatcagtatcgcggtggggctgcctcaagaattcgttaaggagtggtttgaacagcggaaagtgtaccaatattccaactcccggtctccgtcgctggagagatcctctaaaccactggcaccgaacagcaatcctcctacgaaagattcactgctgccacgatctcctgtcaagcctatggatagtatcacaagtccatcaatcgccgagttgcacaattccgtgacaaactgtgacccccctctgagattgactaaaccctctcactttactaacatcaagccggtggaaaagctggatcatagcaggtccaatactccgtcccccttgaatctctcaagtacatcaagcaagaatagtcattcatcctcatatacccccaattctttttccagtgaagagctgcaggctgaaccattggatctgtccttgcctaagcagatgaaggaaccaaaatcgatcatagccaccaaaaacaaaaccaaagcatctagtatcagcctggatcacaatagcgtcagttcttcttcggagaactctgacgaacctttaaatttaacattcatcaagaaggagttctccaattctaacaacctagataacaagtcgaccaaccctgtattctccatgaatccattttccgccaaacccctgtacacagcactgccgcctcagtcagctttcccacctgccaccttcatgccccctgtgcagaccagcattccaggcttaaggccctaccccgggctggatcagatgagcttcctgccccacatggcatacacataccctacgggtgccgccacttttgccgacatgcaacaaaggagaaagtatcaacggaagcagggattccagggggaactcctggatggcgcacaggactatatgagtggcctagatgatatgaccgattcagattcgtgcctcagccggaagaaaatcaagaagaccgagtcagggatgtacgcctgcgatctgtgcgacaagacatttcagaaatctagctccttactccgccacaaatacgagcacacggggaagcgcccccaccagtgccagatttgtaagaaagcatttaagcataagcaccatctgatagaacattccaggctgcactccggcgaaaagccatatcagtgtgacaagtgtggcaagcggttttctcatagtggaagctattcgcagcatatgaatcatagatactcttactgtaagcgggaggcagaggagcgggaggcagccgagcgcgaagcccgtgaaaaaggtcacttggagccaaccgaactcctgatgaatcgcgcttacctgcagtccatcacgccacagggatactcagacagtgaagaacgcgagtctatgccacgggacggggagtccgagaaggagcacgagaaggagggagaggacgggtacggcaagctcggtcgtcaagatggcgatgaggaatttgaggaagaagaggaggagagcgaaaataagtctatggatactgaccccgagaccattagagatgaagaggaaaccggagaccattccatggacgattcatctgaagacggcaaaatggagacaaaatccgaccacgaagaggacaacatggaggacgggatgtag

SEQ ID NO: 67495 - DNA, 276 bp, Artificial Sequence
  derived and/or modified sequence
atgaagcagcccatcatggctgatggcccccgctgcaagaggaggaagcaggccaaccccaggaggaagaatgtggtgaactatgacaacgtggtggacaccggcagcgagacagatgaggaggacaagctgcacatcgccgaggatgatggcatcgccaaccccctggaccaggagaccagccctgcctctgtgcccaaccacgagagcagcccccacgtgtcccaggccctgctgccccgggaggaggaggaggatgagatccgggagggctag

SEQ ID NO: 67496 - DNA, 3573 bp, Artificial Sequence
  derived and/or modified sequence
atgaagcagcccatcatggctgatggcccccgctgcaagaggaggaagcaggccaaccccaggaggaagaatgtggtgaactatgacaacgtggtggacaccggcagcgagacagatgaggaggacaagctgcacatcgccgaggatgatggcatcgccaaccccctggaccaggagaccagccctgcctctgtgcccaaccacgagagcagcccccacgtgtcccaggccctgctgccccgggaggaggaggaggatgagatccgggagggcggcgtggagcacccctggcacaacaatgagatcctgcaggcctctgtggatggccctgtgaagaatgccaactgcaccagtgactttgaggagtactttgccaagaggaagctggaggagagagatggccatgctgtgtccattgaggagtacctgcagaggagtgacacagccatcatctacccagaggcccctgaggagctgagccggctgggcaccccagaggccaacggccaggaggagaatgacctgcccccaggcaccccagatgcctttgcccagctgctgacctgcccctactgtgaccggggctacaagaggctgaccagcctgaaggagcacatcaagtacagacatgagaagaatgaggagaacttcagctgccccctgtgcagctacacctttgcctaccgcacccagctggagcggcacatggtgacccacaagccaggcacagaccagcaccagatgctgacccagggcgccggcaacaggaagttcaagtgcacagaatgtgggaaggccttcaagtacaagcaccacctgaaggagcacctgcgcatccacagcggggagaagccctatgaatgtcccaactgcaagaagcgcttcagccacagcggcagctacagcagccacatcagcagcaagaagtgcatcggcctcatctctgtgaatggaaggatgaggaacaacatcaagacaggcagcagccccaacagcgtgagcagcagccccaccaacagcgccatcacccagctgaggaacaagctggagaatggcaagcccctgtccatgtctgagcagacaggcctgctgaagatcaagacagagcccctggacttcaatgactacaaggtgctgatggccacccacggcttcagcggcaccagccccttcatgaatggaggcctgggcgccaccagccccctgggcgtgcaccccagcgcccagagccccatgcagcacctgggcgtgggcatggaggcccccctgctgggcttccccaccatgaacagcaacctgtctgaggtgcagaaggtgctgcagatcgtggacaacacagtgtcccggcagaagatggactgcaaggccgaggagatcagcaagctgaagggctaccacatgaaggacccctgcagccagcctgaggagcagggcgtgaccagccccaacatcccccctgtgggcctgcctgtggtgagccacaatggagccaccaagagcatcatcgactacaccctggagaaggtgaatgaggccaaggcctgcctgcagagcctgaccacagacagccggcggcagatcagcaacatcaagaaggagaagctgcggaccctgattgacctggtgacagatgacaagatgattgagaaccacaacatcagcacccccttcagctgccagttctgcaaggagagcttccctggccccatccccctgcaccagcacgagcgctacctgtgcaagatgaatgaggagatcaaggctgtgctgcagccccatgagaacatcgtgcccaacaaggccggcgtgtttgtggacaacaaggccctgctgctgagctctgtgctgtctgagaagggcatgaccagccccatcaacccctacaaggaccacatgtctgtgctgaaggcctactatgccatgaacatggagcccaacagtgatgagctgctgaagatcagcattgctgtgggcctgccccaggagtttgtgaaggagtggtttgagcagaggaaggtgtaccagtacagcaacagccgcagccccagcctggagaggagcagcaagcccctggcccccaacagcaacccccccaccaaggacagcctgctgcccaggagccctgtgaagcccatggacagcatcaccagccccagcattgctgagctgcacaacagcgtgaccaactgtgacccccccctgcggctgaccaagcccagccacttcaccaacatcaagcctgtggagaagctggaccacagccgcagcaacacccccagccccctgaacctgagcagcaccagcagcaagaacagccacagcagcagctacacccccaacagcttcagcagcgaggagctgcaggccgagcccctggacctgagcctgcccaagcagatgaaggagcccaagagcatcatcgccaccaagaacaagaccaaggccagcagcatcagcctggaccacaacagcgtgagcagcagcagcgagaacagtgatgagcccctgaacctgaccttcatcaagaaggagttcagcaacagcaacaacctggacaacaagagcaccaaccctgtgttctccatgaaccccttcagcgccaagcccctgtacacagccctgcccccccagagcgccttccccccagccaccttcatgcctcctgtgcagaccagcatccctggcctgcggccctacccaggcctggaccagatgtccttcctgccccacatggcctacacctaccccactggagctgccacctttgctgacatgcagcagaggaggaagtaccagaggaagcagggcttccagggcgagctgctggatggagcccaggactacatgagcggcctggatgacatgacagacagcgacagctgcctgagcaggaagaagatcaagaagacagagagcggcatgtatgcctgtgacctgtgtgacaagaccttccagaagagcagcagcctgctgcggcacaagtatgagcacacaggcaagaggccccaccagtgccagatctgcaagaaggccttcaagcacaagcaccacctgattgagcacagccggctgcacagcggggagaagccctaccagtgtgacaagtgtgggaagcgcttcagccacagcggcagctacagccagcacatgaaccaccgctacagctactgcaagcgggaggccgaggagcgggaggccgctgagcgggaggcccgggagaagggccacctggagcccacagagctgctgatgaacagagcctacctgcagagcatcaccccccagggctacagcgacagcgaggagcgggagagcatgcccagagatggagagagcgagaaggagcacgagaaggagggagaagatggctacggcaagctgggccggcaggatggagatgaggagtttgaggaggaggaggaggagagcgagaacaagtccatggacacagatcctgagaccatcagagatgaggaggagactggagaccacagcatggatgacagcagtgaagatggcaagatggagaccaagagtgaccacgaggaggacaacatggaggatggcatgtag

SEQ ID NO: 67497 - DNA, 276 bp, Artificial Sequence
  derived and/or modified sequence
atgaagcagcccatcatggccgacggcccccggtgcaagcggcggaaacaggccaatccacgtaggaagaacgtggtgaattacgataatgttgtggataccggaagcgaaaccgatgaagaggacaagctacatattgccgaggatgacggcatcgctaatccactggatcaagaaacaagcccagcatcagtgcccaaccacgagagcagcccacacgtcagccaggccctcctcccccgggaggaagaagaggacgagataagggaggggtag

SEQ ID NO: 67498 - DNA, 3573 bp, Artificial Sequence
  derived and/or modified sequence
atgaagcagcccatcatggccgacggcccccggtgcaagcggcggaaacaggcgaatcctcgacggaagaacgtagtcaattacgacaatgtggttgataccggttccgaaacagatgaggaggacaaactacacatcgccgaggacgacggaatcgctaatcctcttgatcaggaaaccagtcctgctagcgtcccaaaccatgaatcctctccacatgtttcgcaggccttgctgccccgagaggaggaggaggacgagatcagggaggggggagtagagcacccatggcacaataatgagatcctccaagcttccgtggatggccctgtgaagaacgccaactgtaccagcgattttgaagagtattttgccaaacggaagttggaggaaagggatggccacgccgtctcaattgaggagtatctgcagcgctctgacacagcgatcatatacccagaggcaccggaagaactctcacgtctcggcactcccgaggcaaacggccaagaggagaatgacctgcctcctgggacaccagatgcattcgctcaactccttacatgtccatattgcgaccgcggctataagcgcttgacttcgttgaaagaacatattaaatatagacatgagaagaacgaggaaaacttttcctgcccactttgctcttatactttcgcatatcgaacccagctggagcgccacatggtcacccataagccagggacagatcagcaccaaatgctgacacaaggagcgggaaaccgaaagttcaagtgtacggaatgcggtaaggcctttaaatacaagcatcatttaaaggaacacctgcgaatacattcaggagagaaaccttatgaatgcccgaactgtaagaagcgatttagtcacagcgggtcttattcaagccacatatccagcaaaaaatgtataggactgatctccgtgaacggcagaatgcggaataatatcaaaaccggctcatccccaaactccgtgagttcctcaccaaccaattcagcaataacacagttgagaaataaactggagaatggtaagccactgtctatgagcgagcaaaccggcctgcttaaaattaaaacagagcctctcgactttaatgattataaagtgcttatggctacacatggatttagcggaacaagcccctttatgaatggaggactcggggcaacctctcctctgggtgtacacccctctgcgcagtctccaatgcagcatctgggggtcggaatggaggcgcccctgctcggctttcctaccatgaatagcaatctctctgaggtacagaaagtgcttcagatcgtcgacaataccgtctctcggcagaaaatggactgcaaggctgaagagatctccaagctgaaggggtaccacatgaaagacccttgctctcagcctgaggagcagggagtgacctcccccaatatcccacccgtagggcttcccgtcgtgtcccataacggagccaccaagagcattattgactataccctggagaaagttaatgaggccaaagcctgcctgcaatcactcactactgacagtaggcgtcaaatttcaaatatcaagaaggaaaagctgcggacccttattgacctggtaacagatgataagatgattgagaaccataacattagcacgcccttttcttgccagttctgcaaggagtcctttcccggtcctatccctctgcaccagcacgagaggtacttatgtaagatgaatgaagagattaaggccgtcctgcaacctcatgaaaacatagtacccaataaagcgggcgtgttcgtggataacaaggcactgttactttctagtgtcctgagcgaaaaaggaatgactagtcctatcaacccatataaagatcatatgagcgtcctgaaagcctactacgcaatgaatatggagccaaatagcgacgagctgttaaaaatatccatcgcggtcggcctgccccaagagttcgtaaaagagtggtttgaacagcgtaaagtgtatcagtactccaattcaagatcaccttccttggagaggtcctcaaaaccactagcccctaacagcaatcccccgacaaaggattccctgctgccacgcagtccagttaaaccaatggattctatcacgagtccctcaattgccgaattgcacaactcagtgactaactgtgatccccctctgcgcctcactaagccgagtcatttcactaatatcaagccggtggaaaagctggatcacagcagaagtaacacgccatcaccactgaacctgagctctacatcgagtaaaaatagccacagcagttcatacaccccaaattccttcagtagcgaggaactccaagctgaacctttagatttgtctttgcccaagcagatgaaggagcccaaatcaataatcgcgactaagaataagacaaaggcctcctccatatctttagatcacaattctgtctctagtagcagcgaaaactccgacgaaccactcaacctgacctttatcaaaaaagaattctcaaactcaaataacctggataacaagagcaccaacccagtattctcaatgaatcctttctctgcgaagccactctataccgctctgcctccccagtctgccttcccgcccgccactttcatgcctcccgtgcagacaagtatcccaggcctgcggccatacccaggcttggaccagatgagttttctgccacatatggcatacacctacccaacaggggccgctacatttgctgatatgcagcagagaagaaaataccagagaaaacagggcttccaaggggagctgttggacggcgcccaggactacatgagcggcctggatgacatgaccgattctgacagctgtcttagcagaaaaaaaataaagaaaacagagagcggcatgtatgcctgcgacctgtgcgacaaaactttccagaaatcatctagcttgcttcggcataaatacgagcacacaggtaaacggccacaccagtgccagatctgtaaaaaagcctttaaacacaaacaccacctgatcgagcattcccgactgcattctggcgaaaaaccgtaccagtgtgataagtgtgggaaaaggttcagtcacagcggctcttactcacagcatatgaaccacagatactcttactgtaagagggaggctgaggagcgcgaagccgctgaacgggaggcccgcgagaagggccacctggaacccaccgaattgctcatgaaccgggcttatttacaaagcatcacaccccagggctactccgactctgaggaacgcgagagcatgccacgcgacggggagagcgagaaggaacatgaaaaggagggggaggacggatacggcaagttgggaaggcaggatggcgacgaggagttcgaagaagaggaggaagagtcagagaacaaaagtatggataccgatcctgaaaccataagggatgaagaggagacaggcgaccattctatggatgatagtagcgaggatggcaagatggagactaagagcgaccatgaagaggacaatatggaagacggtatgtag

SEQ ID NO: 67499 - DNA, 276 bp, Artificial Sequence
  derived and/or modified sequence
atgaagcaaccaatcatggcagatgggcctcggtgtaaacgaagaaaacaagcgaaccccaggagaaaaaatgtggtgaactacgataatgtagtggacacaggtagcgagactgatgaggaagataagctacacattgccgaggacgatggcattgctaaccccctggaccaggaaacatctcccgcatctgtccccaaccatgaatcttcacctcatgtcagtcaggcactgctgcccagagaggaggaggaagatgagatccgtgagggttag

SEQ ID NO: 67500 - DNA, 3573 bp, Artificial Sequence
  derived and/or modified sequence
atgaagcagcctatcatggctgacggaccacggtgcaagcgaagaaagcaggccaaccctcggcgtaagaacgttgtaaattacgacaacgtggtggacactggctctgagactgatgaggaggacaaactacatatagccgaggacgacggcattgccaacccccttgatcaggagacatccccagccagcgtacctaatcacgagtcatctcctcatgtaagtcaggccttgctgccaagggaggaggaagaggacgaaatacgcgaaggcggagtcgaacacccttggcataataatgaaatcttgcaagcctcggtcgatgggcctgtgaaaaatgccaattgtacgtcagacttcgaagagtatttcgcaaagcggaagttagaagagcgcgatgggcacgccgtctccattgaggagtacttgcagagatccgacaccgccataatctatcctgaggcacctgaggaactatccaggctcggcacccccgaagcgaatggacaggaggagaacgacttacctcccggtacgccagatgcattcgctcagctgctcacatgtccctactgtgaccggggttacaagagattgacatctctgaaggagcacatcaaatataggcacgaaaaaaatgaggaaaactttagttgccccctttgctcttacactttcgcatacagaacccaactggaaagacacatggtgactcacaaaccaggaaccgaccagcaccagatgctgacccaaggagcagggaacagaaagttcaagtgcactgagtgcggcaaggcctttaagtacaaacaccaccttaaagaacatctaagaatccacagtggagaaaagccgtatgagtgccctaactgtaaaaaaaggttttctcattctggcagttactcatcacatatctcaagtaagaaatgtatcgggctgatcagtgttaatggaagaatgagaaacaatattaagacgggctcgtccccgaatagcgtttcaagttctccaacaaatagtgctataacccagttgcgcaacaagctcgaaaacgggaaacctttatctatgtctgagcagacaggattattgaagatcaaaaccgagcctctggattttaatgactataaagtgctaatggctactcatgggtttagcgggacatctccctttatgaacggtggactgggcgcaacatcgccactaggtgtgcatccttctgctcagagccctatgcagcatctcggcgttggtatggaggctcctttgctgggttttccaacgatgaactccaatctgtcagaggtgcaaaaggtgctccagattgtggacaatactgtaagtcgccagaagatggactgcaaggctgaagagattagcaagctgaagggctatcatatgaaggacccatgcagccagccggaggaacaaggtgtcacatctccaaatatccctcccgtgggtttgcccgtagtttcccacaatggcgctaccaagtccataatcgactatacgctagaaaaggtgaacgaggccaaagcatgtctccaaagtttgaccaccgattcaaggcgccagatctcgaacattaaaaaagaaaaactgcgcactttgatcgatttagtcacagacgataagatgatcgagaaccacaatatctcgacaccattttcttgccagttctgcaaggagtcttttccagggccaatcccattgcatcaacatgagcgatacctctgcaaaatgaacgaagagattaaagccgtgcttcagccacacgaaaatatcgtgccaaacaaggcgggagtctttgtagacaacaaggctctcctgctctcctctgtcctaagcgagaaaggtatgactagtcctatcaacccatacaaagaccatatgagcgtgttgaaggcttactacgccatgaacatggaacccaatagtgatgaactgttaaaaatttccattgccgttggcctgccccaggagttcgtgaaggagtggttcgagcagcgcaaggtgtaccaatacagcaacagtcgctcaccttcacttgaaaggtcctctaagcctttggctcccaatagcaaccctcccaccaaggactctttacttccgagatcgcccgtcaaaccaatggacagcatcacttccccttctattgccgagctccataacagtgtcacaaactgtgatccacccctgaggttaaccaagccgtcccactttaccaacattaagccagtcgaaaaacttgatcacagccgatcaaacaccccaagccctctgaacctctcctctaccagctcaaagaattcgcactcctcaagttatactccaaacagcttttctagcgaagagctacaggctgagccgctggacctcagcttgccaaagcaaatgaaggagcctaaaagcattattgctaccaaaaataagaccaaggcatcttctatctccctggaccacaattccgtctccagtagctctgagaattccgacgaacctctgaacttgaccttcatcaagaaggagttctccaacagcaataacctggataacaagagcacaaacccggtcttttccatgaaccctttttccgcaaagccactgtacaccgcccttcctccgcagtcagcatttccaccggcaacattcatgcccccagtccaaacgagcattcctgggttgcgaccttatcccggtctcgatcagatgtcttttcttccccacatggcatacacctatccaaccggagccgctaccttcgcagatatgcaacaaaggcgcaaatatcagagaaaacagggcttccagggtgaactgctcgacggtgcacaggattacatgtctgggcttgatgacatgaccgattccgactcatgcttgagcaggaaaaaaatcaaaaaaacagagagtggaatgtacgcatgcgacttgtgcgacaagacgtttcagaaatccagttcacttctgcgacataaatacgaacatactggaaagaggcctcatcaatgtcagatttgtaaaaaagcatttaagcacaagcatcacctcattgaacacagccgtctgcactctggagaaaagccttatcaatgcgacaagtgtgggaagaggttctcccattcaggttcatactctcagcacatgaaccaccgctatagctactgcaaaagagaagcagaagagagagaggcagcagaacgggaagcacgcgagaaaggtcaccttgagccaacagagctcctgatgaatcgcgcttacctccagtccataaccccacagggctacagtgactcagaagagcgcgagtccatgccccgtgacggagagtctgagaaagagcacgagaaagagggtgaggacggatacgggaaactgggccgacaagacggagatgaggaattcgaggaagaagaggaagaaagtgagaacaagagcatggacaccgaccccgaaacgattagggatgaagaagagacaggggatcatagcatggacgatagttcagaagatggtaagatggaaaccaagagcgaccatgaagaagataacatggaagacggcatgtag

SEQ ID NO: 67501 - DNA, 554 bp, Artificial Sequence
  derived and/or modified sequence
gtgcttcatccaggggctgtttcgcgttgtttgtttgtttgtttcctctgggaattggggggtggggggatgagaaaagatgagaacgaaaagaaaacctcgcctcaccccaagttcccgagccgggggctgaggacttttcgaaggaaagggtccgcctagccctgagtcaagcggtcttactgtaccgccgtgtgcattccctcatacgatcgagcctgcgtgctgccgaagcagggcgccgagtccatgcgaactgccatctgatccgctcttatcaatgaagcagccgatcatggcggatggcccccggtgcaagaggcgcaaacaagccaatcccaggaggaaaaacgtggtgaactatgacaatgtagtggacacaggttctgaaacagatgaggaagacaagcttcatattgctgaggatgacggtattgccaaccctctggaccaggagacgagtccagctagtgtgcccaaccatgagtcctccccacacgtgagccaagctctgttgccaagagaggaagaggaagatgaaataagggagggtg

SEQ ID NO: 67502 - DNA, 576 bp, Artificial Sequence
  derived and/or modified sequence
gaggtggaatttcatttcttccactaaagcgtttgcggagacttcaagaaaagaaaaagaaaaaaatgtcattagaagaggcgtaacacgtcagtccgtccccaggtttgtgtttcctggagtggccgaaagagatcagttctaacctgctctgcaggaataacggtcctgcctcccgacactcttggcgaggtttttgtacagtttgctccgggagctgtttcttcgcttccacctttttctcccccacacttcgcggcttcttcatgctttttcttctcaccatttctggccaaaactacaaacaagacttcgcagatcgagcctgcgtgctgccgaagcagggcgccgagtccatgcgaactgccatctgatccgctcttatcaatgaagcagccgatcatggcggatggcccccggtgcaagaggcgcaaacaagccaatcccaggaggaaaaacgtggtgaactatgacaatgtagtggacacaggttctgaaacagatgaggaagacaagcttcatattgctgaggatgacggtattgccaaccctctggaccaggagacgagtccagct

SEQ ID NO: 67503 - DNA, 4061 bp, Artificial Sequence
  derived and/or modified sequence
agttctaacctgctctgcaggaataacggtcctgcctcccgacactcttggcgaggtttttgtacagtttgctccgggagctgtttcttcgcttccacctttttctcccccacacttcgcggcttcttcatgctttttcttctcaccatttctggccaaaactacaaacaagacttcgcagatcgagcctgcgtgctgccgaagcagggcgccgagtccatgcgaactgccatctgatccgctcttatcaatgaagcagccgatcatggcggatggcccccggtgcaagaggcgcaaacaagccaatcccaggaggaaaaacgtggtgaactatgacaatgtagtggacacaggttctgaaacagatgaggaagacaagcttcatattgctgaggatgacggtattgccaaccctctggaccaggagacgagtccagctagtgtgcccaaccatgagtcctccccacacgtgagccaagctctgttgccaagagaggaagaggaagatgaaataagggagggtggagtggaacacccctggcacaacaacgagattctacaagcctctgtagatggtccagtgaagaatgcaaattgcacatcagattttgaggaatactttgccaaaagaaaactggaggaacgcgatggtcatgcagtcagcatcgaggagtaccttcagcgcagtgacacagccattatttacccagaagcccctgaggagctgtctcgccttggcacgccagaggccaatgggcaagaagaaaatgacctgccacctggaactccagatgcttttgcccaactgctgacctgcccctactgcgaccggggctacaagcgcttgacatcactgaaggagcacatcaagtaccgccacgagaagaatgaagagaacttttcctgccctctctgtagctacacgtttgcctaccgcacccagctcgagcggcatatggtgacacacaagccagggacagatcagcaccaaatgctaacccaaggagcaggtaatcgcaagttcaaatgcacagagtgtggcaaggccttcaaatataaacaccatctgaaagaacacctgcgaattcacagtggtgaaaaaccttacgagtgcccaaactgcaagaaacgtttctcccattctggttcctacagttcgcacatcagcagcaagaaatgtattggtttaatctctgtaaatggccgaatgagaaacaatatcaagacgggttcttcccctaattctgtttcttcttctcctactaattcagccattacccagttaagaaacaagttggagaatggaaaaccacttagtatgtctgaacagacaggcttacttaaaattaaaacagaaccactagacttcaatgactataaagttcttatggctacacacgggtttagtggcactagtccctttatgaatggtgggcttggagccaccagccctttaggagttcatccatctgctcagagtccaatgcagcacttaggtgtagggatggaagcccctttacttgggtttcccaccatgaatagtaatttaagtgaggtacaaaaggttctacagattgtggacaatactgtttccaggcaaaaaatggactgcaaggctgaagaaatttcaaagttgaaaggttatcacatgaaggatccatgctctcaacctgaggaacaaggagttacttctcctaatattccgcctgtcggtcttccggtagtgagtcataatggtgccactaaaagtattattgactatacgttggaaaaagtcaatgaagccaaagcttgcctccagagcttgactactgactcaaggagacagatcagtaatataaagaaagagaagctacgtactttaatagatttggtcactgatgacaaaatgattgagaaccacaacatatccactccattttcatgccagttctgtaaagaaagttttcctggccccatccctttgcatcagcatgaacgttacctttgtaagatgaatgaagagatcaaggcggtcctgcagcctcatgaaaacatagtccccaacaaagccggagtttttgttgataataaagccctcctcttgtcatctgtactttctgagaaaggaatgacaagccccatcaacccatacaaggaccacatgtctgtactcaaagcatactatgctatgaacatggagcccaactccgatgaactgctgaaaatttccattgctgtgggccttcctcaggaatttgtgaaggaatggtttgaacaacgaaaagtctaccagtactcaaattccaggtccccatccctggaaagaagctccaagccgttagctcccaacagtaaccctcccacaaaagactctttattacccaggtctcctgtaaaacctatggactccataacatcaccatctatagcagaactccacaacagtgttacgaattgtgatcctcctctcaggctaacaaaaccttcccattttaccaatattaaaccagttgaaaaattggaccactccaggagtaatactccttctcccttaaatctttcctccacatcttctaaaaactcccacagtagttcatacactccaaacagcttctcttctgaggagctccaggctgagcctttagacttgtcattaccaaaacaaatgaaagaacccaaaagtattatagccacaaagaacaaaacaaaagctagtagcatcagtttagatcataacagtgtttcttcctcatctgaaaactcagatgagcctctgaacttgacttttatcaagaaggaattttcaaattcaaataatctggacaacaaaagcactaacccagtgttcagcatgaacccatttagtgccaaacctttatacacagctcttccacctcaaagcgcatttccccctgctactttcatgccaccagtccagaccagtattcctgggctacgaccatacccaggactggatcagatgagcttcctaccacatatggcctacacctacccaactggagcagctacttttgctgatatgcagcaaaggagaaagtaccagcggaaacaaggatttcagggagaattgcttgatggagcacaagactacatgtcaggcctagatgatatgacagactccgactcctgtctgtctcgcaaaaagatcaagaagacagagagtggcatgtatgcatgtgacttatgtgacaagacattccagaaaagcagttcccttctgcgacataaatacgaacacacaggaaaaagaccacatcagtgtcagatttgtaagaaagcgtttaaacacaagcaccaccttatcgagcactcaaggcttcactcgggcgagaagccctatcagtgtgataaatgtggcaagcgcttctcacactcgggctcgtactcgcagcacatgaatcacaggtattcctactgcaagcgggaggcggaggagcgggaagcggcggagcgcgaggcgcgcgagaaagggcacttggaacccaccgagctgctgatgaaccgggcttacttgcagagcattacccctcaggggtactctgactcggaggagagggagagtatgccgagggatggcgagagcgagaaggagcacgagaaagaaggcgaggatggctacgggaagctgggcagacaggatggcgacgaggagttcgaggaggaagaggaagaaagtgaaaataaaagtatggatacggatcccgaaacgatacgagatgaagaagagactggagatcactccatggacgatagttcggaggatgggaaaatggaaaccaaatcagaccacgaggaagacaatatggaagatggcatgtaataaactactgcattttaagcttcctatttttttttccagtagtattgttacctgcttgaaaacactgctgtgttaagctgttcatgcacgtgcctgacgcttccaggaagctgtagagagggacagaaggggcggttcagccaagacagatgtagacggagttggagctgggtattgttaaaaactgcattatgcaaaaattttgtacagtgttaaggcctaaaaactgtgtggttca

SEQ ID NO: 67504 - protein, 568 aa, Artificial Sequence
  derived and/or modified sequence
MEPCTSDEFFQALNHAEQTFKKMENYLRHKQLCDVILVAGDRRIPAHRLVLSSVSDYFAAMFTNDVREARQEEIKMEGVEPNSLWSLIQYAYTGRLELKEDNIECLLSTACLLQLSQVVEACCKFLMKQLHPSNCLGIRSFADAQGCTDLHKVAHNYTMEHFMEVIRNQEFVLLPASEIAKLLASDDMNIPNEETILNALLTWVRHDLEQRRKDLSKLLAYIRLPLLAPQFLADMENNVLFRDDIECQKLIMEAMKYHLLPERRPMLQSPRTKPRKSTVGTLFAVGGMDSTKGATSIEKYDLRTNMWTPVANMNGRRLQFGVAVLDDKLYVVGGRDGLKTLNTVECYNPKTKTWSVMPPMSTHRHGLGVAVLEGPMYAVGGHDGWSYLNTVERWDPQARQWNFVATMSTPRSTVGVAVLSGKLYAVGGRDGSSCLKSVECFDPHTNKWTLCAQMSKRRGGVGVTTWNGLLYAIGGHDAPASNLTSRLSDCVERYDPKTDMWTAVASMSISRDAVGVCLLGDKLYAVGGYDGQAYLNTVEAYDPQTNEWTQVAPLCLGRAGACVVTVKL

SEQ ID NO: 67505 - DNA, 1050 bp, Artificial Sequence
  derived and/or modified sequence
aaaaagcacccctccacagtgatggtaccccaattcttggctgacatggagaataatgtgctttttagagatgatatcgagtgccagaaactgatcatggaggctatgaaatatcatctactgcctgagcgcagacctatgttacagagcccccggaccaaaccacggaagtccaccgtgggcaccctttttgcagtggggggaatggattcaactaagggcgctacatcgatcgagaaatacgaccttcgcactaacatgtggacacctgtagcaaatatgaatggacgccgtctgcagttcggggtggctgtgttggacgacaaactttatgtagtggggggacgcgacggcctgaagacgctaaacaccgtagaatgttataatcccaagacaaagacctggagcgtcatgccaccaatgagcacccaccgccatggtctgggcgtggccgtgctcgaagggcccatgtacgccgtgggaggtcatgacgggtggtcctatctcaatacagttgagcgatgggatccccaggcgaggcagtggaacttcgtggctaccatgtccactcctcggtctactgtcggtgtcgccgttctgtccgggaaactgtacgcggttggtggacgcgatggctcatcgtgccttaaaagcgtggaatgcttcgacccacatacgaataagtggacactgtgcgctcagatgtcaaagaggcggggcggtgtcggagtcacaacttggaatggtctcctatacgcgatcggcggccatgatgcccccgctagcaaccttacgagcagattatccgactgcgtggagcgatacgacccaaaaaccgacatgtggactgcggtggctagcatgtccatatccagagacgctgtgggcgtgtgcctattgggcgacaagctgtacgcagtaggtggatacgacggacaggcttacctgaacaccgtagaggcatatgaccctcagactaacgaatggacacaggtggctcctctatgtctaggcagagcgggcgcgtgtgtggttactgtgaagctgtag

SEQ ID NO: 67506 - DNA, 6216 bp, Artificial Sequence
  derived and/or modified sequence
aagaagcatccatcaactgtaatggttccacaattcctggcagacatggaaaataatgtactttttcgggatgatatagaatgtcagaaactcattatggaagcaatgaagtaccatttattaccagagagacgacccatgttacaaagtcctcggacaaaacctaggaagtcaactgttggtacattatttgcagttgggggaatggattcaacaaaaggagcaacaagcattgaaaagtatgatctccgtacaaatatgtggactccagtagcaaatatgaatgggaggaggctacagttcggtgttgcagtgctagatgacaaactgtatgtggttggaggaagagatggactgaagactttgaatactgtagagtgctacaaccccaaaacaaaaacttggagtgtgatgccacctatgtccacacatagacatggccttggtgtggctgtactggaaggtcccatgtatgccgtaggaggacatgatggctggagctatctgaacacagtggaaagatgggaccctcaggctcgccagtggaattttgttgccactatgtctacccctaggagtacagtaggtgtggcagtactaagtggaaaactttatgcagttggtggtcgtgatggaagttcttgtctcaaatcagtagaatgttttgatcctcatactaataagtggacactgtgtgcacagatgtcaaaaaggagaggtggcgtaggagtgacgacctggaatggactgctgtatgctataggggggcacgatgctcccgcatccaacttgacttccagactctcagactgtgtggaaagatatgatcccaaaacagacatgtggactgcagtagcatccatgagcatcagcagagatgcagtgggggtctgtttacttggtgataagttatatgctgttggggggtatgatggacaggcataccttaatactgtggaggcttatgatccccagacaaatgagtggacccaggttgctccactgtgcctaggaagagctggagcttgtgttgtgactgtaaaattataatttagtgccccgttttctacatgaagacaccgtcttcctttattaatttagtataattattctatcaatggatacatttttagtaaatgtgcattgtcacaatcctgggcacaaagtgcctgatgtcaaaatgaagatagtaaaacaagggaggaagcagtggatggaccaggattaattcctttcatttcttagtaaattaaaacctgcagctggtggattgtgatcacacattcccgaagtaataagtgaggacgaatgcactgctctggaacataacccagtgctaactgggggtttcatttattcagtcaagcacatcttactcacatccagatttattttcctacagtgcaaacacaccagatgaaactttaaaatgttactttttgtaagcttatcataaatgagttgcagtaatttgtttgcttgtttgtttaaccacaaccactattttaatgatatactaaagataacactatttagttttttcagaaacatctgcattatatgtgtgttggttgtggattttgtttctaaaattggcttagtccaataaataaagaaaagcattaaggacttaaagcaacaataaccaaataaaaacttgataggatctttgaagtctatttaaatattcattccattacatctagactcaccaagaactacatgttatgatgttaagttgaagttgaaacatgatgttttgcattaaatttaagatatgcaaatttatgtagagaaaataaatgttatataccctataatctttcacctaattagtatttaattatatggatttgttttatattataaaagatgttttgattttgtcttttgatattgacaaaattgtttggatatccttatgttctcaagtctgtatctgcctcccctgccttatttcttatgttttgccacagttaacccattgtgcttctttgtaatcaaacagtttgtgggagaatgggcttattgaatgtctaaaaaataagtttaaagtgtttgttaccctaagttttttacatttttaaactctaattacatatgtgaatgttattactctcagtgaattgttattgtttgcaaaaatgcactgggcagtaacattttgtgataaatcctataagatataagtcattgagatgtctaagatgctttttattttaaccccagttaataaccaccttacggaaaataatatttgctaatattgtttattgtgaactaggaatcaaagtttttgtatgcatcaatgcacttaatccttataacaaccttatgaggtagttctattccctttttatagctaaggaaattggggtacagagaagttagccccaaggttatatattgcaagtaagtggcagagcagggattcatacaaagaccttctcactcagcagtcttcactcttactattcctgccactaggtagaaaaagaaagatttcggccgggcacagtggctcacgcctataattcccagcactttgggaggctgaggtgggcggatcacgaggtcaggagatggagaccatcctggctaacacagtgaaaccccgtctctactaaaaataaaaaataaaaaaaaattagccaggcgtggtggcgggtgcctgtacgcccagctactcgggaggctgaggcgggagaatggcgtgaacccaggaggaggagcttgcagtgtgccaagatcgcaccactgcactccagcctgggtgacagagcgagactccatcaaaaaaaaataaataaaaaaaaaataaaagatttcattttatgtgaggaattattttaataaaaaaaagagggtttatgctctatagtaataaaatttaccagtaacacccaatcagaaaattttggttccttagtatttagggaagacttttgtttaaatctcttatggaattttacatgttttgatttagaaaagtagatgcaatataatatatttcaagttttatacatattagatgaattgcatggtattttaggcaacttaactataaacaaatttattcatagaagcattgttgccaacaatttagatgacctcgatgaaaaaacacaccaattgacaaaactggctcaaaaggaaataaaaaatccaaacagacctgtaacaagtaaagagattgaaccagtaatcaaaaatctcccaacaaagaaagtccaggactaaatgagtttactggcaaactatgccaaacatataaagaagaattaacactaatccttctcgaactctcccaaaaaatggaagagaaaggagcaccctgtgacattctataaggcggacattaccttaacaccaaagccagacaaagacctcacagggaagctacagaccaatatcccttatgaatatagatgcaaaaaaacttcaaaatactagcaggccaaatccagcagcttattaaaatgatcacacagcatgaccaagtgagatttatcaaagaaatgcagggatggttctacatacaaatgtcaatcgatgtaataatataccatattaatagaatgaaggggaaaaaacagcatgatcacctcaattgataagaaaaagcatttgacaaaaatccaacaccctttcatggtaaaaacactctgcaaactaggaagaaaagggaactttcttaacctgataaagacatccataaaaacccacagctaacaacataatagcaaaacattgaaaatttttcccctaatatcatgaaaattcctgatttccccactgctattcaacattatactagaaggtctagccagagcaattaggcaagaaaaagaaataaaatgaatcccaaataggaagaagtaaaactacatttgcagaaaacatggtcctatatattaaaaatcctaaagaatccacaaaatgattccggctgattttaaaaattcagcaatgttgcaggttgcaagatcaacacacaaaagtctaagaaaaacctgaggggaaattaaaacaatttcatttacaataacatgaaaaagaataaaatacttagaaataaatttgaccaagaaagtgcaagacttggacactgaaaagtacaaaacgttgctgaaagaaattaaagaagacctaaataaatggaagacatcctgtgctggcaggttggaagacttaacattgttaagatggcattactcccaaaattagtctatagatttaatacaatccccattaaaattccagtgacccttttacagaaactgaaaagctgaccctagaatttatatgggattgcaagttactgaaggtactcaagtctgttcaaaacaatcttgaacaagaataaagttgaaggactcacattttccaatttcaaaatttactgcaaagctacttcaatcaaaacagtgttgtgctggtataaaaatatataaagcaatagagtagaatggaaagtccagaaacaaattacgccaatacactatggtcaattgatttttgacaagggttccaggaccattcaatgaagaaagaacagtgtcttcaactaatagtgctaagacaagtgaatattcacatgcaaaagaatgaatttgtacctgtacttcataccatatataaaaattaattcaaaatagatcaaagacctaaatgtaagagctaaaaccataaaactttgagaagaaaatacaggaataaatcttcatgaccttggatttggcaatggtttcttagatatggcaccaaaagcacaagcaacaacagcaaaaaaaaaaaaaaaaaaaaaaaatcaaaattaaaagcttctacatatcaagggacactatgaagaaagtgaaaagacaacccacagaatgggagaaaatatttgtaaatcttacatatctggtaaggaactaatacctagaatatataaggaactccgatgctcgacaacaaaaagacaaaccaattttaaaatgggcaaaggacttaaatagacatttctctaatgaagatatacaaatggccgacaagcacatggaaagcactcaacctcatcagtcattatgcaaatcagcgccacaagaagataccacttcacacctattagaatgacgaaatagacctaggatctaaacctacaggaaaaaaaatgaataatagagaaaataaatgttagagaggatgtggagaaattgaaaaccttcattcgttgttggtgggaatgttaaatggtgtagccactgtggaaaacagtttggcagttcctcaataagttaaaaaaaagaattaccatatgacccagcaagtccactcctgggcatatactgaaaagaactgaaaacaggtgttcaagcaaaaactttcacgcaaatattcattgcagcactagtcacagtagccaaaaaagaggaaacaacccaaatggccatcagctgatgaatgaataaacaaattgtggtatctccacacggcacaatagaatattcagccataaagagaaatgagggactgatacatgctaaagcatggatgagccttgagcgcatttttgccaagtgaaagaaggcagacacaaaaggcaacgtattgcatgagtgcatttatatgaaatatccaaaataggcaaatccatggagacagaaagcagataaatggttgtaagaagctgagagaaaggagtggggagagattgctaaaaaggagtttccttctagggtgatgaaaatgttctggaactacttattggggatgattgcacaacatggtgaaggtactcaatgtcactaatggtaaatttcacatacactttaccataatttttaaaaagctttattagctacattatgttatgatacttaaatgtcataacaatagcattctgtacgcttcactaggataaaaacttcggatttatatgcatctggaagagaaatttttcactgtaatttgcaaataaatgaatttctaaaaatctaacagaaaggctcttaaatcttaatttcaacctaagaagggagtgagaaacaacgagaaccatgaggggagagttaacggggaacttccccaccgtccggtacatggcaggcattccacaaatgttttctgaaagttgaaatagacatcttttcatgaactctgtaatatttgaaattattgataactcttacacaaaaacaaatattcaataaaatgatatttaatttcactgtg

SEQ ID NO: 67507 - DNA, 1050 bp, Artificial Sequence
  derived and/or modified sequence
aagaagcaccccagcacagtgatggtgccccagttcctggccgacatggagaacaacgtgctcttcagagatgacatcgagtgccagaagctgatcatggaggccatgaagtaccacctgctgcctgagcggcggcccatgctgcagagccccaggaccaagcccaggaagagcacagtgggcaccctgtttgctgtgggcggcatggacagcaccaagggggccaccagcattgagaagtatgacctgcggaccaacatgtggacccctgtggccaacatgaatggaagaaggctgcagtttggagtggccgtgctggatgacaagctgtatgtggtgggcggcagagatggcctgaagaccctgaacacagtggagtgctacaaccccaagaccaagacctggagcgtgatgccacccatgagcacccaccgccacggcctgggcgtggccgtgctggagggccccatgtatgctgtgggcggccatgatggctggagctacctgaacacagtggagcgctgggacccccaggcccggcagtggaactttgtggccaccatgagcacccccaggagcacagtgggcgtggccgtgctgagcggcaagctgtatgctgtgggcggcagagatggcagcagctgcctgaagtctgtggagtgctttgacccccacaccaacaagtggaccctgtgtgcccagatgagcaagaggcggggcggcgtgggcgtgaccacctggaatggcctgctgtatgccatcggcggccatgatgccccagccagcaacctgaccagccggctgagtgactgtgtggagagatatgaccccaagacagacatgtggacagctgtggcctccatgagcatcagcagagatgctgtgggcgtgtgcctgctgggggacaagctgtatgctgtgggcggctatgatggccaggcctacctgaacacagtggaggcctatgacccccagaccaatgagtggacccaggtggcccccctgtgcctgggccgggccggggcctgtgtggtgacagtgaagctgtag

SEQ ID NO: 67508 - DNA, 1050 bp, Artificial Sequence
  derived and/or modified sequence
aagaagcaccccagcaccgtgatggtgccccagttcctggccgacatggagaacaacgtgctgttcagagatgatattgagtgccagaaactgataatggaggccatgaaatatcatctgctgcccgaacgacgacctatgctgcagagccctagaacgaagccacgcaagtctaccgtggggaccctgttcgcagtgggcgggatggacagcacaaaaggcgcgacgtccatcgagaaatacgacttgcgtactaacatgtggaccccggtggcaaacatgaatgggcggaggcttcagttcggggtggcagttctcgatgacaaattgtatgtggtgggcggtagggatgggttgaagacattaaacacagtggaatgttacaaccctaagactaaaacatggtcagtcatgccgcccatgtccacgcacaggcacggtctgggcgtggcagttcttgaaggtcctatgtatgcggtggggggtcacgatggctggtcgtacttgaatacagtagaaagatgggatccccaagccagacaatggaactttgtggcaacaatgtccaccccacgcagcactgttggtgtagcggtactgtctggcaagctgtatgctgtcggaggccgggatggtagcagctgcctaaagtctgtggagtgttttgatccccatactaacaaatggactctctgtgctcaaatgagtaaaagacgggggggagtgggggttactacatggaatggcctgctatacgctatagggggccatgacgcacctgcctctaatttgacttcccggctgagtgattgtgtggagcggtacgatcctaaaacggatatgtggacagctgtcgcctcaatgtccatctcccgagacgctgtgggtgtttgtcttttgggtgataagctgtatgctgtcggtggctatgatggccaggcctacttgaacacagtagaggcgtatgacccccagaccaacgagtggacccaagtggctcctctctgcttaggtcgggccggcgcctgcgttgtcactgttaagctgtag

SEQ ID NO: 67509 - DNA, 1050 bp, Artificial Sequence
  derived and/or modified sequence
aaaaagcatccaagtaccgtgatggtgcctcagttcctggcagatatggagaataatgttctgttcagggatgacattgagtgtcagaagttaattatggaggctatgaagtatcacctgctccccgagaggaggccaatgctccagagtccccgaacgaaaccacgcaagagcaccgtcggtactttgtttgcagtgggcggaatggactcaaccaaaggcgcaacctctattgaaaaatatgatctgagaacaaacatgtggacacccgtggcgaatatgaatgggaggaggttgcagtttggtgttgccgtgcttgacgacaagttgtacgtggttgggggacgagacggactgaagaccctcaacactgttgagtgctacaatcctaaaaccaaaacatggtccgtaatgccgccaatgagcacgcacagacacgggctgggggtggctgtactggagggaccaatgtatgccgttgggggtcacgatgggtggtcgtaccttaataccgtggaaaggtgggaccctcaggcccgtcagtggaattttgtggcaaccatgtcaactcctagatcgacagtcggggtggccgtcctatctggtaagctttacgccgttggtggtcgcgacggcagcagctgtctaaaaagtgtagaatgtttcgacccacacacaaacaaatggactctctgcgcccaaatgtccaaacgacgagggggagtgggagttactacatggaatggccttctctacgctatcggtggtcatgacgctccagcatctaatctcacctcgagactcagcgattgtgtggaacgctacgatccaaaaaccgacatgtggactgcagtggcctcgatgagcatcagcagagacgccgtcggagtgtgtctgttgggcgacaagctctacgctgtaggcggatacgatggacaggcctatttaaacaccgtggaggcgtatgatccacagaccaacgagtggacgcaggtggcgcctctgtgtctgggccgagccggtgcatgcgtggtcaccgtaaaattgtag

SEQ ID NO: 67510 - DNA, 1050 bp, Artificial Sequence
  derived and/or modified sequence
aagaagcaccccagcaccgtgatggtgccccagttcctggccgacatggagaacaacgtgctgttcagagacgacatcgagtgccagaagctgatcatggaggccatgaagtaccacctgctgcccgagagaagacccatgctgcagagccccagaaccaagcccagaaagagcaccgtgggcaccctgttcgccgtgggcggcatggacagcaccaagggcgccaccagcatcgagaagtacgacctgagaaccaacatgtggacccccgtggccaacatgaacggcagaagactgcagttcggcgtggccgtgctggacgacaagctgtacgtggtgggcggcagagacggcctgaagaccctgaacaccgtggagtgctacaaccccaagaccaagacctggagcgtgatgccccccatgagcacccacagacacggcctgggcgtggccgtgctggagggccccatgtacgccgtgggcggccacgacggctggagctacctgaacaccgtggagagatgggacccccaggccagacagtggaacttcgtggccaccatgagcacccccagaagcaccgtgggcgtggccgtgctgagcggcaagctgtacgccgtgggcggcagagacggcagcagctgcctgaagagcgtggagtgcttcgacccccacaccaacaagtggaccctgtgcgcccagatgagcaagagaagaggcggcgtgggcgtgaccacctggaacggcctgctgtacgccatcggcggccacgacgcccccgccagcaacctgaccagcagactgagcgactgcgtggagagatacgaccccaagaccgacatgtggaccgccgtggccagcatgagcatcagcagagacgccgtgggcgtgtgcctgctgggcgacaagctgtacgccgtgggcggctacgacggccaggcctacctgaacaccgtggaggcctacgacccccagaccaacgagtggacccaggtggcccccctgtgcctgggcagagccggcgcctgcgtggtgaccgtgaagctgtag

SEQ ID NO: 67511 - protein, 334 aa, Artificial Sequence
  derived and/or modified sequence
MNRSLLVGCMQSKDIWGREESICERLKQDGLDVERAESWELGHMVLFPVWFLYSLLMKLFQRSTPAITLESPDIKYPLRLIDREIISHDTRRFRFALPSPQHILGLPVGQHIYLSARIDGNLVVRPYTPISSDDDKGFVDLVIKVYFKDTHPKFPAGGKMSQYLESMQIGDTIEFRGPSGLLVYQGKGKFAIRPDKKSNPIIRTVKSVGMIAGGTGITPMLQVIRAIMKDPDDHTVCHLLFANQTEKDILLRPELEELRNKHSARFKLWYTLDRAPEAWDYGQGFVNEEMIRDHLPPPEEEPLVLMCGPPPMIQYACLPNLDHVGHPTERCFVF

SEQ ID NO: 67512 - protein, 278 aa, Artificial Sequence
  derived and/or modified sequence
MKLFQRSTPAITLESPDIKYPLRLIDREIISHDTRRFRFALPSPQHILGLPVGQHIYLSARIDGNLVVRPYTPISSDDDKGFVDLVIKVYFKDTHPKFPAGGKMSQYLESMQIGDTIEFRGPSGLLVYQGKGKFAIRPDKKSNPIIRTVKSVGMIAGGTGITPMLQVIRAIMKDPDDHTVCHLLFANQTEKDILLRPELEELRNKHSARFKLWYTLDRAPEAWDYGQGFVNEEMIRDHLPPPEEEPLVLMCGPPPMIQYACLPNLDHVGHPTERCFVF

SEQ ID NO: 67513 - protein, 147 aa, Artificial Sequence
  derived and/or modified sequence
MKLFQRSTPAITLESPDIKYPLRLIDREIISHDTRRFRFALPSPQHILGLPVGQHIYLSARIDGNLVVRPYTPISSDDDKGFVDLVIKVYFKDTHPKFPAGGKMSQYLESMQIGDTIEFRGPSGLLVYQGKGKFAIRPDKKSNPIIR

SEQ ID NO: 67514 - DNA, 1005 bp, Artificial Sequence
  derived and/or modified sequence
atgaacagatccctccttgtaggatgcatgcagagcaaagacatctggggcagggaggagtctatctgtgagaggctgaaacaggacgggctggacgtggaacgagccgaatcctgggagcttggacatatggtgctctttccggtgtggttcctgtatagtctcctgatgaagctgttccagcggtcaacacccgctatcaccttggagagcccagacatcaagtaccctttacgactcatcgatcgggagataatcagccacgacacccggcggttccggttcgccctgccctcaccacagcacatcctgggcctgccggttgggcagcatatctatctgagtgcccgcatcgacggtaatctggttgtgcgtccatataccccaatttcatccgacgacgataagggcttcgtggacctcgttataaaggtatattttaaggacactcacccaaagtttcccgcaggcggaaaaatgagccaatatctcgaaagcatgcagatcggtgacacaatcgaatttcgtggacctagcgggctgctcgtctatcagggaaagggcaaattcgctatcagaccagacaaaaaatcaaacccaatcatccggaccgtgaagtccgtcggcatgatagcaggtggcacaggcatcactccaatgctgcaggtgatcagagctatcatgaaggaccctgacgaccataccgtgtgtcacctgttgttcgctaatcaaacagaaaaagatatcctcttgcgtcctgagcttgaagaactgcgaaataagcacagcgcacgatttaagctctggtacacactagaccgggctcccgaagcctgggattatgggcagggcttcgtaaacgaggagatgattcgagatcacctcccaccgccagaggaggagccgctggtactgatgtgcggaccgccgccaatgattcagtatgcatgcctgcctaacctggaccacgtcgggcaccctacagagaggtgttttgtattctag

SEQ ID NO: 67515 - DNA, 1005 bp, Artificial Sequence
  derived and/or modified sequence
atgaacagaagcctgctggtgggctgcatgcagagcaaggacatctggggccgggaggagagcatctgtgagcggctgaagcaggacggcctggatgtggagcgggcagagagctgggagctgggccacatggtgctcttccctgtgtggttcctgtacagcctgctgatgaagctgttccagaggagcaccccagccatcaccctggagagcccagacatcaagtaccccctgcggctgattgaccgggagatcatcagccatgacacccggcgcttccgctttgccctgcccagcccccagcacatcctgggcctgcctgtgggccagcacatctacctgagcgccagaattgatggcaacctggtggtgcggccctacacccccatcagcagtgatgatgacaagggctttgtggacctggtgatcaaggtgtacttcaaggacacccaccccaagtttcctgctgggggcaagatgagccagtacctggagagcatgcagattggagacaccatcgagttccggggccccagcggcctgctggtgtaccagggcaagggcaagtttgccatccggccagacaagaagagcaaccccatcatcagaacagtgaagtctgtgggcatgattgctgggggcaccggcatcacccccatgctgcaggtgatccgggccatcatgaaggaccctgatgaccacacagtgtgccacctgctgtttgccaaccagacagagaaggacatcctgctgcggcctgagctggaggagctgaggaacaagcacagcgcccgcttcaagctgtggtacaccctggaccgggcccctgaggcctgggactatggccagggctttgtgaatgaggagatgatccgggaccacctgcccccacctgaggaggagcccctggtgctgatgtgtggccccccacccatgatccagtatgcctgcctgcccaacctggaccacgtgggccaccccacagagcgctgctttgtgttctag

SEQ ID NO: 67516 - DNA, 1005 bp, Artificial Sequence
  derived and/or modified sequence
atgaaccggagcctgctggtgggctgcatgcagagcaaggacatctgggggcgagaggagtcgatctgtgaaaggctcaaacaggacggactggacgtcgagcgagccgaaagctgggaactggggcacatggtgctcttcccggtgtggttcctgtattccctgcttatgaaactgtttcagagatctacccctgcgattaccctggaatctcctgacatcaagtaccccctgagactaatcgatcgggagattataagccatgataccaggaggtttaggttcgctttgccttcacctcagcacatactgggcttaccggtcggccagcatatttacctctcagcccgtattgacggtaatctagtcgtacgcccgtacactcctattagcagcgatgacgacaagggcttcgtggacctggtgatcaaggtgtattttaaagacacccatccaaagttcccggcgggcggtaaaatgagtcagtatcttgagagcatgcaaattggagatactattgagttcagaggcccatccggcctgcttgtttatcaggggaaaggaaaatttgccatcagaccagacaagaagagtaacccgatcatcagaaccgtaaagagtgtcggaatgatcgctgggggcacagggattacccccatgctgcaagtcattcgcgccatcatgaaggaccctgacgaccataccgtgtgtcatctgctgttcgccaaccaaacagaaaaggacatcctgctcagacccgagctcgaagagttacgaaacaagcactctgcgcgattcaagctgtggtacactttggatagagcaccggaggcctgggactatggtcaggggttcgtaaacgaagaaatgatacgtgaccaccttcctccacctgaagaggagcctctggtgttaatgtgtgggcctcctcctatgatccagtacgcctgccttcctaaccttgatcatgtgggacatccgaccgagcggtgtttcgttttctag

SEQ ID NO: 67517 - DNA, 1005 bp, Artificial Sequence
  derived and/or modified sequence
atgaacagaagtttgctggtgggatgcatgcagtcaaaagatatctgggggcgtgaagagtccatttgcgagcggttgaagcaagacggcctggatgtggagagggccgaatcctgggagctgggccacatggttctgtttccagtctggttcctgtactcactcctcatgaaactgttccagcggagcacacctgctattacgctcgagagtcccgacattaagtatccattgcggttaatagatagggagataatctctcacgacacaagaagatttcgattcgcattgccgtcaccccaacacattctgggccttccagtggggcaacacatctacctcagcgccaggatcgatgggaatttagtggtaagaccatataccccaatctcatccgacgatgacaaaggcttcgtcgatctggtaattaaagtgtactttaaggatacacacccaaaatttcctgccggaggaaaaatgagtcaatatttagaaagtatgcagataggcgacaccattgagtttaggggaccaagcggcctcctcgtgtatcagggtaagggcaagtttgccatccggccagacaaaaagagcaatccaattatccggaccgttaaatctgtgggcatgattgccggtggcacaggcatcaccccgatgctgcaggtgattagagcaatcatgaaggatccagacgaccacacagtgtgtcatctgcttttcgccaaccagactgaaaaagatatcctcctcagaccagagctggaggagctcagaaacaagcatagcgcccgtttcaagctgtggtacacacttgatcgggcaccggaagcctgggactatggccaaggttttgtgaatgaggagatgataagggaccatctcccccctcctgaggaggaacccctcgtattgatgtgcggcccaccaccaatgatacagtacgcctgcctacctaaccttgaccatgttggccaccctactgaaagatgttttgtgttttag

SEQ ID NO: 67518 - DNA, 2938 bp, Artificial Sequence
  derived and/or modified sequence
atgaataggagtttgctggttggatgcatgcagagcaaggacatttggggcagagaggagagcatatgcgaacgcctgaagcaagatgggcttgatgttgaaagagcagagagctgggagttgggccatatggtgctcttcccagtctggttcctgtacagtctgctcatgaagctgttccagcgctccacgccagccatcaccctcgagagcccggacatcaagtacccgctgcggctcatcgaccgggagatcatcagccatgacacccggcgcttccgctttgccctgccgtcaccccagcacatcctgggcctccctgtcggccagcacatctacctctcggctcgaattgatggaaacctggtcgtccggccctatacacccatctccagcgatgatgacaagggcttcgtggacctggtcatcaaggtttacttcaaggacacccatcccaagtttcccgctggagggaagatgtctcagtacctggagagcatgcagattggagacaccattgagttccggggccccagtgggctgctggtctaccagggcaaagggaagttcgccatccgacctgacaaaaagtccaaccctatcatcaggacagtgaagtctgtgggcatgatcgcgggagggacaggcatcaccccgatgctgcaggtgatccgcgccatcatgaaggaccctgatgaccacactgtgtgccacctgctctttgccaaccagaccgagaaggacatcctgctgcgacctgagctggaggaactcaggaacaaacattctgcacgcttcaagctctggtacacgctggacagagcccctgaagcctgggactacggccagggcttcgtgaatgaggagatgatccgggaccaccttccacccccagaggaggagccgctggtgctgatgtgtggccccccacccatgatccagtacgcctgccttcccaacctggaccacgtgggccaccccacggagcgctgcttcgtcttctgagggccgggcacggtcacacggccacccgccccgcgcaccccacgccctgttcacgctcacccagtcacctccccacatcgcacactggggccccgggttcagcctggcctgcccgtgccctggtgaatcacctggctgagcagttcccctggagccccttcgggagcagggctgtgtcccagatgggccacggctgagccttcagagtacgtcctgcctggcacttactggtccttaccagagacgcccagccccatccctgtcctcatgacccctcgtccaccccccacacacactataaggctgagggctgccagcagccccgtctgcccaccattcccggccgtggaccatagtcgggatgtcagcagacacacatgggcagcccaaagctgcaggtgccagggcccaccccagcctcgcctgtcacccccactcccgcctcagggccaggcccaggcctcaccacctgacgctgcatgagacattgacaccagaaagccctcttgggggcactgctccctaccccagggccctggccagccgggagcttggctctcctctggctagagtgggaagagggggctggccatggggccctcccagaacctcagcatttccttccagcccatccaaacactgaggcagccttggggaaccccgagctggggggttggcagcccactgcaccgcctcagggttttggggtcctgggctggggccaccatccctgatggcagaactcccacaaccacatgtatttattcctctgtcctaaaccgtcccctccttccctcacccccagcacagggggattctgagcagtgcctcttgtctgagggacatatcagtgacctcgacgttgcctttagactacagttgtgttagcctcttgcgtattggctttttcagagtcatttatgagcagaaaaaaaaaaagtaaaactttgctaatattaacccttctctagctcctcgagggtctgtgacctgcaacacaaggggtggggtcaggaaagggctggggaagacctagcattttttttttcttttttttttttttttgagacggagtctccctttgtcacccaggctggagtggcatgatctcagctcactacaacctccacctctcgggttcaagcgattctcctgcctcagcctcccgagtagctgggactaaaagtgcccaccaccacacccagctagtttttgtatttttttttttttttttttgagacggagtctcgctctgtcgcccaggctggagtgcagtggcgggatctcggctcactgcaagctccgcctcccgggttcacgccattctcctgcctcagcctcccaagtagctgggactacaggcgcccgccactacgcccggctaattttttgtatttttagtagagacggggtttcaccgttttagccgggatggtctcgatctcctgacctcgtgatccgcccgcctcggcctcccaaagtgctgggattacaggcgtgagccactgcgcccggctccagcatttatttctgatgtatctttgtggtagaaaatttggaaagtgcagagaagtatacacaggaagaaaaattcccaacccccagaggcaaaccagctgaaaccacgcaaccccagtcaccccaatgcaccgcgaggctgctgcctcctgtcagggtcagatgagcctcgaggctcaggaaagtcagaggatgccatctgcatggtggtaaattacagaggtgatgaggcaaggtgggtgtggggctgttcttaaaacggggcagcaggaaggccccaaggagatggatttgggctgggacgggaagagagagctggccatgctggggtgggtgggtgttcaaatggtggaaacagcagacgcaaaggccctgccgttggaaccagcttgtggaataaactttcagaaacaga

SEQ ID NO: 67519 - DNA, 1050 bp, Artificial Sequence
  derived and/or modified sequence
tctgccatcctgaactgtggttcccctgcctcccagcccggctgtgagtgctcagcgaccctgacaggctgacaggaccaggagggaggtgccgctcagattctggcaggaccgctggcgggcaggcaggggacagttgggccatatggtgctcttcccagtctggttcctgtacagtctgctcatgaagctgttccagcgctccacgccagccatcaccctcgagagcccggacatcaagtacccgctgcggctcatcgaccgggagatcatcagccatgacacccggcgcttccgctttgccctgccgtcaccccagcacatcctgggcctccctgtcggccagcacatctacctctcggctcgaattgatggaaacctggtcgtccggccctatacacccatctccagcgatgatgacaagggcttcgtggacctggtcatcaaggtttacttcaaggacacccatcccaagtttcccgctggagggaagatgtctcagtacctggagagcatgcagattggagacaccattgagttccggggccccagtgggctgctggtctaccagggcaaagggaagttcgccatccgacctgacaaaaagtccaaccctatcatcaggacagtgaagtctgtgggcatgatcgcgggagggacaggcatcaccccgatgctgcaggtgatccgcgccatcatgaaggaccctgatgaccacactgtgtgccacctgctctttgccaaccagaccgagaaggacatcctgctgcgacctgagctggaggaactcaggaacaaacattctgcacgcttcaagctctggtacacgctggacagagcccctgaagcctgggactacggccagggcttcgtgaatgaggagatgatccgggaccaccttccacccccagaggaggagccgctggtgctgatgtgtggccccccacccatgatccagtacgcctgccttcccaacctggaccacgtgggccaccccacggagcgctgcttcgtcttctgagggccgggcacggtcacacggccacccgc

SEQ ID NO: 67520 - DNA, 1849 bp, Artificial Sequence
  derived and/or modified sequence
aaaggcaggctcctgcactgaccccgcgggtcctgtcgtttcagttgggccatatggtgctcttcccagtctggttcctgtacagtctgctcatgaagctgttccagcgctccacgccagccatcaccctcgagagcccggacatcaagtacccgctgcggctcatcgaccgggagatcatcagccatgacacccggcgcttccgctttgccctgccgtcaccccagcacatcctgggcctccctgtcggccagcacatctacctctcggctcgaattgatggaaacctggtcgtccggccctatacacccatctccagcgatgatgacaagggcttcgtggacctggtcatcaaggtttacttcaaggacacccatcccaagtttcccgctggagggaagatgtctcagtacctggagagcatgcagattggagacaccattgagttccggggccccagtgggctgctggtctaccagggcaaagggaagttcgccatccgacctgacaaaaagtccaaccctatcatcaggacagtgaagtctgtgggcatgatcgcgggagggacaggcatcaccccgatgctgcaggtgatccgcgccatcatgaaggaccctgatgaccacactgtgtgccacctgctctttgccaaccagaccgagaaggacatcctgctgcgacctgagctggaggaactcaggaacaaacattctgcacgcttcaagctctggtacacgctggacagagcccctgaagcctgggactacggccagggcttcgtgaatgaggagatgatccgggaccaccttccacccccagaggaggagccgctggtgctgatgtgtggccccccacccatgatccagtacgcctgccttcccaacctggaccacgtgggccaccccacggagcgctgcttcgtcttctgagggccgggcacggtcacacggccacccgccccgcgcaccccacgccctgttcacgctcacccagtcacctccccacatcgcacactggggccccgggttcagcctggcctgcccgtgccctggtgaatcacctggctgagcagttcccctggagccccttcgggagcagggctgtgtcccagatgggccacggctgagccttcagagtacgtcctgcctggcacttactggtccttaccagagacgcccagccccatccctgtcctcatgacccctcgtccaccccccacacacactataaggctgagggctgccagcagccccgtctgcccaccattcccggccgtggaccatagtcgggatgtcagcagacacacatgggcagcccaaagctgcaggtgccagggcccaccccagcctcgcctgtcacccccactcccgcctcagggccaggcccaggcctcaccacctgacgctgcatgagacattgacaccagaaagccctcttgggggcactgctccctaccccagggccctggccagccgggagcttggctctcctctggctagagtgggaagagggggctggccatggggccctcccagaacctcagcatttccttccagcccatccaaacactgaggcagccttggggaaccccgagctggggggttggcagcccactgcaccgcctcagggttttggggtcctgggctggggccaccatccctgatggcagaactcccacaaccacatgtatttattcctctgtcctaaaccgtcccctccttccctcacccccagcacagggggattctgagcagtgcctcttgtctgagggacatatcagtgacctcgacgttgcctttagactacagttgtgttagcctcttgcgtattggctttttcagagtcattt

SEQ ID NO: 67521 - DNA, 2153 bp, Artificial Sequence
  derived and/or modified sequence
aaaacattggagcttggtctgccatcctgaactgtggttcccctgcctcccagcccggctgtgagtgctcagcgaccctgacaggctgacaggtacagtctgccgggctttcctactgtccctggcagccccatgcttactctgcggcccagatcccagctctgtgtccacctgttccttctcctgggttcccttcccccacagttcccagccaagccagagccccccactgcagaacttcctccactccctcccacttcctcccggttagaacaggaccaggagggaggtgccgctcagattctggcaggaccgctggcgggcaggcaggggacagttgggccatatggtgctcttcccagtctggttcctgtacagtctgctcatgaagctgttccagcgctccacgccagccatcaccctcgagagcccggacatcaagtacccgctgcggctcatcgaccgggagatcatcagccatgacacccggcgcttccgctttgccctgccgtcaccccagcacatcctgggcctccctgtcggccagcacatctacctctcggctcgaattgatggaaacctggtcgtccggccctatacacccatctccagcgatgatgacaagggcttcgtggacctggtcatcaaggtttacttcaaggacacccatcccaagtttcccgctggagggaagatgtctcagtacctggagagcatgcagattggagacaccattgagttccggggccccagtgggctgctggtctaccagggcaaagggaagttcgccatccgacctgacaaaaagtccaaccctatcatcaggacagtgaagtctgtgggcatgatcgcgggagggacaggcatcaccccgatgctgcaggtgatccgcgccatcatgaaggaccctgatgaccacactgtgtgccacctgctctttgccaaccagaccgagaaggacatcctgctgcgacctgagctggaggaactcaggaacaaacattctgcacgcttcaagctctggtacacgctggacagagcccctgaagcctgggactacggccagggcttcgtgaatgaggagatgatccgggaccaccttccacccccagaggaggagccgctggtgctgatgtgtggccccccacccatgatccagtacgcctgccttcccaacctggaccacgtgggccaccccacggagcgctgcttcgtcttctgagggccgggcacggtcacacggccacccgccccgcgcaccccacgccctgttcacgctcacccagtcacctccccacatcgcacactggggccccgggttcagcctggcctgcccgtgccctggtgaatcacctggctgagcagttcccctggagccccttcgggagcagggctgtgtcccagatgggccacggctgagccttcagagtacgtcctgcctggcacttactggtccttaccagagacgcccagccccatccctgtcctcatgacccctcgtccaccccccacacacactataaggctgagggctgccagcagccccgtctgcccaccattcccggccgtggaccatagtcgggatgtcagcagacacacatgggcagcccaaagctgcaggtgccagggcccaccccagcctcgcctgtcacccccactcccgcctcagggccaggcccaggcctcaccacctgacgctgcatgagacattgacaccagaaagccctcttgggggcactgctccctaccccagggccctggccagccgggagcttggctctcctctggctagagtgggaagagggggctggccatggggccctcccagaacctcagcatttccttccagcccatccaaacactgaggcagccttggggaaccccgagctggggggttggcagcccactgcaccgcctcagggttttggggtcctgggctggggccaccatccctgatggcagaactcccacaaccacatgtatttattcctctgtcctaaaccgtcccctccttccctcacccccagcacagggggattctgagcagtgcctcttgtctgagggacatatcagtgacctcgacgttgcctttagactacagttgtgttagcctcttgcgtattggctttttcagagtcatttatgagcagaaa

SEQ ID NO: 67522 - DNA, 1005 bp, Artificial Sequence
  derived and/or modified sequence
atgaacagaagcctgctggtgggctgcatgcagagcaaggacatctggggcagagaggagagcatctgcgagagactgaagcaggacggcctggacgtggagagagccgagagctgggagctgggccacatggtgctgttccccgtgtggttcctgtacagcctgctgatgaagctgttccagagaagcacccccgccatcaccctggagagccccgacatcaagtaccccctgagactgatcgacagagagatcatcagccacgacaccagaagattcagattcgccctgcccagcccccagcacatcctgggcctgcccgtgggccagcacatctacctgagcgccagaatcgacggcaacctggtggtgagaccctacacccccatcagcagcgacgacgacaagggcttcgtggacctggtgatcaaggtgtacttcaaggacacccaccccaagttccccgccggcggcaagatgagccagtacctggagagcatgcagatcggcgacaccatcgagttcagaggccccagcggcctgctggtgtaccagggcaagggcaagttcgccatcagacccgacaagaagagcaaccccatcatcagaaccgtgaagagcgtgggcatgatcgccggcggcaccggcatcacccccatgctgcaggtgatcagagccatcatgaaggaccccgacgaccacaccgtgtgccacctgctgttcgccaaccagaccgagaaggacatcctgctgagacccgagctggaggagctgagaaacaagcacagcgccagattcaagctgtggtacaccctggacagagcccccgaggcctgggactacggccagggcttcgtgaacgaggagatgatcagagaccacctgcccccccccgaggaggagcccctggtgctgatgtgcggccccccccccatgatccagtacgcctgcctgcccaacctggaccacgtgggccaccccaccgagagatgcttcgtgttctag

SEQ ID NO: 67523 - DNA, 633 bp, Artificial Sequence
  derived and/or modified sequence
atggtagtatccgcagaaatgtgctgcttctgttttgacgttctctattgtcatctgtacggataccaacagcctaggactccccgcttcacgaatgagccgtacccgttgtttgtcacttggaagatcggccgagacaaaaggctgaggggttgtattggaacctttagcgcaatgaatttacactctggattgcgcgagtataccctgacctcggctcttaaagactcacgtttccctccgatgactcgcgatgaactgcctaggctgttttgcagcgtgagtttgcttacaaatttcgaagacgtctgtgactacctagattgggaagtaggcgtccacggaatccgaatcgagtttataaacgaaaagggctccaagaggaccgctacctacctccctgaggttgcaaaagaacagggctgggatcacattcagacaattgacagcctgctccgcaagggggggtataaggctcctataacaaatgaattccgcaagacaattaaactaacccggtatcgaagtgaaaaaatgaccctttcttacgcagagtatctggcgcacaggcagcaccatcactttcagaatggtataggccaccctctgcctccgtataatcattactcctag

SEQ ID NO: 67524 - DNA, 633 bp, Artificial Sequence
  derived and/or modified sequence
atggtggtgtctgctgagatgtgctgcttctgctttgatgtgctgtactgccacctgtatggctaccagcagcccaggaccccccgcttcaccaatgagccctaccccctgtttgtgacctggaagattggccgggacaagaggctgcggggctgcatcggcaccttcagcgccatgaacctgcacagcggcctgcgggagtacaccctgaccagcgccctgaaggacagccgcttcccccccatgaccagagatgagctgcccaggctcttctgcagcgtgtccctgctgaccaactttgaagatgtgtgtgactacctggactgggaggtgggcgtgcacggcatccgcatcgagttcatcaatgagaagggcagcaagaggacagccacctacctgcctgaggtggccaaggagcagggctgggaccacatccagaccatcgacagcctgctgaggaagggcggctacaaggcccccatcaccaatgagttcaggaagaccatcaagctgacccgctacagaagtgagaagatgaccctgtcctatgcagagtacctggcccaccggcagcaccaccacttccagaatggaattggccaccccctgcccccctacaaccactacagctag

SEQ ID NO: 67525 - DNA, 633 bp, Artificial Sequence
  derived and/or modified sequence
atggtggtgagcgccgagatgtgctgcttctgcttcgacgtgctgtattgccatctgtacgggtaccagcaaccacggactccaagatttactaacgaaccttatccccttttcgtgacttggaaaattggaagggacaaaaggcttcgcggatgtattggcacattctccgccatgaatctgcacagcggcctgcgagaatatacccttacgagcgctctaaaggattctagatttcctcctatgaccagagatgaacttcctcgattgttttgttccgtttccctgctgacaaattttgaggatgtctgtgattacctggactgggaggttggcgttcatggcattagaattgagttcataaacgagaaagggtccaaaagaacagctacctacttgcctgaggtcgcaaaagagcagggttgggatcacatacaaactatcgacagcttgttgcgcaaaggaggatacaaggcacctataaccaacgaattccgaaaaaccatcaagttgaccaggtatcgctcagagaagatgactttgtcgtacgcagaatacctggcacaccgccagcaccaccacttccagaacggcataggccaccctttgccaccttataatcactacagctag

SEQ ID NO: 67526 - DNA, 633 bp, Artificial Sequence
  derived and/or modified sequence
atggtagtatctgccgaaatgtgctgtttctgcttcgatgtactgtactgccatttgtacggctaccagcaacctagaacccccaggttcactaatgagccctatcccctgttcgtaacgtggaagatcggtagagacaaaagactgcgtggttgcattgggactttttccgcaatgaatttacattctggattgcgcgagtatactcttacttccgcactgaaggattctcggttcccgcctatgacgcgagacgaactgccaaggcttttttgctccgtttccctgttgactaacttcgaggatgtttgcgattacctggactgggaggtgggagttcacggtatcaggatcgagtttataaatgaaaaggggtcaaaacgcacagcaacatatctgcccgaagtggccaaagaacaggggtgggaccacattcaaaccatcgatagcctccttcgaaaaggcggatataaagcccctattacaaatgaattcagaaaaacaattaaactcacaagataccggtctgagaagatgacattgagttacgccgagtatctcgcgcatcgccagcatcaccacttccagaatggtattggccaccccttgcccccttataatcactattcttag

SEQ ID NO: 67527 - DNA, 633 bp, Artificial Sequence
  derived and/or modified sequence
atggtggtgagcgccgagatgtgctgcttctgcttcgacgtgctgtactgccacctgtacggctaccagcagcccagaacccccagattcaccaacgagccctaccccctgttcgtgacctggaagatcggcagagacaagagactgagaggctgcatcggcaccttcagcgccatgaacctgcacagcggcctgagagagtacaccctgaccagcgccctgaaggacagcagattcccccccatgaccagagacgagctgcccagactgttctgcagcgtgagcctgctgaccaacttcgaggacgtgtgcgactacctggactgggaggtgggcgtgcacggcatcagaatcgagttcatcaacgagaagggcagcaagagaaccgccacctacctgcccgaggtggccaaggagcagggctgggaccacatccagaccatcgacagcctgctgagaaagggcggctacaaggcccccatcaccaacgagttcagaaagaccatcaagctgaccagatacagaagcgagaagatgaccctgagctacgccgagtacctggcccacagacagcaccaccacttccagaacggcatcggccaccccctgcccccctacaaccactacagctag

SEQ ID NO: 67528 - protein, 355 aa, Artificial Sequence
  derived and/or modified sequence
MVFSNNDEGLINKKLPKELLLRIFSFLDIVTLCRCAQISKAWNILALDGSNWQRIDLFNFQTDVEGRVVENISKRCGGFLRKLSLRGCIGVGDSSLKTFAQNCRNIEHLNLNGCTKITDSTCYSLSRFCSKLKHIQNYCHELVSLNLQSCSRITDEGVVQICRGCHRLQALCLSGCSNLTDASLTALGLNCPRLQILEAARCSHLTDAGFTLLARNCHELEKMDLEECILITDSTLIQLSIHCPKLQALSLSHCELITDDGILHLSNSTCGHERLRVLELDNCLLITDVALEHLENCRGLERLELYDCQQVTRAGIKRMRAQLPHVKVHAYFAPVTPPTAVAGSGQRLCRCCVIL

SEQ ID NO: 67529 - DNA, 2793 bp, Artificial Sequence
  derived and/or modified sequence
accaggacaacgggcgtcgccggcgccgtgtgacttcgggctgtgggctcgctcgcggctcttcggccatggttttctcaaacaatgatgaaggccttattaacaaaaagttacccaaagaacttctgttaagaatattttccttcttggatatagtaactttgtgccgatgtgcacagatttccaaggcttggaacatcttagccctggatggaagcaactggcaaagaatagatctttttaactttcaaacagatgtagagggtcgagtggtggaaaatatctcgaagcgatgcggtggattcctgaggaagctcagcttgcgaggctgcattggtgttggggattcctccttgaagacctttgcacagaactgccgaaacattgaacatttgaacctcaatggatgcacaaaaatcactgacagcacgtgttatagccttagcagattctgttccaagctgaaacatattcagaattactgccatgagcttgtgagcctcaacttgcagtcctgctcacgtatcacggatgaaggtgtggtgcagatatgcaggggctgtcaccggctacaggctctctgcctttcgggttgcagcaacctcacagatgcctctcttacagccctgggtttgaactgtccgcgactgcaaattttggaggctgcccgatgctcccatttgactgacgcaggttttacacttttagctcggaattgccacgaattggagaagatggatcttgaagaatgcatcctgataaccgacagcacactcatccagctctccattcactgtcctaaactgcaagccctgagcctgtcccactgtgaactcatcacagatgatgggatcctgcacctgagcaacagtacctgtggccatgagaggctgcgggtactggagttggacaactgcctcctcatcactgatgtggccctggaacacctagagaactgccgaggcctggagcgcctcgagctgtacgactgccagcaggttacccgtgcaggcatcaagcggatgcgggctcagctccctcatgtcaaagtccacgcctactttgctcccgtcaccccaccgacagcagtggcaggaagtggacagcgactgtgcaggtgctgtgtcattctctgacagcagctgcctgggcccaaggggtgatgaggcatcctttcctctagaagacctgagtcttcctgaccgactccaccatcacccaatctgttgattctccattgggaaaggcatttacaggtaaaagacttctgtatggattgcagttactctggtgatagttttcacctttattctgctgtgaaacaatcaaatcaaagccttgtgtcagttaacacatgacaagtggtctcaatgcagctaggaccatgccagaaacctggatctcttaagagattggtacctacctaggtacgaaagttctacccttggcatactcagcattcctcaaaaagaccatcagtgttagcacaaactgagcagaaaaaataagctgttgattttctacctgatacttaagccagtggcctactttaattcacaattccattttgattagcaggacttttccactttgaagataaatagcaactttatcaaagtgactgtactgcaaattaattcataatgcctgatagttttatatatagagacttatgtggaaggcatgttaataggtttccatgagacaccaaagaaaagaggactctatactgggtggagcagggtcttcacctttttgtttctgtcaacttgtcatatacacctccagggaccaaaaacaaaagcagctcggagtctgtgttgcctgattggaaagtagaagctctggtgtatgctacagcacataacacatttttactaaaggaaaaaagctaattatgtccatgcctctcgtaaaactggggggaaccttaaagagaaagaactaaggcttaagttatctgtagtataatcaattagaagtaatgaatggatgcatgtaaaatggatgtgattttttttcaagcttattttgaaatcttaaaaatcaggttacaccatagctactcaaaagttttacacacttaaaactcagatcagtaagtgttggtaccttttagactcataaaattgaataaaccattgcaatgctttaaaaaaaattaagtcagagggttttattgctatgattttatggcagacacatccaagcaaaaccattttccaaatgcagaccttcctgatgttatctgaaatctgataaaatgaccctactctctgctgtggttcattcttgctccatgctgtccatatttatgatctttattaagaacctgtcaatcagtcatcaccaccttcattgtaaacttaggtgttcatggtggctggcccttccaaacaaccactcccccaaactgaagggccagagctcatgagaaacttaaaagtgaaacggcaaaagcaagatgtgttcccatgactaccaatacctttattaggcagttttagaagtgtttttaaggatatattatgtcagctgcattctaggaagagaagcagattatatatatatataatctccccataaacggacttagcacaattatcatcagagtaagcattaaagtcattttattgccttatgatatattccagtattccttggtctaaaaattgtgtggataccatagcagttagttaaatatacatttatacccactgtttgttgtggaagagatgatgggggaggaggactgatgcaggaagcaacttcaataaatgagcatataacaga

SEQ ID NO: 67530 - DNA, 1259 bp, Artificial Sequence
  derived and/or modified sequence
gacttcgggctgtgggctcgctcgcggctcttcggccatggttttctcaaacaatgatgaaggccttattaacaaaaagttacccaaagaacttctgttaagaatattttccttcttggatatagtaactttgtgccgatgtgcacagatttccaaggcttggaacatcttagccctggatggaagcaactggcaaagaatagatctttttaactttcaaacagatgtagagggtcgagtggtggaaaatatctcgaagcgatgcggtggattcctgaggaagctcagcttgcgaggctgcattggtgttggggattcctccttgaagacctttgcacagaactgccgaaacattgaacatttgaacctcaatggatgcacaaaaatcactgacagcacgtgttatagccttagcagattctgttccaagctgaaacacattcagaattactgccatgagcttgtgagcctcaacttgcagtcctgctcacgtatcacggatgaaggtgtggtgcagatatgcaggggctgtcaccggctacaggctctctgcctttcgggttgcagcaacctcacagatgcctctcttacagccctgggtttgaactgtccgcgactgcaaattttggaggctgcccgatgctcccatttgactgacgcaggttttacacttttagctcggaattgccacgaattggagaagatggatcttgaagaatgcatcctgataaccgacagcacactcatccagctctccattcactgtcctaaactgcaagccctgagcctgtcccactgtgaactcatcacagatgatgggatcctgcacctgagcaacagtacctgtggccatgagaggctgcgggtactggagttggacaactgcctcctcatcactgatgtggccctggaacacctagagaactgccgaggcctggagcgcctcgagctgtacgactgccagcaggttacccgtgcaggcatcaagcggatgcgggctcagctccctcatgtcaaagtccacgcctactttgctcccgtcaccccaccgacagcagtggcaggaagtggacagcgactgtgcaggtgctgtgtcattctctgacagcagctgcctgggcccaaggggtgatgaggcatcctttcctctagaagacctgagtcttcctgaccgactccaccatcacccaatctgttgattctccattgggaaaggcatttacaggtaaaagacttctgtatggattgcagttactctg

SEQ ID NO: 67531 - DNA, 1068 bp, Artificial Sequence
  derived and/or modified sequence
atggtcttctccaacaatgacgagggcctgataaataagaagctgccaaaggagttgctgctgaggatattttcgttcctcgatattgtgacgctgtgtcgttgtgcacagatttccaaagcatggaacatattagcactggacgggagtaactggcagagaatcgacctgtttaatttccagacagatgtagaaggaagggttgtggagaatattagcaagagatgtgggggattcctaaggaagctgtcccttagaggatgcatcggtgttggcgactcttctctgaagaccttcgcgcaaaactgtaggaatattgagcacctaaatctgaatggctgtacgaagatcaccgactctacctgttatagtctttctcgcttttgttccaagttaaagcatatccagaattactgtcatgaattagtgagtctaaacctgcagagttgttcccggattacagatgaaggcgttgtgcagatctgccgggggtgtcaccgcctgcaggccctgtgtctgtccgggtgctctaatctgactgatgccagcctcacagcacttggcctgaattgcccacggctgcagatcctggaagccgccaggtgcagtcatctgactgacgctggattcacccttctggcacgcaattgccatgaactggaaaagatggatctggaggagtgcattcttatcacagattcaactctgatccaattgtcaatccattgccccaaactgcaagcactgtctttgtcacattgtgaacttatcacagacgatggaatactgcacctctcaaactcgacatgtggccacgagcgattaagggtgctagagctcgataactgcttgctgataacggatgtggccctggagcacctggaaaactgtcgagggcttgagcgcttggagctctatgattgtcagcaagtaaccagggcgggcataaagagaatgcgggctcagctacctcatgtgaaggtccatgcctattttgcacctgttacccctcccactgccgtggccggatcagggcagagattgtgtagatgctgcgtgatcctgtag

SEQ ID NO: 67532 - DNA, 1068 bp, Artificial Sequence
  derived and/or modified sequence
atggtcttcagcaataacgatgagggcctgattaataagaaactgcctaaagagctgctcctacgtatcttcagcttcctggacatcgttacgctgtgccggtgcgcgcaaatatcaaaagcttggaacatccttgctctggatggctccaactggcagcgcatagacctatttaatttccagacggacgtcgagggcagagtcgtagagaacatctcaaagcgctgcggaggatttctcaggaagttgtctctgagaggctgtattggggttggagacagcagcctgaaaacattcgcccagaactgtcggaacattgagcatctcaacctgaacggatgcacgaaaattacagatagtacatgctatagcctgagccggttctgttctaagctcaagcatatccagaactactgccacgagctcgtgagtctcaacctgcagagttgtagtcggatcactgatgagggcgtggtgcaaatctgtcgcgggtgccataggctgcaggcactatgcctgagcggctgctccaatttgacggacgcttccctgaccgccctggggttgaattgcccgcggctccagatactggaagctgcccgctgttcccacctgaccgatgcagggttcacgcttctggcccggaactgccacgaacttgaaaaaatggatctggaagagtgtatacttattactgatagtacgctgatccagctgtccatccattgcccaaagctccaggccttgtctctgagccactgcgagctgatcacagacgacggaatcctgcacttgtctaattctacttgcggtcacgagaggctgcgggtcctggagcttgacaattgtctgctcatcacagatgttgctctggagcatttggagaactgcagaggcctcgagaggctggaactttacgactgtcaacaggtgactcgagccggcattaagcggatgcgggctcagctaccacatgtcaaagtgcacgcgtactttgctcctgtcacaccccccaccgccgttgcagggtctggtcagcgcctttgtcggtgttgcgtgatcctctag

SEQ ID NO: 67533 - DNA, 1068 bp, Artificial Sequence
  derived and/or modified sequence
atggtgttcagcaacaatgatgagggcctcatcaacaagaagctgcccaaggagctgctgctgcgcatcttctccttcctggacatcgtgaccctgtgccgctgtgcccagatcagcaaggcctggaacatcctggccctggatggcagcaactggcagagaattgacctcttcaacttccagacagatgtggagggccgggtggtggagaacatcagcaagagatgtggcggcttcctgaggaagctgagcctgcggggctgcattggagtgggggacagcagcctgaagacctttgcccagaactgcaggaacatcgagcacctgaacctgaatggctgcaccaagatcacagacagcacctgctacagcctgagccgcttctgcagcaagctgaagcacatccagaactactgccacgagctggtgtccctgaacctgcagagctgcagccgcatcacagatgaaggagtggtgcagatctgccggggctgccaccggctgcaggccctgtgcctgagcggctgcagcaacctgacagatgccagcctgacagccctgggcctgaactgcccccggctgcagatcctggaggccgcccgctgcagccacctgacagatgctggcttcaccctgctggccaggaactgccacgagctggagaagatggacctggaggagtgcatcctgatcacagacagcaccctcatccagctgagcatccactgccccaagctgcaggccctgagcctgagccactgtgagctgatcacagatgatggcatcctgcacctgagcaacagcacctgtggccacgagcggctgcgggtgctggagctggacaactgcctgctgatcacagatgtggccctggagcacctggagaactgccggggcctggagcggctggagctgtatgactgccagcaggtgacccgggccggcatcaagaggatgagggcccagctgccccacgtgaaggtgcacgcctactttgcccctgtgaccccacccacagctgtggccggcagcggccagaggctgtgccgctgctgcgtcatcctgtag

SEQ ID NO: 67534 - DNA, 1068 bp, Artificial Sequence
  derived and/or modified sequence
atggtgttcagcaacaacgacgagggcctgatcaacaagaagctgccaaaggagctgctactcagaatcttctcatttctggacatcgtaacgctgtgtcgatgtgcccagatatccaaggcttggaatattctcgcattggatggaagtaactggcagaggatagatctgttcaatttccaaacggacgttgagggacgggtcgtggagaatatctccaagcggtgcgggggctttctgcggaaattgtccctacgcggctgcatcggagtgggagactctagcttgaaaactttcgcccaaaactgccggaatatagagcatctcaatctcaacggctgtactaagatcactgacagcacttgctattctctctcaagattttgctcaaaactcaagcacatccagaattactgtcacgaactggtgagtttgaacttacaatcctgttccaggatcactgacgaaggggtcgtgcagatttgccgcggttgccatcggctgcaagcgctgtgtctgtcaggctgcagtaatctgactgacgcttcactgacagccctaggcctcaattgcccgcgacttcagatcctcgaagccgcacggtgtagtcatttgaccgacgctggcttcaccttactggcgcggaactgtcatgagctcgagaagatggacttggaagagtgcatccttattacggacagcacattgattcagctgtccattcattgccctaagcttcaagctctgagcctcagtcactgcgaactgattacggacgatggtatcctgcacctgtcaaacagcacctgtgggcacgagcggctcagagttctggagcttgataactgtctcctcatcaccgacgttgcacttgagcacctggagaactgccgcggcctcgagcggctggagctgtacgactgtcagcaggtaacacgcgccggcataaagagaatgagagcacagctcccacatgtcaaggtgcacgcatatttcgcccctgtgacaccgcccaccgctgttgcgggctcggggcagagactctgtcgatgctgcgtgattctgtag

SEQ ID NO: 67535 - DNA, 1068 bp, Artificial Sequence
  derived and/or modified sequence
atggtgttcagcaacaacgacgagggcctgatcaacaagaagctgcccaaggaactcctgttgaggattttttctttcctagacatcgttactctttgccgctgtgctcaaataagcaaggcttggaacatcctggcccttgatggctccaactggcagagaattgacctgtttaactttcaaactgatgtcgagggtagggtagtggaaaatatctccaagaggtgcggtggttttctgaggaagctaagcttacgcggctgtattggggtcggagattcttctctcaagacatttgcccagaactgtcgtaatatcgagcatctgaatctgaacgggtgtaccaagatcacagatagcacctgttactccctctcgcggttctgctcaaagctgaagcacatccagaactattgccacgagctggtatcccttaacctgcagtcttgctcacgaatcaccgatgaaggcgtggtgcaaatatgccggggatgtcaccgcttgcaggcgctttgcctgtccggatgtagtaacctaaccgacgccagccttacagccttaggcctcaactgccctcgcctccaaatcctggaagccgctagatgctcacacctgacagacgccgggttcaccctcctggccaggaattgccatgagcttgaaaaaatggacctggaggaatgcatattgataactgacagcactctgatccagttgtcaatacactgcccgaaattgcaggccctctcattatctcactgcgaactgatcaccgacgatgggatcctacacttgagcaacagtacttgcggccacgagcggttgcgggtgttggagcttgacaactgtctgctgatcactgatgtggcactggagcacctggaaaactgccgagggttggaacgtctggaactatacgactgccaacaagtgacccgagcgggaatcaagcgtatgagagcccaactgcctcatgtgaaggtccatgcctacttcgcaccagttactccgcccacagctgtcgcaggttccggtcagaggttatgtaggtgctgcgtaattttatag

SEQ ID NO: 67536 - DNA, 1068 bp, Artificial Sequence
  derived and/or modified sequence
atggtcttctcaaataatgacgagggtctgataaataagaagctcccaaaggagctgctcttgcggattttcagctttctggacatcgtcacactctgtagatgcgcccagatcagcaaagcctggaatattttggctctcgacggctcaaactggcagcggatcgatctgtttaactttcagaccgacgtggagggcagagtggtcgagaacattagtaaaagatgcggcggttttttaaggaagctgtcccttagggggtgcattggggtcggcgattcgagcctgaagacctttgctcagaactgtcgtaatattgagcacttgaatctgaacggatgcactaagatcacagattcaacatgctatagcctgtctagattttgttctaagctcaaacatattcaaaactactgccatgagctagttagcttgaacctgcagagctgtagcaggataacggacgagggggtggtccagatatgcagaggatgtcatcgcctgcaggccttgtgcctgagcggctgttccaacctgacagacgctagcctgacagccctcggtctaaattgtccaaggctgcaaattctggaagccgcacggtgctctcatttaaccgatgcagggttcacccttttggccaggaattgccatgagctcgaaaaaatggaccttgaagagtgcattcttataactgactctacattgatccagctgagtattcattgtcctaagctacaggcacttagtttgagtcattgcgagttgattacggacgacggcatcttgcatcttagtaattcaacctgcgggcatgaacgactccgggtgctcgagttagataactgtctcttgatcactgacgtggccttagaacatctggagaattgtcggggactggagcgattagagctctatgactgccagcaggttacccgggctggtatcaagcggatgagagcacagctgccccatgtgaaggtccacgcctatttcgcccctgtgactcccccaactgctgtcgcgggtagcggtcagagactgtgcaggtgttgcgtcatcctgtag

SEQ ID NO: 67537 - DNA, 1068 bp, Artificial Sequence
  derived and/or modified sequence
atggtgttctctaacaatgatgaaggactgattaacaaaaaactgcccaaagagctcttgttacggattttcagctttcttgacatcgtaaccttatgtaggtgcgctcaaattagcaaagcttggaacatactggctcttgacggaagcaattggcaaaggatcgatctttttaattttcagaccgatgtcgagggcagggttgtcgagaatatttctaagagatgtggcggatttttaagaaagctatccctgcgcggatgcataggtgtcggagattcttccctgaagacctttgcacagaactgccgaaatatagaacacttaaatctgaatgggtgcaccaaaatcactgacagcacctgttactctctgagccgcttctgcagcaagctaaaacacatccagaactactgccatgagctggtgtccttgaacctgcagagctgctcaaggattacagacgaaggagtcgtccagatctgcaggggatgccataggctgcaggcgttatgcctgtcaggttgtagtaacttgaccgacgcaagcttaacagcactcggcctgaattgcccgagacttcagatcctcgaggctgcccgttgtagtcacttgacggacgccggtttcaccctgctggcccgaaattgtcacgaactggagaaaatggaccttgaagaatgcatactgattacggactctacattgatacagctgagcatccattgccccaaacttcaggctctcagcctgagtcattgcgagctgatcaccgacgatggcatcctccatctgagcaactcaacctgcggacacgaacgcctacgtgtactcgaactcgacaattgcctgctgatcaccgatgttgccctggagcatctggagaattgtagaggtctggaacggctggagctctatgattgccagcaggtgacccgggcaggcatcaaacggatgcgggctcagttacctcacgtgaaggtgcatgcttatttcgcacctgtcacacctcccaccgcagtggctgggtctggtcaacggctctgtcggtgttgcgttatattatag

SEQ ID NO: 67538 - DNA, 1068 bp, Artificial Sequence
  derived and/or modified sequence
atggtgttcagcaacaacgacgagggcctgatcaacaagaagctgcccaaggagctgctgctgagaatcttcagcttcctggacatcgtgaccctgtgcagatgcgcccagatcagcaaggcctggaacatcctggccctggacggcagcaactggcagagaatcgacctgttcaacttccagaccgacgtggagggcagagtggtggagaacatcagcaagagatgcggcggcttcctgagaaagctgagcctgagaggctgcatcggcgtgggcgacagcagcctgaagaccttcgcccagaactgcagaaacatcgagcacctgaacctgaacggctgcaccaagatcaccgacagcacctgctacagcctgagcagattctgcagcaagctgaagcacatccagaactactgccacgagctggtgagcctgaacctgcagagctgcagcagaatcaccgacgagggcgtggtgcagatctgcagaggctgccacagactgcaggccctgtgcctgagcggctgcagcaacctgaccgacgccagcctgaccgccctgggcctgaactgccccagactgcagatcctggaggccgccagatgcagccacctgaccgacgccggcttcaccctgctggccagaaactgccacgagctggagaagatggacctggaggagtgcatcctgatcaccgacagcaccctgatccagctgagcatccactgccccaagctgcaggccctgagcctgagccactgcgagctgatcaccgacgacggcatcctgcacctgagcaacagcacctgcggccacgagagactgagagtgctggagctggacaactgcctgctgatcaccgacgtggccctggagcacctggagaactgcagaggcctggagagactggagctgtacgactgccagcaggtgaccagagccggcatcaagagaatgagagcccagctgccccacgtgaaggtgcacgcctacttcgcccccgtgaccccccccaccgccgtggccggcagcggccagagactgtgcagatgctgcgtgatcctgtag

SEQ ID NO: 67539 - protein, 162 aa, Artificial Sequence
  derived and/or modified sequence
MNSRTASARGWFSSRPPTSESDLEPATDGPASETTTLSPEATTFNDTRIPDAAGGTAGVGTMLLSFGIITVIGLAVALVLYIRKKKRLEKLRHQLMPMYNFDPTEEQDELEQELLEHGRDAASVQAATSVQAMQGKTTLPSQGPLQRPSRLVFTDVANAIHA

SEQ ID NO: 67540 - DNA, 489 bp, Artificial Sequence
  derived and/or modified sequence
atgaacagcagaaccgccagcgccagaggctggttcagcagcagaccccccaccagcgagagcgacctggagcccgccaccgacggccccgccagcgagaccaccaccctgagccccgaggccaccaccttcaacgacaccagaatccccgacgccgccggcggcaccgccggcgtgggcaccatgctgctgagcttcggcatcatcaccgtgatcggcctggccgtggccctggtgctgtacatcagaaagaagaagagactggagaagctgagacaccagctgatgcccatgtacaacttcgaccccaccgaggagcaggacgagctggagcaggagctgctggagcacggcagagacgccgccagcgtgcaggccgccaccagcgtgcaggccatgcagggcaagaccaccctgcccagccagggccccctgcagagacccagcagactggtgttcaccgacgtggccaacgccatccacgcctag

SEQ ID NO: 67541 - DNA, 489 bp, Artificial Sequence
  derived and/or modified sequence
atgaattcccggaccgcaagtgcccgaggttggttttctagtcggccccctacatcggagtccgatctagaaccagccactgacggccctgccagtgaaaccactacgctgagccccgaggccacaacattcaatgacacaagaatccctgacgctgctggcggaacggcaggagtgggtaccatgctgctcagctttggcattattacagtgattggtctggctgtcgctctggtgctctacattagaaaaaagaagaggctcgagaaactccgtcatcaactcatgcccatgtataatttcgaccctaccgaggaacaggacgagttggagcaggagttgctggagcatggacgggatgctgccagtgtgcaggccgccacaagcgttcaggccatgcaaggcaaaactaccctgccctcccaagggcccctgcaaagaccgagtcgcttagtgtttaccgatgtggcaaatgcaattcatgcctag

SEQ ID NO: 67542 - DNA, 489 bp, Artificial Sequence
  derived and/or modified sequence
atgaattctcggacggcgtctgccaggggctggttctcctcccggccgccaactagtgagtcagacctcgaaccagctacagatggcccggcctccgaaacgaccacattaagtccagaagcgactaccttcaatgatacccggatccctgacgccgcaggcggcacagccggcgtaggcaccatgcttttatcatttggcatcattaccgtgattgggcttgccgtcgccttagtgctgtatatcagaaaaaagaagcgcctggagaagctgcgtcatcagctcatgccgatgtataatttcgatccaactgaagagcaggatgaattggagcaggagctgctggaacatggacgggatgctgcctccgtccaggcagcgactagtgtccaggctatgcagggcaagaccaccttaccaagccagggtccactccaaaggccatccaggctggttttcacagacgtggcgaatgccatccacgcctag

SEQ ID NO: 67543 - DNA, 489 bp, Artificial Sequence
  derived and/or modified sequence
atgaatagccgcactgcgtctgcccgggggtggttctcatcaagacccccgacttccgaatccgacttggagccggccacagacgggccagcaagtgaaaccacaacattgagccccgaagccaccactttcaacgacactcggatacccgacgcagctggcggtactgcaggggtgggtacaatgctattatcattcggcatcattactgtgattggattggcagttgcactggttttatatatcagaaagaaaaaaagacttgaaaagctcagacaccagctaatgccaatgtataatttcgatcccacagaggagcaggatgagctggagcaagaactactggagcacggccgtgatgctgctagcgttcaggccgccacttccgtgcaggctatgcagggcaaaacgacgctgcccagccagggtccattacagcggccaagtcggctcgtcttcacggacgtagctaacgcaatacatgcttag

SEQ ID NO: 67544 - DNA, 489 bp, Artificial Sequence
  derived and/or modified sequence
atgaacagcaggacagccagcgcccggggctggttcagcagccggccccccaccagcgagagtgacctggagcccgccacagatggccctgccagcgagaccaccaccctgagccctgaggccaccaccttcaatgacacccgcatcccagatgctgctgggggcacagctggggtgggcaccatgctgctgagctttggcatcatcaccgtcatcggcctggccgtggccctggtgctgtacatcaggaagaagaagaggctggagaagctgcggcaccagctgatgcccatgtacaactttgaccccacagaggagcaggatgagctggagcaggagctgctggagcacggcagagatgctgcctctgtgcaggccgccacctctgtgcaggccatgcagggcaagaccaccctgcccagccagggccccctgcagaggcccagccggctggtgttcacagatgtggccaatgccatccacgcctag

SEQ ID NO: 67545 - DNA, 489 bp, Artificial Sequence
  derived and/or modified sequence
atgaacagccggaccgccagcgcccggggctggttcagcagccggccaccgacttccgaatctgacctcgaacccgctaccgatggtcccgcctccgagactaccacactctcgcccgaagcaacaacctttaatgacactaggattccagacgctgcagggggtacggccggtgtgggcaccatgctgctgtcttttgggataattacggtgattggactggcagtggccttggtcctctacatcagaaagaagaaaagactggaaaagctccgccatcagctaatgcccatgtacaacttcgaccctacagaggaacaggacgagcttgagcaggagctgttggagcacggtagggacgctgcaagtgttcaggccgctacatctgtacaggcgatgcagggaaaaacgacgttgccatctcagggaccattgcaacgcccttcacggttggtatttactgatgtggctaacgccattcacgcttag

SEQ ID NO: 67546 - DNA, 489 bp, Artificial Sequence
  derived and/or modified sequence
atgaacagccggaccgccagcgcccggggctggttcagcagccggcctcctacatcagaatccgatctggagcctgccactgatggacccgctagcgagactaccacacttagtcccgaggccacgacatttaacgatacccgaatacctgacgccgccggtggaacggcaggggtggggacaatgcttctgtcttttggcattatcactgtcatcggcttggccgtagcactcgtgctgtatattaggaagaagaaacggttagagaagctgcgccaccagctcatgccaatgtataacttcgacccaaccgaggagcaggacgagcttgaacaagaattactggaacacggaagggacgcagcaagcgtccaagcagctacttctgtccaggcaatgcagggaaagactaccctgcccagccaagggcccctccagagaccctccaggctcgtctttaccgatgtggccaacgcgatacacgcatag

SEQ ID NO: 67547 - DNA, 489 bp, Artificial Sequence
  derived and/or modified sequence
atgaacagccggaccgccagcgcccggggctggttcagcagccggccaccaacctctgagtccgacctggagcccgcgaccgatggacccgcctctgaaacgacgacactaagcccggaggcaactactttcaatgacacccgtattccagacgctgccggaggaacagcaggggtaggtacaatgttgctttcatttgggataatcacagtgatcggcctggccgtagctctggtgctgtacataagaaagaaaaaacggctcgagaagcttagacaccagttgatgcccatgtataattttgatccaaccgaggaacaggatgagctcgagcaggaactcctggaacacggacgagatgcagcctccgttcaagcagcaacgagtgtgcaggcgatgcaggggaaaaccacacttccctctcaaggcccactccagaggccatcccgacttgtgttcacagacgtagccaatgcaatccacgcctag

SEQ ID NO: 67548 - DNA, 489 bp, Artificial Sequence
  derived and/or modified sequence
atgaactccagaacggcttccgctagggggtggttttcaagccggccacccacaagcgaatctgaccttgagccagcaacggatggacctgcctcagagactaccaccttgtccccagaagccaccacattcaatgacacacgcatacctgatgctgctggtggaactgccggagtgggcacaatgctcctgagtttcggcatcataaccgtcatcggcctggccgtggccctcgtcttgtatatccgaaaaaagaagagactggagaagcttcgacaccaactgatgcctatgtataattttgatcctaccgaggagcaggacgagttagaacaggaactgcttgaacacgggagagatgcagcgtcagtgcaggccgctacatctgtgcaggccatgcaaggaaagaccaccctgccatcacaggggccactgcagcggccatctcgactggtgtttacggatgttgcaaatgccatccacgcttag

SEQ ID NO: 67549 - DNA, 489 bp, Artificial Sequence
  derived and/or modified sequence
atgaattccaggaccgcctccgccaggggatggttcagctcacggcctcctaccagtgagagcgacctcgagcccgctaccgatgggccagccagtgagacgactactctgtctcccgaggccactaccttcaatgatactcgcatcccagacgccgctggaggaactgcaggtgtgggcactatgctcttatccttcggtatcataacagtgatcggtcttgccgtggcgctggtcttatacatccgaaagaaaaaacgcttagagaaactgagacaccagctcatgccgatgtataacttcgacccgaccgaggaacaggatgaactcgagcaagagttgctggaacatgggagggacgccgcatcagtgcaagctgcaacgtcggtgcaagccatgcagggaaagaccacgctgccaagccaggggccattgcaaagaccttccagactggtttttaccgacgtggcaaacgccatacacgcttag

SEQ ID NO: 67550 - DNA, 489 bp, Artificial Sequence
  derived and/or modified sequence
atgaactccagaacagcttccgctcggggatggttttcatcacggccaccgacatcagagtccgatctggagcccgctaccgatggcccagcgtccgagactacaacactgtctcccgaggccaccacattcaatgacacccggattccggatgcggctgggggaactgctggagtcggtactatgctcctttcattcggcataattaccgtaatcggtctcgccgtggcgctggtcctgtacataagaaagaaaaaaagactcgaaaaactgcgccaccaactgatgccaatgtacaatttcgatcctaccgaggaacaggacgagctcgagcaggagctgcttgagcacgggcgtgatgccgcttctgtccaagcagccactagcgtgcaagctatgcagggcaagacaacactacctagccaggggcctctgcagaggccctctaggctggtctttacggatgttgccaacgccatccatgcctag

SEQ ID NO: 67551 - DNA, 1272 bp, Artificial Sequence
  derived and/or modified sequence
atggagttcagcagccccagcagagaggagtgccccaagcccctgagcagagtgagcatcatggccggcagcctgaccggcctgctgctgctgcaggccgtgagctgggccagcggcatcggctacaacatcatcagagtgcccatggccagctgcgacttcagcatcagaacctacacctacgccgacacccccgacgacttccagctgcacaacttcagcctgcccgaggaggacaccaagctgaagatccccctgatccacagagccctgcagctggcccagagacccgtgagcctgctggccagcccctggaccagccccacctggctgaagaccaacggcgccgtgaacggcaagggcagcctgaagggccagcccggcgacatctaccaccagacctgggccagatacttcgtgaagttcctggacgcctacgccgagcacaagctgcagttctgggccgtgaccgccgagaacgagcccagcgccggcctgctgagcggctaccccttccagtgcctgggcttcacccccgagcaccagagagacttcatcgccagagacctgggccccaccctggccaacagcacccaccacaacgtgagactgctgatgctggacgaccagagactgctgctgccccactgggccaaggtggtgctgaccgaccccgaggccgccaagtacgtgcacggcatcgccgtgcactggtacctggacttcctggcccccgccaaggccaccctgggcgagacccacagactgttccccaacaccatgctgttcgccagcgaggcctgcgtgggcagcaagttctgggagcagagcgtgagactgggcagctgggacagaggcatgcagtacagccacagcatcatcaccaacctgctgtaccacgtggtgggctggaccgactggaacctggccctgaaccccgagggcggccccaactgggtgagaaacttcgtggacagccccatcatcgtggacatcaccaaggacaccttctacaagcagcccatgttctaccacctgggccacttcagcaagttcatccccgagggcagccagagagtgggcctggtggccagccagaagaacgacctggacgccgtggccctgatgcaccccgacggcagcgccgtggtggtggtgctgaacagaagcagcaaggacgtgcccctgaccatcaaggaccccgccgtgggcttcctggagaccatcagccccggctacagcatccacacctacctgtggagaagacagtag

SEQ ID NO: 67552 - DNA, 1272 bp, Artificial Sequence
  derived and/or modified sequence
atggagttcagcagcccctcgcgcgaagagtgccccaagcccctgagtcgcgtgagtattatggccggctcccttaccggccttcttctgcttcaggctgtgagctgggcgagcggcattggatacaacattatccgggtgcctatggctagctgtgacttcagtattagaacatatacctacgccgataccccggacgactttcagctgcacaatttttctctacccgaagaggacactaaactgaagataccactgatccatagggctcttcagctggcgcagaggcccgtgtccctgttggcatcaccatggaccagtccaacctggctcaaaacaaacggggcagttaacggcaagggatcgctgaagggtcagccgggagatatttatcaccagacatgggcccgctacttcgtcaagtttctcgatgcttacgcagagcataagctgcaattctgggcggtcactgccgagaacgaacctagtgcagggctgctgtctggatacccttttcagtgtttaggcttcactcctgagcaccaaagagacttcatcgcccgcgacctggggcctactcttgccaactctacacaccacaatgtccgacttctcatgctggacgatcagcgactgctgctcccgcactgggcaaaagtcgtcctcacggaccccgaggccgctaaatatgtccacgggatcgcagttcactggtacctggatttcttggctccagccaaggcaaccctgggggaaactcataggctctttccaaacacaatgctgtttgccagcgaggcctgcgtcgggtcaaagttctgggaacagagtgtgcgccttggcagctgggatcgaggcatgcagtactcgcattcgataatcaccaacctgctgtatcatgtcgtcggttggacagactggaatctggccttgaatccggagggcggcccaaattgggtgaggaactttgtggacagtcccattattgttgatattaccaaggatacattttacaagcagccgatgttttaccatttggggcactttagcaagttcatcccagaggggtcccagcgggtgggcttggtcgccagccagaagaacgatctcgatgccgttgcactgatgcaccctgatggatcagcggttgtggtggtcttgaatagatccagcaaagatgttcctcttacaataaaggacccggcggtgggcttcttggagactattagtcctggctattccattcacacatacctttggcggcgccagtag

SEQ ID NO: 67553 - DNA, 1272 bp, Artificial Sequence
  derived and/or modified sequence
atggagttcagcagccccagccgggaggagtgccccaagcccctgagccgggtgtccatcatggccggcagcctgaccggcctgctgctgctgcaggccgtgtcctgggccagcggcatcggctacaacatcatccgggtgcccatggccagctgtgacttcagcatccgcacctacacctacgccgacaccccagatgacttccagctgcacaacttcagcctgcctgaggaggacaccaagctgaagatccccctcatccaccgggccctgcagctggcccagaggcctgtgtccctgctggccagcccctggaccagccccacctggctgaagaccaacggggctgtgaatggcaagggcagcctgaagggccagcccggggacatctaccaccagacctgggcccgctactttgtgaagttcctggatgcctatgcagagcacaagctgcagttctgggccgtgacagcagaaaatgagcccagcgctggcctgctgagcggctaccccttccagtgcctgggcttcaccccagagcaccagagggacttcatcgcccgggacctgggccccaccctggccaacagcacccaccacaacgtgcggctgctgatgctggatgaccagaggctgctgctgccccactgggccaaggtggtgctgacagatcctgaggccgccaagtatgtgcacggcattgctgtgcactggtacctggacttcctggccccagccaaggccaccctgggggagacccacaggctcttccccaacaccatgctgtttgccagcgaggcctgtgtgggcagcaagttctgggagcagagcgtgcggctgggctcctgggaccggggcatgcagtacagccacagcatcatcaccaacctgctgtaccacgtggtgggctggacagactggaacctggccctgaaccctgagggcggccccaactgggtgaggaactttgtggacagccccatcatcgtggacatcaccaaggacaccttctacaagcagcccatgttctaccacctgggccacttcagcaagttcatccctgagggcagccagagggtgggcctggtggccagccagaagaatgacctggatgctgtggccctgatgcacccagatggcagcgctgtggtggtggtgctgaacagaagcagcaaggatgtgcccctgaccatcaaggaccctgctgtgggcttcctggagaccatcagccctggctacagcatccacacctacctgtggaggcggcagtag

SEQ ID NO: 67554 - DNA, 1272 bp, Artificial Sequence
  derived and/or modified sequence
atggagttcagcagccccagccgggaggagtgccccaagcccctgagcagagtgtccattatggcgggctccctgactggattactgcttctgcaggccgtcagctgggccagcgggatcggatataatatcattcgggtccccatggcgtcctgtgatttttccatccggacatacacgtacgctgatactcccgatgatttccagttgcacaatttctctctgcccgaagaggacacgaagctgaaaatccctctgatacatcgggcgctgcagctagcgcagagaccggtctcacttctcgctagtccctggacttcccctacatggttgaaaacaaatggggccgtgaatggcaaggggagtctcaagggccagcccggggatatttatcatcagacttgggcaaggtatttcgtgaaatttctggatgcctacgctgagcacaagctgcagttctgggccgtgaccgcagagaatgagccctctgccgggcttctctccgggtatcctttccaatgcctgggtttcacaccagagcaccaaagggacttcatcgccagggacctgggccctaccctggctaattctacccatcataacgtacgactactgatgctggacgaccagcgtctcctgctgccccattgggcaaaagttgtcctgaccgatcccgaagctgctaagtacgtgcatgggatcgcagtccactggtacttagattttctcgcccctgccaaagcgaccctcggggagacccatcgtctttttcccaatacaatgctgttcgccagcgaggcttgcgttggatcaaaattctgggagcagagtgttcgactgggatcatgggacagaggcatgcagtactctcactccattattactaatctgctgtatcacgtggtagggtggaccgactggaacctggcccttaatcctgaaggggggcccaactgggttaggaattttgtggacagccccatcatagtggatatcaccaaggataccttctataagcagcccatgttctatcacctgggccacttctcgaaatttattccggagggcagccaaagagttggactagtggccagccaaaagaatgacctcgacgccgtggcgcttatgcaccccgacggctctgcagttgtcgtagtgctcaacagatcttcaaaggacgtccctcttactataaaggatcctgcggttggatttctggagacaatttcacccggatattctatacacacatacctgtggcgacggcagtag

SEQ ID NO: 67555 - DNA, 1652 bp, Artificial Sequence
  derived and/or modified sequence
agtgcctatagctaaggcaggtacctgcatccttgtttttgtttagtggatcctctatccttcagagactctggaacccctgtggtcttctcttcatctaatgaccctgaggggatggagttttcaagtccttccagagaggaatgtcccaagcctttgagtagggtaagcatcatggctggcagcctcacaggattgcttctacttcaggcagtgtcgtgggcatcaggaatcggatataacatcatccgggtacccatggccagctgtgacttctccatccgcacctacacctatgcagacacccctgatgatttccagttgcacaacttcagcctcccagaggaagataccaagctcaagatacccctgattcaccgagccctgcagttggcccagcgtcccgtttcactccttgccagcccctggacatcacccacttggctcaagaccaatggagcggtgaatgggaaggggtcactcaagggacagcccggagacatctaccaccagacctgggccagatactttgtgaagttcctggatgcctatgctgagcacaagttacagttctgggcagtgacagctgaaaatgagccttctgctgggctgttgagtggataccccttccagtgcctgggcttcacccctgaacatcagcgagacttcattgcccgtgacctaggtcctaccctcgccaacagtactcaccacaatgtccgcctactcatgctggatgaccaacgcttgctgctgccccactgggcaaaggtggtactgacagacccagaagcagctaaatatgttcatggcattgctgtacattggtacctggactttctggctccagccaaagccaccctaggggagacacaccgcctgttccccaacaccatgctctttgcctcagaggcctgtgtgggctccaagttctgggagcagagtgtgcggctaggctcctgggatcgagggatgcagtacagccacagcatcatcacgaacctcctgtaccatgtggtcggctggaccgactggaaccttgccctgaaccccgaaggaggacccaattgggtgcgtaactttgtcgacagtcccatcattgtagacatcaccaaggacacgttttacaaacagcccatgttctaccaccttggccacttcagcaagttcattcctgagggctcccagagagtggggctggttgccagtcagaagaacgacctggacgcagtggcactgatgcatcccgatggctctgctgttgtggtcgtgctaaaccgctcctctaaggatgtgcctcttaccatcaaggatcctgctgtgggcttcctggagacaatctcacctggctactccattcacacctacctgtggcgtcgccagtgatggagcagatactcaaggaggcactgggctcagcctgggcattaaagggacagagtcagctcacacgctgtctgtgactaaagagggcacagcagggccagtgtgagcttacagcgacgtaagcccaggggcaatggtttgggtgactcactttcccctctaggtggtgccaggggctggaggcccctagaaaaagatcagtaagccccagtgtccccccagcccccatgcttatgtgaacatgcgctgtgtgctgcttgctttgg

SEQ ID NO: 67556 - DNA, 1272 bp, Artificial Sequence
  derived and/or modified sequence
atggagttcagcagtccgagcagagaggagtgtcctaaacctctctctagggtcagtatcatggccggatcattaaccggcttgctacttctgcaagctgtcagttgggcctcaggtatcggctacaacatcatcagagtgccaatggcctcatgcgacttctcaatcaggacttacacctacgccgacacacctgatgattttcagcttcacaacttttctctgcctgaagaagacactaagttgaaaatcccactgattcaccgcgctcttcagctcgctcagagaccggtgtccctgcttgcaagcccatggacttcccctacatggctaaagaccaacggtgctgtgaacggtaagggtagtctaaaaggacagcccggagacatctatcatcagacatgggctaggtatttcgttaaatttctggatgcttacgcagaacataagttacagttctgggcggtcactgcggagaacgaacctagcgctgggctgctgtctggatacccatttcaatgcctcgggtttacgccagaacaccaacgggacttcatcgccagagacctgggacccactctggcaaatagcacccaccataacgtaagactgttgatgctggatgaccagcgtcttcttttgcctcactgggccaaagtggttcttacagatcctgaggcagccaagtatgttcatgggatagccgttcactggtatctcgatttcctggctcctgcaaaagcaacgcttggagagacccaccggttgtttcccaacacgatgctgtttgcaagcgaggcctgcgtcggttctaagttctgggagcagtccgtgagattgggctcgtgggacaggggaatgcagtatagccactcaatcatcacgaatctgctctatcacgtagtgggctggactgactggaacctagccctcaatcccgaaggaggacccaactgggtccggaattttgtggacagtcctatcatcgtggatatcactaaggatacattctataagcaaccaatgttctatcaccttggccacttttctaagtttataccagaaggctcacagagagtcgggcttgtcgcatctcaaaaaaatgatcttgacgctgtcgctctgatgcaccccgacggctccgccgtggttgtcgtgttaaatcggagttccaaggatgttcccctcacaatcaaggacccggctgtcgggttcttggagacgataagcccgggatactcgatccatacctacctgtggcgacggcagtag

SEQ ID NO: 67557 - DNA, 1272 bp, Artificial Sequence
  derived and/or modified sequence
atggaattctcaagtccaagcagggaagagtgccccaagccactgtcccgcgtatctattatggcaggcagcttgacaggactcctgttattacaggcagttagctgggccagtggcattggatacaacatcattagagtgcctatggctagctgtgatttctcaatacggacctatacctatgctgatactcccgacgattttcaattgcacaatttttcacttcctgaggaagatacgaagctaaaaattcctttaatacacagggcattgcagctggctcaaaggcccgtatctcttctagcatcaccgtggactagcccaacatggctgaaaaccaacggcgccgtgaatggtaaaggctccttaaagggccagccgggggacatataccaccagacctgggcccgctactttgtgaagtttctcgatgcttatgccgaacacaaactacagttttgggcagtgaccgcagagaacgaaccatccgccggcttattatctggctatccattccaatgcctcgggttcacacctgaacatcagcgggactttatagcccgcgacttagggccgactctcgcaaactcaacacaccacaatgtcagactacttatgctggatgatcaaaggcttcttctcccgcactgggccaaagtggtactgacagaccctgaagccgccaaatacgtccacggaatagccgtccactggtatctcgactttctggccccagctaaggccacactcggggagacccatcggctgttcccgaataccatgctcttcgcttccgaggcctgcgtgggctccaagttttgggaacaaagcgttaggctgggctcatgggatagaggcatgcagtattctcattccatcatcaccaacctgctctaccatgtagtcggctggactgattggaatctagcattgaatcctgagggtggacctaattgggtgagaaattttgtcgatagccctatcatcgtcgacatcacaaaagatacattttataaacaaccaatgttttatcacttgggtcattttagcaagtttatcccagagggctcgcagagggtgggattagttgcatctcaaaaaaacgatctggatgccgtggctcttatgcacccggacggttcagccgtggttgtggtcttaaaccgttctagtaaagacgtacctctgaccattaaagatccagccgtaggatttctcgagacaatcagtcccgggtactctatacacacctatttatggaggcgccaatag

SEQ ID NO: 67558 - DNA, 1272 bp, Artificial Sequence
  derived and/or modified sequence
atggaattttcttcccctagccgggaggaatgccccaaacctctgtcccgagtgtctataatggccggttcactcactggactgctactcctgcaggctgtgtcatgggcctccggaatcggctacaatattattagagttccaatggcttcctgtgacttctccattagaacatatacatacgctgacacccctgatgacttccagctccacaattttagcctgcctgaagaagatacgaagctcaaaatccctcttatccacagagccctccaactagcccaacgcccagtatctcttctggctagtccctggacctcaccaacatggttgaagaccaacggcgcagtcaatggcaaggggagtttgaaaggacaacccggagatatctaccatcaaacatgggccagatacttcgtgaaattccttgacgcttacgccgaacacaagttacagttttgggctgtcacggcagagaatgaaccatcagcgggcctgcttagcggctatcccttccagtgcctgggcttcaccccagaacatcagcgcgacttcattgcaagagatttgggccctacgttagctaattccactcaccacaacgttcgtttgctgatgttagatgaccagcgactcctgctgccgcattgggcaaaggtggttctcacagatcccgaggccgcaaaatatgtgcacgggattgctgttcactggtatctggactttttagcaccggctaaagccactcttggcgagacacatcgcctgttccccaacaccatgctatttgcctccgaggcctgcgtagggagtaagttctgggaacaaagcgttcgtctgggctcatgggacagaggcatgcagtactcacattctataattacaaacctgctgtatcacgtcgtgggatggaccgactggaacctagctttaaaccctgaaggcggtccgaactgggttcgaaatttcgtggatagccctattatagtcgacattacaaaggatacattttacaagcagcccatgttttatcaccttggccattttagtaagtttattcccgaaggttctcagcgcgtgggcctggtagcctcccagaagaatgacctggacgctgtagccctgatgcacccagatggcagcgcagtggtggtggtactgaaccggagttcaaaggatgtccccctcacaatcaaggaccccgctgtgggattcctcgagaccatttcacccggctattctatccatacatatctgtggcgaagacagtag

SEQ ID NO: 67559 - RNA, 1272 nt, Artificial Sequence
  derived and/or modified sequence
auggaauucucaaguccaagcagggaagagugccccaagccacugucccgcguaucuauuauggcaggcagcuugacaggacuccuguuauuacaggcaguuagcugggccaguggcauuggauacaacaucauuagagugccuauggcuagcugugauuucucaauacggaccuauaccuaugcugauacucccgacgauuuucaauugcacaauuuuucacuuccugaggaagauacgaagcuaaaaauuccuuuaauacacagggcauugcagcuggcucaaaggcccguaucucuucuagcaucaccguggacuagcccaacauggcugaaaaccaacggcgccgugaaugguaaaggcuccuuaaagggccagccgggggacauauaccaccagaccugggcccgcuacuuugugaaguuucucgaugcuuaugccgaacacaaacuacaguuuugggcagugaccgcagagaacgaaccauccgccggcuuauuaucuggcuauccauuccaaugccucggguucacaccugaacaucagcgggacuuuauagcccgcgacuuagggccgacucucgcaaacucaacacaccacaaugucagacuacuuaugcuggaugaucaaaggcuucuucucccgcacugggccaaagugguacugacagacccugaagccgccaaauacguccacggaauagccguccacugguaucucgacuuucuggccccagcuaaggccacacucggggagacccaucggcuguucccgaauaccaugcucuucgcuuccgaggccugcgugggcuccaaguuuugggaacaaagcguuaggcugggcucaugggauagaggcaugcaguauucucauuccaucaucaccaaccugcucuaccauguagucggcuggacugauuggaaucuagcauugaauccugaggguggaccuaauugggugagaaauuuugucgauagcccuaucaucgucgacaucacaaaagauacauuuuauaaacaaccaauguuuuaucacuugggucauuuuagcaaguuuaucccagagggcucgcagagggugggauuaguugcaucucaaaaaaacgaucuggaugccguggcucuuaugcacccggacgguucagccgugguuguggucuuaaaccguucuaguaaagacguaccucugaccauuaaagauccagccguaggauuucucgagacaaucagucccggguacucuauacacaccuauuuauggaggcgccaauag

SEQ ID NO: 67560 - RNA, 1272 nt, Artificial Sequence
  derived and/or modified sequence
auggaauuuucuuccccuagccgggaggaaugccccaaaccucugucccgagugucuauaauggccgguucacucacuggacugcuacuccugcaggcugugucaugggccuccggaaucggcuacaauauuauuagaguuccaauggcuuccugugacuucuccauuagaacauauacauacgcugacaccccugaugacuuccagcuccacaauuuuagccugccugaagaagauacgaagcucaaaaucccucuuauccacagagcccuccaacuagcccaacgcccaguaucucuucuggcuagucccuggaccucaccaacaugguugaagaccaacggcgcagucaauggcaaggggaguuugaaaggacaacccggagauaucuaccaucaaacaugggccagauacuucgugaaauuccuugacgcuuacgccgaacacaaguuacaguuuugggcugucacggcagagaaugaaccaucagcgggccugcuuagcggcuaucccuuccagugccugggcuucaccccagaacaucagcgcgacuucauugcaagagauuugggcccuacguuagcuaauuccacucaccacaacguucguuugcugauguuagaugaccagcgacuccugcugccgcauugggcaaaggugguucucacagaucccgaggccgcaaaauaugugcacgggauugcuguucacugguaucuggacuuuuuagcaccggcuaaagccacucuuggcgagacacaucgccuguuccccaacaccaugcuauuugccuccgaggccugcguagggaguaaguucugggaacaaagcguucgucugggcucaugggacagaggcaugcaguacucacauucuauaauuacaaaccugcuguaucacgucgugggauggaccgacuggaaccuagcuuuaaacccugaaggcgguccgaacuggguucgaaauuucguggauagcccuauuauagucgacauuacaaaggauacauuuuacaagcagcccauguuuuaucaccuuggccauuuuaguaaguuuauucccgaagguucucagcgcgugggccugguagccucccagaagaaugaccuggacgcuguagcccugaugcacccagauggcagcgcagugguggugguacugaaccggaguucaaaggaugucccccucacaaucaaggaccccgcugugggauuccucgagaccauuucacccggcuauucuauccauacauaucuguggcgaagacaguag

SEQ ID NO: 67561 - protein, 487 aa, Artificial Sequence
  derived and/or modified sequence
MEFSSPSREECPKPLSRVSIMAGSLTGLLLLQAVSWASGARPCIPKSFGYSSVVCVCNATYCDSFDPPTFPALGTFSRYESTRSGRRMELSMGPIQANHTGTGIGYNIIRVPMASCDFSIRTYTYADTPDDFQLHNFSLPEEDTKLKIPLIHRALQLAQRPVSLLASPWTSPTWLKTNGAVNGKGSLKGQPGDIYHQTWARYFVKFLDAYAEHKLQFWAVTAENEPSAGLLSGYPFQCLGFTPEHQRDFIARDLGPTLANSTHHNVRLLMLDDQRLLLPHWAKVVLTDPEAAKYVHGIAVHWYLDFLAPAKATLGETHRLFPNTMLFASEACVGSKFWEQSVRLGSWDRGMQYSHSIITNLLYHVVGWTDWNLALNPEGGPNWVRNFVDSPIIVDITKDTFYKQPMFYHLGHFSKFIPEGSQRVGLVASQKNDLDAVALMHPDGSAVVVVLNRSSKDVPLTIKDPAVGFLETISPGYSIHTYLWRRQ

SEQ ID NO: 67562 - protein, 302 aa, Artificial Sequence
  derived and/or modified sequence
MCLQPLQEQKQWALDGAEYRTIQANCTGTGIGYNIIWVPMASCDFSIRTYTYADTPDDFQLHNFSLPEEDTKLKIPLIHRALQLAQRPVSLLASPWTSPTRLKTKGAGNGKGPLKGQPRDIYHQTWARYIVKFLDAYAEHKLQFWAVTAENEPSAGLLSGYPFQCLGFTPEHQRDFIARDLGPTLANGTHHNVRLLMLDDQRLLLPHWAKVVLTDPEAAKYVHGIAVHWYLDFLAPAKATLRETHHLFPNTMLFASEACVGSKFWEQSVRLGSWDRGMQYSHSIITNLLYHVVGWTDWNPSL

SEQ ID NO: 67563 - protein, 359 aa, Artificial Sequence
  derived and/or modified sequence
MCLQPLQEQKQWALDGAEYRTIQANCTGTGIGYNIIWVPMASCDFSIRTYTYADTPDDFQLHNFSLPEEDTKLKIPLIHRALQLAQRPVSLLASPWTSPTRLKTKGAGNGKGPLKGQPRDIYHQTWARYIVKFLDAYAEHKLQFWAVTAENEPSAGLLSGYPFQCLGFTPEHQRDFIARDLGPTLANGTHHNVRLLMLDDQRLLLPHWAKVVLTDPEAAKGLCGFQVLGAECAARLLGSRDAVQPQHHHKPPVPCGRLDRLEPIIVDITKHTFYKQPMFYHLGHFSKFIPEGSQRVGLVASQKNDPDAVALMHPDGSPVVVVLNRSSKDVPLTIKDPAVGFLETISPGYSIHTYLWRRQ

SEQ ID NO: 67564 - DNA, 2174 bp, Artificial Sequence
  derived and/or modified sequence
acatgacccatccacatcgggaagccggaattacttgcagggctaacctagtgcctatagctaaggcaggtacctgcatccttgtttttgtttagtggatcctctatccttcagagactctggaacccctgtggtcttctcttcatctaatgaccctgaggggatggagttttcaagtccttccagagaggaatgtcccaagcctttgagtagggtaagcatcatggctggcagcctcacaggattgcttctacttcaggcagtgtcgtgggcatcaggtgcccgcccctgcatccctaaaagcttcggctacagctcggtggtgtgtgtctgcaatgccacatactgtgactcctttgaccccccgacctttcctgcccttggtaccttcagccgctatgagagtacacgcagtgggcgacggatggagctgagtatggggcccatccaggctaatcacacgggcacaggaatcggatataacatcatccgggtacccatggccagctgtgacttctccatccgcacctacacctatgcagacacccctgatgatttccagttgcacaacttcagcctcccagaggaagataccaagctcaagatacccctgattcaccgagccctgcagttggcccagcgtcccgtttcactccttgccagcccctggacatcacccacttggctcaagaccaatggagcggtgaatgggaaggggtcactcaagggacagcccggagacatctaccaccagacctgggccagatactttgtgaagttcctggatgcctatgctgagcacaagttacagttctgggcagtgacagctgaaaatgagccttctgctgggctgttgagtggataccccttccagtgcctgggcttcacccctgaacatcagcgagacttcattgcccgtgacctaggtcctaccctcgccaacagtactcaccacaatgtccgcctactcatgctggatgaccaacgcttgctgctgccccactgggcaaaggtggtactgacagacccagaagcagctaaatatgttcatggcattgctgtacattggtacctggactttctggctccagccaaagccaccctaggggagacacaccgcctgttccccaacaccatgctctttgcctcagaggcctgtgtgggctccaagttctgggagcagagtgtgcggctaggctcctgggatcgagggatgcagtacagccacagcatcatcacgaacctcctgtaccatgtggtcggctggaccgactggaaccttgccctgaaccccgaaggaggacccaattgggtgcgtaactttgtcgacagtcccatcattgtagacatcaccaaggacacgttttacaaacagcccatgttctaccaccttggccacttcagcaagttcattcctgagggctcccagagagtggggctggttgccagtcagaagaacgacctggacgcagtggcactgatgcatcccgatggctctgctgttgtggtcgtgctaaaccgctcctctaaggatgtgcctcttaccatcaaggatcctgctgtgggcttcctggagacaatctcacctggctactccattcacacctacctgtggcgtcgccagtgatggagcagatactcaaggaggcactgggctcagcctgggcattaaagggacagagtcagctcacacgctgtctgtgactaaagagggcacagcagggccagtgtgagcttacagcgacgtaagcccaggggcaatggtttgggtgactcactttcccctctaggtggtgccaggggctggaggcccctagaaaaagatcagtaagccccagtgtccccccagcccccatgcttatgtgaacatgcgctgtgtgctgcttgctttggaaactgggcctgggtccaggcctagggtgagctcactgtccgtacaaacacaagatcagggctgagggtaaggaaaagaagagactaggaaagctgggcccaaaactggagactgtttgtctttcctggagatgcagaactgggcccgtggagcagcagtgtcagcatcagggcggaagccttaaagcagcagcgggtgtgcccaggcacccagatgattcctatggcaccagccaggaaaaatggcagctcttaaaggagaaaatgtttgagcccagtca

SEQ ID NO: 67565 - DNA, 1464 bp, Artificial Sequence
  derived and/or modified sequence
atggagttcagcagccccagcagagaggagtgccccaagcccctgagcagagtgagcatcatggccggcagcctgaccggcctgctgctgctgcaggccgtgagctgggccagcggcgccagaccctgcatccccaagagcttcggctacagcagcgtggtgtgcgtgtgcaacgccacctactgcgacagcttcgacccccccaccttccccgccctgggcaccttcagcagatacgagagcaccagaagcggcagaagaatggagctgagcatgggccccatccaggccaaccacaccggcaccggcatcggctacaacatcatcagagtgcccatggccagctgcgacttcagcatcagaacctacacctacgccgacacccccgacgacttccagctgcacaacttcagcctgcccgaggaggacaccaagctgaagatccccctgatccacagagccctgcagctggcccagagacccgtgagcctgctggccagcccctggaccagccccacctggctgaagaccaacggcgccgtgaacggcaagggcagcctgaagggccagcccggcgacatctaccaccagacctgggccagatacttcgtgaagttcctggacgcctacgccgagcacaagctgcagttctgggccgtgaccgccgagaacgagcccagcgccggcctgctgagcggctaccccttccagtgcctgggcttcacccccgagcaccagagagacttcatcgccagagacctgggccccaccctggccaacagcacccaccacaacgtgagactgctgatgctggacgaccagagactgctgctgccccactgggccaaggtggtgctgaccgaccccgaggccgccaagtacgtgcacggcatcgccgtgcactggtacctggacttcctggcccccgccaaggccaccctgggcgagacccacagactgttccccaacaccatgctgttcgccagcgaggcctgcgtgggcagcaagttctgggagcagagcgtgagactgggcagctgggacagaggcatgcagtacagccacagcatcatcaccaacctgctgtaccacgtggtgggctggaccgactggaacctggccctgaaccccgagggcggccccaactgggtgagaaacttcgtggacagccccatcatcgtggacatcaccaaggacaccttctacaagcagcccatgttctaccacctgggccacttcagcaagttcatccccgagggcagccagagagtgggcctggtggccagccagaagaacgacctggacgccgtggccctgatgcaccccgacggcagcgccgtggtggtggtgctgaacagaagcagcaaggacgtgcccctgaccatcaaggaccccgccgtgggcttcctggagaccatcagccccggctacagcatccacacctacctgtggagaagacagtag

SEQ ID NO: 67566 - DNA, 1464 bp, Artificial Sequence
  derived and/or modified sequence
atggagttctcctccccttctagagaggaatgcccaaagcccctgtccagggtgagtatcatggccggatccctcacgggactgctgttattacaggccgtgtcatgggcgtccggtgcacggccatgcatcccaaagtctttcggttacagctccgttgtctgcgtctgtaacgccacttattgtgacagtttcgatccccctacattccccgccttgggtacattctcacggtacgagagcactcgttcaggacgcaggatggagctgtccatgggaccgatccaggccaaccacacaggaacgggcattggctacaacataatccgagtgccaatggcctcatgtgacttttctatccggacctacacgtacgctgatactcccgatgacttccagctgcataatttctcgcttcctgaggaggacacgaagttgaagattccacttatccacagggccttgcagttggcccagcgccccgtgtccctcctggcgtcgccttggactagccctacgtggctcaaaacaaacggcgccgtcaacgggaaggggtctctaaagggccaaccaggagatatttaccaccagacatgggcccgttacttcgtgaagttcttggacgcctatgctgaacataaactgcagttctgggccgttaccgcagagaacgagccttccgctggactcctgtctggataccccttccagtgtctaggcttcacgcccgagcaccagcgcgacttcatagccagggatctcgggccgaccctcgcaaacagtactcaccataatgtacgacttctcatgttagacgatcaacgcctcctccttccccactgggctaaagttgtcctgacagaccccgaggcagcaaagtatgtgcatggaatcgccgtacattggtacctcgattttctagcgcccgccaaagccacactcggggaaacccatcgcttattcccaaacacgatgctttttgcctccgaagcctgcgttggctccaagttctgggaacagtctgttagactgggatcatgggaccggggcatgcagtatagccattccatcataaccaatctactgtatcacgtcgttggatggaccgactggaacctggccctgaatcccgagggaggtccaaattgggtcagaaatttcgtagacagtcctatcattgttgacataacaaaggacacgttttataagcagcctatgttttaccacctcggacacttcagcaagttcattcctgaagggagccagcgcgtgggcctggtggcctcccagaaaaatgacctggatgccgtcgctctgatgcacccggacggtagcgcggtggttgtggttttgaatcgtagcagtaaggatgtacctctgaccatcaaggatcccgcagtgggttttctggagacgatcagtccaggttattccatacatacatacctatggcgccgccaatag

SEQ ID NO: 67567 - DNA, 1464 bp, Artificial Sequence
  derived and/or modified sequence
atggagttcagcagccccagccgggaggagtgccccaagcccctgagccgggtgtccatcatggccggcagcctgaccggcctgctgctgctgcaggccgtgtcctgggccagcggggcccggccctgcatccccaagagctttggctacagctctgtggtgtgtgtgtgcaatgccacctactgtgacagctttgatcctcccaccttccctgccctgggcaccttcagccgctatgagagcaccaggagcggccgcaggatggagctgtccatgggccccatccaggccaaccacacaggcaccggcatcggctacaacatcatccgggtgcccatggccagctgtgacttcagcatccgcacctacacctacgccgacaccccagatgacttccagctgcacaacttcagcctgcctgaggaggacaccaagctgaagatccccctcatccaccgggccctgcagctggcccagaggcctgtgtccctgctggccagcccctggaccagccccacctggctgaagaccaacggggctgtgaatggcaagggcagcctgaagggccagcccggggacatctaccaccagacctgggcccgctactttgtgaagttcctggatgcctatgcagagcacaagctgcagttctgggccgtgacagcagaaaatgagcccagcgctggcctgctgagcggctaccccttccagtgcctgggcttcaccccagagcaccagagggacttcatcgcccgggacctgggccccaccctggccaacagcacccaccacaacgtgcggctgctgatgctggatgaccagaggctgctgctgccccactgggccaaggtggtgctgacagatcctgaggccgccaagtatgtgcacggcattgctgtgcactggtacctggacttcctggccccagccaaggccaccctgggggagacccacaggctcttccccaacaccatgctgtttgccagcgaggcctgtgtgggcagcaagttctgggagcagagcgtgcggctgggctcctgggaccggggcatgcagtacagccacagcatcatcaccaacctgctgtaccacgtggtgggctggacagactggaacctggccctgaaccctgagggcggccccaactgggtgaggaactttgtggacagccccatcatcgtggacatcaccaaggacaccttctacaagcagcccatgttctaccacctgggccacttcagcaagttcatccctgagggcagccagagggtgggcctggtggccagccagaagaatgacctggatgctgtggccctgatgcacccagatggcagcgctgtggtggtggtgctgaacagaagcagcaaggatgtgcccctgaccatcaaggaccctgctgtgggcttcctggagaccatcagccctggctacagcatccacacctacctgtggaggcggcagtag

SEQ ID NO: 67568 - DNA, 1464 bp, Artificial Sequence
  derived and/or modified sequence
atggagttcagcagccccagccgggaggagtgccccaagcccctgtcgcgggtttctataatggccggatcactgaccgggctcctgctcttgcaggctgtgtcatgggccagcggcgctcgcccttgcattcccaaaagtttcgggtattccagcgtcgtctgcgtgtgcaatgcaacatattgtgactcgttcgaccctcccactttccctgccctggggacctttagcaggtacgaaagcacccgctctggtcggcgtatggagctgtccatgggccctatccaggccaatcacacaggcacaggcatagggtacaacattatccgggtgcccatggcttcctgcgatttttctatcaggacatacacatatgctgatactcctgacgactttcagcttcacaatttttcccttcccgaagaagatacaaagctcaagatcccattaattcatcgcgcgctgcagttggcgcagcgcccagtgtccctgctggctagcccctggacctcccctacgtggctgaaaacaaatggggcagtaaacggcaaaggtagcctgaaggggcagcccggcgatatttaccatcagacatgggcccgctattttgtcaaattcctggacgcttacgccgagcacaagctacagttttgggctgtcactgcagagaacgagccttccgcgggactgctctccggctacccttttcagtgcctgggtttcactccagaacatcagcgggacttcatcgcgcgagatttaggcccaactctggcaaacagcactcatcacaacgtccgtcttctcatgctagacgaccagcggttgctgctgcctcattgggccaaggtcgtacttacagacccggaagcagccaaatacgtgcacggtattgctgtccattggtatctagacttcctggcacccgctaaggccaccttgggagaaacccatcgccttttccctaataccatgttgtttgcctccgaggcttgtgtggggagcaaattttgggagcagtccgtgcggttgggttcttgggatcgaggaatgcagtattcacacagcataatcacgaacttactctatcacgttgtgggatggactgactggaatctggccctcaaccccgagggcggacctaattgggtacggaactttgtggattcacccattatcgttgatataacaaaggataccttttataaacagccaatgttctaccatctggggcactttagtaaattcattccggaaggctcgcagcgcgttggcttggtagcctctcagaaaaatgatctggatgcagtcgccctaatgcacccggacggctcagccgttgttgttgtgttaaatagaagctctaaggacgtgccgctcactatcaaggatcctgctgtcggattcctggaaactatttctcctggttattcaattcacacatacctgtggcgtaggcaatag

SEQ ID NO: 67569 - DNA, 1464 bp, Artificial Sequence
  derived and/or modified sequence
atggagttctcaagtcctagtcgggaggaatgcccaaagccactttccagagtgtccatcatggccggttcactcactggacttctcctattacaggcggtctcatgggcttccggcgctcgcccatgtatcccaaagtcctttggatatagctctgtggtttgtgtctgcaacgccacgtactgcgatagtttcgatccaccgacattcccagctctgggaaccttctccaggtacgagagtacaagaagcggcaggcgtatggagttgtctatgggaccaattcaggcaaaccacaccgggacaggcataggatataatatcatccgggtaccaatggcatcatgcgacttttcgatcaggacctatacttatgctgacacccctgacgactttcagctgcacaactttagcctgcctgaggaggataccaagctcaagattccactgattcacagagcccttcagctcgcacagcgtcccgtgtctctcctggccagcccctggacttccccgacttggctaaagaccaacggggctgtcaacgggaaaggctccctaaagggacaacccggagacatctaccatcagacctgggcccgttatttcgtcaagttcctagatgcatacgcggagcacaagttgcagttctgggccgtgaccgcagagaatgaacccagcgctgggctgctaagcgggtatcctttccaatgcctcggttttacaccggaacatcagcgagacttcattgccagggacttaggcccaaccctggctaactctacccatcacaacgttagacttctgatgcttgatgaccaaagactgttgctgccccactgggcaaaggtggtgcttaccgatccagaagctgccaagtacgtgcatggcatcgccgttcattggtacctggactttttggccccagctaaagctaccctgggagagacacaccgcctgttccctaacacaatgttgttcgccagcgaagcgtgcgtgggaagcaagttctgggagcaaagcgttcgacttggtagctgggacaggggcatgcagtatagccacagtattataaccaacctcttgtatcatgttgtggggtggacagactggaacttggctctgaatccggagggaggccctaattgggttcggaacttcgtcgatagcccaattattgtcgatattactaaagataccttttacaaacagcctatgttctatcacttagggcatttcagtaaatttattccagaaggttctcaaagggttgggttggtggctagtcagaagaacgatctggacgctgttgcactgatgcatccagacggatccgctgttgtcgtggttctgaatcgttcttctaaagacgtgcctctgactatcaaggatcccgctgttggtttcctggagaccatctcccccggatactccatccacacttacttgtggcgacgacagtag

SEQ ID NO: 67570 - DNA, 1464 bp, Artificial Sequence
  derived and/or modified sequence
atggaattttccagtcctagtcgggaagaatgccctaagcctttgtctcgggttagcataatggccgggtcacttaccggacttctcctccttcaggccgtgagctgggcatcgggggcacgaccctgcatcccaaagtcatttggatattcttccgtagtgtgcgtctgtaacgcaacatattgtgatagtttcgaccctcctacctttccggccctaggcacgttcagcagatatgaaagtacaaggtcgggtcgccggatggaactcagcatgggccctattcaggctaatcatactgggaccgggattggttacaatattatccgagtgcctatggcaagctgtgatttctccatacggacttatacttacgccgatacacctgacgattttcaacttcacaatttcagtcttccagaggaggatacaaagctaaaaatacctttgatccaccgagcgctgcagcttgcacaaagacctgtctccctactggcttctccttggacctctcccacctggctgaagacaaatggtgccgttaacgggaagggttccctcaaaggccaacctggcgacatatatcaccagacctgggcgaggtactttgtcaaattcctggacgcctacgccgaacataagttacaattctgggctgtgaccgccgagaacgagccatcggcaggtctgctatctggctacccattccaatgccttggattcaccccggagcatcagcgagactttatcgcccgcgacctgggcccgactctggcaaattccacacaccacaatgttcggctgttgatgctcgatgatcaaagacttcttcttccacactgggctaaggtggtgctaactgaccccgaggccgcaaaatacgtacacggaatagccgtgcattggtacctggattttcttgcccccgcaaaggcaaccctaggtgaaacacacagactgtttcccaacacaatgctgtttgccagtgaagcttgcgttggctctaaattctgggagcagtcagttcggctcggctcgtgggacagaggaatgcagtatagtcatagtatcatcaccaatctactgtaccacgtcgtcggttggaccgactggaacttggccttgaatcccgaggggggacccaattgggtaagaaacttcgtagactccccaattatcgtggatattacaaaagatacgttctataagcagccaatgttttatcatttgggtcatttttccaaatttataccggagggctcccagcgggtgggtctggttgcctcacagaagaatgatcttgacgctgtggccctgatgcacccggatggcagtgcggtggtggttgtattgaatcgctcgtccaaggatgtccccctgaccatcaaggatcccgctgtgggcttcctcgagaccatctctccgggctacagcatccacacgtatctctggcgcagacagtag

SEQ ID NO: 67571 - DNA, 1464 bp, Artificial Sequence
  derived and/or modified sequence
atggaattctcctcccctagcagagaagaatgccctaagccactttcacgtgttagtattatggcaggctcactcaccggactgttgcttctgcaggctgtctcatgggcgtctggcgcccgcccttgtattccaaaaagtttcggctattctagcgtcgtatgcgtgtgtaacgccacctattgtgactctttcgatcccccaacctttcccgctctgggtactttttctaggtatgagagcacacggtcagggcggcggatggaactcagcatggggcctatacaggccaaccatacaggaacggggattggttataatatcattcgcgtgccaatggccagctgcgacttcagtattcgaacatacacttacgccgacacccctgatgattttcagcttcacaatttcagtttaccagaagaggatacaaagctaaaaatacccctgatccacagagcgcttcagttagcccaacgacctgtctccctcctcgcatctccctggacatcccctacatggctgaagactaatggtgccgttaacgggaagggatccctcaaaggccagccgggcgacatctatcaccagacatgggcacgctacttcgtaaaatttctggatgcttatgcagaacacaaactgcagttctgggccgtaacagctgaaaatgaaccgtccgcggggctattaagcggataccctttccagtgtctgggcttcacccctgaacaccagcgggacttcatagcaagggatttgggaccgacactcgctaacagcactcaccacaatgtccgcttgctcatgctcgacgaccaaagattgttactcccacactgggcaaaggtggtgttaactgaccccgaagctgcaaagtacgttcacgggattgccgtgcactggtaccttgacttccttgcgcccgccaaagccacactgggagaaactcacagacttttccccaacactatgttattcgcctctgaagcctgtgtgggctcaaaattttgggaacagtcagtccgactgggatcatgggatcgcgggatgcagtattcccatagcatcatcacgaaccttctgtatcacgtggttggctggacagactggaatttggcactgaatccagaaggtggaccaaactgggtgcggaacttcgtggattcgccgatcattgtggatattacaaaggacacattctacaagcaacctatgttctaccatttaggacacttttccaaattcataccagagggaagtcagcgggtgggcctagtggcatcacagaagaatgatttggacgccgtagccctgatgcaccccgacggttccgccgtagtagttgttctgaacagatccagcaaggacgttccactaaccatcaaggatccagcagtgggatttctggaaaccatcagtcccggatactctatccatacttatctctggagacggcaatag

SEQ ID NO: 67572 - DNA, 909 bp, Artificial Sequence
  derived and/or modified sequence
atgtgcctgcagcccctgcaggagcagaagcagtgggccctggacggcgccgagtacagaaccatccaggccaactgcaccggcaccggcatcggctacaacatcatctgggtgcccatggccagctgcgacttcagcatcagaacctacacctacgccgacacccccgacgacttccagctgcacaacttcagcctgcccgaggaggacaccaagctgaagatccccctgatccacagagccctgcagctggcccagagacccgtgagcctgctggccagcccctggaccagccccaccagactgaagaccaagggcgccggcaacggcaagggccccctgaagggccagcccagagacatctaccaccagacctgggccagatacatcgtgaagttcctggacgcctacgccgagcacaagctgcagttctgggccgtgaccgccgagaacgagcccagcgccggcctgctgagcggctaccccttccagtgcctgggcttcacccccgagcaccagagagacttcatcgccagagacctgggccccaccctggccaacggcacccaccacaacgtgagactgctgatgctggacgaccagagactgctgctgccccactgggccaaggtggtgctgaccgaccccgaggccgccaagtacgtgcacggcatcgccgtgcactggtacctggacttcctggcccccgccaaggccaccctgagagagacccaccacctgttccccaacaccatgctgttcgccagcgaggcctgcgtgggcagcaagttctgggagcagagcgtgagactgggcagctgggacagaggcatgcagtacagccacagcatcatcaccaacctgctgtaccacgtggtgggctggaccgactggaaccccagcctgtag

SEQ ID NO: 67573 - DNA, 1080 bp, Artificial Sequence
  derived and/or modified sequence
atgtgcctgcagcccctgcaggagcagaagcagtgggccctggacggcgccgagtacagaaccatccaggccaactgcaccggcaccggcatcggctacaacatcatctgggtgcccatggccagctgcgacttcagcatcagaacctacacctacgccgacacccccgacgacttccagctgcacaacttcagcctgcccgaggaggacaccaagctgaagatccccctgatccacagagccctgcagctggcccagagacccgtgagcctgctggccagcccctggaccagccccaccagactgaagaccaagggcgccggcaacggcaagggccccctgaagggccagcccagagacatctaccaccagacctgggccagatacatcgtgaagttcctggacgcctacgccgagcacaagctgcagttctgggccgtgaccgccgagaacgagcccagcgccggcctgctgagcggctaccccttccagtgcctgggcttcacccccgagcaccagagagacttcatcgccagagacctgggccccaccctggccaacggcacccaccacaacgtgagactgctgatgctggacgaccagagactgctgctgccccactgggccaaggtggtgctgaccgaccccgaggccgccaagggcctgtgcggcttccaggtgctgggcgccgagtgcgccgccagactgctgggcagcagagacgccgtgcagccccagcaccaccacaagccccccgtgccctgcggcagactggacagactggagcccatcatcgtggacatcaccaagcacaccttctacaagcagcccatgttctaccacctgggccacttcagcaagttcatccccgagggcagccagagagtgggcctggtggccagccagaagaacgaccccgacgccgtggccctgatgcaccccgacggcagccccgtggtggtggtgctgaacagaagcagcaaggacgtgcccctgaccatcaaggaccccgccgtgggcttcctggagaccatcagccccggctacagcatccacacctacctgtggagaagacagtag

SEQ ID NO: 67574 - DNA, 909 bp, Artificial Sequence
  derived and/or modified sequence
atgtgcctccagccgctccaggaacagaagcagtgggccctggacggggctgaatatcggactattcaggccaattgcacagggactggaatagggtacaacatcatttgggtccctatggcgagctgcgactttagcatccgaacttacacatatgctgacacacctgatgacttccagctccacaacttttcactgcctgaggaggatacaaagctgaaaatcccactcatccatcgggccctgcagctggctcagagacccgtttcactactcgctagcccctggacatcccccacccggctgaagacaaagggggcagggaacggcaagggccccctcaaaggccaaccccgggacatctaccaccagacttgggcccgatacattgtgaagttcctcgacgcctacgctgagcacaagctgcagttctgggccgtgaccgctgagaatgaaccctctgccggcctgctgagcgggtaccctttccagtgtctggggtttactcccgagcaccagcgggacttcattgccagggatctaggccctacattagcaaacggcactcaccacaatgtgaggctcctgatgctcgacgaccagcggctcctattgccacactgggccaaagtggtgctgactgatcctgaggccgccaagtatgtccatggcatagccgtgcactggtatctcgacttccttgcccccgctaaagctaccctgcgcgagactcatcacctgttccccaatactatgctctttgcgagtgaggcttgtgtcggctctaagttttgggagcagtccgtgagactgggatcctgggatcgcggcatgcagtattcccattcaattattactaatttactgtaccatgtcgtaggctggactgattggaacccatcactgtag

SEQ ID NO: 67575 - DNA, 1080 bp, Artificial Sequence
  derived and/or modified sequence
atgtgtctgcaaccactacaagagcagaaacaatgggctttggatggagctgagtaccgtactatccaagcaaattgtacgggcactggtatcggctataatattatttgggttccgatggcaagttgcgatttctccatcagaacatatacatacgccgataccccagatgatttccaactgcacaatttctctcttcccgaggaagacaccaagctgaagatacctcttattcatagagcactgcagttagcacagcggccagtttcgctgctggccagtccctggacgagccctacacgacttaaaacaaaaggcgccgggaatggaaaaggcccactgaaaggacaacccagagacatctatcatcagacctgggctcggtatattgtgaagtttcttgatgcttatgcagagcataaactgcagttctgggccgtcactgccgagaacgagccctctgccggcctgctgagcggttacccattccagtgcctcggattcaccccagagcatcagcgggatttcatcgctagggatttgggtcctacccttgcaaacggcacccaccacaacgtgcgacttctcatgctggatgatcagcgcttgcttcttcctcactgggctaaggtggtgctcactgaccccgaggccgctaaaggactgtgcggtttccaggtgctgggcgcagaatgcgccgctcgtcttcttgggtcacgtgacgcagtgcagccccaacaccaccacaaacccccagtgccatgcggacggctggaccggctggagccaatcatcgtcgacataaccaaacatactttctacaaacagccaatgttctatcacttaggtcattttagcaaatttattcccgaggggtcccagagagtgggccttgtagcttcacaaaagaatgaccctgacgctgtggcccttatgcacccggatggctccccagtcgtggtcgtcctgaatagaagctccaaggatgtccctttgaccataaaagaccctgcagtggggttcctcgagaccattagccccggttattcgattcacacatatctgtggaggcgccagtag

SEQ ID NO: 67576 - DNA, 909 bp, Artificial Sequence
  derived and/or modified sequence
atgtgcctgcagcccctgcaggagcagaagcagtgggccctggatggagctgagtaccgcaccatccaggccaactgcacaggaactggaattggctacaacatcatctgggtgcccatggccagctgtgacttcagcatccgcacctacacctatgctgacaccccagatgacttccagctgcacaacttcagcctgcctgaggaggacaccaagctgaagatccccctcatccaccgggccctgcagctggcccagaggcctgtgtccctgctggccagcccctggaccagccccacccggctgaagaccaagggagctggaaatggcaagggccccctgaagggccagccccgggacatctaccaccagacctgggcccgctacatcgtgaagttcctggatgcctatgcagagcacaagctgcagttctgggccgtgacagcagaaaatgagcccagcgctggcctgctgagcggctaccccttccagtgcctgggcttcaccccagagcaccagagggacttcatcgcccgggacctgggccccaccctggccaacggcacccaccacaacgtgcggctgctgatgctggatgaccagaggctgctgctgccccactgggccaaggtggtgctgacagatcctgaggccgccaagtatgtgcatggaattgctgtgcactggtacctggacttcctggccccagccaaggccaccctgcgggagacccaccacctgttccccaacaccatgctgtttgccagcgaggcctgtgtgggcagcaagttctgggagcagagcgtgcggctgggctcctgggaccggggcatgcagtacagccacagcatcatcaccaacctgctgtaccacgtggtgggctggacagactggaaccccagcctgtag

SEQ ID NO: 67577 - DNA, 1080 bp, Artificial Sequence
  derived and/or modified sequence
atgtgcctgcagcccctgcaggagcagaagcagtgggccctggatggagctgagtaccgcaccatccaggccaactgcacaggaactggaattggctacaacatcatctgggtgcccatggccagctgtgacttcagcatccgcacctacacctatgctgacaccccagatgacttccagctgcacaacttcagcctgcctgaggaggacaccaagctgaagatccccctcatccaccgggccctgcagctggcccagaggcctgtgtccctgctggccagcccctggaccagccccacccggctgaagaccaagggagctggaaatggcaagggccccctgaagggccagccccgggacatctaccaccagacctgggcccgctacatcgtgaagttcctggatgcctatgcagagcacaagctgcagttctgggccgtgacagcagaaaatgagcccagcgctggcctgctgagcggctaccccttccagtgcctgggcttcaccccagagcaccagagggacttcatcgcccgggacctgggccccaccctggccaacggcacccaccacaacgtgcggctgctgatgctggatgaccagaggctgctgctgccccactgggccaaggtggtgctgacagatcctgaggccgccaagggcctgtgtggcttccaggtgctgggcgcagaatgtgccgcccggctgctgggcagcagagatgctgtgcagccccagcaccaccacaagccccctgtgccctgtggccgcctggaccggctggagcccatcatcgtggacatcaccaagcacaccttctacaagcagcccatgttctaccacctgggccacttcagcaagttcatccctgagggcagccagagggtgggcctggtggccagccagaagaatgaccctgatgctgtggccctgatgcacccagatggcagccctgtggtggtggtgctgaacagaagcagcaaggatgtgcccctgaccatcaaggaccctgctgtgggcttcctggagaccatcagccctggctacagcatccacacctacctgtggaggcggcagtag

SEQ ID NO: 67578 - DNA, 1633 bp, Artificial Sequence
  derived and/or modified sequence
ccttttgccttcggttggggctgctgtttctcttcgccgacggttcgtctcaaactcctgggctcaaaagatcctcatcttctcaagtggttgaatatacacgctccagcgaccatgcctggctgaatgaagagctttgagattttgaagaaacaggaaccatgaaatttgctttgcaactgtttgcaacctttaaggaagactgaaaaggcattcctgaagcatgtgccttcagccgctacaagagcagaagcagtgggcattggatggagctgagtacaggaccatacaggctaattgcaccggcacaggaatcggatataacatcatctgggtacccatggccagctgtgacttctccatccgcacctacacctatgcagacacccctgatgatttccagttgcacaacttcagcctcccagaggaagataccaagctcaagatacccctgattcaccgagccctgcagttggcccagcgtcccgtttcactccttgccagcccctggacatcacccactcggctcaagaccaagggagcggggaatgggaaggggccactcaagggacagcccagagacatctaccaccagacctgggccagatacattgtgaagttcctggatgcctatgctgagcacaagttacagttctgggcagtgacagctgaaaatgagccttctgctgggctgttgagtggataccccttccagtgcctgggcttcacccctgaacatcagcgagacttcattgcccgtgacctaggtcctacccttgccaacggtactcaccacaatgtccgcctactcatgctggatgaccaacgcttgctgctgccccactgggcaaaggtggtactgacagacccagaagcagctaagtatgttcatggtattgctgtacattggtacctggactttctggctccagccaaagccaccctaagggagacacaccacctgttccccaacaccatgctctttgcctcagaggcctgtgtgggttccaagttctgggagcagagtgtgcggctaggctcctgggatcgagggatgcagtacagccacagcatcatcacaaacctcctgtaccatgtggtcggctggaccgactggaacccatcattgtagacatcaccaagcacacgttttacaaacagcccatgttctaccaccttggccacttcagcaagttcattcctgagggctcccagagagtggggctggttgccagtcagaagaacgacccggacgcagtggcactgatgcatcccgatggctctcctgttgtggtcgtcctaaaccgctcctctaaggatgtgcctcttaccatcaaggatcctgctgtgggcttcctggagacaatctcacctggctactccattcacacctacctgtggcgtcgccagtgatggagcagatactcaaggaggcactgggctcagcctgggcattaaagggacagagtcagctcacacgctgtctgtgactaaagagggcacaacagggccagcgtgagcttacagcgacgtaagcccaggggcaatggtttgggtgactcactttcccctctaggtggtgccaggggctggaggcccctagaaaaagatcagtaagccccagtgtcccccc

SEQ ID NO: 67579 - DNA, 1873 bp, Artificial Sequence
  derived and/or modified sequence
cttttgccttcggttggggctgctgtttctcttcgccgacggtgacagggctttccctatgttgcccaggttcgtctcaaactcctgggctcaaaagatcctcatcttctcaagtggttgaatatacacgctccagcgaccatgcctggctgaatgaagagctttgagattttgaagaaacaggaaccatgaaatttgctttgcaactgtttgcaacctttaaggaagactgaaaaggcattcctgaagcatgtgccttcagccgctacaagagcagaagcagtgggcattggatggagctgagtacaggaccatacaggctaattgcaccggcacaggaatcggatataacatcatctgggtacccatggccagctgtgacttctccatccgcacctacacctatgcagacacccctgatgatttccagttgcacaacttcagcctcccagaggaagataccaagctcaagatacccctgattcaccgagccctgcagttggcccagcgtcccgtttcactccttgccagcccctggacatcacccactcggctcaagaccaagggagcggggaatgggaaggggccactcaagggacagcccagagacatctaccaccagacctgggccagatacattgtgaagttcctggatgcctatgctgagcacaagttacagttctgggcagtgacagctgaaaatgagccttctgctgggctgttgagtggataccccttccagtgcctgggcttcacccctgaacatcagcgagacttcattgcccgtgacctaggtcctacccttgccaacggtactcaccacaatgtccgcctactcatgctggatgaccaacgcttgctgctgccccactgggcaaaggtggtactgacagacccagaagcagctaaaggcctgtgtgggttccaagttctgggagcagagtgtgcggctaggctcctgggatcgagggatgcagtacagccacagcatcatcacaaacctcctgtaccatgtggtcggctggaccgactggaacccatcattgtagacatcaccaagcacacgttttacaaacagcccatgttctaccaccttggccacttcagcaagttcattcctgagggctcccagagagtggggctggttgccagtcagaagaacgacccggacgcagtggcactgatgcatcccgatggctctcctgttgtggtcgtcctaaaccgctcctctaaggatgtgcctcttaccatcaaggatcctgctgtgggcttcctggagacaatctcacctggctactccattcacacctacctgtggcgtcgccagtgatggagcagatactcaaggaggcactgggctcagcctgggcattaaagggacagagtcagctcacacgctgtctgtgactaaagagggcacaacagggccagcgtgagcttacagcgacgtaagcccaggggcaatggtttgggtgactcactttcccctctaggtggtgccaggggctggaggcccctagaaaaagatcagtaagccccagtgtccccccagcccccatgcttatgtgaacatgcgctgtgtgctgcttgctttggaaactgggcctgggtccaggcctagggtgagctcactgtccgtacaaacacaagatcagggctgagggtaaggaaaagaagagactaggaaagctgggcccaaaactggagactgtttgtctttcctggagatgcagaactgggcccgtggagcagcagtgtcagcatcagggcggaagccttaaagcagcagcgggtgtgcccaggcacccagatgattcctatggcaccagccaggaaaaatggcagctcttaaaggagaaaatgtttgagccca

SEQ ID NO: 67580 - DNA, 909 bp, Artificial Sequence
  derived and/or modified sequence
atgtgcctgcagcccctgcaggagcagaagcagtgggccctggacggcgccgagtaccgcaccatacaggccaactgcacgggaacgggcattggctataacattatttgggtgcctatggctagttgcgatttctcaatccggacctacacttatgccgatactccggatgacttccagctgcataatttcagccttccggaggaagacacaaaacttaagattcccctcattcacagggctcttcagttggcccagcgcccggttagcctgttagccagcccctggacaagtccaactcggttaaagaccaagggtgctggaaacggaaagggcccattgaagggacagccgcgcgacatataccaccagacttgggcgaggtacatcgtcaaatttctcgacgcctacgcagagcataagttgcaattttgggcggtcaccgccgagaatgaaccgtccgcagggttgctctctggatacccctttcagtgtcttggatttacaccagaacatcagagggatttcattgcaagggatctggggccaacattggctaatggaactcaccacaatgtgcgattgctgatgttggacgaccagaggctcctgctcccccattgggcaaaggttgtgttgactgatcccgaggcggcaaagtatgtgcacggcattgccgtacactggtatctggattttctggcacccgcaaaggctaccctcagagagactcatcatctattccccaacaccatgctgttcgcctccgaagcatgcgtgggttccaagttctgggagcagtcagttagactgggatcttgggataggggtatgcaatactctcactccatcatcactaatctgctgtatcacgtcgtgggctggacagattggaatccaagtttgtag

SEQ ID NO: 67581 - DNA, 1080 bp, Artificial Sequence
  derived and/or modified sequence
atgtgcctgcagcccctgcaggagcagaagcagtgggccctggacggggccgaatatcggaccatccaggccaattgcacaggtaccggcattggttataacatcatctgggtgcctatggcaagctgcgacttctccatcagaacctacacctatgccgacacccccgacgatttccagctacacaactttagtctcccggaggaagatactaagctgaaaataccactaattcacagggcactccaactcgcccagcggcctgtttctttactggcctcgccatggacttcacctacccggctgaagacgaagggagctggcaacgggaagggaccattaaagggtcagcccagggacatttaccaccagacttgggcaagatacatcgtgaagttcctggatgcatacgccgagcacaaactgcagttttgggctgtgaccgctgagaacgaaccttcagccggcctgctcagtggttaccccttccagtgcttggggtttacaccagagcaccaaagggacttcatagcacgagacctcggacccacccttgcgaatggaacgcatcataacgtgaggctgctcatgctggatgaccagagattgctgctgccgcactgggccaaggtcgtactgaccgacccagaagcagcaaagggtctgtgcggcttccaggtactcggggcagaatgtgctgcaaggctcctgggaagccgggacgccgtacaaccgcagcaccatcacaaaccacccgtaccctgcggccgcctcgaccgactggagccaatcatagttgatattacgaagcatactttttacaaacagcccatgttctaccatcttggacacttctctaagtttatcccggagggttcacagagggtgggactggtggcttcccaaaaaaacgatccggatgccgtcgcactgatgcatccagacggctcgcctgtcgtagtggtgctcaacaggtcaagcaaggacgtgccgctaacaattaaggaccccgctgtgggctttctggaaacgatttcccccgggtatagtatacacacatatctgtggaggcgtcagtag

SEQ ID NO: 67582 - DNA, 909 bp, Artificial Sequence
  derived and/or modified sequence
atgtgcctgcagccactgcaggagcagaagcaatgggccctcgacggtgctgaataccggaccatacaggccaactgcacgggcacaggcatcggatataatataatctgggtccccatggccagctgcgactttagcatcaggacatacacctatgcggacactcccgacgatttccagttacacaacttttccctcccggaggaagacaccaagttgaagataccactaatccatcgggctctccagctggcccagcgaccagtgtcacttctggcatcaccgtggaccagccctacacgactgaaaacaaagggagccggtaatggcaaaggtccccttaaaggacagccccgagacatttatcaccagacctgggctaggtatatcgttaaatttttagatgcctacgcagaacataagctgcagttttgggccgtgaccgcggagaacgaaccttcagcgggacttctctccggatatcctttccagtgcctgggttttacccctgagcaccagcgtgacttcatcgccagagacttgggccctacactggccaacggtacgcaccacaacgttagactgctgatgctggacgatcaacggctgttacttccccactgggccaaagttgttctgacagatccagaggctgcaaaatacgtgcacgggattgcagttcactggtacttggactttcttgcacctgcaaaagccaccctgcgagagacacatcacctgttcccgaacacaatgctgttcgcttctgaggcatgtgtgggctctaagttttgggagcagtcggtgagactgggttcctgggatcggggaatgcagtactctcactctataatcaccaaccttctgtaccacgttgttggctggactgattggaatccctccctgtag

SEQ ID NO: 67583 - DNA, 1080 bp, Artificial Sequence
  derived and/or modified sequence
atgtgccttcaaccgttgcaggagcagaaacagtgggctctggatggagcggagtatagaactatccaagccaactgtactggcaccggtattggatataacatcatatgggtgccaatggcctcatgtgatttctctattcgcacatatacgtacgcggatactccggacgatttccagctgcacaacttttctcttcctgaggaggataccaagctgaagatcccactcatccaccgggctctacagctagcccagagacctgttagtcttctggcgagcccctggacttctccaaccaggctcaaaacaaagggagccggaaacgggaaggggccactgaaagggcagcccagagacatttaccatcagacctgggctagatacattgtgaaattcctcgacgcctatgccgagcacaagctccagttttgggctgtgaccgcagagaacgaacctagcgcaggactcttgtcaggctacccctttcaatgccttggctttactcccgaacaccagcgggactttattgccagagatctgggtcctacacttgctaacggaacacatcacaatgtgcggcttttaatgttggacgaccagcgactgttgcttccacactgggccaaggttgtgctgactgatccagaggccgctaagggcctgtgtggctttcaggtgcttggtgctgagtgcgcggcaaggctgctcgggagtagggatgcagttcagccccaacaccaccataagcctcccgtcccctgcggtagactggatcggctggaaccaatcatcgtggacatcacaaagcacacattctacaagcagcctatgttctaccatctgggacacttttctaaattcattcctgaggggtcccagcgggtaggattagtggcctctcaaaaaaacgatccagacgctgtggcgttaatgcatccagatgggagccctgtggtggttgtccttaacaggtcctccaaggatgttccgctcaccatcaaagatccggctgttggtttcttggagacaatttcaccaggctacagtatccacacttacctctggcgcaggcaatag

SEQ ID NO: 67584 - RNA, 1464 nt, Artificial Sequence
  derived and/or modified sequence
auggaauuuuccaguccuagucgggaagaaugcccuaagccuuugucucggguuagcauaauggccgggucacuuaccggacuucuccuccuucaggccgugagcugggcaucgggggcacgacccugcaucccaaagucauuuggauauucuuccguagugugcgucuguaacgcaacauauugugauaguuucgacccuccuaccuuuccggcccuaggcacguucagcagauaugaaaguacaaggucgggucgccggauggaacucagcaugggcccuauucaggcuaaucauacugggaccgggauugguuacaauauuauccgagugccuauggcaagcugugauuucuccauacggacuuauacuuacgccgauacaccugacgauuuucaacuucacaauuucagucuuccagaggaggauacaaagcuaaaaauaccuuugauccaccgagcgcugcagcuugcacaaagaccugucucccuacuggcuucuccuuggaccucucccaccuggcugaagacaaauggugccguuaacgggaaggguucccucaaaggccaaccuggcgacauauaucaccagaccugggcgagguacuuugucaaauuccuggacgccuacgccgaacauaaguuacaauucugggcugugaccgccgagaacgagccaucggcaggucugcuaucuggcuacccauuccaaugccuuggauucaccccggagcaucagcgagacuuuaucgcccgcgaccugggcccgacucuggcaaauuccacacaccacaauguucggcuguugaugcucgaugaucaaagacuucuucuuccacacugggcuaagguggugcuaacugaccccgaggccgcaaaauacguacacggaauagccgugcauugguaccuggauuuucuugcccccgcaaaggcaacccuaggugaaacacacagacuguuucccaacacaaugcuguuugccagugaagcuugcguuggcucuaaauucugggagcagucaguucggcucggcucgugggacagaggaaugcaguauagucauaguaucaucaccaaucuacuguaccacgucgucgguuggaccgacuggaacuuggccuugaaucccgaggggggacccaauuggguaagaaacuucguagacuccccaauuaucguggauauuacaaaagauacguucuauaagcagccaauguuuuaucauuugggucauuuuuccaaauuuauaccggagggcucccagcgggugggucugguugccucacagaagaaugaucuugacgcuguggcccugaugcacccggauggcagugcgguggugguuguauugaaucgcucguccaaggaugucccccugaccaucaaggaucccgcugugggcuuccucgagaccaucucuccgggcuacagcauccacacguaucucuggcgcagacaguag

SEQ ID NO: 67585 - RNA, 1464 nt, Artificial Sequence
  derived and/or modified sequence
auggaauucuccuccccuagcagagaagaaugcccuaagccacuuucacguguuaguauuauggcaggcucacucaccggacuguugcuucugcaggcugucucaugggcgucuggcgcccgcccuuguauuccaaaaaguuucggcuauucuagcgucguaugcguguguaacgccaccuauugugacucuuucgaucccccaaccuuucccgcucuggguacuuuuucuagguaugagagcacacggucagggcggcggauggaacucagcauggggccuauacaggccaaccauacaggaacggggauugguuauaauaucauucgcgugccaauggccagcugcgacuucaguauucgaacauacacuuacgccgacaccccugaugauuuucagcuucacaauuucaguuuaccagaagaggauacaaagcuaaaaauaccccugauccacagagcgcuucaguuagcccaacgaccugucucccuccucgcaucucccuggacauccccuacauggcugaagacuaauggugccguuaacgggaagggaucccucaaaggccagccgggcgacaucuaucaccagacaugggcacgcuacuucguaaaauuucuggaugcuuaugcagaacacaaacugcaguucugggccguaacagcugaaaaugaaccguccgcggggcuauuaagcggauacccuuuccagugucugggcuucaccccugaacaccagcgggacuucauagcaagggauuugggaccgacacucgcuaacagcacucaccacaauguccgcuugcucaugcucgacgaccaaagauuguuacucccacacugggcaaaggugguguuaacugaccccgaagcugcaaaguacguucacgggauugccgugcacugguaccuugacuuccuugcgcccgccaaagccacacugggagaaacucacagacuuuuccccaacacuauguuauucgccucugaagccugugugggcucaaaauuuugggaacagucaguccgacugggaucaugggaucgcgggaugcaguauucccauagcaucaucacgaaccuucuguaucacgugguuggcuggacagacuggaauuuggcacugaauccagaagguggaccaaacugggugcggaacuucguggauucgccgaucauuguggauauuacaaaggacacauucuacaagcaaccuauguucuaccauuuaggacacuuuuccaaauucauaccagagggaagucagcgggugggccuaguggcaucacagaagaaugauuuggacgccguagcccugaugcaccccgacgguuccgccguaguaguuguucugaacagauccagcaaggacguuccacuaaccaucaaggauccagcagugggauuucuggaaaccaucagucccggauacucuauccauacuuaucucuggagacggcaauag

SEQ ID NO: 67586 - DNA, 906 bp, Artificial Sequence
  derived and/or modified sequence
atgaacacgggagtagaggcaggcgagacagcatgcaagcttgccagaaaatggggctacactgttaagggcattcagaaatacaaggccaagatcgtgttcgccgcaggaaacttttggggccgcactcttagcgctatctcctcgtctacagaccccactagctatgacggttttggaccctttatgccagggttcgatatcatcccttacaacgacttaccagctctggagcgagctctgcaggaccctaatgtggctgcatttatggtggagcccatccaaggggaggctggtgtggtggtgccggaccccggctacctaatgggagtccgcgagctgtgcacgagacaccaagtgctcttcatcgccgatgaaattcaaaccggcttagcccgaaccgggcgatggctagctgttgattacgaaaatgttcgacccgatatcgtgttattaggcaaggctctctccggggggctttatccagtatctgccgtgctgtgcgatgatgacatcatgctaactattaagccaggcgagcacggatccacctatggaggcaatccattgggttgtcgtgtggcgattgctgccttggaggtactggaggaggagaatctcgctgagaatgcagacaagctcggaattatactacgcaacgaactcatgaagctgccttccgatgtggttaccgctgtgcgggggaaaggcctactgaacgcgatcgtcatcaaggaaacaaaagactgggatgcctggaaagtatgtcttcgcctgcgtgacaacggcctcctggccaagcctacccacggcgacataatacgattcgcacctccgctggttattaaagaagatgagctgcgcgaaagcatagaaatcattaataaaaccatactgtcattctag

SEQ ID NO: 67587 - DNA, 906 bp, Artificial Sequence
  derived and/or modified sequence
atgaacacaggagtggaggccggggagacagcctgcaagctggccaggaagtggggctacacagtgaagggcatccagaagtacaaggccaagatcgtgtttgctgctggcaacttctggggccgcaccctgagcgccatcagcagcagcacagaccccaccagctatgatggcttcggccccttcatgcctggctttgacatcatcccctacaatgacctgcctgccctggagcgggccctgcaggaccccaacgtggccgccttcatggtggagcccatccagggcgaggccggcgtggtggtgcctgaccccggctacctgatgggcgtgcgggagctgtgcaccaggcaccaggtgctcttcatcgcagatgagatccagacaggcctggccaggacaggccgctggctggccgtggactatgaaaatgtgcggccagacatcgtgctgctgggcaaggccctgagcggcggcctgtaccctgtgtctgctgtgctgtgtgatgatgacatcatgctgaccatcaagccaggagaacatggcagcacctatggaggcaaccccctgggctgccgggtggccatcgccgccctggaggtgctggaggaggagaacctggctgaaaatgctgacaagctgggcatcatcctgagaaatgagctgatgaagctgcccagtgatgtggtgacagctgtgcggggcaagggcctgctgaatgccatcgtcatcaaggagaccaaggactgggatgcctggaaggtgtgcctgcggctgcgggacaatggcctgctggccaagcccacccacggggacatcatccgctttgccccacccctggtgatcaaggaggatgagctgcgggagagcattgagatcatcaacaagaccatcctgtccttctag

SEQ ID NO: 67588 - DNA, 906 bp, Artificial Sequence
  derived and/or modified sequence
atgaacaccggcgtggaggccggcgagaccgcctgcaagctggcccgtaagtggggttacaccgtgaaaggaattcaaaagtacaaagctaagattgtatttgcagctgggaatttctggggcaggacgctatctgctatttccagcagtacagaccctactagttatgatgggttcggcccgtttatgcctggattcgacatcataccttataacgacctgccagctctcgaacgcgctctgcaggatcctaatgtggctgccttcatggtggagccgatacagggcgaggctggagtggttgttcccgaccctggttacctcatgggagtccgcgagctgtgcaccagacaccaggtgctgttcatcgcagacgaaatccagacaggactcgcccgcacaggccgatggctggccgtggactatgagaatgttaggcccgatattgtcttactgggtaaagcactgtccggtgggctgtatccagtctctgccgttctgtgcgatgacgatatcatgctcacaatcaaacccggcgagcatgggtcaacatacggcgggaacccactggggtgcagggtcgcaatcgcagctcttgaagttttagaggaggaaaatctggccgagaatgctgataaactagggatcattctccgcaacgagctaatgaagctgccaagtgatgtggtaactgccgtgcgtggaaagggattactcaacgccatcgtcattaaagaaacaaaggactgggacgcttggaaagtttgcttgagactgagagacaacgggttacttgccaagcctacacatggggatataatccgattcgccccacccctggttatcaaagaagatgaactccgagaatctattgagatcattaataagactatcctgtctttctag

SEQ ID NO: 67589 - DNA, 906 bp, Artificial Sequence
  derived and/or modified sequence
atgaacaccggagttgaagctggcgagactgcttgcaagcttgctagaaagtgggggtatactgtgaaaggtattcagaagtataaagcaaagatcgtgtttgccgcaggaaacttttggggtcggaccttgagcgctatttcatccagcaccgatcctactagctacgatgggttcggaccgtttatgcccggattcgacatcatcccctacaatgatctacccgcactcgagcgtgcactgcaagatcccaacgtagctgcctttatggtggagccaatacagggcgaggctggagtggtcgtgcccgatccaggttatctcatgggggtccgtgagctttgtacgcgccaccaggtgcttttcattgccgacgagatacagacaggcctggcacgcaccggcaggtggctcgcggtggattacgagaatgtccggccagacatcgtcctgctgggtaaagcactgtccggaggcctctaccccgtctctgccgtgctgtgtgatgatgacatcatgcttactatcaaaccaggcgaacacggatccacttacggcggaaacccattaggctgtagggtggcaatcgccgcacttgaagtgttggaagaggagaatcttgcagaaaacgctgataagttgggcatcatattgcggaatgaactcatgaaattgccttctgatgtggttacagctgtgaggggcaaagggctgctgaacgccatagtgattaaagaaactaaggactgggacgcgtggaaggtctgcctacgcctgagagacaacggcttgcttgctaagcctacccacggggacatcattaggtttgcaccaccactggtgattaaggaagacgagctgcgggagagtattgaaatcattaacaaaaccatcttgagtttctag

SEQ ID NO: 67590 - DNA, 906 bp, Artificial Sequence
  derived and/or modified sequence
atgaacaccggcgtggaggccggcgagaccgcctgcaagctggccagaaagtggggctacaccgtgaagggcatccagaagtacaaggccaagatcgtgttcgccgccggcaacttctggggcagaaccctgagcgccatcagcagcagcaccgaccccaccagctacgacggcttcggccccttcatgcccggcttcgacatcatcccctacaacgacctgcccgccctggagagagccctgcaggaccccaacgtggccgccttcatggtggagcccatccagggcgaggccggcgtggtggtgcccgaccccggctacctgatgggcgtgagagagctgtgcaccagacaccaggtgctgttcatcgccgacgagatccagaccggcctggccagaaccggcagatggctggccgtggactacgagaacgtgagacccgacatcgtgctgctgggcaaggccctgagcggcggcctgtaccccgtgagcgccgtgctgtgcgacgacgacatcatgctgaccatcaagcccggcgagcacggcagcacctacggcggcaaccccctgggctgcagagtggccatcgccgccctggaggtgctggaggaggagaacctggccgagaacgccgacaagctgggcatcatcctgagaaacgagctgatgaagctgcccagcgacgtggtgaccgccgtgagaggcaagggcctgctgaacgccatcgtgatcaaggagaccaaggactgggacgcctggaaggtgtgcctgagactgagagacaacggcctgctggccaagcccacccacggcgacatcatcagattcgccccccccctggtgatcaaggaggacgagctgagagagagcatcgagatcatcaacaagaccatcctgagcttctag

SEQ ID NO: 67591 - protein, 402 aa, Artificial Sequence
  derived and/or modified sequence
MHQRDLSRSSSPPSLLDQLQMGCDGASCGSLNMECRVCGDKASGFHYGVHACEGCKGFFRRTIRMKLEYEKCERSCKIQKKNRNKCQYCRFQKCLALGMSHNAIRFGRMPEAEKRKLVAGLTANEGSQYNPQVADLKAFSKHIYNAYLKNFNMTKKKARSILTGKASHTAPFVIHDIETLWQAEKGLVWKQLVNGLPPYKEISVHVFYRCQCTTVETVRELTEFAKSIPSFSSLFLNDQVTLLKYGVHEAIFAMLASIVNKDGLLVANGSGFVTREFLRSLRKPFSDIIEPKFEFAVKFNALELDDSDLALFIAAIILCGDRPGLMNVPRVEAIQDTILRALEFHLQANHPDAQYLFPKLLQKMADLRQLVTEHAQMMQRIKKTETETSLHPLLQEIYKDMY

SEQ ID NO: 67592 - DNA, 1209 bp, Artificial Sequence
  derived and/or modified sequence
atgcaccagagggaccttagccgcagtagcagccccccttctttactggaccagctgcagatggggtgcgatggcgcttcctgcggatctctgaacatggagtgtagagtctgcggtgataaagccagcggatttcattatggcgttcacgcctgtgagggatgtaagggcttcttcaggcgtacgattcgtatgaagttggaatacgaaaaatgtgagagaagctgcaagatacaaaaaaaaaacagaaacaagtgccaatactgcagattccagaagtgtttggcgctgggcatgtcgcacaacgctatcaggtttgggagaatgcccgaagcggagaaaagaaagcttgtcgccgggcttacagcaaacgaaggctctcagtacaacccccaggtcgcagatctgaaggcatttagtaagcatatttataatgcctacctgaaaaattttaacatgacgaagaaaaaggcgagatcaattctgaccggtaaggcttctcatactgcgccatttgtcattcatgatatcgaaaccctatggcaggctgaaaaaggcctggtgtggaaacagttggttaacggcctgccaccttacaaggagatttccgtgcacgtattttatcgttgccagtgcactacagtcgagacagtgagagagcttaccgaatttgccaagtctattccgagtttttcaagcttgttcctgaacgaccaggtgaccttgctcaaatatggcgtgcacgaggcaatctttgctatgctggcctcaattgtcaataaagacgggctcctcgtagccaacggcagtgggttcgtgacccgggagtttctgcgctcattacgaaaaccgttttcagatattattgaaccaaaatttgaattcgctgtgaagttcaatgctttggagctggacgacagcgatctggctcttttcatcgccgcgattatcctttgcggagatcgacctgggctaatgaacgtgccgcgggtcgaagctattcaagacactattctgcgggccctggagtttcatctccaggcaaaccatccagatgcccaatatctgttccctaaacttctgcagaaaatggctgatctacgtcaactagtcacagaacatgcacagatgatgcagagaataaaaaaaaccgaaacagaaaccagtctgcatcctctgttacaggaaatttataaggacatgtattag

SEQ ID NO: 67593 - DNA, 1017 bp, Artificial Sequence
  derived and/or modified sequence
atgaagctggagtacgagaagtgtgaaagatcttgcaaaatccagaagaagaacaggaacaagtgccagtactgcagatttcaaaaatgtctggccctgggcatgtcccacaacgccatccgctttggtcggatgccagaagccgagaagagaaagctggtggccggcctcaccgccaacgagggctctcagtacaatccccaggtggccgaccttaaagcattctctaaacatatttacaatgcttatttgaaaaatttcaacatgaccaagaagaaagcccgatctatcctgacgggcaaagcatcccacacagccccttttgttatacacgatatcgagaccttatggcaggcagagaaggggctcgtatggaaacagctggtcaatggactgccaccatataaggagatttctgtccatgtgttttaccgctgtcagtgcactactgtcgagacagtacgcgagctgaccgagtttgcaaagtcgattccaagtttttcctcactgttcctaaatgaccaggttaccctgcttaaatacggcgttcacgaggcaatatttgctatgttagccagcattgtgaacaaggatgggctactcgtggccaacggctctggtttcgtgaccagagagttcctgcgaagcctcaggaaaccatttagcgacatcattgaacctaagttcgaatttgctgtaaagttcaacgccctggaactcgatgattctgatctggccctttttattgcagccattatactctgtggggatagaccaggactaatgaatgtgccaagagtggaagccattcaggatacgatcctcagagcccttgagttccaccttcaggccaatcaccctgatgctcaatacctgtttcccaaacttttgcagaagatggcagatctgagacaactggtgactgaacatgctcaaatgatgcaacgtataaaaaaaacagaaaccgagacgagcttgcaccccctgcttcaagaaatctataaagacatgtactag

SEQ ID NO: 67594 - DNA, 1209 bp, Artificial Sequence
  derived and/or modified sequence
atgcaccagagggacctgagccgcagcagcagcccccccagcctgctggaccagctgcagatgggctgtgatggagccagctgtggcagcctgaacatggagtgccgggtgtgtggggacaaggccagcggcttccactatggagtgcacgcctgtgagggctgcaagggcttcttccggaggaccatccgcatgaagctggagtatgaaaaatgtgagaggagctgcaagatccagaagaagaacagaaacaagtgccagtactgccgcttccagaagtgcctggccctgggcatgagccacaatgccatccgcttcggccgcatgcctgaggccgagaagaggaagctggtggccggcctgacagccaatgaaggcagccagtacaacccccaggtggccgacctgaaggccttcagcaagcacatctacaatgcctacctgaagaacttcaacatgaccaagaagaaggcccggagcatcctgaccgggaaggccagccacacagcccccttcgtcatccatgacatcgagaccctgtggcaggccgagaagggcctggtgtggaagcagctggtgaatggcctgcccccctacaaggagatctctgtgcacgtgttctaccgctgccagtgcaccaccgtggagaccgtgcgggagctgacagaatttgccaagagcatccccagcttcagcagcctcttcctgaatgaccaggtgaccctgctgaagtatggagtgcatgaggccatctttgccatgctggccagcatcgtgaacaaggatggcctgctggtggccaacggcagcggctttgtgacccgggagttcctgcggagcctgaggaagcccttcagtgacatcatcgagcccaagtttgaatttgctgtgaagttcaatgccctggagctggatgacagcgacctggccctcttcatcgccgccatcatcctgtgtggggacaggcctggcctgatgaatgtgccccgggtggaggccatccaggacaccatcctgcgggccctggagttccacctgcaggccaaccacccagatgcccagtacctgttccccaagctgctgcagaagatggctgacctgcggcagctggtgacagagcacgcccagatgatgcagaggatcaagaagacagaaacagagaccagcctgcaccccctgctgcaggagatctacaaggacatgtactag

SEQ ID NO: 67595 - DNA, 1017 bp, Artificial Sequence
  derived and/or modified sequence
atgaagctggagtatgaaaaatgtgagaggagctgcaagatccagaagaagaacagaaacaagtgccagtactgccgcttccagaagtgcctggccctgggcatgagccacaatgccatccgcttcggccgcatgcctgaggccgagaagaggaagctggtggccggcctgacagccaatgaaggcagccagtacaacccccaggtggccgacctgaaggccttcagcaagcacatctacaatgcctacctgaagaacttcaacatgaccaagaagaaggcccggagcatcctgaccgggaaggccagccacacagcccccttcgtcatccatgacatcgagaccctgtggcaggccgagaagggcctggtgtggaagcagctggtgaatggcctgcccccctacaaggagatctctgtgcacgtgttctaccgctgccagtgcaccaccgtggagaccgtgcgggagctgacagaatttgccaagagcatccccagcttcagcagcctcttcctgaatgaccaggtgaccctgctgaagtatggagtgcatgaggccatctttgccatgctggccagcatcgtgaacaaggatggcctgctggtggccaacggcagcggctttgtgacccgggagttcctgcggagcctgaggaagcccttcagtgacatcatcgagcccaagtttgaatttgctgtgaagttcaatgccctggagctggatgacagcgacctggccctcttcatcgccgccatcatcctgtgtggggacaggcctggcctgatgaatgtgccccgggtggaggccatccaggacaccatcctgcgggccctggagttccacctgcaggccaaccacccagatgcccagtacctgttccccaagctgctgcagaagatggctgacctgcggcagctggtgacagagcacgcccagatgatgcagaggatcaagaagacagaaacagagaccagcctgcaccccctgctgcaggagatctacaaggacatgtactag

SEQ ID NO: 67596 - DNA, 1209 bp, Artificial Sequence
  derived and/or modified sequence
atgcaccagcgggacctgagccggagcagcagcccccccagcctgctggaccaactgcagatggggtgcgatggagctagctgcggaagccttaacatggagtgccgagtttgtggtgataaggcctctgggttccattacggagtccatgcatgtgagggatgtaagggattctttcggcgaacgattagaatgaagctagagtatgaaaagtgcgagaggtcctgcaagatccaaaagaaaaaccgaaacaaatgccagtactgtcggttccaaaaatgtctggcgttgggaatgtcacataatgctatccgctttgggcggatgcccgaagctgaaaagcgcaaactggtggccggcctaacagctaacgagggcagtcaatataacccccaagtagcggaccttaaagcgttctcgaagcatatttacaatgcctatctgaaaaactttaatatgacgaaaaagaaagcaaggtctatccttactggcaaggcctctcatactgcaccttttgtgattcatgatatagagacactgtggcaggcagaaaagggcctcgtctggaagcagctggtgaacggactacccccttataaagagatttcagttcatgtcttctatagatgccagtgcacaacggtggaaacggtgagagaactcaccgagttcgctaagagcattccttcattcagctccttattcttaaacgaccaggtgacactgttaaagtatggcgtacatgaggcgattttcgccatgctggcctcaatagtgaataaggacggcctgctggtagcgaacgggtctgggttcgtgacgagggagtttttgagaagtctgagaaagcctttttctgacattattgaaccgaagttcgagttcgctgtcaaatttaacgcgctcgaactcgatgacagtgacttggccctgtttatagccgccatcatcttgtgcggtgacaggcccggacttatgaatgtccccagggttgaagcaatccaggacacaattctgcgcgcactcgagtttcacctgcaggcgaaccaccctgacgcacagtatctgtttcctaagctgcttcagaaaatggctgatctgcgtcaattagtgaccgagcacgcgcagatgatgcagaggataaagaagacggagaccgagactagccttcatccccttctgcaggagatttacaaagacatgtactag

SEQ ID NO: 67597 - DNA, 1017 bp, Artificial Sequence
  derived and/or modified sequence
atgaagctggagtacgagaagtgcgagcggagctgcaagatccagaagaagaatcgtaacaaatgccagtattgtcgattccaaaagtgcctcgccttgggcatgtctcataatgcgattagatttggacgtatgcccgaggcggagaagcgaaaactagtcgccggtctcacggctaacgagggcagtcaatacaatccccaggtggcagatctgaaggcctttagcaagcatatttataatgcgtacctgaaaaacttcaatatgacaaagaagaaagcccgctccattctgacaggtaaggctagtcacacagctcctttcgtgatccacgacattgaaacactgtggcaagcagagaagggactggtgtggaagcaactggtgaatggcctcccaccctataaggaaatttctgtccatgtcttttaccgttgccagtgcacaacggtagagactgttcgggagctgaccgagtttgcaaaatccattccaagctttagcagcctgtttctgaacgaccaggttactctgctgaaatacggggtccacgaggcaatcttcgcgatgctcgcatcaatcgtgaataaagacgggctgttagtcgcgaacggctccgggttcgtaaccagggagttcttacggagcctgcggaagccattctcggatatcattgaaccaaagtttgagtttgcagtcaagttcaatgccctcgagctggacgacagcgacctggccctgttcatcgccgccattattctgtgcggagaccggcctggcctcatgaacgtacctcgagttgaagctatccaggatactatcctgagggcactggagttccacttgcaagccaatcaccccgacgcccagtatctgttccccaagctgctgcagaaaatggctgatctacggcaactcgtaacagagcacgcccaaatgatgcagaggattaagaaaacagaaacagagacgagtctacacccacttttgcaggaaatctataaagacatgtactag

SEQ ID NO: 67598 - DNA, 3516 bp, Artificial Sequence
  derived and/or modified sequence
gcggagcgtgtgacgctgcggccgccgcggacctggggattaatgggaaaagttttggcaggagcgggagaattctgcggagcctgcgggacggcggcggtggcgccgtaggcagccgggacagtgttgtacagtgttttgggcatgcacgtgatactcacacagtggcttctgctcaccaacagatgaagacagatgcaccaacgagacctctcccggagctcctcgccaccctcactgctggaccaactgcagatgggctgtgacggggcctcatgcggcagcctcaacatggagtgccgggtgtgcggggacaaggcatcgggcttccactacggtgttcatgcatgtgaggggtgcaagggcttcttccgtcgtacgatccgcatgaagctggagtacgagaagtgtgagcgcagctgcaagattcagaagaagaaccgcaacaagtgccagtactgccgcttccagaagtgcctggcactgggcatgtcacacaacgctatccgttttggtcggatgccggaggctgagaagaggaagctggtggcagggctgactgcaaacgaggggagccagtacaacccacaggtggccgacctgaaggccttctccaagcacatctacaatgcctacctgaaaaacttcaacatgaccaaaaagaaggcccgcagcatcctcaccggcaaagccagccacacggcgccctttgtgatccacgacatcgagacattgtggcaggcagagaaggggctggtgtggaagcagttggtgaatggcctgcctccctacaaggagatcagcgtgcacgtcttctaccgctgccagtgcaccacagtggagaccgtgcgggagctcactgagttcgccaagagcatccccagcttcagcagcctcttcctcaacgaccaggttacccttctcaagtatggcgtgcacgaggccatcttcgccatgctggcctctatcgtcaacaaggacgggctgctggtagccaacggcagtggctttgtcacccgtgagttcctgcgcagcctccgcaaacccttcagtgatatcattgagcctaagtttgaatttgctgtcaagttcaacgccctggaacttgatgacagtgacctggccctattcattgcggccatcattctgtgtggagaccggccaggcctcatgaacgttccacgggtggaggctatccaggacaccatcctgcgtgccctcgaattccacctgcaggccaaccaccctgatgcccagtacctcttccccaagctgctgcagaagatggctgacctgcggcaactggtcaccgagcacgcccagatgatgcagcggatcaagaagaccgaaaccgagacctcgctgcaccctctgctccaggagatctacaaggacatgtactaacggcggcacccaggcctccctgcagactccaatggggccagcactggaggggcccacccacatgacttttccattgaccagcccttgagcacccggcctggagcagcagagtcccacgatcgccctcagacacatgacacccacggcctctggctccctgtgccctctctcccgcttcctccagccagctctcttcctgtctttgttgtctccctctttctcagttcctctttcttttctaattcctgttgctctgtttcttcctttctgtaggtttctctcttcccttctcccttgccctccctttctctctccaccccccacgtctgtcctcctttcttattctgtgagatgttttgtattatttcaccagcagcatagaacaggacctctgcttttgcacaccttttccccaggagcagaagagagtggggcctgccctctgccccatcattgcacctgcaggcttaggtcctcacttctgtctcctgtcttcagagcaaaagacttgagccatccaaagaaacactaagctctctgggcctgggttccagggaaggctaagcatggcctggactgactgcagccccctatagtcatggggtccctgctgcaaaggacagtgggcaggaggccccaggctgagagccagatgcctccccaagactgtcattgcccctccgatgctgaggccacccactgacccaactgatcctgctccagcagcacacctcagccccactgacacccagtgtccttccatcttcacactggtttgccaggccaatgttgctgatggccccctgcactggccgctggacggcactctcccagcttggaagtaggcagggttccctccaggtgggcccccacctcactgaagaggagcaagtctcaagagaaggaggggggattggtggttggaggaagcagcacacccaattctgcccctaggactcggggtctgagtcctggggtcaggccagggagagctcggggcaggccttccgccagcactcccactgcccccctgcccagtagcagccgcccacattgtgtcagcatccagggccagggcctggcctcacatccccctgctcctttctctagctggctccacgggagttcaggccccactccccctgaagctgcccctccagcacacacacataagcactgaaatcactttacctgcaggctccatgcacctcccttccctccctgaggcaggtgagaacccagagagaggggcctgcaggtgagcaggcagggctgggccaggtctccggggaggcaggggtcctgcaggtcctggtgggtcagcccagcacctgctcccagtgggagcttcccgggataaactgagcctgttcattctgatgtccatttgtcccaatagctctactgccctccccttcccctttactcagcccagctggccacctagaagtctccctgcacagcctctagtgtccggggaccttgtgggaccagtcccacaccgctggtccctgccctcccctgctcccaggttgaggtgcgctcacctcagagcagggccaaagcacagctgggcatgccatgtctgagcggcgcagagccctccaggcctgcaggggcaaggggctggctggagtctcagagcacagaggtaggagaactggggttcaagcccaggcttcctgggtcctgcctggtcctccctcccaaggagccattctgtgtgtgactctgggtggaagtgcccagcccctgcccctacgggcgctgcagcctcccttccatgccccaggatcactctctgctggcaggattcttcccgctccccacctacccagctgatgggggttggggtgcttcctttcaggccaaggctatgaagggacagctgctgggacccacctccccctccccggccacatgccgcgtccctgccccgacccgggtctggtgctgaggatacagctcttctcagtgtctgaacaatctccaaaattgaaatgtatatttttgctaggagccccagcttcctgtgtttttaatataaatagtgtacacagactgacgaaactttaaataaatgggaattaaatatttaagagctgactggaa

SEQ ID NO: 67599 - DNA, 1505 bp, Artificial Sequence
  derived and/or modified sequence
gagaattctgcggagcctgcgggacggcggcggtggcgccgtaggcagccgggacaggctgatgggaaccaccctgtagaggtccatctgcgttcagacccagacgatgccagagctatgactgggcctgcaggtgtggcgccgaggggagatcagccatggagcagccacaggaggaagcccctgaggtccgggaagaggaggagaaagaggaagtggcagagggcttcttccgtcgtacgatccgcatgaagctggagtacgagaagtgtgagcgcagctgcaagattcagaagaagaaccgcaacaagtgccagtactgccgcttccagaagtgcctggcactgggcatgtcacacaacgctatccgttttggtcggatgccggaggctgagaagaggaagctggtggcagggctgactgcaaacgaggggagccagtacaacccacaggtggccgacctgaaggccttctccaagcacatctacaatgcctacctgaaaaacttcaacatgaccaaaaagaaggcccgcagcatcctcaccggcaaagccagccacacggcgccctttgtgatccacgacatcgagacattgtggcaggcagagaaggggctggtgtggaagcagttggtgaatggcctgcctccctacaaggagatcagcgtgcacgtcttctaccgctgccagtgcaccacagtggagaccgtgcgggagctcactgagttcgccaagagcatccccagcttcagcagcctcttcctcaacgaccaggttacccttctcaagtatggcgtgcacgaggccatcttcgccatgctggcctctatcgtcaacaaggacgggctgctggtagccaacggcagtggctttgtcacccgtgagttcctgcgcagcctccgcaaacccttcagtgatatcattgagcctaagtttgaatttgctgtcaagttcaacgccctggaacttgatgacagtgacctggccctattcattgcggccatcattctgtgtggagaccggccaggcctcatgaacgttccacgggtggaggctatccaggacaccatcctgcgtgccctcgaattccacctgcaggccaaccaccctgatgcccagtacctcttccccaagctgctgcagaagatggctgacctgcggcaactggtcaccgagcacgcccagatgatgcagcggatcaagaagaccgaaaccgagacctcgctgcaccctctgctccaggagatctacaaggacatgtactaacggcggcacccaggcctccctgcagactccaatggggccagcactggaggggcccacccacatgacttttccattgaccagcccttgagcacccggcctggagcagcagagtcccacgatcgccctcagacacatgacacccacggcctctggctccctgtgccctctctcccgcttcctccagccagctctcttcctgtctttgttgtctccctctttctcagttcctctttcttttct

SEQ ID NO: 67600 - DNA, 1209 bp, Artificial Sequence
  derived and/or modified sequence
atgcatcaacgagacctttcacgttcctcttcccccccatccctgctggaccagctacagatgggctgcgacggtgccagctgcggctcccttaatatggagtgcagagtttgcggagacaaagcttctggatttcattatggcgtgcacgcatgcgagggctgcaaaggtttctttcggaggactattagaatgaagctcgagtacgagaaatgtgagaggagctgcaaaattcagaagaagaatcgcaataagtgccagtactgccggttccagaagtgtcttgcacttgggatgtcacataacgccatccgcttcgggagaatgccggaagcggaaaaacggaagctagttgctggactgacggcaaatgagggctcacagtacaacccgcaagtggccgatctcaaagcttttagtaagcatatttataatgcatatctcaagaacttcaatatgacaaagaagaaagccaggagtattctaactgggaaagcttctcatactgctcccttcgtgattcacgatatcgaaactctttggcaggcagaaaagggactggtttggaaacagctggttaatgggctgccaccctacaaggaaatctctgtccacgtattctaccgctgtcagtgcactacagttgaaactgtgcgggaactgactgagttcgcaaagagcattccatccttttcatccctgttcctgaacgatcaggtcaccctcttgaagtacggggtacacgaggcaatcttcgccatgttagcttccattgtgaataaagatggcctcctggttgccaacggatcaggatttgtgacccgggagtttctgcgaagcttgcgaaagccattttccgacatcatcgagccgaagttcgagtttgctgtcaagttcaacgccctcgagctggatgactcggaccttgccctttttatcgccgctattatcctgtgcggcgaccgccctggactcatgaacgtgcctcgggttgaagccatccaggatacaatcttgcgagctctggagttccatctccaggcaaaccaccccgacgcacagtatctgttccccaagttgcttcagaaaatggcggaccttagacagctcgtgactgagcacgctcagatgatgcaacgtatcaagaagaccgagaccgagacatcgctccaccccctgctgcaggagatctataaggatatgtattag

SEQ ID NO: 67601 - DNA, 1017 bp, Artificial Sequence
  derived and/or modified sequence
atgaaattagagtacgaaaagtgtgagcgtagctgcaagattcaaaagaaaaatcgaaataaatgtcaatactgtcgctttcaaaaatgcctggccctgggaatgagtcataacgccattcgcttcggccgaatgcccgaggctgagaagcgtaagttagtcgcgggtctgacagctaacgagggctcacagtataatccgcaggtggctgacctcaaagctttcagcaagcacatttacaacgcctacctgaagaattttaacatgacaaagaaaaaggcgagaagcatcctgactggcaaagcttcccacaccgcgcctttcgttatccatgatatcgagaccctgtggcaggccgaaaaaggacttgtgtggaagcagcttgtcaacggcctccctccctataaagagatttctgttcacgtgttctatagatgtcagtgtacaacagttgagacagtgcgagagctcactgagttcgccaagtctatcccatctttttcatccctattcttgaacgatcaggttaccctgctaaagtacggcgtgcacgaggccatcttcgcgatgttagcgagcattgtgaataaagacggtttactcgtcgccaacgggtctggattcgtaacccgcgaattcctgagatccttgcggaagccattcagtgatatcatcgagcctaagtttgagttcgctgtgaaattcaacgcccttgagctggacgacagtgacttagcactttttatagctgccatcattctttgtggggatcggcctggactgatgaacgtcccgagagttgaagctattcaggacaccattcttagggcactcgaatttcatttgcaggcaaaccatccagatgcgcagtacctattcccaaagctcctgcaaaaaatggctgatttgcggcaactggttactgagcatgcccagatgatgcagcgaattaagaagacagaaaccgagacgtcacttcatccactgctccaggagatatataaagacatgtattag

SEQ ID NO: 67602 - DNA, 1209 bp, Artificial Sequence
  derived and/or modified sequence
atgcaccagagagacctgagcagaagcagcagcccccccagcctgctggaccagctgcagatgggctgcgacggcgccagctgcggcagcctgaacatggagtgcagagtgtgcggcgacaaggccagcggcttccactacggcgtgcacgcctgcgagggctgcaagggcttcttcagaagaaccatcagaatgaagctggagtacgagaagtgcgagagaagctgcaagatccagaagaagaacagaaacaagtgccagtactgcagattccagaagtgcctggccctgggcatgagccacaacgccatcagattcggcagaatgcccgaggccgagaagagaaagctggtggccggcctgaccgccaacgagggcagccagtacaacccccaggtggccgacctgaaggccttcagcaagcacatctacaacgcctacctgaagaacttcaacatgaccaagaagaaggccagaagcatcctgaccggcaaggccagccacaccgcccccttcgtgatccacgacatcgagaccctgtggcaggccgagaagggcctggtgtggaagcagctggtgaacggcctgcccccctacaaggagatcagcgtgcacgtgttctacagatgccagtgcaccaccgtggagaccgtgagagagctgaccgagttcgccaagagcatccccagcttcagcagcctgttcctgaacgaccaggtgaccctgctgaagtacggcgtgcacgaggccatcttcgccatgctggccagcatcgtgaacaaggacggcctgctggtggccaacggcagcggcttcgtgaccagagagttcctgagaagcctgagaaagcccttcagcgacatcatcgagcccaagttcgagttcgccgtgaagttcaacgccctggagctggacgacagcgacctggccctgttcatcgccgccatcatcctgtgcggcgacagacccggcctgatgaacgtgcccagagtggaggccatccaggacaccatcctgagagccctggagttccacctgcaggccaaccaccccgacgcccagtacctgttccccaagctgctgcagaagatggccgacctgagacagctggtgaccgagcacgcccagatgatgcagagaatcaagaagaccgagaccgagaccagcctgcaccccctgctgcaggagatctacaaggacatgtactag

SEQ ID NO: 67603 - DNA, 1017 bp, Artificial Sequence
  derived and/or modified sequence
atgaagctggagtacgagaagtgcgagagaagctgcaagatccagaagaagaacagaaacaagtgccagtactgcagattccagaagtgcctggccctgggcatgagccacaacgccatcagattcggcagaatgcccgaggccgagaagagaaagctggtggccggcctgaccgccaacgagggcagccagtacaacccccaggtggccgacctgaaggccttcagcaagcacatctacaacgcctacctgaagaacttcaacatgaccaagaagaaggccagaagcatcctgaccggcaaggccagccacaccgcccccttcgtgatccacgacatcgagaccctgtggcaggccgagaagggcctggtgtggaagcagctggtgaacggcctgcccccctacaaggagatcagcgtgcacgtgttctacagatgccagtgcaccaccgtggagaccgtgagagagctgaccgagttcgccaagagcatccccagcttcagcagcctgttcctgaacgaccaggtgaccctgctgaagtacggcgtgcacgaggccatcttcgccatgctggccagcatcgtgaacaaggacggcctgctggtggccaacggcagcggcttcgtgaccagagagttcctgagaagcctgagaaagcccttcagcgacatcatcgagcccaagttcgagttcgccgtgaagttcaacgccctggagctggacgacagcgacctggccctgttcatcgccgccatcatcctgtgcggcgacagacccggcctgatgaacgtgcccagagtggaggccatccaggacaccatcctgagagccctggagttccacctgcaggccaaccaccccgacgcccagtacctgttccccaagctgctgcagaagatggccgacctgagacagctggtgaccgagcacgcccagatgatgcagagaatcaagaagaccgagaccgagaccagcctgcaccccctgctgcaggagatctacaaggacatgtactag

SEQ ID NO: 67604 - protein, 343 aa, Artificial Sequence
  derived and/or modified sequence
MEQPQEEAPEVREEEEKEEVAEAEGAPELNGGPQHALPSSSYTAIRFGRMPEAEKRKLVAGLTANEGSQYNPQVADLKAFSKHIYNAYLKNFNMTKKKARSILTGKASHTAPFVIHDIETLWQAEKGLVWKQLVNGLPPYKEISVHVFYRCQCTTVETVRELTEFAKSIPSFSSLFLNDQVTLLKYGVHEAIFAMLASIVNKDGLLVANGSGFVTREFLRSLRKPFSDIIEPKFEFAVKFNALELDDSDLALFIAAIILCGDRPGLMNVPRVEAIQDTILRALEFHLQANHPDAQYLFPKLLQKMADLRQLVTEHAQMMQRIKKTETETSLHPLLQEIYKDMY

SEQ ID NO: 67605 - DNA, 1032 bp, Artificial Sequence
  derived and/or modified sequence
atggaacagcctcaggaggaggctcccgaggttcgagaggaagaggagaaggaagaggtggccgaggccgagggcgcaccagagttaaacgggggacctcaacacgctcttcccagtagttcttatacagccattaggttcggaaggatgcccgaggccgaaaagcggaagttggtagcgggcctgacagcaaatgaggggtcccagtacaacccgcaggtagctgacctaaaggcctttagcaagcacatttataacgcctacctcaaaaacttcaacatgaccaagaaaaaggcacggagcatccttacaggtaaggcctcccacacggcaccgttcgtgatccacgacattgaaaccctctggcaggctgaaaagggcctggtgtggaagcagcttgtgaatggtctgcctccgtataaggagatctccgtgcacgtattctaccggtgtcaatgtacgaccgtcgagactgtacgtgagctgaccgaattcgcaaagtctattccatctttctcatctttgttcctcaatgaccaggtgaccctgcttaagtatggagtgcacgaggccatctttgccatgctggcatcaatagtgaataaagatgggctcctggtcgcaaacggaagcggctttgtaactcgcgaatttctcagatccttacgtaagccattctctgacattatagagccaaagtttgaatttgccgtaaagttcaacgccctcgagctcgatgactcagacctcgctcttttcatcgcagctatcattctctgtggcgaccgccccggcctgatgaatgtgcccagggtcgaggctatacaagatacaatactccgtgctttggagtttcacttgcaggccaaccatccggatgctcagtacctgtttcccaagctgctacagaaaatggctgacctccggcagctggtcacagagcatgcccagatgatgcagcgcatcaaaaagacagagacagagaccagtcttcaccctttgctccaagagatctacaaggatatgtactag

SEQ ID NO: 67606 - DNA, 1032 bp, Artificial Sequence
  derived and/or modified sequence
atggagcagccccaggaggaggcccctgaggtgcgggaggaggaggagaaggaggaggtggccgaggccgagggcgcccctgagctgaatggaggcccccagcacgccctgcccagcagcagctacacagccatccgctttggaaggatgcctgaggccgagaagaggaagctggtggccggcctgacagccaatgaaggcagccagtacaacccccaggtggccgacctgaaggccttcagcaagcacatctacaatgcctacctgaagaacttcaacatgaccaagaagaaggcccggagcatcctgaccgggaaggccagccacacagccccctttgtgattcatgacatcgagaccctgtggcaggccgagaagggcctggtgtggaagcagctggtgaatggcctgcccccctacaaggagatctctgtgcacgtgttctaccgctgccagtgcaccaccgtggagaccgtgcgggagctgacagaatttgccaagagcatccccagcttcagcagcctcttcctgaatgaccaggtgaccctgctgaagtatggagtgcatgaggccatctttgccatgctggccagcatcgtgaacaaggatggcctgctggtggccaatggaagtggctttgtgacccgggagttcctgcggagcctgaggaagcccttcagtgacatcatcgagcccaagtttgaatttgctgtgaagttcaatgccctggagctggatgacagcgacctggccctcttcatcgccgccatcatcctgtgtggggaccggcccggcctgatgaatgtgccccgggtggaggccatccaggacaccatcctgcgggccctggagttccacctgcaggccaaccacccagatgcccagtacctgttccccaagctgctgcagaagatggctgacctgcggcagctggtgacagaacatgcccagatgatgcagaggatcaagaagacagaaacagagaccagcctgcaccccctgctgcaggagatctacaaggacatgtactag

SEQ ID NO: 67607 - DNA, 1032 bp, Artificial Sequence
  derived and/or modified sequence
atggagcagccccaggaggaggcccccgaggtgcgggaggaggaggaaaaggaggaagttgcagaggccgagggcgctccagagctaaacggaggtccccagcacgccttgccgagtagttcctacacagcaattcgctttggaaggatgccagaggctgagaagcgtaagctagttgccgggctgactgctaacgaggggagtcagtataacccacaagtggcggatctgaaggctttttccaaacacatctacaacgcatacttaaaaaattttaatatgacaaagaaaaaggctcgctcaattctgaccggaaaggcctctcataccgctccattcgtcatccatgacattgaaaccctatggcaggccgagaaggggctggtgtggaagcagctggtgaacgggctacccccttacaaggaaatcagcgtgcatgtgttctaccggtgccagtgcacaaccgtcgagactgtgagggaactgacagagtttgcaaagtcgattccttcctttagcagcctctttctgaatgaccaggttacactgctgaagtacggtgtccacgaggccatattcgccatgctggcgtcaatcgtaaataaagacgggctgctcgtagccaacggctccggatttgtgaccagagagtttctgcggtccctgaggaagcctttttctgacattatcgagcccaagtttgaatttgcggttaagtttaatgccctcgagctggacgatagcgacctggccctgttcatcgctgcaataatcctgtgtggcgaccgccccggattgatgaatgtgcctagagttgaggcgattcaagatacaattctgcgcgctctcgaatttcacctccaggcaaatcatcccgacgcccagtatttgtttcccaaactgctgcagaagatggcagatctcaggcagttggtcaccgagcatgcccaaatgatgcagcggatcaaaaaaaccgagacggaaaccagcctccaccctctgctccaagagatttataaggacatgtactag

SEQ ID NO: 67608 - DNA, 3453 bp, Artificial Sequence
  derived and/or modified sequence
gcggagcgtgtgacgctgcggccgccgcggacctggggattaatgggaaaagttttggcaggagcgggagaattctgcggagcctgcgggacggcggcggtggcgccgtaggcagccgggacagtgttgtacagtgttttgggcatgcacgtgatactcacacagtggcttctgctcaccaacagatgaagacagatgcaccaacgaggctgatgggaaccaccctgtagaggtccatctgcgttcagacccagacgatgccagagctatgactgggcctgcaggtgtggcgccgaggggagatcagccatggagcagccacaggaggaagcccctgaggtccgggaagaggaggagaaagaggaagtggcagaggcagaaggagccccagagctcaatgggggaccacagcatgcacttccttccagcagctacacagctatccgttttggtcggatgccggaggctgagaagaggaagctggtggcagggctgactgcaaacgaggggagccagtacaacccacaggtggccgacctgaaggccttctccaagcacatctacaatgcctacctgaaaaacttcaacatgaccaaaaagaaggcccgcagcatcctcaccggcaaagccagccacacggcgccctttgtgatccacgacatcgagacattgtggcaggcagagaaggggctggtgtggaagcagttggtgaatggcctgcctccctacaaggagatcagcgtgcacgtcttctaccgctgccagtgcaccacagtggagaccgtgcgggagctcactgagttcgccaagagcatccccagcttcagcagcctcttcctcaacgaccaggttacccttctcaagtatggcgtgcacgaggccatcttcgccatgctggcctctatcgtcaacaaggacgggctgctggtagccaacggcagtggctttgtcacccgtgagttcctgcgcagcctccgcaaacccttcagtgatatcattgagcctaagtttgaatttgctgtcaagttcaacgccctggaacttgatgacagtgacctggccctattcattgcggccatcattctgtgtggagaccggccaggcctcatgaacgttccacgggtggaggctatccaggacaccatcctgcgtgccctcgaattccacctgcaggccaaccaccctgatgcccagtacctcttccccaagctgctgcagaagatggctgacctgcggcaactggtcaccgagcacgcccagatgatgcagcggatcaagaagaccgaaaccgagacctcgctgcaccctctgctccaggagatctacaaggacatgtactaacggcggcacccaggcctccctgcagactccaatggggccagcactggaggggcccacccacatgacttttccattgaccagcccttgagcacccggcctggagcagcagagtcccacgatcgccctcagacacatgacacccacggcctctggctccctgtgccctctctcccgcttcctccagccagctctcttcctgtctttgttgtctccctctttctcagttcctctttcttttctaattcctgttgctctgtttcttcctttctgtaggtttctctcttcccttctcccttgccctccctttctctctccaccccccacgtctgtcctcctttcttattctgtgagatgttttgtattatttcaccagcagcatagaacaggacctctgcttttgcacaccttttccccaggagcagaagagagtggggcctgccctctgccccatcattgcacctgcaggcttaggtcctcacttctgtctcctgtcttcagagcaaaagacttgagccatccaaagaaacactaagctctctgggcctgggttccagggaaggctaagcatggcctggactgactgcagccccctatagtcatggggtccctgctgcaaaggacagtgggcaggaggccccaggctgagagccagatgcctccccaagactgtcattgcccctccgatgctgaggccacccactgacccaactgatcctgctccagcagcacacctcagccccactgacacccagtgtccttccatcttcacactggtttgccaggccaatgttgctgatggccccctgcactggccgctggacggcactctcccagcttggaagtaggcagggttccctccaggtgggcccccacctcactgaagaggagcaagtctcaagagaaggaggggggattggtggttggaggaagcagcacacccaattctgcccctaggactcggggtctgagtcctggggtcaggccagggagagctcggggcaggccttccgccagcactcccactgcccccctgcccagtagcagccgcccacattgtgtcagcatccagggccagggcctggcctcacatccccctgctcctttctctagctggctccacgggagttcaggccccactccccctgaagctgcccctccagcacacacacataagcactgaaatcactttacctgcaggctccatgcacctcccttccctccctgaggcaggtgagaacccagagagaggggcctgcaggtgagcaggcagggctgggccaggtctccggggaggcaggggtcctgcaggtcctggtgggtcagcccagcacctgctcccagtgggagcttcccgggataaactgagcctgttcattctgatgtccatttgtcccaatagctctactgccctccccttcccctttactcagcccagctggccacctagaagtctccctgcacagcctctagtgtccggggaccttgtgggaccagtcccacaccgctggtccctgccctcccctgctcccaggttgaggtgcgctcacctcagagcagggccaaagcacagctgggcatgccatgtctgagcggcgcagagccctccaggcctgcaggggcaaggggctggctggagtctcagagcacagaggtaggagaactggggttcaagcccaggcttcctgggtcctgcctggtcctccctcccaaggagccattctgtgtgtgactctgggtggaagtgcccagcccctgcccctacgggcgctgcagcctcccttccatgccccaggatcactctctgctggcaggattcttcccgctccccacctacccagctgatgggggttggggtgcttcctttcaggccaaggctatgaagggacagctgctgggacccacctccccctccccggccacatgccgcgtccctgccccgacccgggtctggtgctgaggatacagctcttctcagtgtctgaacaatctccaaaattgaaatgtatatttttgctaggagccccagcttcctgtgtttttaatataaatagtgtacacagactgacgaaactttaaataaatgggaattaaatatttaagagctgactggaa

SEQ ID NO: 67609 - DNA, 1032 bp, Artificial Sequence
  derived and/or modified sequence
atggagcagccacaagaggaagccccagaagtaagagaggaggaggaaaaggaggaagtggcggaggccgaaggggctccggaactgaacgggggaccacaacacgccctgccttcatcgagttataccgctattcgctttgggcgaatgccggaagcggaaaagcgaaagctagtcgcaggcctgactgctaatgaaggttctcagtataacccccaggtggccgacctaaaggcatttagtaaacacatttataatgcatacctgaagaatttcaatatgaccaaaaagaaggcccgatcaatcctcacaggtaaggcaagtcacacagctccattcgtcattcatgacattgagacactctggcaggccgaaaagggtctcgtgtggaaacagttggttaacggccttcctccttataaggaaatttctgtacacgttttttataggtgccagtgtacaacagtagaaacagtgcgtgaactgacggagttcgccaaatccatcccgtccttcagctctctctttttaaacgatcaagttacactgctcaagtacggggttcacgaagctatcttcgccatgctcgctagtatcgtgaataaagatggactcctcgtcgcgaatggttctgggtttgtgacccgcgaattcttaaggtccctgaggaagcccttttctgatatcattgaaccgaaatttgaatttgccgtaaagtttaatgctctggaactagatgatagcgatctcgctctgttcatcgcggctattatcctctgcggcgatagaccgggacttatgaatgtgcctagagtggaagcgattcaggacacaattttaagggctctagaatttcacctccaagctaatcaccccgatgcacagtatctgttcccgaagctgctccagaaaatggcagacttaagacagttagtgacagaacatgcacagatgatgcagcgaatcaagaagaccgaaacagagacatcactgcatccactactgcaggagatttacaaggacatgtattag

SEQ ID NO: 67610 - DNA, 1032 bp, Artificial Sequence
  derived and/or modified sequence
atggagcagccccaggaggaggcccccgaggtgagagaggaggaggagaaggaggaggtggccgaggccgagggcgcccccgagctgaacggcggcccccagcacgccctgcccagcagcagctacaccgccatcagattcggcagaatgcccgaggccgagaagagaaagctggtggccggcctgaccgccaacgagggcagccagtacaacccccaggtggccgacctgaaggccttcagcaagcacatctacaacgcctacctgaagaacttcaacatgaccaagaagaaggccagaagcatcctgaccggcaaggccagccacaccgcccccttcgtgatccacgacatcgagaccctgtggcaggccgagaagggcctggtgtggaagcagctggtgaacggcctgcccccctacaaggagatcagcgtgcacgtgttctacagatgccagtgcaccaccgtggagaccgtgagagagctgaccgagttcgccaagagcatccccagcttcagcagcctgttcctgaacgaccaggtgaccctgctgaagtacggcgtgcacgaggccatcttcgccatgctggccagcatcgtgaacaaggacggcctgctggtggccaacggcagcggcttcgtgaccagagagttcctgagaagcctgagaaagcccttcagcgacatcatcgagcccaagttcgagttcgccgtgaagttcaacgccctggagctggacgacagcgacctggccctgttcatcgccgccatcatcctgtgcggcgacagacccggcctgatgaacgtgcccagagtggaggccatccaggacaccatcctgagagccctggagttccacctgcaggccaaccaccccgacgcccagtacctgttccccaagctgctgcagaagatggccgacctgagacagctggtgaccgagcacgcccagatgatgcagagaatcaagaagaccgagaccgagaccagcctgcaccccctgctgcaggagatctacaaggacatgtactag

SEQ ID NO: 67611 - protein, 821 aa, Artificial Sequence
  derived and/or modified sequence
MAEANPRRGKMRFRRNAASFPGNLHLVLVLRPTSFLQRTFTDIGFWFSQEDFMLKLPAIENFALTVKEMAQMLQSFGTELAETELPDDIPSIEEILAIRAERYHLLKNDITAVTKEGKILLTNLEVPDTEGAVSSRLECHRQISGDWQTINKLLTQVHDMETAFDGFWEKHQLKMEQYLQLWKFEQDFQQLVTEVEFLLNQQAELADVTGTIAQVKQKIKKLENLDENSQELLSKAQFVILHGHKLAANHHYALDLICQRCNELRYLSDILVNEIKAKRIQLSRTFKMHKLLQQARQCCDEGECLLANQEIDKFQSKEDAQKALQDIENFLEMALPFINYEPETLQYEFDVILSPELKVQMKTIQLKLENIRSIFENQQAGFRNLADKHVRPIQFVVPTPENLVTSGTPFFSSKQGKKTWRQNQSNLKIEVVPDCQEKRSSGPSSSLDNGNSLDVLKNHVLNELIQTERVYVRELYTVLLGYRAEMDNPEMFDLMPPLLRNKKDILFGNMAEIYEFHNDIFLSSLENCAHAPERVGPCFLERKDDFQMYAKYCQNKPRSETIWRKYSECAFFQECQRKLKHRLRLDSYLLKPVQRITKYQLLLKELLKYSKDCEGSALLKKALDAMLDLLKSVNDSMHQIAINGYIGNLNELGKMIMQGGFSVWIGHKKGATKMKDLARFKPMQRHLFLYEKAIVFCKRRVESGEGSDRYPSYSFKHCWKMDEVGITEYVKGDNRKFEIWYGEKEEVYIVQASNVDVKMTWLKEIRNILLKQQELLTVKKRKQQDQLTERDKFQISLQQNDEDLCRRWLSYIDEATMSNGK

SEQ ID NO: 67612 - DNA, 2466 bp, Artificial Sequence
  derived and/or modified sequence
atggcagaggctaaccctaggcggggcaaaatgaggttccggcgtaacgccgcctccttcccaggcaacctacacctggtcctagtgttgagaccgacctcatttcttcagcgcacctttacagatatcggcttttggttttctcaggaagactttatgctgaagctccctgcaattgaaaatttcgccttgacagttaaagagatggcacagatgctccaatcattcggtactgaacttgccgagaccgagctgcccgacgacattccatcaatagaggaaattttggcgatccgggccgaacggtaccatcttctcaaaaatgatattacggcagtgaccaaagagggcaaaattctgctgactaacctagaagtgcctgacacagagggcgccgtgtcatcgcgtctggaatgccatcgtcagatcagcggcgattggcagaccattaacaagctcctcactcaggtccatgacatggagaccgcattcgatgggttctgggaaaaacaccagctcaagatggaacagtacctgcaactctggaagtttgaacaggacttccaacagctagttactgaggtcgaatttctgctcaaccagcaagccgagttggcagacgtaacgggaaccatagcccaggtcaagcagaagattaagaagctagaaaatctagacgaaaactctcaggagctcctgagcaaggcccagtttgtaattctacatgggcataaactggctgccaatcatcactacgcgcttgaccttatctgccaaaggtgcaatgagctcaggtacttatcagacattctggtgaacgagattaaagcgaaacgaatccagttgagcagaacctttaaaatgcataaacttctgcagcaagcccgacagtgctgtgatgaaggggagtgcctgctggctaaccaggagatcgacaagtttcagagtaaggaggatgcccaaaaggctttgcaagatatcgagaattttctggagatggcacttccattcatcaactatgagcccgagacactacagtacgaattcgatgttatcctgtcccccgagctgaaggtgcaaatgaagaccatacagctgaaattggagaacatccggagcatttttgagaaccagcaagccggctttcgcaacctcgcagataaacatgtgcgcccaattcagttcgttgttcccacaccggagaaccttgtaacctcaggtaccccatttttttctagcaagcaggggaagaagacttggaggcagaatcagagtaacctgaaaattgaggtggtgcccgactgccaggagaaacgatcttctggtccttctagcagtctggataacggcaactcactggacgtcctaaagaaccacgtcctgaatgagcttattcagaccgagcgcgtatatgtccgcgagttgtatactgtcttgcttggctatagggccgagatggataaccctgagatgtttgatctcatgcctccacttctgcgaaataaaaaagacatcctctttggtaatatggcagagatctacgagtttcataacgacattttcctttccagtctggagaattgtgcgcatgcacccgaaagagtgggcccttgctttttggagaggaaggacgactttcagatgtatgctaagtattgccagaataaaccaaggagtgaaactatttggcgaaaatattcagaatgcgcgttctttcaagagtgtcagaggaaacttaagcatcgtctgagacttgatagctacttgctcaaacctgtccagcgcattacgaaatatcagctgctgcttaaggaactgctgaaatatagtaaagactgcgagggctccgcactcctcaaaaaggcacttgacgcaatgctagacctgctcaagtccgtgaacgactctatgcaccagattgctatcaacggatatatcggcaacctgaacgaacttgggaagatgatcatgcagggaggcttctctgtttggattggccataaaaagggagcaacaaagatgaaagatctcgcccgatttaagcctatgcagcggcatctgttcctgtatgaaaaggctatcgtcttctgtaagcggagggtggagtctggagaggggagcgacaggtacccgtcatatagctttaaacattgctggaagatggacgaggtgggtatcacagagtatgtgaagggtgataatcgcaaattcgaaatctggtatggagaaaaagaggaagtctacatcgtgcaggccagtaacgtcgacgtcaaaatgacctggctgaaagagatccgtaacatcctccttaagcagcaggaacttctgacagtgaagaaacgcaagcagcaggatcaactgacagaaagagacaagttccagatttccctgcagcagaatgatgaagatttgtgtcgacgttggctctcatatatagatgaggctaccatgagtaacggcaagtag

SEQ ID NO: 67613 - DNA, 2466 bp, Artificial Sequence
  derived and/or modified sequence
atggccgaggccaacccccggcggggcaagatgaggttcagaagaaatgctgccagcttccctggcaacctgcacctggtgctggtgctgcggcccaccagcttcctgcagaggaccttcacagacatcggcttctggttcagccaggaggacttcatgctgaagctgcctgccatcgagaactttgccctgactgtgaaggagatggcccagatgctgcagagctttggaacagagctggccgagacagagctgcctgatgacatccccagcattgaggagatcctggccatccgggcagagcgctaccacctgctgaagaatgacatcacagctgtgaccaaggagggcaagatcctgctgaccaacctggaggtgcctgacacagaaggagctgtgagcagccggctggagtgccaccggcagatcagcggggactggcagaccatcaacaagctgctgacccaggtgcatgacatggagacagcctttgatggcttctgggagaagcaccagctgaagatggagcagtacctgcagctgtggaagtttgagcaggacttccagcagctggtgacagaggtggagttcctgctgaaccagcaggccgagctggctgatgtgacaggcaccatcgcccaggtgaagcagaagatcaagaagctggagaacctggatgagaacagccaggagctgctgagcaaggcccagtttgtgatcctgcacggccacaagctggccgccaaccaccactacgccctggacctgatctgccagcgctgcaatgagctgcgctacctgagtgacatcctggtgaatgagatcaaggccaagaggatccagctgagcaggaccttcaagatgcacaagctgctgcagcaggcccggcagtgctgtgatgaaggagaatgtctgctggccaaccaggagattgacaagttccagagcaaggaggatgcccagaaggccctgcaggacatcgagaacttcctggagatggccctgcccttcatcaactatgagcctgagaccctgcagtatgaatttgatgtgatcctgagccctgagctgaaggtgcagatgaagaccatccagctgaagctggagaacatccgcagcatctttgagaaccagcaggccggcttcaggaacctggccgacaagcacgtgcggcccatccagtttgtggtgcccaccccagagaacctggtgaccagcggcacccccttcttcagcagcaagcagggcaagaagacctggaggcagaaccagagcaacctgaagattgaggtggtgcctgactgccaggagaagaggagcagcggccccagcagcagcctggacaatggaaacagcctggatgtgctgaagaaccacgtgctgaatgagctgatccagacagagcgggtgtatgtgcgggagctgtacacagtgctgctgggctacagagctgagatggacaaccctgagatgtttgacctgatgccacccctgctgaggaacaagaaggacatcctgtttggaaacatggccgagatctatgagttccacaatgacatcttcctgagcagcctggagaactgtgcccacgcccctgagcgggtgggcccctgcttcctggagaggaaggatgacttccagatgtatgccaagtactgccagaacaagcccaggtctgagaccatctggaggaagtacagtgaatgtgccttcttccaggagtgccagaggaagctgaagcaccggctgcggctggacagctacctgctgaagcctgtgcagaggatcaccaagtaccagctgctgctgaaggagctgctgaagtacagcaaggactgtgagggcagcgccctgctgaagaaggccctggatgccatgctggacctgctgaagtctgtgaatgacagcatgcaccagatcgccatcaatggctacatcggcaacctgaatgagctgggcaagatgatcatgcagggcggcttctctgtgtggattggccacaagaagggggccaccaagatgaaggacctggcccgcttcaagcccatgcagaggcacctgttcctgtatgagaaggccatcgtgttctgcaagagaagagtggagagcggggagggcagtgaccgctaccccagctacagcttcaagcactgctggaagatggatgaggtgggcatcacagaatatgtgaagggggacaacaggaagtttgagatctggtatggagagaaggaggaggtgtacatcgtgcaggccagcaatgtggatgtgaagatgacctggctgaaggagatccggaacatcctgctgaagcagcaggagctgctgactgtgaagaagaggaagcagcaggaccagctgacagagcgggacaagttccagatcagcctgcagcagaatgatgaggacctgtgccgccgctggctgagctacattgatgaggccaccatgagcaatggcaagtag

SEQ ID NO: 67614 - DNA, 3461 bp, Artificial Sequence
  derived and/or modified sequence
aggacatgcctgatcttcttgagcagtccagcacaagctaatccacaaggttcaatcaggctaagtaattggaggaatgtgttaactctgaattacaaggagcagaagggaaggatctgtcagctgactaatcagggatagtggtttttttttttttttcctccccagcattgctgccactgtgctaatggaagcagccacggcagctttgtttgatagagatttttggctgccgtttttaaatactacccaagaagcagctcgtatttcatcaacgttgcgttgacaattggaaaagaaaagtgtaattgcgtacaggcgaaatggcagaagcaaatccccggagaggcaagatgaggttcagaaggaatgcggcttccttccctgggaacttgcacttggttttggttttacgtcctaccagctttcttcaacgaacgttcacagacattggattttggtttagtcaggaggattttatgcttaaattaccagctatagaaaattttgccctcacagtgaaagaaatggctcagatgttacagtcctttggaactgaactggctgagacagaactaccagatgatattccctcaatagaagaaattctggcaattcgtgctgaaaggtatcatctgttgaagaatgatattacagctgtaaccaaagaaggaaaaattctgctaacaaatctggaagtgcctgacactgaaggagctgtcagttcaagactagaatgtcatcggcaaataagtggtgactggcaaactattaataagttgctgactcaagtacatgatatggaaacagcttttgatggattttgggaaaaacatcaattaaaaatggagcagtatctgcaactatggaagtttgagcaggattttcaacagcttgtgactgaagttgaatttctattaaaccaacaagcagaactggctgatgtaacagggactatagctcaagtaaaacaaaaaataaaaaaattggaaaacttagatgaaaattctcaggagctattatcaaaggcccagtttgtgatattacatggacacaagcttgcagcaaatcaccattatgcacttgatttaatctgccagaggtgcaatgagctacgttacctttctgatattttggttaatgagataaaagcaaaacggatacaactcagcaggaccttcaaaatgcataaactcctacagcaggctcgtcaatgctgtgatgaaggggaatgtcttctagctaatcaggaaatagataagtttcagtctaaagaagatgctcagaaagctctccaagacattgaaaattttcttgaaatggctctaccctttataaattatgaacctgaaacactgcagtatgaatttgatgtaatattatctcctgagcttaaggttcaaatgaagactatacaactcaagcttgaaaacattcgaagtatatttgagaaccagcaggctggtttcaggaacctggcagataagcatgtgaggccaatccaatttgtggtacccacacctgaaaatttggtcacatctgggacaccatttttttcatctaaacaagggaagaagacttggagacaaaatcagagcaacttaaaaattgaagtggtgcctgattgtcaggagaagagaagttctggtccatcctccagtttggacaatggcaatagcttggatgttttaaagaaccacgtactaaatgaactgatacagactgagagagtttatgttcgagaactgtatactgttttgttgggttatagagcggagatggataatccagagatgtttgatcttatgccacctctcctgagaaataaaaaggacattctctttggaaacatggcagaaatatatgaattccataacgacattttcttgagcagcctggaaaattgtgctcatgctccagaaagagtgggaccttgtttcctggaaaggaaggatgattttcagatgtatgcaaaatattgtcagaataagcccagatcagaaacaatttggaggaagtattcagaatgcgcatttttccaggaatgtcaaagaaagttaaaacacagacttagactggattcctatttactcaaaccagtgcaacgaatcactaaatatcagttattgttgaaggagctattaaaatatagcaaagactgtgaaggatctgctctgttgaagaaggcactcgatgcaatgctggatttactgaagtcagttaatgattctatgcatcagattgcaataaatggctatattggaaacttaaatgaactgggcaagatgataatgcaaggtggattcagcgtttggatagggcacaagaaaggtgctacaaaaatgaaggatttggctagattcaaaccaatgcagcgacaccttttcttgtatgaaaaagccattgttttttgcaaaaggcgtgttgaaagtggagaaggctctgacagatacccgtcatacagttttaaacactgttggaaaatggatgaagttggaatcactgaatatgtaaaaggtgataaccgcaagtttgaaatctggtatggtgaaaaggaagaagtttatattgtccaggcttctaatgtagatgtgaagatgacgtggctaaaagaaataagaaatattttgttgaagcagcaggaacttttgacagttaaaaaaagaaagcaacaggatcaattaacagaacgggataagtttcagatttctcttcagcagaatgatgaagacctgtgtcggagatggctctcctatattgatgaagctactatgtcaaatggcaagtagctctttcctgcctgcttctcagctcatttggaaaaatactgcgcaaaagacattgagctcaaatgatgcagatgttgttttcaggttaatggacacgcaaagaaaccacagcacatacttcttttctttcatttaataaagcttttaattatggtacgctgtctttttaaaatcatgtatttaatgtgtcagatattgtgcttgaaagattctcatctcagaatacttttggacttgaaaattatttcttctctactttgtaaccaaatgcaatcggtgtgccttggattatttagtttattaatgaattaagtcaaaattacggctgcaaaatggctaaggtcaagtaaagcacaacattatgatttaatatgcttttgttgaaaccacagcttttgtgcccattgttttaacttgtgtgaaacaatacaaagcccagaaattcttttcggggcatgagtaaattttgttcagggctactgtctgtatgtgcccagataaaattttcatgagagtagtttacaaaagccgtatttaaaagttaatattttcacactttttttctggatttctgcttataattaatgtaacttaaattagttgtgctctgctattttctgtatatttcatgttgtaattctttttttcaaataaaaattaattcttcaggtt

SEQ ID NO: 67615 - DNA, 2466 bp, Artificial Sequence
  derived and/or modified sequence
atggccgaggccaacccccggcggggcaagatgcggttccggcggaatgccgccagcttccctggcaacttacacttggtgcttgttctgcggcccacctcctttctgcagagaacattcaccgacattgggttctggttctcacaggaggacttcatgttgaaacttcctgccattgagaacttcgcactgactgtcaaggagatggcgcagatgctccaatccttcggtacggagttggctgaaaccgaacttcccgacgatatcccaagcatcgaagagatcctggcaatcagagcagagagataccatctcctgaagaacgatattactgctgtgacaaaggaggggaagattctcttgactaatttggaagtgcctgataccgaaggcgctgtatcaagtagactagagtgtcatagacagatctccggggattggcagacaataaataaactcctgacccaagtgcatgatatggagactgccttcgacggcttttgggagaagcatcagctcaagatggagcagtatttgcagctttggaagtttgaacaggatttccagcagctggtgaccgaagttgaatttctcctgaatcagcaggccgaactggctgacgtgactggcacgatcgcccaggttaagcagaaaattaagaagctggaaaacctcgacgagaatagccaggagctgctctctaaggctcagttcgtgatcctgcacggccacaaactagcagccaaccaccactacgctctggatctgatatgtcagaggtgcaatgagcttagatacttaagtgatattctggtgaacgagatcaaagccaagcgtattcaactatcccggaccttcaagatgcacaaactgctgcaacaggcacgccagtgctgtgatgaaggcgagtgcctgcttgcaaatcaggaaattgacaagttccaatcaaaggaggacgcacagaaagcccttcaggacattgaaaattttctggaaatggctctgccatttattaactacgagcccgaaacactccagtatgagttcgatgtcattctctctccagagcttaaggtacaaatgaagactatacagttgaagctcgaaaacattcgttcaattttcgagaatcagcaggcaggatttaggaatcttgcggacaagcatgtaagacctattcagtttgtggtccctactccagaaaatctggtaacctcaggcacccccttcttcagctctaagcagggcaagaagacctggagacagaaccagtccaatctgaaaattgaggtggttcctgactgccaggagaagagatcatcagggccatcatcttccctggacaatggcaattctctggatgttctcaaaaatcacgtcctgaatgaactaatccagacagagcgtgtttacgtccgggaactgtatactgtcctgctgggctatagagcggagatggataatccggagatgttcgacctgatgccccctctactgcggaacaaaaaggacattctattcgggaacatggccgagatttatgagttccataatgatatattcctttcaagccttgagaactgtgcgcacgcccctgagcgggtgggcccttgtttcctggaaagaaaggacgacttccagatgtacgccaaatactgccagaacaagccaaggtccgagactatctggcggaagtattccgagtgtgccttttttcaagagtgtcaacgaaagttgaaacatcggctccgactggactcctacttgctcaaacccgttcagcgcataaccaaataccaactccttcttaaagagctccttaagtattcaaaggattgtgaaggctcggccctactaaagaaagctctggacgccatgttggaccttctcaaaagcgttaatgactcaatgcaccagatagctatcaatggctatataggcaacctgaatgagctgggaaagatgattatgcagggcggtttctccgtctggatcggacacaaaaagggcgctactaaaatgaaagatctggcacggtttaagccaatgcaacgccacctttttctctacgaaaaggctattgttttttgcaaacgcagggtggaatctggcgagggcagcgacaggtacccaagttattcgttcaaacattgttggaaaatggatgaagtggggattaccgagtacgttaaaggtgacaacagaaaatttgagatttggtatggggagaaagaggaagtctacatcgtgcaggcaagtaatgtggatgtgaagatgacatggctaaaggagattcgaaatatactgttaaaacagcaggagctgctgaccgtgaagaaaagaaagcagcaggatcaactgaccgagcgagacaaatttcagatcagtctgcagcagaatgacgaggatctgtgccgtcgctggctgtcttacattgatgaagccactatgtcaaatgggaaatag

SEQ ID NO: 67616 - DNA, 2466 bp, Artificial Sequence
  derived and/or modified sequence
atggccgaagctaacccccgacggggaaagatgaggttcagacgcaacgcggcatccttccccggtaacctgcacctcgtcctggtactcaggcctactagcttcctgcagcgaaccttcacagacatcggattttggttctcacaggaagatttcatgctgaagctgccggctatagagaatttcgccctgaccgtgaaggagatggctcaaatgctgcagtcttttggcaccgagttagcagagaccgagctgccggacgacattccgtcaattgaggagatccttgcaatacgagcagagcgttatcacctgctcaaaaatgatattactgccgtgaccaaggaggggaagattctcctgactaacctggaggtaccagatactgagggtgctgtgagctctaggctcgaatgtcatcgccagatctccggtgactggcagaccattaataagctgttaacccaggtgcatgacatggagacagctttcgatggcttctgggaaaaacaccagttgaagatggaacaatatctgcagttgtggaaatttgaacaagatttccagcaactcgtgaccgaggtggaatttctgctgaatcagcaggccgaactggcagacgtgaccggtacaatcgcacaggtgaaacagaagattaagaagctagaaaaccttgatgagaatagccaagagctgttaagcaaggctcagttcgtgattctccatggtcacaaactggcagctaaccatcactacgcactggacttaatctgccagaggtgcaatgaattgcgttatctgtcagatatattggtgaatgagatcaaagccaaaaggatccagctctcaagaaccttcaaaatgcacaagttgctgcagcaggcacgccagtgctgcgatgaaggagagtgcctactcgcgaaccaggagatagacaagtttcaatctaaggaggacgcacagaaggccctgcaggatattgaaaatttcctggaaatggcccttcctttcataaactacgagccagagaccctccagtacgaattcgatgttattttgagcccggagctgaaagttcagatgaagacaatccagcttaaactagagaatattagatcaatctttgagaaccagcaagcgggttttcgcaacctggctgataagcatgtcagacccattcaatttgtagtgcctactcctgagaacttggtgaccagtggtactccgtttttctcatctaaacaaggcaaaaagacttggcgccagaatcaaagtaatttgaagatcgaggtggtgccagactgccaggagaagagatcttcagggcctagctcatcactggataacggaaactctttggacgtgctgaaaaatcacgttcttaatgagctcatccagacagagcgtgtgtatgtgagggagctgtacacagtcctacttgggtatagagcggagatggacaaccccgagatgttcgaccttatgccgccactcctccgcaacaaaaaagacattcttttcgggaacatggccgagatatacgaattccataacgatatttttctcagttctctggagaattgtgctcatgcccctgagcgcgtgggcccttgctttctcgagaggaaagacgactttcagatgtacgctaagtattgccagaataaacctcggagcgagactatctggcggaagtacagcgaatgtgctttttttcaagaatgccagcggaagctcaaacaccgacttaggctagactcatatcttcttaagcctgtccagaggatcacgaaatatcagctgttgctgaaagagctgctaaagtattccaaggactgtgagggatccgcgctcctcaagaaagcgctggacgccatgttggacctcctgaaaagcgtgaatgatagcatgcaccagatcgctattaacgggtacatcggcaatctgaatgaactcggcaagatgataatgcaggggggattttctgtttggatcggccacaagaagggggcaaccaagatgaaagaccttgcccgattcaaacctatgcaaaggcatctgtttctgtacgagaaggctattgtgttttgcaagcgacgagtggaaagcggtgagggaagcgatcgatatccatcgtacagctttaaacactgctggaagatggacgaggtcggcatcacggaatatgtgaaaggggataaccgcaaattcgagatctggtacggggaaaaggaggaggtttacatcgtacaagcatcgaatgtagatgtgaaaatgacgtggctgaaggagatcaggaacattctcctgaaacagcaggaactgttgactgttaagaagagaaagcagcaggatcagttgacggaacgagacaagttccaaatttccttacagcagaacgatgaagacctgtgccgacggtggttatcttacattgatgaagcaacaatgtccaacggtaagtag

SEQ ID NO: 67617 - DNA, 2466 bp, Artificial Sequence
  derived and/or modified sequence
atggccgaggccaaccccagaagaggcaagatgagattcagaagaaacgccgccagcttccccggcaacctgcacctggtgctggtgctgagacccaccagcttcctgcagagaaccttcaccgacatcggcttctggttcagccaggaggacttcatgctgaagctgcccgccatcgagaacttcgccctgaccgtgaaggagatggcccagatgctgcagagcttcggcaccgagctggccgagaccgagctgcccgacgacatccccagcatcgaggagatcctggccatcagagccgagagataccacctgctgaagaacgacatcaccgccgtgaccaaggagggcaagatcctgctgaccaacctggaggtgcccgacaccgagggcgccgtgagcagcagactggagtgccacagacagatcagcggcgactggcagaccatcaacaagctgctgacccaggtgcacgacatggagaccgccttcgacggcttctgggagaagcaccagctgaagatggagcagtacctgcagctgtggaagttcgagcaggacttccagcagctggtgaccgaggtggagttcctgctgaaccagcaggccgagctggccgacgtgaccggcaccatcgcccaggtgaagcagaagatcaagaagctggagaacctggacgagaacagccaggagctgctgagcaaggcccagttcgtgatcctgcacggccacaagctggccgccaaccaccactacgccctggacctgatctgccagagatgcaacgagctgagatacctgagcgacatcctggtgaacgagatcaaggccaagagaatccagctgagcagaaccttcaagatgcacaagctgctgcagcaggccagacagtgctgcgacgagggcgagtgcctgctggccaaccaggagatcgacaagttccagagcaaggaggacgcccagaaggccctgcaggacatcgagaacttcctggagatggccctgcccttcatcaactacgagcccgagaccctgcagtacgagttcgacgtgatcctgagccccgagctgaaggtgcagatgaagaccatccagctgaagctggagaacatcagaagcatcttcgagaaccagcaggccggcttcagaaacctggccgacaagcacgtgagacccatccagttcgtggtgcccacccccgagaacctggtgaccagcggcacccccttcttcagcagcaagcagggcaagaagacctggagacagaaccagagcaacctgaagatcgaggtggtgcccgactgccaggagaagagaagcagcggccccagcagcagcctggacaacggcaacagcctggacgtgctgaagaaccacgtgctgaacgagctgatccagaccgagagagtgtacgtgagagagctgtacaccgtgctgctgggctacagagccgagatggacaaccccgagatgttcgacctgatgccccccctgctgagaaacaagaaggacatcctgttcggcaacatggccgagatctacgagttccacaacgacatcttcctgagcagcctggagaactgcgcccacgcccccgagagagtgggcccctgcttcctggagagaaaggacgacttccagatgtacgccaagtactgccagaacaagcccagaagcgagaccatctggagaaagtacagcgagtgcgccttcttccaggagtgccagagaaagctgaagcacagactgagactggacagctacctgctgaagcccgtgcagagaatcaccaagtaccagctgctgctgaaggagctgctgaagtacagcaaggactgcgagggcagcgccctgctgaagaaggccctggacgccatgctggacctgctgaagagcgtgaacgacagcatgcaccagatcgccatcaacggctacatcggcaacctgaacgagctgggcaagatgatcatgcagggcggcttcagcgtgtggatcggccacaagaagggcgccaccaagatgaaggacctggccagattcaagcccatgcagagacacctgttcctgtacgagaaggccatcgtgttctgcaagagaagagtggagagcggcgagggcagcgacagataccccagctacagcttcaagcactgctggaagatggacgaggtgggcatcaccgagtacgtgaagggcgacaacagaaagttcgagatctggtacggcgagaaggaggaggtgtacatcgtgcaggccagcaacgtggacgtgaagatgacctggctgaaggagatcagaaacatcctgctgaagcagcaggagctgctgaccgtgaagaagagaaagcagcaggaccagctgaccgagagagacaagttccagatcagcctgcagcagaacgacgaggacctgtgcagaagatggctgagctacatcgacgaggccaccatgagcaacggcaagtag

SEQ ID NO: 67618 - protein, 860 aa, Artificial Sequence
  derived and/or modified sequence
MAEANPRRGKMRFRRNAASFPGNLHLVLVLRPTSFLQRTFTDIGFWFSQEDFMLKLPVVMLSSVSDLLTYIDDKQLTPELGGTLQYCHSEWIIFRNAIENFALTVKEMAQMLQSFGTELAETELPDDIPSIEEILAIRAERYHLLKNDITAVTKEGKILLTNLEVPDTEGAVSSRLECHRQISGDWQTINKLLTQVHDMETAFDGFWEKHQLKMEQYLQLWKFEQDFQQLVTEVEFLLNQQAELADVTGTIAQVKQKIKKLENLDENSQELLSKAQFVILHGHKLAANHHYALDLICQRCNELRYLSDILVNEIKAKRIQLSRTFKMHKLLQQARQCCDEGECLLANQEIDKFQSKEDAQKALQDIENFLEMALPFINYEPETLQYEFDVILSPELKVQMKTIQLKLENIRSIFENQQAGFRNLADKHVRPIQFVVPTPENLVTSGTPFFSSKQGKKTWRQNQSNLKIEVVPDCQEKRSSGPSSSLDNGNSLDVLKNHVLNELIQTERVYVRELYTVLLGYRAEMDNPEMFDLMPPLLRNKKDILFGNMAEIYEFHNDIFLSSLENCAHAPERVGPCFLERKDDFQMYAKYCQNKPRSETIWRKYSECAFFQECQRKLKHRLRLDSYLLKPVQRITKYQLLLKELLKYSKDCEGSALLKKALDAMLDLLKSVNDSMHQIAINGYIGNLNELGKMIMQGGFSVWIGHKKGATKMKDLARFKPMQRHLFLYEKAIVFCKRRVESGEGSDRYPSYSFKHCWKMDEVGITEYVKGDNRKFEIWYGEKEEVYIVQASNVDVKMTWLKEIRNILLKQQELLTVKKRKQQDQLTERDKFQISLQQNDEDLCRRWLSYIDEATMSNGK

SEQ ID NO: 67619 - DNA, 2583 bp, Artificial Sequence
  derived and/or modified sequence
atggctgaggccaaccctcggcgcgggaaaatgcgctttcgtcgaaacgccgcttcattccccggtaacctccatctggtcttagtgctacgacctaccagcttcctccaacggacgttcacagacatagggttttggttctctcaagaagactttatgctgaaactgcctgtggtgatgttgagttccgtgagcgacttgctaacatatatcgacgataagcagctgacacccgagttgggcggcactctccagtactgtcattcggagtggatcattttccggaacgctatcgaaaatttcgcattaaccgtgaaggaaatggcacagatgctgcagagctttggaactgaactggccgagacggagcttccggacgatattccttcaattgaagaaattctggcaataagagctgaacgataccacctgcttaagaatgacatcaccgccgttaccaaagagggcaagatccttctaacaaacctagaagtacctgataccgagggagccgtgagctctcgcttggaatgccaccggcagatttcaggtgactggcaaaccatcaataaactgctgactcaagtgcatgatatggaaactgccttcgatggtttctgggagaagcaccagttaaaaatggaacagtacctccagttgtggaagttcgagcaggactttcaacagcttgttaccgaagtcgaattcctgctgaatcagcaagcggagttggccgacgttacaggtaccattgcccaggtgaaacagaagatcaaaaagcttgaaaacctggatgagaattctcaggaacttctgtctaaagcacagtttgtcattctgcatggccataagctcgccgctaatcaccactacgccctcgacctcatctgccagcggtgtaacgagctgcggtacttgagtgatatactcgttaacgagatcaaagccaagcgcatccagcttagccgaacatttaaaatgcacaagctattacagcaggcaaggcaatgttgcgacgagggcgagtgtctcctggcaaaccaggaaatcgataaatttcagagcaaggaagatgctcagaaagccctccaggacattgaaaatttcttggagatggccctgccctttatcaactatgagcctgagacattacagtatgagtttgacgtcattctcagtcccgagctgaaagtgcagatgaagacaattcagttgaaactcgaaaatatcagatcaatatttgaaaatcaacaagccggtttcaggaacttggctgataaacacgtgcgccccatccagttcgtggtgcctactccagagaatctggtcactagcggcaccccattctttagttctaaacagggaaagaagacttggagacaaaaccagtcaaacttgaaaatcgaggtggttccagactgccaggagaagaggtctagcggcccatcaagctccctggacaacggcaactccctggatgtgctgaagaaccacgtcttgaacgagttgattcaaacagagcgagtatacgtgcgggaattgtacactgttctgttgggttatcgggccgaaatggacaacccagaaatgttcgaccttatgcctcccctcctacggaacaaaaaggatattcttttcggtaacatggctgagatatacgaattccataatgacatattcctgtcctctctggaaaattgtgctcatgcccctgagcgtgtggggccatgcttccttgagagaaaagacgacttccagatgtatgcaaaatactgccagaacaaaccgaggtctgaaactatctggcggaagtattccgaatgtgccttctttcaagaatgtcagagaaagttgaaacacaggctcagactggatagctacctgctgaaacctgtacagcgcattactaagtaccagttattacttaaggagcttctgaagtactctaaagactgcgaggggagtgccctcctgaagaaagcgctggatgcgatgcttgatctcctgaagtccgtcaacgattctatgcaccagatcgctataaacggctacataggcaacctcaacgaacttggaaaaatgattatgcaaggggggttctccgtgtggatcggacataagaaaggcgctactaaaatgaaggacttggctcggttcaaacccatgcagcgccacttattcctttacgaaaaggctatcgtcttctgtaaacgccgggtggagagcggtgaagggagtgacaggtacccttcttatagcttcaaacattgttggaaaatggacgaggtaggtatcacagaatatgtcaaaggcgataacaggaaattcgagatctggtacggtgaaaaggaagaggtgtatattgttcaagccagcaatgtggacgtgaagatgacatggctgaaggagatcagaaacattttgcttaagcagcaggaattgctgaccgtgaaaaagaggaaacagcaggaccagctgactgagcgagacaagtttcagatcagcctgcagcagaacgacgaggacttgtgtagacgctggctgtcttacattgacgaagccaccatgtctaacgggaaatag

SEQ ID NO: 67620 - DNA, 2583 bp, Artificial Sequence
  derived and/or modified sequence
atggccgaggccaacccccggcggggcaagatgaggttcagaagaaatgctgccagcttccctggcaacctgcacctggtgctggtgctgcggcccaccagcttcctgcagaggaccttcacagacatcggcttctggttcagccaggaggacttcatgctgaagctgcctgtggtgatgctgagctctgtgtctgacctgctgacctacattgatgacaagcagctgaccccagagctgggcggcaccctgcagtactgccacagcgagtggatcatcttcagaaatgccattgaaaattttgccctgactgtgaaggagatggcccagatgctgcagagctttggaacagagctggccgagacagagctgcctgatgacatccccagcattgaggagatcctggccatccgggcagagcgctaccacctgctgaagaatgacatcacagctgtgaccaaggagggcaagatcctgctgaccaacctggaggtgcctgacacagagggcgctgtgagcagccggctggagtgccaccggcagatcagcggggactggcagaccatcaacaagctgctgacccaggtgcatgacatggagacagcctttgatggcttctgggagaagcaccagctgaagatggagcagtacctgcagctgtggaagtttgagcaggacttccagcagctggtgacagaggtggagttcctgctgaaccagcaggccgagctggctgatgtgacaggcaccatcgcccaggtgaagcagaagatcaagaagctggagaacctggatgagaacagccaggagctgctgagcaaggcccagtttgtgatcctgcacggccacaagctggccgccaaccaccactacgccctggacctgatctgccagcgctgcaatgagctgcgctacctgagtgacatcctggtgaatgagatcaaggccaagaggatccagctgagcaggaccttcaagatgcacaagctgctgcagcaggcccggcagtgctgtgatgaaggagagtgcctgctggccaaccaggagattgacaagttccagagcaaagaagatgcccagaaggccctgcaggacatcgagaacttcctggagatggccctgcccttcatcaactatgagcctgagaccctgcagtatgaatttgatgtgatcctgagccctgagctgaaggtgcagatgaagaccatccagctgaagctggagaacatccgcagcatctttgagaaccagcaggccggcttcaggaacctggccgacaagcacgtgcggcccatccagtttgtggtgcccaccccagagaacctggtgaccagcggcacccccttcttcagcagcaagcagggcaagaagacctggaggcagaaccagagcaacctgaagattgaggtggtgcctgactgccaggagaagaggagcagcggccccagcagcagcctggacaatggaaacagcctggatgtgctgaagaaccacgtgctgaatgaactcatccagacagagcgggtgtatgtgcgggagctgtacacagtgctgctgggctacagagctgagatggacaaccctgagatgtttgacctgatgccacccctgctgaggaacaagaaggacatcctgtttggaaacatggccgagatctatgagttccacaatgacatcttcctgagcagcctggagaactgtgcccacgcccctgagcgggtgggcccctgcttcctggagaggaaggatgacttccagatgtatgccaagtactgccagaacaagcccaggtctgagaccatctggaggaagtacagtgaatgtgccttcttccaggagtgccagaggaagctgaagcaccggctgcggctggacagctacctgctgaagcctgtgcagaggatcaccaagtaccagctgctgctgaaggagctgctgaagtacagcaaggactgtgagggcagcgccctgctgaagaaggccctggatgccatgctggacctgctgaagtctgtgaatgacagcatgcaccagatcgccatcaatggctacatcggcaacctgaatgagctgggcaagatgatcatgcagggcggcttctctgtgtggattggccacaagaagggggccaccaagatgaaggacctggcccgcttcaagcccatgcagaggcacctgttcctgtatgagaaggccatcgtgttctgcaagagaagagtggagagcggggagggcagtgaccgctaccccagctacagcttcaagcactgctggaagatggatgaggtgggcatcacagaatatgtgaagggggacaacaggaagtttgagatctggtacggggagaaggaggaggtgtacatcgtgcaggccagcaatgtggatgtgaagatgacctggctgaaggagatccggaacatcctgctgaagcagcaggagctgctgactgtgaagaagaggaagcagcaggaccagctgacagagcgggacaagttccagatcagcctgcagcagaatgatgaggacctgtgccgccgctggctgagctacattgatgaggccaccatgagcaatggcaagtag

SEQ ID NO: 67621 - DNA, 2583 bp, Artificial Sequence
  derived and/or modified sequence
atggcagaagcaaatccccggagaggcaagatgaggttcagaaggaatgcggcttccttccctgggaacttgcacttggttttggttttacgtcctaccagctttcttcaacgaacgttcacagacattggattttggtttagtcaggaggattttatgcttaaattaccagttgttatgctgagctcagttagtgatttgctgacatacattgatgacaagcaattaacccctgagttaggcggcaccttgcagtactgccacagtgaatggatcatcttcagaaatgctatagaaaattttgccctcacagtgaaagaaatggctcagatgttacagtcctttggaactgaactggctgagacagaactaccagatgatattccctcaatagaagaaattctggcaattcgtgctgaaaggtatcatctgttgaagaatgatattacagctgtaaccaaagaaggaaaaattctgctaacaaatctggaagtgcctgacactgaaggagctgtcagttcaagactagaatgtcatcggcaaataagtggtgactggcaaactattaataagttgctgactcaagtacatgatatggaaacagcttttgatggattttgggaaaaacatcaattaaaaatggagcagtatctgcaactatggaagtttgagcaggattttcaacagcttgtgactgaagttgaatttctattaaaccaacaagcagaactggctgatgtaacagggactatagctcaagtaaaacaaaaaataaaaaaattggaaaacttagatgaaaattctcaggagctattatcaaaggcccagtttgtgatattacatggacacaagcttgcagcaaatcaccattatgcacttgatttaatctgccagaggtgcaatgagctacgttacctttctgatattttggttaatgagataaaagcaaaacggatacaactcagcaggaccttcaaaatgcataaactcctacagcaggctcgtcaatgctgtgatgaaggggaatgtcttctagctaatcaggaaatagataagtttcagtctaaagaagatgctcagaaagctctccaagacattgaaaattttcttgaaatggctctaccctttataaattatgaacctgaaacactgcagtatgaatttgatgtaatattatctcctgagcttaaggttcaaatgaagactatacaactcaagcttgaaaacattcgaagtatatttgagaaccagcaggctggtttcaggaacctggcagataagcatgtgaggccaatccaatttgtggtacccacacctgaaaatttggtcacatctgggacaccatttttttcatctaaacaagggaagaagacttggagacaaaatcagagcaacttaaaaattgaagtggtgcctgattgtcaggagaagagaagttctggtccatcctccagtttggacaatggcaatagcttggatgttttaaagaaccacgtactaaatgaactgatacagactgagagagtttatgttcgagaactgtatactgttttgttgggttatagagcggagatggataatccagagatgtttgatcttatgccacctctcctgagaaataaaaaggacattctctttggaaacatggcagaaatatatgaattccataacgacattttcttgagcagcctggaaaattgtgctcatgctccagaaagagtgggaccttgtttcctggaaaggaaggatgattttcagatgtatgcaaaatattgtcagaataagcccagatcagaaacaatttggaggaagtattcagaatgcgcatttttccaggaatgtcaaagaaagttaaaacacagacttagactggattcctatttactcaaaccagtgcaacgaatcactaaatatcagttattgttgaaggagctattaaaatatagcaaagactgtgaaggatctgctctgttgaagaaggcactcgatgcaatgctggatttactgaagtcagttaatgattctatgcatcagattgcaataaatggctatattggaaacttaaatgaactgggcaagatgataatgcaaggtggattcagcgtttggatagggcacaagaaaggtgctacaaaaatgaaggatttggctagattcaaaccaatgcagcgacaccttttcttgtatgaaaaagccattgttttttgcaaaaggcgtgttgaaagtggagaaggctctgacagatacccgtcatacagttttaaacactgttggaaaatggatgaagttggaatcactgaatatgtaaaaggtgataaccgcaagtttgaaatctggtatggtgaaaaggaagaagtttatattgtccaggcttctaatgtagatgtgaagatgacgtggctaaaagaaataagaaatattttgttgaagcagcaggaacttttgacagttaaaaaaagaaagcaacaggatcaattaacagaacgggataagtttcagatttctcttcagcagaatgatgaagacctgtgtcggagatggctctcctatattgatgaagctactatgtcaaatggcaagtag

SEQ ID NO: 67622 - DNA, 2583 bp, Artificial Sequence
  derived and/or modified sequence
atggccgaggccaacccccggcggggcaagatgcggttccggcggaacgctgccagctttccagggaatctgcacctcgtgcttgtactaaggcctacatcattcctccagagaacattcactgacatcgggttttggttttctcaggaagactttatgctcaagcttccagtggtcatgctgagtagcgtctccgacctcctgacttatatcgacgacaaacagttgacccccgaactaggcgggaccctgcagtactgtcattctgagtggataatatttcggaacgccattgaaaactttgctctgacggtaaaagaaatggcccagatgttgcagtcatttggaacagagctggccgagaccgaactgccagacgatatcccgtcgatcgaagaaatcctcgcaatccgagcagagaggtaccatttgctaaagaacgacattactgccgttaccaaagaaggaaagattctgctgaccaatttagaagttcccgataccgaaggcgccgtctcgtccagacttgagtgtcatagacagatttctggggactggcagaccatcaacaagctgctcacacaggttcatgacatggagacagcatttgatgggttctgggagaagcatcagcttaagatggaacagtacctgcagctgtggaagttcgagcaggatttccagcagcttgtcacagaagtggagtttctcctgaatcagcaggcagagctggcagacgtgaccggaaccatcgcacaggtgaagcagaaaattaagaagctggagaatctggacgagaattctcaggagctcctgagtaaagcccagtttgtgatccttcacggccacaaactggccgcgaaccatcattatgcactggacctcatctgtcagaggtgtaatgagctgagataccttagtgatatactggtgaatgagataaaggcaaagagaatacaactgtcacgcaccttcaagatgcacaaattattgcagcaggcccggcagtgctgcgacgaaggagaatgtctcctggctaaccaggaaatcgataaattccagtccaaagaggatgctcagaaagctctgcaagacatcgagaatttcctggaaatggcccttccatttattaattatgagccggagacattgcagtacgaatttgacgtgatcctgagtcctgagctgaaggtgcagatgaaaacgatacaactgaagctggagaatattcgcagcatcttcgagaaccaacaggctggcttcagaaatctcgccgacaaacatgtcaggccaatccagtttgtggtgcctactccggagaacttggttacaagtggcacaccttttttcagttctaagcaaggaaaaaaaacatggaggcaaaatcaaagcaaccttaagatagaggtggtgcccgactgccaggaaaagcgatcgtctgggcctagttcttcgcttgataacggaaactcactggacgtactgaagaaccacgtgctcaatgaactcatacaaactgagagggtgtacgttagggaactctacacagtcttactgggttacagagctgagatggataacccagaaatgtttgatcttatgcctcctttattgcgcaataagaaggatatcctgtttggcaatatggcagagatctatgagtttcataacgatatttttctctcctctctcgagaattgtgctcacgcccccgaaagggtcgggccctgcttcttggagcgcaaggacgatttccagatgtacgctaagtactgtcaaaacaagcctcggagtgagaccatctggcgcaaatattccgaatgcgctttctttcaagagtgccagcggaaactcaagcatcgcctgcgtctggatagctacctcctgaagcccgtgcaacgcatcactaaatatcaacttctgctgaaagaactgttgaagtacagtaaagattgtgaaggaagcgcattgctcaagaaagctttggacgcaatgcttgatctcctgaaatccgtcaatgacagcatgcatcaaatcgccatcaatggatatattggaaacctcaatgaactcgggaagatgataatgcagggaggcttctctgtctggattggccataagaaaggagctacaaagatgaaggacctcgccagatttaaacccatgcagcgccacctgttcctgtatgagaaagccattgtgttttgcaaacgtcgcgtagagtccggcgagggctccgatagatatccctcctacagcttcaagcactgctggaagatggatgaggtcgggataaccgagtatgtaaaaggagacaaccggaaattcgagatctggtacggtgagaaggaggaggtatacattgtgcaggccagcaacgtggatgttaaaatgacctggcttaaggagattaggaatatccttctgaaacagcaagaactgctcaccgtgaaaaagaggaaacagcaggaccagctaacggaacgagacaaatttcagatttctctgcagcagaatgatgaggacctatgccgtcgttggctgtcatacatagacgaggcaaccatgagtaatggaaaatag

SEQ ID NO: 67623 - DNA, 2583 bp, Artificial Sequence
  derived and/or modified sequence
atggccgaggccaacccccgaagggggaagatgcgattccgaagaaatgccgctagctttccaggaaatctgcacctcgtgctggtgctccgccctactagctttctgcaacgaacttttaccgatattggcttttggttttcccaggaggacttcatgctaaagttacccgtggtaatgttgagcagcgtctccgacctcttgacatacattgatgataagcaactcacccctgaattagggggtaccctccagtattgccactccgagtggatcatattcaggaacgccattgagaactttgccctgaccgtcaaggaaatggcccaaatgcttcagtccttcgggacggagctggccgaaactgaactccctgacgacattcctagcatcgaggagatccttgctatccgagcagaaagataccatctccttaagaatgacattaccgccgtgaccaaggaaggtaagattctccttaccaacctggaagttcctgacacggagggagctgtctccagtaggcttgagtgccaccgtcagatttccggggattggcagacaattaacaaacttctgacccaagtgcacgatatggagactgcttttgatggtttctgggagaaacaccagctcaaaatggaacagtatctccaactttggaagtttgaacaggactttcagcagctggtcacagaagtggaatttctgctgaatcagcaggcggaattggccgatgttactggaacaatagctcaggtgaagcaaaaaattaagaaactggagaacctggacgaaaattcccaggagctgcttagcaaggcgcagtttgtgatcttgcatggccacaaactcgctgccaatcatcactatgctctggatttaatctgtcagagatgcaacgagttaagatatctcagcgacatcctggtaaacgagattaaggctaagcgcatccagctgtcccggacattcaaaatgcacaaacttctccagcaggctcgtcagtgttgcgatgagggtgagtgtctgctggccaaccaggagatcgataagtttcagagcaaggaggacgcccagaaagcactgcaggacatcgaaaatttccttgagatggccttgccatttataaattacgagcccgagaccctccagtacgagttcgacgtgatcctctctcccgagctgaaagtgcaaatgaagaccatacagctgaagctagagaatataagatcgatctttgagaatcagcaggcgggattccgcaacctcgccgataaacatgtgcggccaatacagtttgttgtccctaccccagagaatttggtcactagtggtacacctttcttctccagcaagcaggggaaaaaaacgtggcggcagaatcaaagtaatctgaagatcgaagtagttccggactgccaggaaaagcgaagtagtggcccatctagctctctggataatggaaactccctggacgtgctgaaaaaccacgtcctgaatgaactgatacagaccgaaagggtttatgtgagggagctctataccgttctcctcggataccgtgctgaaatggacaatcctgaaatgttcgacctgatgccgcctcttctacggaataagaaggacatcctcttcgggaatatggctgagatttatgaatttcacaacgacatattcctgtccagccttgagaactgtgcgcatgctccagaacgggttggcccttgttttttggagcggaaggatgacttccaaatgtatgccaagtactgccagaacaagccacggagtgaaacgatatggagaaagtactctgaatgtgccttcttccaggaatgccaacggaaactgaaacacagacttaggctggattcctacctcctgaagcccgttcagagaattaccaaataccaactcttactcaaagaacttcttaagtatagtaaggactgcgaaggatcagcactcctgaagaaagcccttgatgcaatgctcgatctcctcaaaagcgtcaatgactctatgcaccagatcgctataaacggatatattggcaatctgaatgaactggggaaaatgataatgcagggagggttttccgtttggataggtcacaaaaagggcgcaactaaaatgaaggacctggccaggtttaagccgatgcagagacaccttttcctttatgagaaggccattgtattctgcaagaggcgagtggagagtggagagggaagcgaccggtatcctagttattccttcaaacattgctggaaaatggacgaggtggggatcacagaatacgtcaagggcgataaccgcaagtttgaaatttggtatggggaaaaggaagaggtctacatcgtacaagccagtaacgtagacgtgaaaatgacttggctgaaggaaatcaggaatatactcttgaaacagcaggagcttctgaccgtaaagaaaagaaaacagcaagatcagttgaccgagagagacaagtttcaaatcagcctccaacagaacgacgaggatctgtgccggaggtggttatcctacattgatgaagcaacaatgtcaaacggaaagtag

SEQ ID NO: 67624 - DNA, 2583 bp, Artificial Sequence
  derived and/or modified sequence
atggccgaggccaaccccagaagaggcaagatgagattcagaagaaacgccgccagcttccccggcaacctgcacctggtgctggtgctgagacccaccagcttcctgcagagaaccttcaccgacatcggcttctggttcagccaggaggacttcatgctgaagctgcccgtggtgatgctgagcagcgtgagcgacctgctgacctacatcgacgacaagcagctgacccccgagctgggcggcaccctgcagtactgccacagcgagtggatcatcttcagaaacgccatcgagaacttcgccctgaccgtgaaggagatggcccagatgctgcagagcttcggcaccgagctggccgagaccgagctgcccgacgacatccccagcatcgaggagatcctggccatcagagccgagagataccacctgctgaagaacgacatcaccgccgtgaccaaggagggcaagatcctgctgaccaacctggaggtgcccgacaccgagggcgccgtgagcagcagactggagtgccacagacagatcagcggcgactggcagaccatcaacaagctgctgacccaggtgcacgacatggagaccgccttcgacggcttctgggagaagcaccagctgaagatggagcagtacctgcagctgtggaagttcgagcaggacttccagcagctggtgaccgaggtggagttcctgctgaaccagcaggccgagctggccgacgtgaccggcaccatcgcccaggtgaagcagaagatcaagaagctggagaacctggacgagaacagccaggagctgctgagcaaggcccagttcgtgatcctgcacggccacaagctggccgccaaccaccactacgccctggacctgatctgccagagatgcaacgagctgagatacctgagcgacatcctggtgaacgagatcaaggccaagagaatccagctgagcagaaccttcaagatgcacaagctgctgcagcaggccagacagtgctgcgacgagggcgagtgcctgctggccaaccaggagatcgacaagttccagagcaaggaggacgcccagaaggccctgcaggacatcgagaacttcctggagatggccctgcccttcatcaactacgagcccgagaccctgcagtacgagttcgacgtgatcctgagccccgagctgaaggtgcagatgaagaccatccagctgaagctggagaacatcagaagcatcttcgagaaccagcaggccggcttcagaaacctggccgacaagcacgtgagacccatccagttcgtggtgcccacccccgagaacctggtgaccagcggcacccccttcttcagcagcaagcagggcaagaagacctggagacagaaccagagcaacctgaagatcgaggtggtgcccgactgccaggagaagagaagcagcggccccagcagcagcctggacaacggcaacagcctggacgtgctgaagaaccacgtgctgaacgagctgatccagaccgagagagtgtacgtgagagagctgtacaccgtgctgctgggctacagagccgagatggacaaccccgagatgttcgacctgatgccccccctgctgagaaacaagaaggacatcctgttcggcaacatggccgagatctacgagttccacaacgacatcttcctgagcagcctggagaactgcgcccacgcccccgagagagtgggcccctgcttcctggagagaaaggacgacttccagatgtacgccaagtactgccagaacaagcccagaagcgagaccatctggagaaagtacagcgagtgcgccttcttccaggagtgccagagaaagctgaagcacagactgagactggacagctacctgctgaagcccgtgcagagaatcaccaagtaccagctgctgctgaaggagctgctgaagtacagcaaggactgcgagggcagcgccctgctgaagaaggccctggacgccatgctggacctgctgaagagcgtgaacgacagcatgcaccagatcgccatcaacggctacatcggcaacctgaacgagctgggcaagatgatcatgcagggcggcttcagcgtgtggatcggccacaagaagggcgccaccaagatgaaggacctggccagattcaagcccatgcagagacacctgttcctgtacgagaaggccatcgtgttctgcaagagaagagtggagagcggcgagggcagcgacagataccccagctacagcttcaagcactgctggaagatggacgaggtgggcatcaccgagtacgtgaagggcgacaacagaaagttcgagatctggtacggcgagaaggaggaggtgtacatcgtgcaggccagcaacgtggacgtgaagatgacctggctgaaggagatcagaaacatcctgctgaagcagcaggagctgctgaccgtgaagaagagaaagcagcaggaccagctgaccgagagagacaagttccagatcagcctgcagcagaacgacgaggacctgtgcagaagatggctgagctacatcgacgaggccaccatgagcaacggcaagtag

SEQ ID NO: 67625 - protein, 941 aa, Artificial Sequence
  derived and/or modified sequence
MAEANPRRGKMRFRRNAASFPGNLHLVLVLRPTSFLQRTFTDIGFWFSQEDFMLKLPVVMLSSVSDLLTYIDDKQLTPELGGTLQYCHSEWIIFRNAIENFALTVKEMAQMLQSFGTELAETELPDDIPSIEEILAIRAERYHLLKNDITAVTKEGKILLTNLEVPDTEGAVSSRLECHRQISGDWQTINKLLTQVHDMETAFDGFWEKHQLKMEQYLQLWKFEQDFQQLVTEVEFLLNQQAELADVTGTIAQVKQKIKKLENLDENSQELLSKAQFVILHGHKLAANHHYALDLICQRCNELRYLSDILVNEIKAKRIQLSRTFKMHKLLQQARQCCDEGECLLANQEIDKFQSKEDAQKALQDIENFLEMALPFINYEPETLQYEFDVILSPELKVQMKTIQLKLENIRSIFENQQAGFRNLADKHVRPIQFVVPTPENLVTSGTPFFSSKQVGVGYSFFQACKLFSKGKKTWRQNQSNLKIEVVPDCQEKRSSGPSSSLDNGNSLDVLKNHVLNELIQTERVYVRELYTVLLGYRAEMDNPEMFDLMPPLLRNKKDILFGNMAEIYEFHNDIFLSSLENCAHAPERVGPCFLERKDDFQMYAKYCQNKPRSETIWRKYSECAFFQECQRKLKHRLRLDSYLLKPVQRITKYQLLLKELLKYSKDCEGSALLKKALDAMLDLLKSVNDSMHQIAINGYIGNLNELGKMIMQGGFSVWIGHKKGATKMKDLARFKPMQRHLFLYEKAIVFCKRRVESGEGSDRYPSYSFKHCWKMDEVGITEYVKGDNRKFEIWYGEKEEVYIVQASNVDVKMTWLKEIRNILLKQQELLTVKKRKQQDQLTERDKFQISLQQNDEKQQGAFISTEETELEHTSTVVEVCEAIASVQAEANTVWTEASQSAEISEEPAEWSSNYFYPTYDENEEENRPLMRPVSEMALLY

SEQ ID NO: 67626 - DNA, 2826 bp, Artificial Sequence
  derived and/or modified sequence
atggctgaggccaatcccagaagaggcaaaatgcgcttccggaggaatgccgccagctttcctggcaatttgcacctcgtgttggtactgcgtccaactagctttctgcagcggacatttacggacatcggattctggttctctcaggaagatttcatgctgaaattgcccgtggtgatgctttcctccgtgagcgacttactcacttacatagatgacaagcagctcactcccgaattgggggggaccctgcagtactgtcattcagagtggataatctttaggaatgccattgaaaacttcgccctgacagtgaaggaaatggcccagatgctgcaatcatttggcaccgagctagccgaaacagagctccctgacgatatcccatctattgaagaaattttggccatccgggccgaaagatatcatctgttaaaaaacgacataaccgccgtcacaaaagaaggtaaaatcttgctgacgaaccttgaggtgccagatactgagggcgctgtcagcagtcgtctagaatgccatcgccagataagcggggattggcaaacgatcaataagctccttacgcaggttcatgatatggaaacagcattcgatggcttctgggagaaacaccagttaaaaatggagcagtacttacaactgtggaagtttgaacaagactttcagcaactggtgacagaagtggagtttttgctgaaccagcaggcagaactggcggatgtgaccggaactatcgcacaggtgaagcagaaaataaagaagctcgagaaccttgatgagaactctcaggaactcctgtccaaggcgcagttcgtcatcttgcatgggcacaaactcgcagccaatcatcattatgctttggacctcatatgccagaggtgtaatgagctcaggtacctgtccgatattctagttaacgagatcaaggccaagcgaatacagctcagccgaaccttcaagatgcacaaactcttgcagcaagcacggcagtgttgcgatgagggggagtgcctgctggccaatcaggaaatagacaagttccagagcaaggaggatgctcaaaaagctttgcaagatattgaaaatttcttagaaatggccttgccattcatcaactacgaacccgagacgctccagtatgaattcgatgtcatcctgtccccggagctgaaagtacagatgaagaccattcagctaaaattggagaacatacgaagtatattcgaaaatcagcaggctgggtttagaaatctggccgataaacacgtgcgacccatccagttcgtagtccctactccggagaacttagtgaccagcggaacaccgttttttagcagcaagcaggtgggggttggctattcttttttccaggcctgtaaactgttcagcaaaggcaaaaagacctggcggcagaatcagtctaatctgaagattgaggtagtgccggactgccaagagaaacgttcctccgggcccagttccagcctggacaatggcaattctttggacgtgctgaagaatcacgttctgaacgagctgattcaaaccgagcgggtatatgttagagagctgtacaccgtactgctcggataccgtgccgagatggataacccagaaatgtttgatctgatgccacccttactcaggaataagaaagacatactttttgggaatatggctgagatctacgagttccataatgatatattcctgtcgtcactggagaactgtgcccatgctccagagcgtgtgggaccctgttttctggaaaggaaggacgactttcaaatgtatgcgaagtattgtcagaataagcccaggtccgaaacgatttggcggaaatactcagagtgcgcttttttccaggagtgccagcggaagctgaagcaccgacttcgcctggacagctatcttctaaagccagtgcaacgtatcaccaagtatcagttactcctgaaggaactccttaagtattccaaagactgcgaaggctccgccttgctgaaaaaggccctggacgccatgctggatttgttgaagtctgtcaatgatagcatgcaccagatcgccattaacggctatatcggcaacctgaacgagttaggtaaaatgatcatgcaaggaggctttagcgtgtggattggacataagaagggggccaccaagatgaaggatctggcccggttcaagccgatgcagagacacctgttcctctacgagaaagccattgtgttctgcaaacgcagagtggagtcgggggagggaagtgacagatacccttcttacagtttcaaacattgctggaagatggacgaagtcggcatcaccgagtatgtcaagggagacaatcggaagtttgagatctggtatggcgaaaaagaggaggtctacattgtgcaggcctctaacgtggatgtgaaaatgacctggttgaaagaaattcgaaatatactgctcaaacagcaggaactcctgacggtgaaaaagcggaaacagcaggaccagctaaccgagcgcgacaagtttcagatcagcctgcaacagaacgacgaaaagcaacagggggcctttatttcaacagaagaaaccgagctggaacacacctcaactgtcgtagaagtgtgtgaagctatagcctccgtccaagcagaggcaaacactgtgtggacagaggccagccaatccgcagagatcagcgaggaacctgcagagtggtcctccaactatttttatcccacctacgatgaaaatgaagaggagaatcgccctctcatgaggcctgtaagtgaaatggccctgctctactag

SEQ ID NO: 67627 - DNA, 2826 bp, Artificial Sequence
  derived and/or modified sequence
atggccgaggccaacccccggcggggcaagatgaggttcagaagaaatgctgccagcttccctggcaacctgcacctggtgctggtgctgcggcccaccagcttcctgcagaggaccttcacagacatcggcttctggttcagccaggaggacttcatgctgaagctgcctgtggtgatgctgagctctgtgtctgacctgctgacctacattgatgacaagcagctgaccccagagctgggcggcaccctgcagtactgccacagcgagtggatcatcttcagaaatgccattgaaaattttgccctgactgtgaaggagatggcccagatgctgcagagctttggaacagagctggccgagacagagctgcctgatgacatccccagcattgaggagatcctggccatccgggcagagcgctaccacctgctgaagaatgacatcacagctgtgaccaaggagggcaagatcctgctgaccaacctggaggtgcctgacacagagggcgctgtgagcagccggctggagtgccaccggcagatcagcggggactggcagaccatcaacaagctgctgacccaggtgcatgacatggagacagcctttgatggcttctgggagaagcaccagctgaagatggagcagtacctgcagctgtggaagtttgagcaggacttccagcagctggtgacagaggtggagttcctgctgaaccagcaggccgagctggctgatgtgacaggcaccatcgcccaggtgaagcagaagatcaagaagctggagaacctggatgagaacagccaggagctgctgagcaaggcccagtttgtgatcctgcacggccacaagctggccgccaaccaccactacgccctggacctgatctgccagcgctgcaatgagctgcgctacctgagtgacatcctggtgaatgagatcaaggccaagaggatccagctgagcaggaccttcaagatgcacaagctgctgcagcaggcccggcagtgctgtgatgaaggagagtgcctgctggccaaccaggagattgacaagttccagagcaaagaagatgcccagaaggccctgcaggacatcgagaacttcctggagatggccctgcccttcatcaactatgagcctgagaccctgcagtatgaatttgatgtgatcctgagccctgagctgaaggtgcagatgaagaccatccagctgaagctggagaacatccgcagcatctttgagaaccagcaggccggcttcaggaacctggccgacaagcacgtgcggcccatccagtttgtggtgcccaccccagagaacctggtgaccagcggcacccccttcttcagcagcaagcaggtgggcgtgggctacagcttcttccaggcctgcaagctgttcagcaagggcaagaagacctggaggcagaaccagagcaacctgaagattgaggtggtgcctgactgccaggagaagaggagcagcggccccagcagcagcctggacaatggaaacagcctggatgtgctgaagaaccacgtgctgaatgaactcatccagacagagcgggtgtatgtgcgggagctgtacacagtgctgctgggctacagagctgagatggacaaccctgagatgtttgacctgatgccacccctgctgaggaacaagaaggacatcctgtttggaaacatggccgagatctatgagttccacaatgacatcttcctgagcagcctggagaactgtgcccacgcccctgagcgggtgggcccctgcttcctggagaggaaggatgacttccagatgtatgccaagtactgccagaacaagcccaggtctgagaccatctggaggaagtacagtgaatgtgccttcttccaggagtgccagaggaagctgaagcaccggctgcggctggacagctacctgctgaagcctgtgcagaggatcaccaagtaccagctgctgctgaaggagctgctgaagtacagcaaggactgtgagggcagcgccctgctgaagaaggccctggatgccatgctggacctgctgaagtctgtgaatgacagcatgcaccagatcgccatcaatggctacatcggcaacctgaatgagctgggcaagatgatcatgcagggcggcttctctgtgtggattggccacaagaagggggccaccaagatgaaggacctggcccgcttcaagcccatgcagaggcacctgttcctgtatgagaaggccatcgtgttctgcaagagaagagtggagagcggggagggcagtgaccgctaccccagctacagcttcaagcactgctggaagatggatgaggtgggcatcacagaatatgtgaagggggacaacaggaagtttgagatctggtacggggagaaggaggaggtgtacatcgtgcaggccagcaatgtggatgtgaagatgacctggctgaaggagatccggaacatcctgctgaagcagcaggagctgctgactgtgaagaagaggaagcagcaggaccagctgacagagcgggacaagttccagatcagcctgcagcagaatgatgagaagcagcagggcgccttcatcagcacagaggagacagagctggagcacaccagcacagtggtggaggtgtgtgaggccatcgcctctgtgcaggccgaggccaacacagtgtggacagaggccagccagagcgctgagatcagcgaggagcctgctgagtggagcagcaactacttctaccccacctatgatgaaaatgaggaggagaaccggcccctgatgaggcctgtgtctgagatggccctgctgtactag

SEQ ID NO: 67628 - DNA, 2826 bp, Artificial Sequence
  derived and/or modified sequence
atggcagaagcaaatccccggagaggcaagatgaggttcagaaggaatgcggcttccttccctgggaacttgcacttggttttggttttacgtcctaccagctttcttcaacgaacgttcacagacattggattttggtttagtcaggaggattttatgcttaaattaccagttgttatgctgagctcagttagtgatttgctgacatacattgatgacaagcaattaacccctgagttaggcggcaccttgcagtactgccacagtgaatggatcatcttcagaaatgctatagaaaattttgccctcacagtgaaagaaatggctcagatgttacagtcctttggaactgaactggctgagacagaactaccagatgatattccctcaatagaagaaattctggcaattcgtgctgaaaggtatcatctgttgaagaatgatattacagctgtaaccaaagaaggaaaaattctgctaacaaatctggaagtgcctgacactgaaggagctgtcagttcaagactagaatgtcatcggcaaataagtggtgactggcaaactattaataagttgctgactcaagtacatgatatggaaacagcttttgatggattttgggaaaaacatcaattaaaaatggagcagtatctgcaactatggaagtttgagcaggattttcaacagcttgtgactgaagttgaatttctattaaaccaacaagcagaactggctgatgtaacagggactatagctcaagtaaaacaaaaaataaaaaaattggaaaacttagatgaaaattctcaggagctattatcaaaggcccagtttgtgatattacatggacacaagcttgcagcaaatcaccattatgcacttgatttaatctgccagaggtgcaatgagctacgttacctttctgatattttggttaatgagataaaagcaaaacggatacaactcagcaggaccttcaaaatgcataaactcctacagcaggctcgtcaatgctgtgatgaaggggaatgtcttctagctaatcaggaaatagataagtttcagtctaaagaagatgctcagaaagctctccaagacattgaaaattttcttgaaatggctctaccctttataaattatgaacctgaaacactgcagtatgaatttgatgtaatattatctcctgagcttaaggttcaaatgaagactatacaactcaagcttgaaaacattcgaagtatatttgagaaccagcaggctggtttcaggaacctggcagataagcatgtgaggccaatccaatttgtggtacccacacctgaaaatttggtcacatctgggacaccatttttttcatctaaacaagtgggagttggatactctttctttcaagcatgtaaacttttttcaaaagggaagaagacttggagacaaaatcagagcaacttaaaaattgaagtggtgcctgattgtcaggagaagagaagttctggtccatcctccagtttggacaatggcaatagcttggatgttttaaagaaccacgtactaaatgaactgatacagactgagagagtttatgttcgagaactgtatactgttttgttgggttatagagcggagatggataatccagagatgtttgatcttatgccacctctcctgagaaataaaaaggacattctctttggaaacatggcagaaatatatgaattccataacgacattttcttgagcagcctggaaaattgtgctcatgctccagaaagagtgggaccttgtttcctggaaaggaaggatgattttcagatgtatgcaaaatattgtcagaataagcccagatcagaaacaatttggaggaagtattcagaatgcgcatttttccaggaatgtcaaagaaagttaaaacacagacttagactggattcctatttactcaaaccagtgcaacgaatcactaaatatcagttattgttgaaggagctattaaaatatagcaaagactgtgaaggatctgctctgttgaagaaggcactcgatgcaatgctggatttactgaagtcagttaatgattctatgcatcagattgcaataaatggctatattggaaacttaaatgaactgggcaagatgataatgcaaggtggattcagcgtttggatagggcacaagaaaggtgctacaaaaatgaaggatttggctagattcaaaccaatgcagcgacaccttttcttgtatgaaaaagccattgttttttgcaaaaggcgtgttgaaagtggagaaggctctgacagatacccgtcatacagttttaaacactgttggaaaatggatgaagttggaatcactgaatatgtaaaaggtgataaccgcaagtttgaaatctggtatggtgaaaaggaagaagtttatattgtccaggcttctaatgtagatgtgaagatgacgtggctaaaagaaataagaaatattttgttgaagcagcaggaacttttgacagttaaaaaaagaaagcaacaggatcaattaacagaacgggataagtttcagatttctcttcagcagaatgatgaaaagcaacagggagcttttataagtactgaggaaactgaattggaacacaccagcactgtggtggaggtctgtgaggcaattgcgtcagttcaggcagaagcaaatacagtttggactgaggcatcacaatctgcagaaatctctgaagaacctgcggaatggtcaagcaactatttctaccctacttatgatgaaaatgaagaagaaaataggcccctcatgagacctgtgtcggagatggctctcctatattga

SEQ ID NO: 67629 - DNA, 2826 bp, Artificial Sequence
  derived and/or modified sequence
atggccgaggccaacccccggcggggcaagatgcggttccggcggaatgcagcaagtttcccaggaaatttacacttggtgctcgtgctgaggccaacgagcttcctccagcggacgttcaccgatattggcttttggtttagtcaggaggatttcatgcttaagctccctgtggttatgctctcatctgtcagcgatttattaacctacattgatgataagcagcttacacctgagcttggtggtaccctccagtattgtcattctgagtggatcattttcaggaatgccatcgagaatttcgccctgactgtcaaggagatggcccagatgctgcagagttttggaaccgagctggcagaaacggaactgcccgacgacatcccatccatcgaagagattctggcaatcagagctgagcgttaccacttgctcaaaaatgatattactgcggtgactaaggaggggaaaattcttctcactaatcttgaggtgcctgataccgagggtgccgtctctagccgactcgaatgtcaccgccagattagcggcgactggcagaccatcaacaaattgttaacacaggtacacgatatggaaacggccttcgatgggttctgggagaaacaccagttgaagatggagcagtatcttcagctctggaagttcgagcaggactttcagcagcttgtaaccgaggtcgagttcctgctcaatcagcaggctgaactcgccgatgtaaccggaacgatcgcccaggtcaagcagaagattaaaaaactggagaatctggacgagaatagtcaagaactactgagtaaggctcaattcgtcatcctgcatggccacaagctggccgctaaccaccactatgcactagacttgatttgtcagcggtgtaatgagctccgctatctgtccgatattctggtgaatgaaatcaaggctaagcgcatccagctcagcagaacattcaaaatgcacaagttgctccaacaggcccggcaatgctgcgacgagggtgagtgcctgttagcaaaccaagaaatagacaaatttcaatcaaaagaagatgcgcagaaggctctccaggacatcgaaaattttctcgaaatggcactgccctttatcaactacgaacccgaaacattacagtatgagtttgatgtgatcctgagccctgagcttaaggtccaaatgaaaaccattcagctcaaacttgagaatatcaggagcatatttgagaatcagcaggccggatttcggaatctggctgataaacatgtgagacccatccagttcgtggtgccgactccagagaatttggtgacctctggaacacccttcttctcttccaagcaggtgggtgtgggttattccttcttccaggcctgcaagctgttcagtaaaggcaagaagacctggagacaaaaccagagtaatcttaagattgaagttgtgcccgattgtcaggagaaaagaagtagcggtcccagctcttcactcgacaatggcaactcgctggatgtcctgaagaatcacgtgttgaatgagcttatccaaactgagcgagtatatgtcagagaactgtataccgtgctactgggctatagagctgaaatggataatcccgagatgtttgatctgatgcctcctctgttgaggaataagaaggacattctgtttggcaacatggcggagatctatgagttccacaatgacatcttcctttcttcactcgaaaactgcgctcatgcccccgaacgagtggggccttgcttcttggaaaggaaggatgactttcagatgtatgccaagtactgccagaataagcctcggtccgaaacgatctggaggaaatattccgagtgcgctttcttccaagaatgccaacgaaagctaaagcaccgccttagactggattcgtacttgctgaagcccgttcaacgcataaccaaatatcagttgctgttgaaagagctcttaaagtactccaaggactgcgagggatctgccctcctgaaaaaggcccttgatgcgatgttggacttactcaagagcgtaaatgatagcatgcatcagattgctattaacggctacattggaaatctgaatgaactggggaagatgataatgcagggagggttctccgtttggattgggcacaagaagggcgccacaaagatgaaagacttggccaggtttaagcctatgcaaagacacttgttcctctatgagaaagccatagtcttctgtaagaggcgggttgaaagcggcgagggatccgaccgctacccctcgtactcattcaagcactgttggaagatggacgaagtaggaattactgagtatgtcaaaggtgacaatagaaaatttgaaatctggtacggggagaaggaggaggtttacattgtgcaagcttcaaacgtcgacgttaagatgacctggctgaaggaaatacgaaatatacttcttaaacagcaagagctcctcactgtgaagaaacgcaaacaacaggatcaactgaccgagcgagataaatttcaaatatctctgcagcagaatgacgagaagcagcaaggagcatttattagtacagaggaaaccgaactagaacatacctccaccgtggtggaggtctgtgaggctatagcctctgtccaggcagaagccaacaccgtgtggaccgaagcaagtcaaagcgcggagatctctgaagagcccgctgaatggtctagtaactacttttatcccacctacgacgagaacgaggaggagaacaggcccctgatgagacccgtatcagagatggctttgctgtactag

SEQ ID NO: 67630 - DNA, 2826 bp, Artificial Sequence
  derived and/or modified sequence
atggccgaggcaaacccacgtcgcggaaagatgcgctttcgcaggaacgctgcgtcctttcccggaaaccttcacctcgttctggtgctgcggcctacctcattcctacaaagaacctttactgatatcggcttctggttttcccaggaggactttatgctgaaattgccagttgtgatgctcagctcagtctctgacctactcacttatatcgatgataaacagttaactcccgagctagggggaacactccaatactgccattcagagtggattatattccgcaatgccatcgaaaacttcgccctgactgttaaggaaatggcccagatgttgcagagtttcggtacggaactggccgagacagagcttcccgacgatattccttccatagaggaaatcctcgctattcgcgcagaacgatatcacctcctgaagaacgacatcacagctgtgaccaaggagggcaagattctgctgaccaacctggaggtgcctgatactgaaggtgccgtgtctagtagattagagtgccaccgccagatcagcggtgactggcagacaattaacaagctcctaacccaggtgcacgacatggagacggcctttgatggattctgggagaagcaccagctgaagatggagcaatatctgcagttgtggaaatttgagcaggactttcagcaattggtcacagaggtggagttcctgctgaaccaacaggctgaacttgcggacgttactggaacaatcgctcaagtgaagcaaaagattaagaagttagagaacttagacgagaacagccaagaactcctttctaaggcacagttcgttattctccacggacataaacttgctgctaaccaccactacgccctcgaccttatctgccaacggtgtaatgagctccggtatctgagcgacatccttgttaatgaaattaaggccaagaggatccagctatccaggaccttcaaaatgcataagttgctgcagcaggcccgacagtgttgtgatgagggagaatgccttctggctaatcaagagatcgacaaattccagtctaaagaggatgcccagaaggcacttcaggatatcgagaacttcctcgagatggcactccccttcatcaactatgagccagagacccttcagtacgagttcgatgtcatcttgtcacctgagctcaaggtgcagatgaagacaatccagctgaagctcgaaaatattcgctcaattttcgagaaccaacaagctgggttcaggaatctcgctgacaaacacgtcaggccaatccagttcgtggtgccaacccccgagaacctggtcacctctggtacaccctttttttccagcaaacaggtcggtgtggggtattcgttttttcaagcctgcaagctgttttccaaaggtaagaaaacatggaggcagaatcagtctaacctcaagattgaagttgtccctgattgtcaggagaagcgcagtagtggcccttcatcgagcttggacaacggcaactcccttgacgttctgaagaatcatgtgcttaatgagcttattcagaccgagcgtgtgtacgttcgcgagctgtatacggtgctgctcggatatcgagccgagatggacaatcctgagatgttcgatttaatgccacctctactgcgtaataagaaggacatactatttgggaatatggctgagatctatgagtttcacaacgatatttttctgagctccctggagaactgcgcacatgcgcctgaaagggttggaccttgttttctcgagagaaaggacgattttcagatgtatgctaaatactgccaaaacaagcctagatctgagacaatctggcgtaagtactcagagtgtgcattctttcaggagtgtcagcgcaagctcaagcatcggctccgcctggatagctatcttctgaaacccgtccagaggatcacaaagtatcagttgcttttgaaggaactcctgaagtatagtaaggattgcgaagggagcgccctcctgaagaaagcactggacgccatgctggatctcttgaaatctgtgaacgactccatgcaccagattgctatcaacggatatatcgggaatttgaacgaactcgggaaaatgatcatgcagggaggattctccgtttggatcggtcacaagaaaggtgcaacaaagatgaaggacttagcccgattcaagcccatgcaaaggcatctgttcctgtatgagaaagccattgtcttctgcaaacggagagtcgagtcaggtgaggggtcagaccggtaccctagctattccttcaagcactgctggaagatggatgaggttggcatcacggaatacgtcaaaggcgacaatcggaaatttgaaatatggtacggggaaaaagaagaagtttatatcgtccaggcttcgaacgtcgacgtgaagatgacatggctcaaggagattcggaatattctactgaagcagcaggagctgctgaccgttaagaagcgtaagcagcaggaccagttaaccgagcgagacaaattccagatcagtcttcagcagaatgacgagaaacagcagggtgcattcatcagcaccgaggaaactgagctagagcacacgtctacagtcgtggaagtgtgcgaggctatcgcaagcgtgcaggctgaggcaaataccgtttggaccgaagcatcgcagtcagccgaaatttcagaagagccagcagaatggtcctccaactatttttatcctacatatgatgaaaatgaagaggagaacagaccattgatgcggcctgtgagtgagatggcattgttatattag

SEQ ID NO: 67631 - DNA, 2826 bp, Artificial Sequence
  derived and/or modified sequence
atggccgaggccaaccccagaagaggcaagatgagattcagaagaaacgccgccagcttccccggcaacctgcacctggtgctggtgctgagacccaccagcttcctgcagagaaccttcaccgacatcggcttctggttcagccaggaggacttcatgctgaagctgcccgtggtgatgctgagcagcgtgagcgacctgctgacctacatcgacgacaagcagctgacccccgagctgggcggcaccctgcagtactgccacagcgagtggatcatcttcagaaacgccatcgagaacttcgccctgaccgtgaaggagatggcccagatgctgcagagcttcggcaccgagctggccgagaccgagctgcccgacgacatccccagcatcgaggagatcctggccatcagagccgagagataccacctgctgaagaacgacatcaccgccgtgaccaaggagggcaagatcctgctgaccaacctggaggtgcccgacaccgagggcgccgtgagcagcagactggagtgccacagacagatcagcggcgactggcagaccatcaacaagctgctgacccaggtgcacgacatggagaccgccttcgacggcttctgggagaagcaccagctgaagatggagcagtacctgcagctgtggaagttcgagcaggacttccagcagctggtgaccgaggtggagttcctgctgaaccagcaggccgagctggccgacgtgaccggcaccatcgcccaggtgaagcagaagatcaagaagctggagaacctggacgagaacagccaggagctgctgagcaaggcccagttcgtgatcctgcacggccacaagctggccgccaaccaccactacgccctggacctgatctgccagagatgcaacgagctgagatacctgagcgacatcctggtgaacgagatcaaggccaagagaatccagctgagcagaaccttcaagatgcacaagctgctgcagcaggccagacagtgctgcgacgagggcgagtgcctgctggccaaccaggagatcgacaagttccagagcaaggaggacgcccagaaggccctgcaggacatcgagaacttcctggagatggccctgcccttcatcaactacgagcccgagaccctgcagtacgagttcgacgtgatcctgagccccgagctgaaggtgcagatgaagaccatccagctgaagctggagaacatcagaagcatcttcgagaaccagcaggccggcttcagaaacctggccgacaagcacgtgagacccatccagttcgtggtgcccacccccgagaacctggtgaccagcggcacccccttcttcagcagcaagcaggtgggcgtgggctacagcttcttccaggcctgcaagctgttcagcaagggcaagaagacctggagacagaaccagagcaacctgaagatcgaggtggtgcccgactgccaggagaagagaagcagcggccccagcagcagcctggacaacggcaacagcctggacgtgctgaagaaccacgtgctgaacgagctgatccagaccgagagagtgtacgtgagagagctgtacaccgtgctgctgggctacagagccgagatggacaaccccgagatgttcgacctgatgccccccctgctgagaaacaagaaggacatcctgttcggcaacatggccgagatctacgagttccacaacgacatcttcctgagcagcctggagaactgcgcccacgcccccgagagagtgggcccctgcttcctggagagaaaggacgacttccagatgtacgccaagtactgccagaacaagcccagaagcgagaccatctggagaaagtacagcgagtgcgccttcttccaggagtgccagagaaagctgaagcacagactgagactggacagctacctgctgaagcccgtgcagagaatcaccaagtaccagctgctgctgaaggagctgctgaagtacagcaaggactgcgagggcagcgccctgctgaagaaggccctggacgccatgctggacctgctgaagagcgtgaacgacagcatgcaccagatcgccatcaacggctacatcggcaacctgaacgagctgggcaagatgatcatgcagggcggcttcagcgtgtggatcggccacaagaagggcgccaccaagatgaaggacctggccagattcaagcccatgcagagacacctgttcctgtacgagaaggccatcgtgttctgcaagagaagagtggagagcggcgagggcagcgacagataccccagctacagcttcaagcactgctggaagatggacgaggtgggcatcaccgagtacgtgaagggcgacaacagaaagttcgagatctggtacggcgagaaggaggaggtgtacatcgtgcaggccagcaacgtggacgtgaagatgacctggctgaaggagatcagaaacatcctgctgaagcagcaggagctgctgaccgtgaagaagagaaagcagcaggaccagctgaccgagagagacaagttccagatcagcctgcagcagaacgacgagaagcagcagggcgccttcatcagcaccgaggagaccgagctggagcacaccagcaccgtggtggaggtgtgcgaggccatcgccagcgtgcaggccgaggccaacaccgtgtggaccgaggccagccagagcgccgagatcagcgaggagcccgccgagtggagcagcaactacttctaccccacctacgacgagaacgaggaggagaacagacccctgatgagacccgtgagcgagatggccctgctgtactag

SEQ ID NO: 67632 - protein, 215 aa, Artificial Sequence
  derived and/or modified sequence
MSCTIEKALADAKALVERLRDHDDAAESLIEQTTALNKRVEAMKQYQEEIQELNEVARHRPRSTLVMGIQQENRQIRELQQENKELRTSLEEHQSALELIMSKYREQMFRLLMASKKDDPGIIMKLKEQHSKELQAHVDQITEMAAVMRKAIEIDEQQGCKEQERIFQLEQENKGLREILQITRESFLNLRKDDASESTSLSALVTNSDLSLRKS

SEQ ID NO: 67633 - protein, 60 aa, Artificial Sequence
  derived and/or modified sequence
MSCTIEKALADAKALVERLRDHDDAAESLIEQTTALNKRVEAMKQYQEEIQELNEVARHR

SEQ ID NO: 67634 - DNA, 648 bp, Artificial Sequence
  derived and/or modified sequence
atgagctgcaccatcgagaaggccctggccgacgccaaggccctggtggagagactgagagaccacgacgacgccgccgagagcctgatcgagcagaccaccgccctgaacaagagagtggaggccatgaagcagtaccaggaggagatccaggagctgaacgaggtggccagacacagacccagaagcaccctggtgatgggcatccagcaggagaacagacagatcagagagctgcagcaggagaacaaggagctgagaaccagcctggaggagcaccagagcgccctggagctgatcatgagcaagtacagagagcagatgttcagactgctgatggccagcaagaaggacgaccccggcatcatcatgaagctgaaggagcagcacagcaaggagctgcaggcccacgtggaccagatcaccgagatggccgccgtgatgagaaaggccatcgagatcgacgagcagcagggctgcaaggagcaggagagaatcttccagctggagcaggagaacaagggcctgagagagatcctgcagatcaccagagagagcttcctgaacctgagaaaggacgacgccagcgagagcaccagcctgagcgccctggtgaccaacagcgacctgagcctgagaaagagctag

SEQ ID NO: 67635 - DNA, 648 bp, Artificial Sequence
  derived and/or modified sequence
atgtcctgcaccatcgagaaagccctggcggacgcaaaagccctggtcgagaggttaagggaccacgatgatgccgccgagtcgctgattgaacagacgacagcactaaacaagagggttgaggccatgaaacagtaccaggaagagattcaggagctgaacgaggtcgcgcggcataggccgcggtcaacgctcgtgatgggaattcagcaggaaaacagacagattcgtgaacttcaacaggagaacaaagagttgcgaactagcctagaagagcaccagtctgccttggagcttattatgtcaaaatatcgggaacagatgttccgactgctcatggccagcaagaaggatgacccaggtattatcatgaagctgaaagagcagcatagcaaggaactacaggcccatgtcgatcaaattaccgagatggctgccgtgatgcgcaaagcaattgagatcgacgagcagcagggctgcaaagagcaagagagaatttttcaactggagcaggagaataagggactgagggaaattctccagatcactcgcgagtctttcctcaacctccggaaggacgacgcaagcgaaagtacttcactttcagcacttgtcacaaactccgacctttccttacggaagagctag

SEQ ID NO: 67636 - DNA, 648 bp, Artificial Sequence
  derived and/or modified sequence
atgagctgcaccatcgagaaggccctggctgatgccaaggccctggtggagcggctgcgggaccatgatgatgctgctgagagcctcatcgagcagaccacagccctgaacaagagggtggaggccatgaagcagtaccaggaggagatccaggagctgaatgaggtggcccggcaccggcccaggagcaccctggtgatgggcatccagcaggagaaccggcagatccgggagctgcagcaggagaacaaggagctgcggaccagcctggaggagcaccagagcgccctggagctgatcatgagcaagtaccgggagcagatgttccggctgctgatggccagcaagaaggatgaccccggcatcatcatgaagctgaaggagcagcacagcaaggagctgcaggcccacgtggaccagatcacagagatggctgctgtgatgaggaaggccatcgagattgatgagcagcagggctgcaaggagcaggagcgcatcttccagctggagcaggagaacaagggcctgcgggagatcctgcagatcacccgggagagcttcctgaacctgaggaaggatgatgccagcgagagcaccagcctgagcgccctggtgaccaacagcgacctgagcctgaggaagagctag

SEQ ID NO: 67637 - DNA, 648 bp, Artificial Sequence
  derived and/or modified sequence
atgagctgcaccatcgagaaggccctggccgacgccaaggccctggtggagcgcctccgtgatcatgacgatgccgctgaaagtctcattgagcagaccaccgctctgaacaaacgcgtcgaggccatgaagcagtatcaagaagaaattcaagagcttaacgaggtggcccggcaccggcccagatccacactggtgatggggatacagcaagagaacagacaaatcagggaactgcagcaagagaataaagagctcagaaccagcctggaggaacatcagagcgccctggagctgatcatgtccaagtaccgtgagcagatgttccgcttgctgatggctagcaagaaagacgaccccggaataattatgaaactgaaggagcaacattccaaggagctgcaggctcatgtcgaccagatcaccgaaatggccgcagtcatgcgcaaagctatcgagatcgatgagcagcagggctgtaaagaacaagaacgcatttttcagctggagcaagagaataagggactgagagagattctgcagatcacccgcgaatccttcttgaacctcaggaaagatgacgcaagtgagagtacttccctgtcagctctcgtgacgaatagcgacctttccctgagaaaatcttag

SEQ ID NO: 67638 - DNA, 648 bp, Artificial Sequence
  derived and/or modified sequence
atgtcatgcacaattgaaaaagcactggccgatgcaaaggccctggttgagaggttgagggatcacgacgatgctgccgaaagcttaattgaacagaccaccgcactcaacaaaagagtcgaggctatgaagcaatatcaggaagagattcaagagctgaatgaggttgccaggcaccgcccacggtccacactcgttatgggcatccaacaggagaaccgacaaatcagagaacttcagcaagagaataaggaactacgaacttccctggaggaacatcagtctgctctcgagctgattatgtctaagtaccgtgaacagatgtttcgattattaatggcaagtaaaaaagacgaccccggaataattatgaagctcaaagagcagcattcaaaggagcttcaggcgcacgtagaccaaattacggaaatggctgctgttatgcggaaagcaatagaaattgatgagcaacaaggctgcaaggaacaggagcgcatttttcagcttgagcaggagaacaaaggcctacgggagatcctgcaaattacccgagagtcattcctgaatctgagaaaggatgatgctagcgaatctacctccctttctgccctggtaactaacagcgacctctctctgcgcaagtcatag

SEQ ID NO: 67639 - DNA, 2790 bp, Artificial Sequence
  derived and/or modified sequence
cggcggaggtgtctaccccgccggtgatggcgttgaacgccactggcttcccggccttccgtccgctgcctccgtccgattctgcgtctgcttgctgaggaggcggattaggggggcgcggagtctcttcccttgagtgcataggtcccggttggtagagggtttgagtccgcatcgccacagctgaaggctgcgagggactaagagcagaatatatctttagaaatgagttgcacaattgagaaggcacttgccgacgctaaagctcttgttgaaagattaagagatcatgacgatgcagcagaatctctgattgagcaaaccacagctctcaacaagcgagtagaagccatgaaacagtatcaggaagaaattcaagaacttaatgaagtcgcgagacatcggccacggtccacgttagttatgggaatccagcaagaaaacagacaaatcagagagttgcaacaagaaaacaaagaattacgtacatctctggaagaacatcagtcggccttggaacttataatgagcaagtaccgagaacaaatgtttagattgctaatggctagcaaaaaagatgatccgggtataataatgaagttaaaagagcagcactccaaggaactgcaagcacatgttgaccagataactgaaatggcagcagtaatgaggaaagccattgaaattgacgagcaacagggttgcaaggaacaagaacgaatatttcaacttgaacaagaaaacaaaggcttgagagagatccttcaaataactcgagaatcatttttgaacctaaggaaagatgatgcgtcggaaagtacttctttgtcagcattagtgaccaacagtgatttgagtctgaggaagagctgaagagtttctgagtctgtgagcttcttacatggctccaaatggtcaaataagtgaatgaatgaatggacagaaaattcaatcctttatttttttctctgtaaatatgtacagtgcacgggctatgagatagcaacaaaaaatgcatagttaatggtcatagactttattccaaaacataattggaaaatagaaactgagccattgccaaatggtaaagaaatgaaaagttttcacagtgactactgaatataccaagagcttttggcagtactgctggctttctgggtgattaattaggtaaacttgaatattcccagtaaatgtttgagaatgcataaaattataccaatttaaaaatataaatttttgccactgttttgtgaacggaggatttgtacgctaaatttcatccttatttggcgtcaaagttgatgcaaagtttatgtaccatgagacttctagtgattgcctactttcacatttatttaaatttttgtgaaagaaaatacagttttaaaggctataggaatgtgttatatgtaccttaaacagataatttaattttagcaatttatcataactgatacttagctaacaattgtccataacttgtttaagtgtaagaaataccatttcaggaatgaaaaagaaggaatactactttctaagaaagaagatcttataatagacatatttagtaggttaaactactcctttgaaagaataagttttggttcaaagtcaataatgaagacgagatttgtttttctcttctctggctgatttttaaggatattatgtagttcatttagttaacagaattgaaatgtttgatatggcaagataggtatggtaatttcaaagtgaattgggaattcctctggctcatagaacccttttttttttcctttaagtattcttgagatacaaaaaaaaaaagtaaatacaatttcaaaaaaaaagttccggatctgtttttaagctccatctggtcctcataacctgcaagatttttcttaaaacctttcagctgaaagtgggggtaaaggtggagtaatctgtggatttgtttctgttgtcttttaaaatgtcaaatatataatatgtaatttttttaaaaaccaccagatacagaaatgtgctttaacatcagttgaaacctaaattttcttatgttgtggtgattgtattaaaaagggataaaagaagagtgtcaaacatggttaaatatattgtactcatttatgttgaatacgtattaaaattaagacaaatggaaaattatactttgagtatataatttgttaaatattactttatatggtaattttatgtataatttcatatattggtaaaattcaaaactacacttgagaatttttttatcttaagtttggggtgaatggggtggatgagactgattgaatagaaaagggctaatggcccaaacattatatagatttctttttttcagtcagaggccttatttgatattttataaataaatgacagtttttatttttaaactttttattgtttttgggaaagtattccttaatttaatgacacattcattcagatacttcttatccctgctaataaaggaaatctatttcaagctacaccattgagattaagtctgaggcagttcattgaggcagctctactataaaagcttacttgataaataattatttttgtaaacaagttgggttaacttattcttcgtctttttgcttggatatgaatttaaggtcttcatgtttaaagacatttactttgttatttagtgacacatttccatcctattttttttttttttttggttgttgttaaacagaaccttaagtttatgtttgaggtatgtactgcataggaacctattttattattaaagatgaatgattaaaattggta

SEQ ID NO: 67640 - protein, 172 aa, Artificial Sequence
  derived and/or modified sequence
MSCTIEKALADAKALVERLRDHDDAAESLIEQTTALNKRVEAMKQYQEEIQELNEVARHRPRSTLVMGIQQENRQIRELQQENKELRTSLEEHQSALELIMSKYREQMFRLLMASKKDDPGIIMKLKEQHSKIDMVHRNKSEGFFLDASRHILEAPQHGLERRHLEANQNVH

SEQ ID NO: 67641 - DNA, 183 bp, Artificial Sequence
  derived and/or modified sequence
atgagctgcaccatcgagaaggccctggccgacgccaaggccctggtggagagactgagagaccacgacgacgccgccgagagcctgatcgagcagaccaccgccctgaacaagagagtggaggccatgaagcagtaccaggaggagatccaggagctgaacgaggtggccagacacagatag

SEQ ID NO: 67642 - DNA, 519 bp, Artificial Sequence
  derived and/or modified sequence
atgagctgcaccatcgagaaggccctggccgacgccaaggccctggtggagagactgagagaccacgacgacgccgccgagagcctgatcgagcagaccaccgccctgaacaagagagtggaggccatgaagcagtaccaggaggagatccaggagctgaacgaggtggccagacacagacccagaagcaccctggtgatgggcatccagcaggagaacagacagatcagagagctgcagcaggagaacaaggagctgagaaccagcctggaggagcaccagagcgccctggagctgatcatgagcaagtacagagagcagatgttcagactgctgatggccagcaagaaggacgaccccggcatcatcatgaagctgaaggagcagcacagcaagatcgacatggtgcacagaaacaagagcgagggcttcttcctggacgccagcagacacatcctggaggccccccagcacggcctggagagaagacacctggaggccaaccagaacgtgcactag

SEQ ID NO: 67643 - DNA, 183 bp, Artificial Sequence
  derived and/or modified sequence
atgtcctgtactatcgaaaaggcattggctgacgctaaagcgcttgtcgaacgattgcgcgaccacgatgacgccgccgagtctctgattgaacagacgaccgcgctgaataaaagggtagaagccatgaaacagtaccaggaggagatccaggagctgaatgaggtggcccggcaccgatag

SEQ ID NO: 67644 - DNA, 519 bp, Artificial Sequence
  derived and/or modified sequence
atgagctgtaccatcgagaaggctctggccgacgccaaagctcttgtggaacggttaagggaccatgatgacgcagcagaatctctgatcgaacagacaacggccctgaacaagagggtggaggcaatgaaacagtatcaagaggagatccaggaactaaatgaagtcgccagacaccgcccgcgatctactctggtgatgggaatccagcaggagaaccgtcagatacgcgagcttcagcaagagaacaaggagcttagaacatccctggaggagcatcagtccgccttagaacttatcatgagtaagtacagagagcagatgttccgcctgctcatggcatctaaaaaagacgaccctggaatcataatgaaactgaaagaacaacacagcaaaattgacatggtgcaccgtaacaaaagcgaaggattctttctggacgcatctaggcacatcctggaagcgccccagcacggactagaaaggagacacctagaagccaatcagaacgtgcactag

SEQ ID NO: 67645 - DNA, 183 bp, Artificial Sequence
  derived and/or modified sequence
atgagctgcaccatcgagaaggccctggctgatgccaaggccctggtggagcggctgcgggaccatgatgatgctgctgagagcctcatcgagcagaccacagccctgaacaagagggtggaggccatgaagcagtaccaggaggagatccaggagctgaatgaggtggcccggcacaggtag

SEQ ID NO: 67646 - DNA, 519 bp, Artificial Sequence
  derived and/or modified sequence
atgagctgcaccatcgagaaggccctggctgatgccaaggccctggtggagcggctgcgggaccatgatgatgctgctgagagcctcatcgagcagaccacagccctgaacaagagggtggaggccatgaagcagtaccaggaggagatccaggagctgaatgaggtggcccggcaccggcccaggagcaccctggtgatgggcatccagcaggagaaccggcagatccgggagctgcagcaggagaacaaggagctgcggaccagcctggaggagcaccagagcgccctggagctgatcatgagcaagtaccgggagcagatgttccggctgctgatggccagcaagaaggatgaccccggcatcatcatgaagctgaaggagcagcacagcaagattgacatggtgcacaggaacaagtctgagggcttcttcctggatgccagccgccacatcctggaggccccccagcacggcctggagcggcggcacctggaggccaaccagaatgtgcactag

SEQ ID NO: 67647 - DNA, 183 bp, Artificial Sequence
  derived and/or modified sequence
atgagctgcaccatcgagaaggccctggccgacgccaaggccctggtggagcgcttgcgggatcatgacgacgccgcggagtctttgatagagcagactaccgcacttaacaagagggtcgaagcgatgaaacagtaccaagaggaaatccaggagcttaacgaggttgcccggcacaggtag

SEQ ID NO: 67648 - DNA, 519 bp, Artificial Sequence
  derived and/or modified sequence
atgagctgcaccatcgagaaggccctggccgacgccaaggccctggtggaacgacttcgagaccatgacgatgcagctgaatccctcatcgagcagacaacggcactgaataagagagtggaggctatgaaacaataccaagaggagatccaggagttgaatgaggtcgcccgacaccggcccaggagcactctggtcatgggaatccagcaagagaatagacagatccgcgaactgcaacaggagaacaaggaactccgcaccagtctcgaggagcatcaatcagcactagagctcataatgagcaaatatcgggagcagatgtttcggctgttaatggcatctaagaaagatgatcctggaatcattatgaaactgaaagagcagcactccaaaatcgatatggttcaccgtaataagagtgaggggttctttctagacgcgtctcgtcatattcttgaagcacctcagcatggcttagaacggcggcacctcgaggctaatcaaaatgtacattag

SEQ ID NO: 67649 - DNA, 183 bp, Artificial Sequence
  derived and/or modified sequence
atgtcttgtacaattgaaaaggcgctggcggatgccaaggctctcgtcgaaagactgagggaccacgacgatgccgcagaaagccttatcgaacagaccaccgccctgaacaagcgggttgaagccatgaagcagtatcaagaagaaattcaggaactaaacgaagtagccagacatcgctag

SEQ ID NO: 67650 - DNA, 519 bp, Artificial Sequence
  derived and/or modified sequence
atgtcctgcaccattgagaaggctttagccgacgcgaaagccctcgtcgaacgtctcagggaccacgatgacgctgcagaatctctgatagagcagacaactgccttaaacaagcgggtggaagctatgaagcagtatcaggaagagatccaagagctgaatgaagttgcccgtcaccgtcccaggtctacactggtaatgggaatccagcaggagaataggcagattcgagagctgcagcaggaaaataaggaactccggaccagccttgaggagcatcagtcggccctagaactcatcatgtccaagtacagagagcaaatgtttcggttgctgatggcaagcaagaaagacgaccctgggataattatgaaattgaaagaacagcacagtaaaatcgacatggttcacaggaataagtctgagggattttttctagacgctagtaggcatatcctggaagccccacaacatggcctagagagacgccaccttgaggcaaatcagaatgtgcactag

SEQ ID NO: 67651 - DNA, 582 bp, Artificial Sequence
  derived and/or modified sequence
agcgccggtcggaggcggtcggcggaggtgtctaccccgccggtgatggcgttgaacgccactggcttcccggccttccgtccgctgcctccgtccgattctgcgtctgcttgctgaggaggcggattaggggggcgcggagtctcttcccttgagtgcataggtcccggttggtagagggtttgagtccgcatcgccacagctgaaggctgcgagggactaagagcagagaagatgcaagagttagaattataatgcaactttatgtaagaagcagaagttcttccaagaagaggttgagactttaatgtagcatgacacattgaggccacttcggctggtcagcagtgtttgtgaacagtgtgtcaagtcacctgaccaagcagagatatatctttagaaatgagttgcacaattgagaaggcacttgccgacgctaaagctcttgttgaaagattaagagatcatgacgatgcagcagaatctctgattgagcaaaccacagctctcaacaagcgagtagaagccatgaaacagtatcaggaagaaattcaagaacttaatgaagtcgcgagacatcgg

SEQ ID NO: 67652 - DNA, 956 bp, Artificial Sequence
  derived and/or modified sequence
ggtcggcggaggtgtctaccccgccggtgatggcgttgaacgccactggcttcccggccttccgtccgctgcctccgtccgattctgcgtctgcttgctgaggaggcggattaggggggcgcggagtctcttcccttgagtgcataggtcccggttggtagagggtttgagtccgcatcgccacagctgaaggctgcgagggactaagagcagaatatatctttagaaatgagttgcacaattgagaaggcacttgccgacgctaaagctcttgttgaaagattaagagatcatgacgatgcagcagaatctctgattgagcaaaccacagctctcaacaagcgagtagaagccatgaaacagtatcaggaagaaattcaagaacttaatgaagtcgcgagacatcggccacggtccacgttagttatgggaatccagcaagaaaacagacaaatcagagagttgcaacaagaaaacaaagaattacgtacatctctggaagaacatcagtcggccttggaacttataatgagcaagtaccgagaacaaatgtttagattgctaatggctagcaaaaaagatgatccgggtataataatgaagttaaaagagcagcactccaagattgacatggtacatcgtaacaagtccgaaggattcttccttgatgcatctcgacacatccttgaagcacctcaacatggactggagagaaggcacttggaagcaaatcagaatgtacactaaataaacagtcaacttttggggtgtggatggaaggggggtccattttaaaagtgcttttacattgaatttccctcccagattagatcagcaaataaatgaaatttattaaaagaatgttgtgtctttaatagccatgctgttcagtgtagaaactttaaatctctcattaattttctgtgtattgtatcatgtacagcctgttagatatt

SEQ ID NO: 67653 - protein, 1212 aa, Artificial Sequence
  derived and/or modified sequence
MGRHVATSCHVAWLLVLISGCWGQVNRLPFFTNHFFDTYLLISEDTPVGSSVTQLLAQDMDNDPLVFGVSGEEASRFFAVEPDTGVVWLRQPLDRETKSEFTVEFSVSDHQGVITRKVNIQVGDVNDNAPTFHNQPYSVRIPENTPVGTPIFIVNATDPDLGAGGSVLYSFQPPSQFFAIDSARGIVTVIRELDYETTQAYQLTVNATDQDKTRPLSTLANLAIIITDVQDMDPIFINLPYSTNIYEHSPPGTTVRIITAIDQDKGRPRGIGYTIVSGNTNSIFALDYISGVLTLNGLLDRENPLYSHGFILTVKGTELNDDRTPSDATVTTTFNILVIDINDNAPEFNSSEYSVAITELAQVGFALPLFIQVVDKDETQGLNSMFEVYLVGNNSHHFIISPTSVQGKADIRIRVAIPLDYETVDRYDFDLFANESVPDHVGYAKVKITLINENDNRPIFSQPLYNISLYENVTVGTSVLTVLATDNDAGTFGEVSYFFSDDPDRFSLDKDTGLIMLIARLDYELIQRFTLTIIARDGGGEETTGRVRINVLDVNDNVPTFQKDAYVGALRENEPSVTQLVRLRATDEDSPPNNQITYSIVSASAFGSYFDISLYEGYGVISVSRPLDYEQISNGLIYLTVMAMDAGNPPLNSTVPVTIEVFDENDNPPTFSKPAYFVSVVENIMAGATVLFLNATDLDRSREYGQESIIYSLEGSTQFRINARSGEITTTSLLDRETKSEYILIVRAVDGGVGHNQKTGIATVNITLLDINDNHPTWKDAPYYINLVEMTPPDSDVTTVVAVDPDLGENGTLVYSIQPPNKFYSLNSTTGKIRTTHAMLDRENPDPHEAELMRKIVVSVTDCGRPPLKATSSATVFVNLLDLNDNDPTFQNLPFVAEVLEGIPAGVSIYQVVAIDLDEGLNGLVSYRMPVGMPRMDFLINSSSGVVVTTTELDRERIAEYQLRVVASDAGTPTKSSTSTLTIHVLDVNDETPTFFPAVYNVSVSEDVPREFRVVWLNCTDNDVGLNAELSYFITGGNVDGKFSVGYRDAVVRTVVGLDRETTAAYMLILEAIDNGPVGKRHTGTATVFVTVLDVNDNRPIFLQSSYEASVPEDIPEGHSILQEEDLASPCISPAPPRRAFQSSGEKETSQFPGKELRREPGPSKAQNRAAFTEPLAEAPLLGSKQAQEERAPLPREQAQQLQGSEGEKGGP

SEQ ID NO: 67654 - protein, 1064 aa, Artificial Sequence
  derived and/or modified sequence
MGRHVATSCHVAWLLVLISGCWGQVNRLPFFTNHFFDTYLLISEDTPVGSSVTQLLAQDMDNDPLVFGVSGEEASRFFAVEPDTGVVWLRQPLDRETKSEFTVEFSVSDHQGVITRKVNIQVGDVNDNAPTFHNQPYSVRIPEVGATGNTPVGTPIFIVNATDPDLGAGGSVLYSFQPPSQFFAIDSARGIVTVIRELDYETTQAYQLTVNATDQDKTRPLSTLANLAIIITDVQDMDPIFINLPYSTNIYEHSPPGTTVRIITAIDQDKGRPRGIGYTIVSGNTNSIFALDYISGVLTLNGLLDRENPLYSHGFILTVKGTELNDDRTPSDATVTTTFNILVIDINDNAPEFNSSEYSVAITELAQVGFALPLFIQVVDKDEGLNSMFEVYLVGNNSHHFIISPTSVQGKADIRIRVAIPLDYETVDRYDFDLFANESVPDHVGYAKVKITLINENDNRPIFSQPLYNISLYENVTVGTSVLTVLATDNDAGTFGEVSYFFSDDPDRFSLDKDTGLIMLIARLDYELIQRFTLTIIARDGGGEETTGRVRINVLDVNDNVPTFQKDAYVGALRENEPSVTQLVRLRATDEDSPPNNQITYSIVSASAFGSYFDISLYEGYGVISVSRPLDYEQISNGLIYLTVMAMDAGNPPLNSTVPVTIEVFDENDNPPTFSKPAYFVSVVENIMAGATVLFLNATDLDRSREYGQESIIYSLEGSTQFRINARSGEITTTSLLDRETKSEYILIVRAVDGGVGHNQKTGIATVNITLLDINDNHPTWKDAPYYINLVEMTPPDSDVTTVVAVDPDLGENGTLVYSIQPPNKFYSLNSTTGKIRTTHAMLDRENPDPHEAELMRKIVVSVTDCGRPPLKATSSATVFVNLLDLNDNDPTFQNLPFVAEVLEGIPAGVSIYQVVAIDLDEGLNGLVSYRMPVGMPRMDFLINSSSGVVVTTTELDRERIAEYQLRVVASDAGTPTKSSTSTLTIHVLDVNDETPTFFPAVYNVSVSEDVPREFRVVWLNCTDNDVGLNAELSYFITGAAPASAHLCRPPGALPPPLPDGQPD

SEQ ID NO: 67655 - protein, 382 aa, Artificial Sequence
  derived and/or modified sequence
MGEEGTGGTVHLLCLAASSGVPLFCRSSRGGAPARQQLPFSVIGSLNGVHMFGQNLEVQLSSARTENTTVVLLVGLEELTNIRNVERLKKDLRASYCLIDSFLGDSELIGDLTQCVDCVIPPEGSLLQEALSGFAEAAGTTFVSLVVSGRVVAATEGWWRLGTPEAVLLPWLVGSLPPQTARDYPVYLPHGSPTVPHRLLTLTLLPSLELCLLCGPSPPLSQLYPQLLERWWQPLLDPLRACLPLGPRALPSGFPLHTDILGLLLLHLELKRCLFTVEPLGDKEPSPEQRRRLLRNFYTLVTSTHFPPEPGPPEKTEDEVYQAQLPRACYLVLGTEEPGTGVRLVALQLGLRRLLLLLSPQSPTHGLRSLATHTLHALTPLL

SEQ ID NO: 67656 - DNA, 1479 bp, Artificial Sequence
  derived and/or modified sequence
ctgattaccgccatgctccaagacccgcactgacagtccccacgtgagggaccgcggtgggagtcctaaatgggggaggaggggacgggcggcactgtgcatctgctgtgcctcgcggcctccagcggggtccccctattctgcaggagcagtcgcggcggcgcccccgcccgtcagcagctcccgttctctgtcatcggttccctcaatggagtccacatgtttgggcagaatctggaggtgcagctgagctctgcgaggaccgagaacacgactgtggtccttcttgtgggacttgaagaactgaccaatatccgcaacgtggagagactgaagaaggacttgagggccagttattgcctcatcgacagcttcctgggggactcggagctcatcggggacctgacccagtgtgtggactgcgtgattcctccagaggggtccctcttgcaggaagccctctccgggttcgctgaggccgcgggcacgaccttcgtcagtctggtggtgtccggccgggtggtggcagcaacagagggttggtggcggctggggacgcccgaggccgtgctgctcccctggctggtggggtccctgccgccgcagaccgctcgcgactacccggtgtacctgccgcacgggagccccacggtcccacaccggctcctgaccctgactctgctgccgagcctggagctgtgtctactctgcgggccgagcccacccctcagccagttgtatccacagcttctggagcgctggtggcagccactgctggacccgttgcgggcctgtctgccgttgggaccccgggcgctgcccagtggcttcccccttcacacagacatcctcgggctgctgctcctccacctggaactgaagcgctgcctcttcaccgtggagcccttgggggataaagagccttcaccagaacagcgccggcgcctcctccgaaacttctataccctggtcacctccacgcacttcccaccagagccagggccaccagagaagacagaagatgaggtctaccaggcccagctgcccagagcttgctacctggtgttggggactgaggaaccaggcacaggagtgcgtctggtggccttgcagctggggcttcggcggctgctgctgctgctgtctccccagagtcccacccatgggctgcgaagcctggccacccacactctgcatgccctcaccccacttctttgactacctagcagtgggtgatggacacagacatggggctgttagcgtctctctgtttattcgctcacaataatacacagcccctggatggggagggggtaggaggggctacaacagggtggggtgggaggggaggagacatccacttccctggcccctctcccctctgtgcttgggggggaaagggagggagggggactccccctaaccccccagaatgtaaacagcagcagatgaacaaaaataaaaatacaaaaggccgga

SEQ ID NO: 67657 - DNA, 1149 bp, Artificial Sequence
  derived and/or modified sequence
atgggcgaagagggcaccggagggactgtgcatctcctatgtctggccgcctctagcggagtgccgttattctgtcgatcttctcgcggtggcgcccccgctaggcagcagcttcccttctcagtaatagggtcattaaatggggtacacatgtttggccaaaacttagaggtgcaacttagcagcgcaaggactgagaacactaccgtggtgctgctggtcggtctggaagagttgaccaacataaggaacgtggagaggctgaaaaaagacctacgagccagttactgtctcatagattcctttttaggagatagtgaactgatcggtgatctcacacagtgcgtggattgcgtgatccctccggagggaagcctgcttcaggaggcgctgagcggtttcgccgaagccgccggtacaacattcgtaagcttggttgtcagtggcagagtggtggctgccactgagggctggtggcgcctggggactccagaagccgtgcttcttccctggctggtggggtccttacctccccagacggctcgtgattacccagtgtacctgccccacggttctcctaccgtacctcatcgcttgcttacactgacactcctcccgtctttagagctttgcttattatgcgggccatcacctccactgtcccaattgtaccctcagctgctggaacgatggtggcagcctctgctcgatccactgcgtgcatgcttacccttgggcccacgcgccctccccagcggatttccactgcatacagacattctcggcctgttgctgcttcacttggagctcaagcgctgcctgtttacagtggagcccctgggcgacaaggagccgagcccagagcagagacgcaggctgttgagaaatttttatacattggtgacatccacccacttccctccagagcctgggccaccagagaagactgaggatgaagtttaccaggcccagctgccccgtgcatgctatctcgtcctgggcacggaggaaccaggaaccggggtgcgtctggtcgccctgcagctgggtctcaggaggctgttgttactgctgtcaccccagtctcccactcacggtttgagatctttagccactcacactttgcatgccttgaccccactgttatag

SEQ ID NO: 67658 - DNA, 1149 bp, Artificial Sequence
  derived and/or modified sequence
atgggagaggagggcaccggcggcaccgtgcacctgctgtgcctggccgccagcagtggagtgcccctcttctgccgcagcagccggggcggggccccagcccggcagcagctgcccttctctgtgattggcagcctgaatggagtgcacatgtttggccagaacctggaggtgcagctgagcagcgccaggacagagaacaccaccgtggtgctgctggtgggcctggaggagctgaccaacatcagaaatgtggagcggctgaagaaggacctgcgggccagctactgcctgattgacagcttcctgggggacagcgagctgattggagacctgacccagtgtgtggactgtgtgattcctcctgagggcagcctgctgcaggaggccctgagcggctttgctgaggccgccggcaccacctttgtgtccctggtggtgtctggccgggtggtggccgccacagagggctggtggaggctgggcaccccagaggccgtgctgctgccctggctggtgggcagcctgcccccccagacagcccgggactaccctgtgtacctgccccacggcagccccaccgtgccccaccggctgctgaccctgaccctgctgcccagcctggagctgtgcctgctgtgtggccccagcccccccctgagccagctgtacccccagctgctggagcgctggtggcagcccctgctggaccccctgcgggcctgcctgcccctgggcccccgggccctgcccagcggcttccccctgcacacagacatcctgggcctgctgctgctgcacctggagctgaagcgctgcctcttcaccgtggagcccctgggggacaaggagcccagccctgagcagaggcggcggctgctgaggaacttctacaccctggtgaccagcacccacttccccccagagcccggccccccagagaagacagaagatgaggtgtaccaggcccagctgccccgggcctgctacctggtgctgggcacagaggagcccggcaccggggtgcggctggtggccctgcagctgggcctgcggcggctgctgctgctgctgagcccccagagccccacccacggcctgcggagcctggccacccacaccctgcacgccctgacccccctgctgtag

SEQ ID NO: 67659 - DNA, 1149 bp, Artificial Sequence
  derived and/or modified sequence
atgggcgaggagggcaccggcggcaccgtgcacctgctgtgcctggcggcctctagtggggtcccattgttctgccgtagctctaggggaggagctccagccagacagcaactccccttttctgtgatcggcagcctgaatggggtccatatgtttgggcaaaatctggaagtccagctgtcctcggctagaactgaaaataccaccgttgtgttgctggtcggcctcgaggagctgaccaacatccggaatgttgagagattgaaaaaggatctgagagcgtcctactgtttgatcgactccttcctcggggacagcgagcttattggcgatctcactcagtgtgtagattgtgtgatacccccagaggggtccttgctgcaggaggccctatccggtttcgctgaggccgccgggactacgttcgtctcgctcgtagtgtccggccgagtggtggccgctaccgagggttggtggagattggggaccccggaggctgtgttgttgccctggctcgttggctctctgcctccccaaacagctcgcgactatcccgtatatctccctcatggtagtccaacagtgccgcaccgactactgacgttgacattgctgccctccttggagctctgcttactgtgcgggccatctccgccactgagccaactgtacccccagctgctggagagatggtggcagccacttctggaccctctgagggcatgcttaccccttggcccacgcgctctgccttcagggtttcctctgcatacagatatactgggtctgcttctccttcacttggaactcaaacggtgcctcttcactgtggaacctctcggtgataaagagccctccccggaacaaaggcgtagactgttacgcaatttttacaccctggtgacttccacccacttcccaccagaacctggcccccctgaaaaaactgaagatgaggtgtaccaggctcagctgcccagagcgtgctatttggtcctggggacagaggagcccgggaccggggtcaggctcgtggctctacaacttggattgcggaggctcttactgctgctgagtccgcagagtcctacccacggcttgagatccctggcaacccacactttgcatgccctaaccccattgctctag

SEQ ID NO: 67660 - DNA, 1149 bp, Artificial Sequence
  derived and/or modified sequence
atgggggaggagggtacgggcggaaccgtgcacctgctctgtctggcggctagttccggcgtgccccttttctgtagatctagcagagggggagccccagcccgacagcagttacccttcagtgttattggcagcctgaacggcgtccatatgtttggacagaacttggaggtgcagctatcatctgcaaggaccgagaacacaaccgtggtactattagtgggtctcgaggagctgacaaacatccgtaacgttgagcgcttaaaaaaggatctccgcgcttcctactgtcttatagactcatttctgggtgactctgagctgatcggagaccttacacagtgtgtcgactgcgttatacctccagaaggctcactgttacaggaagcactctccggcttcgccgaggctgctggtaccacctttgtgtcgctcgttgtttctggcagagttgtcgctgccactgaaggatggtggaggctcggtacgcctgaggccgtcttgctgccatggctcgtgggttccctccctccccagacagctcgcgattacccagtgtacctcccacacggctcccccaccgtccctcataggctgcttacactgacactcttgccatccctggaactctgcctgctgtgcgggcctagcccaccattgagccaactctatccgcaactcctggagaggtggtggcagccactgctcgaccccctgagggcatgcctgccacttggacctcgggcactgccatccggtttccctctgcatacggatatcctgggcctgctgcttctccacctggagttaaaaagatgcttatttactgtagaacctctgggagacaaagaaccaagccccgagcaacggcgtaggctcctgcggaacttctatactctcgtcacgagcacacactttccgcctgaacccggaccgccagagaaaacagaggatgaggtataccaggcgcaactaccaagagcgtgttacctggtgctgggcactgaagagccaggcacgggggtgaggttggtcgccctgcaattggggctcaggcggctcttgctgttgcttagtccccagagtccgacccatgggttacgctctctggccacccataccctgcacgcactgactccattgctgtag

SEQ ID NO: 67661 - DNA, 1149 bp, Artificial Sequence
  derived and/or modified sequence
atgggcgaggagggcaccggcggcaccgtgcacctgctgtgcctggccgccagcagcggcgtgcccctgttctgcagaagcagcagaggcggcgcccccgccagacagcagctgcccttcagcgtgatcggcagcctgaacggcgtgcacatgttcggccagaacctggaggtgcagctgagcagcgccagaaccgagaacaccaccgtggtgctgctggtgggcctggaggagctgaccaacatcagaaacgtggagagactgaagaaggacctgagagccagctactgcctgatcgacagcttcctgggcgacagcgagctgatcggcgacctgacccagtgcgtggactgcgtgatcccccccgagggcagcctgctgcaggaggccctgagcggcttcgccgaggccgccggcaccaccttcgtgagcctggtggtgagcggcagagtggtggccgccaccgagggctggtggagactgggcacccccgaggccgtgctgctgccctggctggtgggcagcctgcccccccagaccgccagagactaccccgtgtacctgccccacggcagccccaccgtgccccacagactgctgaccctgaccctgctgcccagcctggagctgtgcctgctgtgcggccccagcccccccctgagccagctgtacccccagctgctggagagatggtggcagcccctgctggaccccctgagagcctgcctgcccctgggccccagagccctgcccagcggcttccccctgcacaccgacatcctgggcctgctgctgctgcacctggagctgaagagatgcctgttcaccgtggagcccctgggcgacaaggagcccagccccgagcagagaagaagactgctgagaaacttctacaccctggtgaccagcacccacttcccccccgagcccggcccccccgagaagaccgaggacgaggtgtaccaggcccagctgcccagagcctgctacctggtgctgggcaccgaggagcccggcaccggcgtgagactggtggccctgcagctgggcctgagaagactgctgctgctgctgagcccccagagccccacccacggcctgagaagcctggccacccacaccctgcacgccctgacccccctgctgtag

SEQ ID NO: 67662 - DNA, 1092 bp, Artificial Sequence
  derived and/or modified sequence
atggactatcgcgtgaacatctttctcagacagcagtggaacgattctcgcctggcttacagtgaatatcctgacgatagcctggatcttgatccctccatgttagactctatctggaaaccggacctttttttcgcaaatgaaaagggagctaacttccacgatgtcacgaccgataataaactgctacgcatctcaaagaacggtaaggtcctctattcaatccggttaacactgacactaagttgtcctatggacctaaaaaacttcccaatggatgtgcagacctgtaccatgcagctggaatcgtttggatacacaatgaacgacctgatattcgagtggctgtcggatggacccgttcaagtcgcggagggcctcacactaccccagttcattcttaaggaggaaaaggaattagggtattgcactaaacattataacaccggcaagtttacatgcattgaggttaaattccatctagagcggcagatgggttattatctgattcagatgtatattcccagcctcctcatcgtcatccttagctgggttagcttctggattaatatggatgcggccccggctagagtggcactcggcatcaccaccgttcttaccatgaccacccagagcagtgggtcaagggcgtctctgcccaaggtctcttacgtaaaggcgatcgacatttggatggcagtttgtctcttgtttgtgtttgctgctctgttggagtatgcagctgtgaattttgtgtcaagacaacacaaagaatttttaaggctgcgccggcggcagaaacgccagaacaaggaagaggacgttaccagagaaagccggtttaatttcagcgggtatgggatgggccactgcttacaggtcaaggatggcaccgccgtgaaggctacccctgccaatcccttgcctcaacccccaaaggatggtgacgctatcaagaagaagttcgttgatagggctaagcggatcgacacaattagtagggcagccttcccccttgcctttctgatatttaatattttttattggatcacttacaaaatcattcggcatgaggacgtgcacaaaaagtag

SEQ ID NO: 67663 - DNA, 1092 bp, Artificial Sequence
  derived and/or modified sequence
atggactacagagtgaacatcttcctgcggcagcagtggaatgacagccggctggcctacagcgagtacccagatgacagcctggacctggaccccagcatgctggacagcatctggaagccagacctcttctttgccaatgaaaaaggagccaacttccatgatgtgaccacagacaacaagctgctgcgcatcagcaagaatggcaaggtgctgtacagcatccggctgaccctgaccctgagctgccccatggacctgaagaacttccccatggatgtgcagacctgcaccatgcagctggagagctttggctacaccatgaatgacctgatctttgagtggctgagtgatggccctgtgcaggtggccgagggcctgaccctgccccagttcatcctgaaggaggagaaggagctgggctactgcaccaagcactacaacacaggcaagttcacctgcatcgaggtgaagttccacctggagcggcagatgggctactacctgatccagatgtacatccccagcctgctgattgtcatcctgtcctgggtgtccttctggatcaacatggatgctgccccagcccgggtggccctgggcatcaccaccgtgctgaccatgaccacccagagcagcggcagccgggccagcctgcccaaggtgtcctatgtgaaggccatcgacatctggatggctgtgtgcctgctgtttgtgtttgctgccctgctggagtatgctgctgtgaactttgtgtcccggcagcacaaggagttcctgcggctgcggcggcggcagaagaggcagaacaaggaggaggatgtgacccgggagagccgcttcaacttcagcggctacggcatgggccactgcctgcaggtgaaggatggaacagctgtgaaggccaccccagccaaccccctgccccagccccccaaggatggagatgccatcaagaagaagtttgtggaccgggccaagagaattgacaccatcagcagagctgccttccccctggccttcctgatcttcaacatcttctactggatcacctacaagatcatcagacatgaagatgtgcacaagaagtag

SEQ ID NO: 67664 - DNA, 1092 bp, Artificial Sequence
  derived and/or modified sequence
atggactaccgggtgaacatcttcctgcggcagcagtggaacgactccaggctggcatattctgaatacccagatgatagcctcgatttagacccctcaatgctagatagtatctggaaaccagatctctttttcgctaatgaaaagggtgctaactttcatgatgttacaaccgacaataagctgttaagaatctctaagaacggcaaggtcctgtatagcatcagactaactctgaccctgtcatgccctatggatctcaaaaatttccctatggatgtccagacctgtactatgcagctcgaatcatttggatataccatgaacgacctgatctttgaatggctaagcgatggaccagttcaggttgccgagggccttacgctgccgcagtttattctgaaagaggaaaaagaacttgggtactgtaccaagcattacaacacgggcaaatttacctgtatcgaggttaagtttcacctcgaacggcagatgggctactacctcattcagatgtatattccaagtctgctgatcgtgattctgtcgtgggtgagcttttggattaacatggacgcggccccagctagggtggcgctgggcatcactacagtgcttacaatgacaacccagagcagcggctctcgcgcctctttacccaaggtctcttatgtgaaagcaatagacatttggatggcggtgtgtctgctctttgtattcgccgctttgctcgaatacgctgccgtgaatttcgtttccagacagcataaggagtttcttcgcctgcgccgccggcagaaacgtcaaaataaagaggaggacgtgacgcgggaatcgaggttcaatttctcagggtatggaatgggtcattgcttgcaggtgaaggacggcaccgcagtgaaggccacgcctgccaatcctctgccccagcccccaaaggacggggatgcgattaaaaagaagtttgttgaccgggccaaaagaattgatacaataagcagggcggcatttccactggcatttctgatcttcaacattttttactggataacctacaagattatcaggcatgaagacgtccataaaaaatag

SEQ ID NO: 67665 - DNA, 1092 bp, Artificial Sequence
  derived and/or modified sequence
atggactatcgtgtcaacattttcctgcgccaacaatggaatgactctaggctggcatacagcgagtaccccgacgactcacttgacctggaccccagcatgctcgatagtatctggaaaccggatctgttcttcgccaacgagaagggagccaattttcacgatgtcactacagataacaagctgctgcgtatctctaaaaatggaaaggtcttgtactcaattcgactgacactgacattgtcatgccctatggatctgaagaatttcccgatggatgtccagacatgcaccatgcagctcgagtcctttggctacaccatgaacgatctgatatttgaatggctaagcgacggacctgtgcaagtcgccgaggggctgaccctgccacagtttattttgaaggaggaaaaggagctggggtactgtacgaagcattacaacaccggaaagttcacgtgcatcgaagtgaagttccacctggagcgccagatgggctattacctgatccagatgtacattcccagccttctcattgttatcctcagctgggtctccttctggataaatatggatgcggctccggctagggtagccctcggaatcacaaccgtcctaactatgacaacccaatccagtggttcccgagccagtctgccaaaagtgagttatgtaaaagctattgacatttggatggcagtctgtcttctttttgtttttgccgcacttctggagtatgccgcagtgaactttgtctctcgccagcataaagaattccttagattacggagacgacagaaaagacaaaataaagaagaggacgtgactcgagagagcagattcaacttcagcgggtacggtatgggacactgcttgcaagttaaagacggcactgccgttaaagcaacacctgcaaaccctctgccacagcctcctaaagatggggacgcaatcaagaagaagtttgtggaccgcgctaagcggatagacaccatctcacgcgctgcctttcctctggcgttccttattttcaatatcttttattggataacctacaagatcatacggcatgaggatgtgcacaaaaaatag

SEQ ID NO: 67666 - DNA, 1092 bp, Artificial Sequence
  derived and/or modified sequence
atggactacagagtgaacatcttcctgagacagcagtggaacgacagcagactggcctacagcgagtaccccgacgacagcctggacctggaccccagcatgctggacagcatctggaagcccgacctgttcttcgccaacgagaagggcgccaacttccacgacgtgaccaccgacaacaagctgctgagaatcagcaagaacggcaaggtgctgtacagcatcagactgaccctgaccctgagctgccccatggacctgaagaacttccccatggacgtgcagacctgcaccatgcagctggagagcttcggctacaccatgaacgacctgatcttcgagtggctgagcgacggccccgtgcaggtggccgagggcctgaccctgccccagttcatcctgaaggaggagaaggagctgggctactgcaccaagcactacaacaccggcaagttcacctgcatcgaggtgaagttccacctggagagacagatgggctactacctgatccagatgtacatccccagcctgctgatcgtgatcctgagctgggtgagcttctggatcaacatggacgccgcccccgccagagtggccctgggcatcaccaccgtgctgaccatgaccacccagagcagcggcagcagagccagcctgcccaaggtgagctacgtgaaggccatcgacatctggatggccgtgtgcctgctgttcgtgttcgccgccctgctggagtacgccgccgtgaacttcgtgagcagacagcacaaggagttcctgagactgagaagaagacagaagagacagaacaaggaggaggacgtgaccagagagagcagattcaacttcagcggctacggcatgggccactgcctgcaggtgaaggacggcaccgccgtgaaggccacccccgccaaccccctgccccagccccccaaggacggcgacgccatcaagaagaagttcgtggacagagccaagagaatcgacaccatcagcagagccgccttccccctggccttcctgatcttcaacatcttctactggatcacctacaagatcatcagacacgaggacgtgcacaagaagtag

SEQ ID NO: 67667 - protein, 113 aa, Artificial Sequence
  derived and/or modified sequence
MDFSRLHMYSPPQCVPENTGYTYALSSSYSSDALDFETEHKLDPVFDSPRMSRRSLRLATTACTLGDGEAVGADSGTSSAVSLKNRAARTTKQRRSTNKSAFSINHVSRQVTS

SEQ ID NO: 67668 - protein, 88 aa, Artificial Sequence
  derived and/or modified sequence
MDFSRLHMYSPPQCVPENTGYTYALSSSYSSDALDFETEHKLDPVFDSPRMSRRSLRLATTACTLGDGEAVGADSGTSSAVSLKNRAA

SEQ ID NO: 67669 - protein, 135 aa, Artificial Sequence
  derived and/or modified sequence
MDFSRLHMYSPPQCVPENTGYTYALSSSYSSDALDFETEHKLDPVFDSPRMSRRSLRLATTACTLGDGEAVGADSGTSSAVSLKNRAARTTKQRRSTNKSAFSINHVSRQVTSSGVSHGGTVSLQDAVTRRPPVL

SEQ ID NO: 67670 - protein, 682 aa, Artificial Sequence
  derived and/or modified sequence
MDFSRLHMYSPPQCVPENTGYTYALSSSYSSDALDFETEHKLDPVFDSPRMSRRSLRLATTACTLGDGEAVGADSGTSSAVSLKNRAARTTKQRRSTNKSAFSINHVSRQVTSSGVSHGGTVSLQDAVTRRPPVLDESWIREQTTVDHFWGKAASGVFWWLGIGWYQFVTLISWLNVFLLTRCLRNICKFLVLLIPLFLLLGLSLRGQGNFFSFLPVLNWASMHRTQRVDDPQDVFKPTTSRLKQPLQGDSEAFPWHWMSGVEQQVASLSGQCHHHGENLRELTTLLQKLQARVDQMEGGAAGPSASVRDAVGQPPRETDFMAFHQEHEVRMSHLEDILGKLREKSEAIQKELEQTKQKTISAVGEQLLPTVEHLQLELDQLKSELSSWRHVKTGCETVDAVQERVDVQVREMVKLLFSEDQQGGSLEQLLQRFSSQFVSKGDLQTMLRDLQLQILRNVTHHVSVTKQLPTSEAVVSAVSEAGASGITEAQARAIVNSALKLYSQDKTGMVDFALESGGGSILSTRCSETYETKTALMSLFGIPLWYFSQSPRVVIQPDIYPGNCWAFKGSQGYLVVRLSMMIHPAAFTLEHIPKTLSPTGNISSAPKDFAVYGLENEYQEEGQLLGQFTYDQDGESLQMFQALKRPDDTAFQIVELRIFSNWGHPEYTCLYRFRVHGEPVK

SEQ ID NO: 67671 - protein, 119 aa, Artificial Sequence
  derived and/or modified sequence
MDFSRLHMYSPPQCVPENTGYTYALSSSYSSDALDFETEHKLDPVFDSPRMSRRSLRLATTACTLGDGEAVGADSGTSSAVSLKNRAARTTKQRRSTNKSAFSINHVSRQVTSSGVSHG

SEQ ID NO: 67672 - DNA, 2049 bp, Artificial Sequence
  derived and/or modified sequence
atggacttcagcagactgcacatgtacagccccccccagtgcgtgcccgagaacaccggctacacctacgccctgagcagcagctacagcagcgacgccctggacttcgagaccgagcacaagctggaccccgtgttcgacagccccagaatgagcagaagaagcctgagactggccaccaccgcctgcaccctgggcgacggcgaggccgtgggcgccgacagcggcaccagcagcgccgtgagcctgaagaacagagccgccagaaccaccaagcagagaagaagcaccaacaagagcgccttcagcatcaaccacgtgagcagacaggtgaccagcagcggcgtgagccacggcggcaccgtgagcctgcaggacgccgtgaccagaagaccccccgtgctggacgagagctggatcagagagcagaccaccgtggaccacttctggggcaaggccgccagcggcgtgttctggtggctgggcatcggctggtaccagttcgtgaccctgatcagctggctgaacgtgttcctgctgaccagatgcctgagaaacatctgcaagttcctggtgctgctgatccccctgttcctgctgctgggcctgagcctgagaggccagggcaacttcttcagcttcctgcccgtgctgaactgggccagcatgcacagaacccagagagtggacgacccccaggacgtgttcaagcccaccaccagcagactgaagcagcccctgcagggcgacagcgaggccttcccctggcactggatgagcggcgtggagcagcaggtggccagcctgagcggccagtgccaccaccacggcgagaacctgagagagctgaccaccctgctgcagaagctgcaggccagagtggaccagatggagggcggcgccgccggccccagcgccagcgtgagagacgccgtgggccagccccccagagagaccgacttcatggccttccaccaggagcacgaggtgagaatgagccacctggaggacatcctgggcaagctgagagagaagagcgaggccatccagaaggagctggagcagaccaagcagaagaccatcagcgccgtgggcgagcagctgctgcccaccgtggagcacctgcagctggagctggaccagctgaagagcgagctgagcagctggagacacgtgaagaccggctgcgagaccgtggacgccgtgcaggagagagtggacgtgcaggtgagagagatggtgaagctgctgttcagcgaggaccagcagggcggcagcctggagcagctgctgcagagattcagcagccagttcgtgagcaagggcgacctgcagaccatgctgagagacctgcagctgcagatcctgagaaacgtgacccaccacgtgagcgtgaccaagcagctgcccaccagcgaggccgtggtgagcgccgtgagcgaggccggcgccagcggcatcaccgaggcccaggccagagccatcgtgaacagcgccctgaagctgtacagccaggacaagaccggcatggtggacttcgccctggagagcggcggcggcagcatcctgagcaccagatgcagcgagacctacgagaccaagaccgccctgatgagcctgttcggcatccccctgtggtacttcagccagagccccagagtggtgatccagcccgacatctaccccggcaactgctgggccttcaagggcagccagggctacctggtggtgagactgagcatgatgatccaccccgccgccttcaccctggagcacatccccaagaccctgagccccaccggcaacatcagcagcgcccccaaggacttcgccgtgtacggcctggagaacgagtaccaggaggagggccagctgctgggccagttcacctacgaccaggacggcgagagcctgcagatgttccaggccctgaagagacccgacgacaccgccttccagatcgtggagctgagaatcttcagcaactggggccaccccgagtacacctgcctgtacagattcagagtgcacggcgagcccgtgaagtag

SEQ ID NO: 67673 - DNA, 2049 bp, Artificial Sequence
  derived and/or modified sequence
atggatttctcacggttgcacatgtatagtcctccacagtgcgtgccagaaaacaccggctatacgtacgccttatcttcatcttattccagcgacgcccttgacttcgagaccgaacacaaattagaccctgttttcgattctccacgcatgtccaggagatctttacgtctggctacaacagcctgcacattgggcgacggtgaggcagttggcgccgattcgggaacgtccagtgcagtcagccttaagaaccgagccgcccggactacgaaacagaggcgaagcactaacaagtctgctttctcaatcaaccacgtgagtaggcaagtgacttcttctggcgtctcccacggcgggactgtgagtctgcaagatgccgttacccgcagaccccccgtgctggacgagagctggatcagagagcagactactgtggatcatttttgggggaaagccgcttcaggggtgttttggtggctgggtatcggctggtaccagttcgtgaccctgatctcctggctcaatgtatttctgctgactcgatgcctgcgcaatatttgcaagttcctggtcttgctgattcctttattcttgttgcttgggctctcactccgggggcagggaaatttctttagttttctgccggtgttgaactgggcttcgatgcacagaacacagagagttgacgatccacaggacgtcttcaagcccactacctcaaggctgaaacaaccccttcagggcgactccgaagccttcccatggcattggatgtcgggtgtggagcagcaggtggcatcgctgtctggccaatgtcaccaccacggcgagaatctccgcgaactgacaaccttattgcagaagttgcaggcgcgagtcgaccagatggaaggaggcgcagctgggccatcggcctccgtccgcgacgccgtggggcaacctcccagggagacggatttcatggcgttccatcaggagcatgaagtccggatgtctcaccttgaagacattctcggaaagctgagagaaaagagtgaggcgatccagaaggagttggagcagaccaagcaaaaaacaatttcggctgtcggtgaacagctgttacccaccgttgagcatctgcagctggagctcgatcaactcaaaagtgaactttcttcctggagacacgtgaagacaggctgcgaaaccgttgatgccgtgcaggaaagagtagatgtacaggtacgcgagatggtgaaactgctgttcagcgaggatcagcagggtgggtccctcgaacagctcttgcaaaggttttcatcccagtttgtgagcaagggggatctccagacaatgctgcgcgatttgcagctgcaaatcctgcggaatgtgacccaccatgtcagcgtaactaaacagctgccaacgagcgaagcagttgtctccgccgtgtccgaggctggcgcaagcggaatcaccgaggcacaggcccgcgccattgtgaacagtgcacttaaactgtatagccaggataagactggcatggtggattttgcgctggaatctggcgggggatccattttgtctacaagatgctctgaaacatacgagaccaaaacagctctgatgagcctgttcgggatccccctttggtacttctcccagagccccagagtcgtgatccaacctgatatctacccgggcaactgctgggccttcaaaggaagccagggatacctggtggtccgcctgtccatgatgattcaccccgccgcctttactttagaacatatccctaaaacgctttctcctaccggcaacatttccagcgcacccaaagattttgccgtttacggtctcgaaaatgagtaccaggaggagggtcaactgttgggccagttcacttacgaccaggatggtgagagtctgcagatgttccaggcactcaaaaggccggacgatacagcctttcaaatagtggagctgcggattttttctaactgggggcaccccgagtatacatgcctgtatcggttcagggtgcacggcgagccggtaaagtag

SEQ ID NO: 67674 - DNA, 2049 bp, Artificial Sequence
  derived and/or modified sequence
atggacttcagccggctgcacatgtacagccccccccagtgtgtgcctgaaaatacaggctacacctacgccctgagcagcagctacagcagtgatgccctggactttgaaacagagcacaagctggaccctgtgtttgacagccccaggatgagcagaagaagcctgcggctggccaccacagcctgcaccctgggagatggagaggccgtgggcgctgacagcggcaccagcagcgctgtgtccctgaagaacagagctgcccggaccaccaagcagaggaggagcaccaacaagagcgccttcagcatcaaccacgtgtcccggcaggtgaccagcagcggcgtgagccacggcggcaccgtgtccctgcaggatgctgtgacccggcggccccctgtgctggatgagagctggatccgggagcagaccaccgtggaccacttctggggcaaggccgccagcggggtcttctggtggctgggcatcggctggtaccagtttgtgaccctcatctcctggctgaatgtgttcctgctgacccgctgcctgaggaacatctgcaagttcctggtgctgctgatccccctcttcctgctgctgggcctgagcctgcggggccagggcaacttcttctccttcctgcctgtgctgaactgggcctccatgcacaggacccagagggtggatgacccccaggatgtgttcaagcccaccaccagccggctgaagcagcccctgcagggcgacagcgaggccttcccctggcactggatgtctggagtggagcagcaggtggccagcctgagcggccagtgccaccaccacggggagaacctgcgggagctgaccaccctgctgcagaagctgcaggcccgggtggaccagatggagggcggggccgccggccccagcgcctctgtgagagatgctgtgggccagcccccccgggagacagacttcatggccttccaccaggagcacgaggtgaggatgagccacctggaggacatcctgggcaagctgcgggagaagtctgaggccatccagaaggagctggagcagaccaagcagaagaccatctctgctgtgggggagcagctgctgcccaccgtggagcacctgcagctggagctggaccagctgaagtctgagctgagctcctggaggcatgtgaagacaggctgtgagaccgtggatgctgtgcaggagcgggtggatgtgcaggtgcgggagatggtgaagctgctcttcagcgaggaccagcagggcggcagcctggagcagctgctgcagcgcttcagcagccagtttgtgtccaaaggagacctgcagaccatgctgcgggacctgcagctgcagatcctgagaaatgtgacccaccacgtgtctgtgaccaagcagctgcccaccagcgaggccgtggtgtctgctgtgtctgaggccggggccagcggcatcacagaggcccaggcccgggccatcgtgaacagcgccctgaagctgtacagccaggacaagacaggcatggtggactttgccctggagagcggcggcggcagcatcctgagcacccgctgcagcgagacctatgagaccaagacagccctgatgagcctgtttggcatccccctgtggtacttcagccagagcccccgggtggtgatccagcctgacatctacccaggcaactgctgggccttcaagggcagccagggctacctggtggtgcggctgtccatgatgatccaccctgctgccttcaccctggagcacatccccaagaccctgagccccaccggcaacatcagcagcgcccccaaggactttgctgtgtatggcctggagaatgagtaccaggaggagggccagctgctgggccagttcacctatgaccaggatggagagagcctgcagatgttccaggccctgaagaggccagatgacacagccttccagatcgtggagctgcgcatcttcagcaactggggccaccctgagtacacctgcctgtaccgcttccgggtgcatggagagcctgtgaagtag

SEQ ID NO: 67675 - DNA, 2049 bp, Artificial Sequence
  derived and/or modified sequence
atggacttcagccggctgcacatgtacagccccccccagtgcgtgccggaaaatacagggtacacctatgcactgtcctcgtcctattcctcagacgccctagacttcgagacagaacataaacttgatccagttttcgacagcccccgcatgtctagacggagcctaagactcgcaaccaccgcctgtactctaggggacggtgaggccgtcggggcagatagcggcacttcaagcgccgtttccctgaaaaacagggccgcaaggacaacgaagcagcggcgtagtaccaataagtcagccttctccatcaatcatgtctcgcgacaggtaacgagcagtggcgtgtcacatggcggtacagtatccctccaagatgccgtgacccggcgccccccggtgctggatgagagctggatcagggagcaaacaacggtggaccacttttgggggaaggctgctagcggagtgttctggtggctgggtattggatggtaccagtttgtcactctgatttcttggctcaacgtgttcctgttaactcggtgcttgcgaaacatatgcaagttcctggtcctgctgatcccgctgttccttctgctcggactgtcgttgcggggacaaggcaattttttcagcttcctcccagttctcaattgggcaagcatgcacaggactcagagggtggacgatccacaagatgtattcaagccaactacctcgcgccttaagcagccacttcaaggcgatagcgaggcgttcccgtggcactggatgagtggcgtggagcagcaggtggccagcctcagcggacagtgccatcaccatggtgaaaatctccgggaactcacaactctgctccaaaaactgcaagctcgggtagatcagatggaggggggcgcagctgggccttcagctagcgttagagacgccgtggggcagcctcctcgtgagacggacttcatggcgttccatcaggagcatgaggtgaggatgagtcacctagaggacattctgggcaagctgcgagagaaaagtgaggcaattcaaaaggagctggaacagaccaagcagaagaccatcagcgccgtcggcgagcagcttcttccaactgtggaacacctgcagctggagctggaccagctgaagagcgagttgtcgagttggcggcacgtgaaaaccggatgtgagacggtggacgcagtgcaagaacgggtggatgttcaggtcagggagatggtcaagctcctgttcagtgaggaccaacaaggcggaagtctggagcaactgctgcagagatttagctctcagttcgtgtctaagggcgaccttcagaccatgctccgggacctgcagctccaaattcttcggaatgttactcaccacgtgtcagtgaccaagcagctccccacaagtgaagccgttgtgtctgccgtgtcagaggcgggtgcaagtgggattaccgaagcacaagcccgtgccatcgttaattccgctctcaaattgtattctcaagacaaaaccgggatggttgacttcgctcttgagtcgggggggggatcaattctgagcacccggtgcagcgaaacttatgagaccaaaacagcactcatgtcattgttcgggatccccctttggtacttctcccagtcaccccgggtggtgatccaaccagacatataccctggaaattgttgggcctttaaaggctcccaaggatatctcgtggtgaggctgtccatgatgatacacccagctgcatttactctggaacatattccgaagaccctcagccccaccggaaacatctcctccgcacccaaggattttgcggtgtacggcttggaaaatgagtaccaagaagaggggcagttgctgggacagttcacctacgatcaagacggcgagagcctacagatgtttcaagcactgaagcggcctgacgacacggcgtttcaaatcgtggagctgaggatcttcagcaattgggggcaccccgagtatacatgcctttaccgatttcgggtgcacggggagcctgttaagtag

SEQ ID NO: 67676 - DNA, 2049 bp, Artificial Sequence
  derived and/or modified sequence
atggacttcagtcggcttcatatgtactcccctccccagtgcgtgccagaaaacactggctatacctacgcactgtcgtcttcatatagcagtgacgcattggattttgaaactgagcacaagctggaccccgtgtttgactcacccagaatgtcacggaggagtctgagactggctaccacggcatgtactcttggtgacggcgaggccgtgggggcagactctggaacctcctcagctgtgtccctgaagaacagggccgcacgtactaccaaacagcggagaagcacaaacaaatctgctttctcaatcaatcacgttagccgacaggtaacctcctcgggggtgagccatggaggaacagtgtcccttcaggacgcagtgaccaggaggcctcctgtgctcgatgagagctggatccgagagcagaccaccgttgaccatttctggggcaaggctgcctcaggggtgttttggtggctcgggattggatggtatcagttcgtgaccctcatctcctggctcaacgtgtttctgctcactcggtgcctgcggaacatttgtaaatttctcgttctgctgatcccactgttcctgctcctgggcctcagccttcgcggtcaaggaaactttttcagcttcctcccagtgcttaattgggccagtatgcatagaacccagcgcgtggatgatcctcaagacgtgtttaagcccacaacaagccggttaaagcagcccctgcagggagactccgaggccttcccgtggcactggatgtctggggtggagcagcaggtggcctcccttagcggccagtgccatcaccacggggagaatctgcgcgagcttaccaccttactgcagaagctacaagccagagtggaccagatggaaggaggcgcagccggaccctcagcttccgtaagagacgccgtcggacagccacccagagagaccgacttcatggccttccaccaggagcatgaggtgcggatgagccatctcgaggatattttaggtaaactaagagaaaaatccgaagctatccagaaagagctggaacaaaccaaacaaaaaactatttccgccgtgggggagcagctcctgccaacagtggagcacctccaactggagctggatcagctgaagagcgagctgtcttcatggaggcacgtcaagacagggtgtgagacagtggatgcagtccaagaaagggtggacgttcaggtcagggagatggttaaacttctgttcagcgaggaccagcagggtggaagcctggagcagctgctgcagagattttcatcacagttcgtgtctaaaggggacctgcagaccatgctgcgcgacttgcaactgcaaatcctgcgcaacgttacacaccatgtcagcgttaccaaacagcttcctactagtgaagcggttgtaagcgcggtctccgaggcaggagcgtctgggatcaccgaggctcaagccagggcaatcgtcaactcagcactgaaactgtactcccaggacaagacggggatggtggacttcgcccttgaatctggcggtggctctatcctgagcactaggtgttcagagacctacgaaaccaagaccgctctgatgtccttattcggcatacccctgtggtacttctcccaatccccgagggttgtgatacaacctgatatatacccaggaaattgttgggccttcaagggaagccagggataccttgtggtgcgactttccatgatgatccatcctgccgcttttaccctggagcacataccaaagaccctcagcccaacaggtaacatttcctctgcgcctaaagactttgctgtgtacgggctcgagaatgaatatcaggaggagggacagttgcttggccagttcacctacgatcaggacggggaatcattgcaaatgtttcaagcattgaagcgcccagacgatacagcctttcagatcgttgagctgcgaatcttttcaaactgggggcaccccgagtatacttgtttataccgtttccgagtccacggtgaaccagtcaagtag

SEQ ID NO: 67677 - DNA, 3717 bp, Artificial Sequence
  derived and/or modified sequence
agagcgtcttctcgggcctgggcggcgcagacgaggcctgaggcggcggcgcgaggcagtatggtttgaagtggtgaacatggatttttctcggcttcacatgtacagtcctccccagtgtgtgccggagaacacgggctacacgtatgcgctcagttccagctattcttcagatgctctggattttgagacggagcacaaattggaccctgtatttgattctccacggatgtcccgccgtagtttgcgcctggccacgacagcatgcaccctgggggatggtgaggctgtgggtgccgacagcggcaccagcagcgctgtctccctgaagaaccgagcggccagaacaacaaaacagcgcagaagcacaaacaaatcagcttttagtatcaaccacgtgtcaaggcaggtcacgtcctctggcgtcagccacggcggcactgtcagcctgcaggatgctgtgactcgacggcctcctgtattggacgagtcttggattcgtgaacagaccacagtggaccacttctgggggaaggcagcctctggagtgttctggtggctggggattggatggtaccagtttgttactttgatttcttggctgaatgtgtttcttcttaccaggtgccttcgaaacatctgcaagtttttagtcttgctcatcccactcttccttttactaggtctctccttacggggccagggcaatttcttttcgttcttgcccgtgttgaactgggcaagcatgcatagaacacagcgggtggatgacccccaggacgtgtttaaacccacgacttctcgcctgaagcagcctctgcagggtgacagtgaggcttttccgtggcattggatgagtggcgtggagcagcaggtggcctctctgtctggacagtgccaccaccatggtgagaatctccgagagctgaccactttgctacagaagctgcaggctcgggtggaccagatggaaggcggcgctgccgggccgtcagcttcggtcagagacgctgtgggacagcccccgagggagactgactttatggcctttcaccaagaacatgaagtgcgtatgtcacacttggaagatattctgggaaaactgagagaaaaatctgaggccatccagaaggaactagaacagaccaagcaaaaaacaatcagtgcggttggtgagcagctcctgcccacagtcgagcacctccagctggagctggatcagctaaagtcagagctgtccagctggcgacacgtgaagaccggctgtgagacagtggatgccgtacaagaaagagtggacgtgcaagtcagagaaatggtgaaactcctgttttccgaagatcagcaaggcggttctctggaacagctgctgcagaggttctcatcacagtttgtgagcaaaggcgacttgcagacgatgctgcgagacctgcagctgcagatcctgcggaacgtcacccaccacgtttccgtgaccaagcagctcccaacctcagaagccgtggtgtctgctgtgagcgaggcgggggcgtctggaataacagaggcgcaagcacgtgccatcgtgaacagcgccttgaagctgtattcccaagataagaccgggatggtggactttgctctggaatctggtggtggcagcatcttgagtactcgctgttctgaaacttacgaaaccaaaacggcgctgatgagtctgtttgggatcccgctgtggtacttctcgcagtccccgcgcgtggtcatccagcctgacatttaccccggtaactgctgggcatttaaaggctcccaggggtacctggtggtgaggctctccatgatgatccacccagccgccttcactctggagcacatccctaagacgctgtcgccaacaggcaacatcagcagcgcccccaaggacttcgccgtctatggattagaaaatgagtatcaggaagaagggcagcttctgggacagttcacgtatgatcaggatggggagtcgctccagatgttccaggccctgaaaagacccgacgacacagctttccaaatagtggaacttcggattttttctaactggggccatcctgagtatacctgtctgtatcggttcagagttcatggcgaacctgtcaagtgaagacactactcattatttttgtacatttttgtatatactgggacagcgtgaaacactggaatccttcatggacgagggcatatacaatgatgggacagtgccacactccttcaataaacgtggctgctggccagaggacgtgagcgtgtgacgggcgccttggcgccacctgttgggtgctcactgcctctgcaggtgcagaggggtcagcagcaggagaagcgtgttgaacacgtggctctcagacactccttgtttttaacgggaagctctttgcatttgcatttcctcaacaaaggagcaaagcagaggaagctgagagtctggcgtgttcttgacgctttggtcttcagccttgcactggctcttctaaaggacttttggagggcagataatttcatctgttaaatccaacacacatttctttcagggaaaaacaatgtcaccaaattttcagagttctaaactcctttccttcaagccggaattttccttttttcagcaccagtaggtactaagtctccagatggggaaataactaaaatgtgtttttctgctttgttcgctcttacttctgaggaaggtttccagtcaggactcgctgtaccaatatccatggaggaatatgggagcgtttcgctctccttgtaggctgaagtcagtctgacttgaaggggcctggtttggatctaagcaaacacccagatggggttctctggtctcagcaaggcttttcctgttgggagtcacagtaaacagaaacccaaaaatctcatcttgggtgttttcagggcttgttttgagttttgctgaatagggagcgcaagacgccctgagcctccctctcactggtggtgataagaggagccgtctggtgtgtcagggtcacgaacccgttacatttcaggacgatcctttttccttcagcagcatttcttactggctgtggctggaatctgccttttatcacagctgtcaccattctcacgtgattcttgtgagactctttttggttataattactatttaatatttagactattttactgagcagactttataaatgagatatctacaaggcacttaaagtgttacagatgttttaccttaagaattatttaagttgtgttgggttaagacagttttcagtgtaccgtaaatgttgtgttttcagaaaaagacaaaacgatggtgctgactggttttctgtatattgcacaacagtcctcaaatacactgatgtatgaaactattcatacatcaagcagcatttttttcactctccttagaattggaactatgcagttaaggcagataaaatgtacagatgtttcatatattacaggttacatatataaatcaaaatttcctatataaaactgatttgggatttggggtggaaatattttgaatattaatttatttttaaagatgcaagataggactttgtgcaatgtatttttgtaaatgcttttcaaaatatctgtctttggtagtgcttctgctgctgccaccaaattgataagatgctattaagaggtttaaataaagagttttaatttttaaaagggcatgggatataaacagtc

SEQ ID NO: 67678 - protein, 278 aa, Artificial Sequence
  derived and/or modified sequence
MGRISPGSPGLPRTVWFEVVNMDFSRLHMYSPPQCVPENTGYTYALSSSYSSDALDFETEHKLDPVFDSPRMSRRSLRLATTACTLGDGEAVGADSGTSSAVSLKNRAARTTKQRRSTNKSAFSINHVSRQVTSSGVSHGGTVSLQDAVTRRPPVLDESWIREQTTVDHFWGLDDDGDLKGGNKAAIQGNGDVGAAAATAHNGFSCSNCSMLSERKDVLTAHPAAPGPVSRVYSRDRNQKCKSQSFKTQKKVCFPNLIFPFCKSQCLHYLSWRLKIIP

SEQ ID NO: 67679 - DNA, 837 bp, Artificial Sequence
  derived and/or modified sequence
atgggcagaatcagccccggcagccccggcctgcccagaaccgtgtggttcgaggtggtgaacatggacttcagcagactgcacatgtacagccccccccagtgcgtgcccgagaacaccggctacacctacgccctgagcagcagctacagcagcgacgccctggacttcgagaccgagcacaagctggaccccgtgttcgacagccccagaatgagcagaagaagcctgagactggccaccaccgcctgcaccctgggcgacggcgaggccgtgggcgccgacagcggcaccagcagcgccgtgagcctgaagaacagagccgccagaaccaccaagcagagaagaagcaccaacaagagcgccttcagcatcaaccacgtgagcagacaggtgaccagcagcggcgtgagccacggcggcaccgtgagcctgcaggacgccgtgaccagaagaccccccgtgctggacgagagctggatcagagagcagaccaccgtggaccacttctggggcctggacgacgacggcgacctgaagggcggcaacaaggccgccatccagggcaacggcgacgtgggcgccgccgccgccaccgcccacaacggcttcagctgcagcaactgcagcatgctgagcgagagaaaggacgtgctgaccgcccaccccgccgcccccggccccgtgagcagagtgtacagcagagacagaaaccagaagtgcaagagccagagcttcaagacccagaagaaggtgtgcttccccaacctgatcttccccttctgcaagagccagtgcctgcactacctgagctggagactgaagatcatcccctag

SEQ ID NO: 67680 - DNA, 837 bp, Artificial Sequence
  derived and/or modified sequence
atggggcggatatctccgggtagcccaggcctgcctcggacagtctggtttgaggtggttaatatggattttagcagactgcatatgtattcacccccccagtgcgtgccagagaataccgggtacacatacgccctctcctcttcgtactcatccgatgccctcgatttcgaaacagagcacaaacttgacccagtttttgattcccccagaatgagccggcgctcccttaggctcgctaccacagcctgcactctgggcgatggagaagctgtcggagctgactcaggtacttctagtgcagtgagcttaaaaaatagagcagctagaactaccaaacagcggcgctccaccaacaagtcagcattctctatcaatcacgtctccaggcaggtgacgagctcaggagtctcgcacggcggaacggtctctctgcaggatgccgtaacccggaggccaccagtgctagacgagagctggattcgcgaacaaacaaccgttgaccacttttggggcttggatgacgacggggaccttaaggggggcaacaaggcggccatccaaggcaacggtgacgtaggcgcggcggcagccacggcacacaacggcttttcatgtagcaactgctcaatgctctcagagcgcaaggacgtgcttacagcccatccagcagcacccggcccagtctcacgagtttactcccgcgacaggaaccaaaagtgcaaatcccagagcttcaaaactcagaaaaaggtatgctttcctaacctgatctttccgttttgcaaatctcaatgcctccactatctctcctggaggctcaaaattattccatag

SEQ ID NO: 67681 - DNA, 837 bp, Artificial Sequence
  derived and/or modified sequence
atgggccgcatcagccctggcagccctggcctgcccaggacagtgtggtttgaggtggtgaacatggacttcagccggctgcacatgtacagccccccccagtgtgtgcctgagaacacaggctacacctacgccctgagcagcagctacagcagtgatgccctggactttgaaacagagcacaagctggaccctgtgtttgacagccccaggatgagccgccgcagcctgcggctggccaccacagcctgcaccctgggagatggagaggccgtgggcgctgacagcggcaccagcagcgctgtgtccctgaagaacagagctgcccggaccaccaagcagaggaggagcaccaacaagagcgccttcagcatcaaccacgtgtcccggcaggtgaccagcagtggagtgtcccatggaggcaccgtgtccctgcaggatgctgtgaccaggaggcctcctgtgctggatgagagctggatccgggagcagaccaccgtggaccacttctggggcctggatgatgatggagacctgaagggcggcaacaaggccgccatccagggcaatggagatgtgggcgctgctgctgccacagcccacaacggcttcagctgcagcaactgcagcatgctgtctgagaggaaggatgtgctgacagcccaccctgctgcccctggccctgtgtcccgggtgtacagccgggacaggaaccagaagtgcaagagccagagcttcaagacccagaagaaggtgtgcttccccaacctgatcttccccttctgcaagagccagtgcctgcactacctgtcctggaggctgaagatcatcccctag

SEQ ID NO: 67682 - DNA, 837 bp, Artificial Sequence
  derived and/or modified sequence
atgggccggatcagccccggcagccccggcctgccccggaccgtgtggttcgaggtcgtaaatatggatttcagccggttgcacatgtattctccaccacaatgcgtccctgaaaacacaggatatacatatgcactgtcctcctcttactcatcagacgctctggatttcgaaacagaacacaaactggatccagtattcgattctccaaggatgagccggaggtctttgagacttgcaacaactgcctgtaccctgggggatggggaggctgtcggggctgatagtggaacctctagcgccgtgagtctaaaaaaccgggccgcccgaacaaccaagcagcgtcgttccaccaacaaatctgcattctcgattaatcacgtcagccggcaagtaactagttccggcgttagccacgggggaacggttagtttacaggatgcagtaaccagacgcccaccagtgctagacgagtcctggattcgtgagcagacaaccgttgaccacttctggggcctggacgatgacggggatctgaaaggtgggaacaaggcggccatccaggggaacggagacgtaggagcagccgcagctacggcccacaatgggttctcttgttcaaactgcagcatgctcagcgagaggaaggacgtgctgaccgcccatcccgctgcccccggtcccgtttcgagagtatattctagagataggaaccagaagtgtaaatcgcagtccttcaagactcagaaaaaagtttgctttcctaacttaattttcccattctgtaagagtcagtgcctgcattatctgtcatggcgcctgaaaatcattccatag

SEQ ID NO: 67683 - DNA, 837 bp, Artificial Sequence
  derived and/or modified sequence
atggggcgtatttcacccggatcaccagggctccctaggactgtgtggttcgaagtggtgaacatggattttagcaggctgcacatgtactcaccgccacagtgcgtccccgagaatacaggctatacttacgccttatcctcatcctattcgagcgatgcacttgatttcgagacagaacataaactcgatcctgtcttcgatagccctagaatgagcagacgctcactgcgactcgcaactacagcttgcacactgggtgacggcgaggcagtaggggctgactcaggaacttcttctgccgtgagcctaaagaacagggccgcacgcacgactaagcaaaggaggtccactaacaagtccgctttttcaattaaccacgtgtcaagacaggtgactagctctggggtgtcccatggtggaacagtgtctttgcaggacgccgtcacccgcaggccgcctgtgctcgatgaatcctggattagagaacagacaaccgtcgatcacttctggggcttggatgatgatggcgatctcaagggcggtaataaagccgctatccagggtaatggagacgttggtgctgcggctgccactgcccacaacggattcagttgctcgaattgttccatgctgtccgaaagaaaagacgttctgactgcccacccagcagctccaggtcctgtgtcacgagtgtattcaagggatcggaaccaaaagtgcaagagccagtcttttaaaacccaaaaaaaggtctgttttcccaatcttatctttccattttgtaagagccagtgcctgcactacctgagctggagactcaaaattattccttag

SEQ ID NO: 67684 - DNA, 978 bp, Artificial Sequence
  derived and/or modified sequence
agtatggtttgaagtggtgaacatggatttttctcggcttcacatgtacagtcctccccagtgtgtgccggagaacacgggctacacgtatgcgctcagttccagctattcttcagatgctctggattttgagacggagcacaaattggaccctgtatttgattctccacggatgtcccgccgtagtttgcgcctggccacgacagcatgcaccctgggggatggtgaggctgtgggtgccgacagcggcaccagcagcgctgtctccctgaagaaccgagcggccagaacaacaaaacagcgcagaagcacaaacaaatcagcttttagtatcaaccacgtgtcaaggcaggtcacgtcctctggcgtcagccacggcggcactgtcagcctgcaggatgctgtgactcgacggcctcctgtattggacgagtcttggattcgtgaacagaccacagtggaccacttctggggtcttgatgatgatggtgatcttaaaggtggaaataaagctgccattcagggaaacggggatgtgggagccgccgccgccaccgcgcacaacggcttctcctgcagcaactgcagcatgctgtccgagcgcaaggacgtgctcacggcgcaccccgcggcccccgggcccgtgtcgagagtttattctagggacaggaatcaaaaatgtaagtctcagtcctttaaaactcagaaaaaggtgtgttttccaaatttaatatttcctttctgtaagtctcagtgtctgcactatttgtcttggagacttaaaattatcccttgaaagcataagaagtacaccccaaaccagctttgtccttcctgtcctcttctagtttacattttatgtggttagtaattttgtacctaaaagtatttgaaattctataaatttggacttgacgtgagcaaaagaaaatttctacgtaagcgaaactaataaaactacagtcactttcagatgca

SEQ ID NO: 67685 - DNA, 540 bp, Artificial Sequence
  derived and/or modified sequence
aatatactcaacactttctaacctaaaaaatatcctgttttttggtgaggaaaaaagtgtaaatagtgccttaagcttttttgttattcaccctgcagtttcttttctgattctgagatgcttgtgagagcttcagccatctaggaacgcatacgctgctgcttgaccacgctgtagcagtatggtttgaagtggtgaacatggatttttctcggcttcacatgtacagtcctccccagtgtgtgccggagaacacgggctacacgtatgcgctcagttccagctattcttcagatgctctggattttgagacggagcacaaattggaccctgtatttgattctccacggatgtcccgccgtagtttgcgcctggccacgacagcatgcaccctgggggatggtgaggctgtgggtgccgacagcggcaccagcagcgctgtctccctgaagaaccgagcggccagaacaacaaaacagcgcagaagcacaaacaaatcagcttttagtatcaaccacgtgtcaaggcaggtcacgtcct

SEQ ID NO: 67686 - DNA, 633 bp, Artificial Sequence
  derived and/or modified sequence
gcgcaggtgaagacgcccggagaccctggcggtcgtggcgcagggggttgtggtctctccatgctgcccaggtcggactcctaggctcaagcgatcccctcgccccagcctgcctggaggcgcgcgcgtggtctccgcgccctgttgcgccttcaaagtgcccagaatggtgtctggtgcaaaataagcagcggcggggaacaccttgccactgtcaccgtcatggggaggatttctcccggctccccagggctccccaggacagtttcttttctgattctgagatgcttgtgagagcttcagccatctaggaacgcatacgctgctgcttgaccacgctgtagcagtatggtttgaagtggtgaacatggatttttctcggcttcacatgtacagtcctccccagtgtgtgccggagaacacgggctacacgtatgcgctcagttccagctattcttcagatgctctggattttgagacggagcacaaattggaccctgtatttgattctccacggatgtcccgccgtagtttgcgcctggccacgacagcatgcaccctgggggatggtgaggctgtgggtgccgacagcggcaccagcagcgctgtctccctgaagaaccgagcggccag

SEQ ID NO: 67687 - DNA, 676 bp, Artificial Sequence
  derived and/or modified sequence
ttctcgggcctgggcggcgcagacgaggcctgaggcggcggcgcgaggcagtttcttttctgattctgagatgcttgtgagagcttcagccatctaggaacgcatacgctgctgcttgaccacgctgtagcagtatggtttgaagtggtgaacatggatttttctcggcttcacatgtacagtcctccccagtgtgtgccggagaacacgggctacacgtatgcgctcagttccagctattcttcagatgctctggattttgagacggagcacaaattggaccctgtatttgattctccacggatgtcccgccgtagtttgcgcctggccacgacagcatgcaccctgggggatggtgaggctgtgggtgccgacagcggcaccagcagcgctgtctccctgaagaaccgagcggccagaacaacaaaacagcgcagaagcacaaacaaatcagcttttagtatcaaccacgtgtcaaggcaggtcacgtcctctggcgtcagccacggcggcactgtcagcctgcaggatgctgtgactcgacggcctcctgtattggacgagtcttggattcgtgaacagaccacagtggaccacttctggggtcttgatgatgatggtgatcttaaaggtggaaataaagctgccattcagggaaacggggatgtgggagccg

SEQ ID NO: 67688 - DNA, 626 bp, Artificial Sequence
  derived and/or modified sequence
ggggggacgcggggtcgcggcctgggcgccctcagcgcgggctgcgccagggcctcctgggccaacggctgccgcccccgcccgtcccgcgccccgcagctaccccggcccgcgcagtttcttttctgattctgagatgcttgtgagagcttcagccatctaggaacgcatacgctgctgcttgaccacgctgtagcagtatggtttgaagtggtgaacatggatttttctcggcttcacatgtacagtcctccccagtgtgtgccggagaacacgggctacacgtatgcgctcagttccagctattcttcagatgctctggattttgagacggagcacaaattggaccctgtatttgattctccacggatgtcccgccgtagtttgcgcctggccacgacagcatgcaccctgggggatggtgaggctgtgggtgccgacagcggcaccagcagcgctgtctccctgaagaaccgagcggccagaacaacaaaacagcgcagaagcacaaacaaatcagcttttagtatcaaccacgtgtcaaggcaggtcacgtcctctggcgtcagccacggcggcactgtcagcctgcaggatgctgtgactcgacggcctcctgtattgga

SEQ ID NO: 67689 - DNA, 537 bp, Artificial Sequence
  derived and/or modified sequence
agacgaggcctgaggcggcggcgcgaggcagggttgtggtctctccatgctgcccaggtcggactcctaggctcaagcgatcccctcgccccagcctgcctggaggcgcgcgcgtggtctccgcgccctgttgcgccttcaaagtgcccagaatggtgtctggtgcaaaataagcagcggcggggaacaccttgccactgtcaccgtcatggggaggatttctcccggctccccagggctccccaggacagtatggtttgaagtggtgaacatggatttttctcggcttcacatgtacagtcctccccagtgtgtgccggagaacacgggctacacgtatgcgctcagttccagctattcttcagatgctctggattttgagacggagcacaaattggaccctgtatttgattctccacggatgtcccgccgtagtttgcgcctggccacgacagcatgcaccctgggggatggtgaggctgtgggtgccgacagcggcaccagcagcgctgtctccctgaagaaccgagcggccag

SEQ ID NO: 67690 - DNA, 1309 bp, Artificial Sequence
  derived and/or modified sequence
agagcgtcttctcgggcctgggcggcgcagacgaggcctgaggcggcggcgcgaggcagggttgtggtctctccatgctgcccaggtcggactcctaggctcaagcgatcccctcgccccagcctgcctggaggcgcgcgcgtggtctccgcgccctgttgcgccttcaaagtgcccagaatggtgtctggtgcaaaataagcagcggcggggaacaccttgccactgtcaccgtcatggggaggatttctcccggctccccagggctccccaggacagtatggtttgaagtggtgaacatggatttttctcggcttcacatgtacagtcctccccagtgtgtgccggagaacacgggctacacgtatgcgctcagttccagctattcttcagatgctctggattttgagacggagcacaaattggaccctgtatttgattctccacggatgtcccgccgtagtttgcgcctggccacgacagcatgcaccctgggggatggtgaggctgtgggtgccgacagcggcaccagcagcgctgtctccctgaagaaccgagcggccagaacaacaaaacagcgcagaagcacaaacaaatcagcttttagtatcaaccacgtgtcaaggcaggtcacgtcctctggcgtcagccacggcggcactgtcagcctgcaggatgctgtgactcgacggcctcctgtattggacgagtcttggattcgtgaacagaccacagtggaccacttctggggtcttgatgatgatggtgatcttaaaggtggaaataaagctgccattcagggaaacggggatgtgggagccgccgccgccaccgcgcacaacggcttctcctgcagcaactgcagcatgctgtccgagcgcaaggacgtgctcacggcgcaccccgcggcccccgggcccgtgtcgagagtttattctagggacaggaatcaaaaatgtaagtctcagtcctttaaaactcagaaaaaggtgtgttttccaaatttaatatttcctttctgtaagtctcagtgtctgcactatttgtcttggagacttaaaattatcccttgaaagcataagaagtacaccccaaaccagctttgtccttcctgtcctcttctagtttacattttatgtggttagtaattttgtacctaaaagtatttgaaattctataaatttggacttgacgtgagcaaaagaaaatttctacgtaagcgaaactaataaaactacagtcactttcagatgcacacctttatttttataaaacggcacagatgttcacacatactgaaggagtggct

SEQ ID NO: 67691 - DNA, 563 bp, Artificial Sequence
  derived and/or modified sequence
agagcaggcctgcgcacctcaggagcccaggcatggtgtataggtggagggtagcctacattggatccaggccaaggccctgtcctgtgccgggctcctctgcgttttcttttctgattctgagatgcttgtgagagcttcagccatctaggaacgcatacgctgctgcttgaccacgctgtagcagtatggtttgaagtggtgaacatggatttttctcggcttcacatgtacagtcctccccagtgtgtgccggagaacacgggctacacgtatgcgctcagttccagctattcttcagatgctctggattttgagacggagcacaaattggaccctgtatttgattctccacggatgtcccgccgtagtttgcgcctggccacgacagcatgcaccctgggggatggtgaggctgtgggtgccgacagcggcaccagcagcgctgtctccctgaagaaccgagcggccagaacaacaaaacagcgcagaagcacaaacaaatcagcttttagtatcaaccacgtgtcaaggcaggtcacgtcctctggcgtcagccacgg

SEQ ID NO: 67692 - protein, 257 aa, Artificial Sequence
  derived and/or modified sequence
MDFSRLHMYSPPQCVPENTGYTYALSSSYSSDALDFETEHKLDPVFDSPRMSRRSLRLATTACTLGDGEAVGADSGTSSAVSLKNRAARTTKQRRSTNKSAFSINHVSRQVTSSGVSHGGTVSLQDAVTRRPPVLDESWIREQTTVDHFWGLDDDGDLKGGNKAAIQGNGDVGAAAATAHNGFSCSNCSMLSERKDVLTAHPAAPGPVSRVYSRDRNQKCKSQSFKTQKKVCFPNLIFPFCKSQCLHYLSWRLKIIP

SEQ ID NO: 67693 - DNA, 774 bp, Artificial Sequence
  derived and/or modified sequence
atggacttcagcagactgcacatgtacagccccccccagtgcgtgcccgagaacaccggctacacctacgccctgagcagcagctacagcagcgacgccctggacttcgagaccgagcacaagctggaccccgtgttcgacagccccagaatgagcagaagaagcctgagactggccaccaccgcctgcaccctgggcgacggcgaggccgtgggcgccgacagcggcaccagcagcgccgtgagcctgaagaacagagccgccagaaccaccaagcagagaagaagcaccaacaagagcgccttcagcatcaaccacgtgagcagacaggtgaccagcagcggcgtgagccacggcggcaccgtgagcctgcaggacgccgtgaccagaagaccccccgtgctggacgagagctggatcagagagcagaccaccgtggaccacttctggggcctggacgacgacggcgacctgaagggcggcaacaaggccgccatccagggcaacggcgacgtgggcgccgccgccgccaccgcccacaacggcttcagctgcagcaactgcagcatgctgagcgagagaaaggacgtgctgaccgcccaccccgccgcccccggccccgtgagcagagtgtacagcagagacagaaaccagaagtgcaagagccagagcttcaagacccagaagaaggtgtgcttccccaacctgatcttccccttctgcaagagccagtgcctgcactacctgagctggagactgaagatcatcccctag

SEQ ID NO: 67694 - DNA, 342 bp, Artificial Sequence
  derived and/or modified sequence
atggacttcagcagactgcacatgtacagccccccccagtgcgtgcccgagaacaccggctacacctacgccctgagcagcagctacagcagcgacgccctggacttcgagaccgagcacaagctggaccccgtgttcgacagccccagaatgagcagaagaagcctgagactggccaccaccgcctgcaccctgggcgacggcgaggccgtgggcgccgacagcggcaccagcagcgccgtgagcctgaagaacagagccgccagaaccaccaagcagagaagaagcaccaacaagagcgccttcagcatcaaccacgtgagcagacaggtgaccagctag

SEQ ID NO: 67695 - DNA, 267 bp, Artificial Sequence
  derived and/or modified sequence
atggacttcagcagactgcacatgtacagccccccccagtgcgtgcccgagaacaccggctacacctacgccctgagcagcagctacagcagcgacgccctggacttcgagaccgagcacaagctggaccccgtgttcgacagccccagaatgagcagaagaagcctgagactggccaccaccgcctgcaccctgggcgacggcgaggccgtgggcgccgacagcggcaccagcagcgccgtgagcctgaagaacagagccgcctag

SEQ ID NO: 67696 - DNA, 525 bp, Artificial Sequence
  derived and/or modified sequence
atggacttcagcagactgcacatgtacagccccccccagtgcgtgcccgagaacaccggctacacctacgccctgagcagcagctacagcagcgacgccctggacttcgagaccgagcacaagctggaccccgtgttcgacagccccagaatgagcagaagaagcctgagactggccaccaccgcctgcaccctgggcgacggcgaggccgtgggcgccgacagcggcaccagcagcgccgtgagcctgaagaacagagccgccagaaccaccaagcagagaagaagcaccaacaagagcgccttcagcatcaaccacgtgagcagacaggtgaccagcagcggcgtgagccacggcggcaccgtgagcctgcaggacgccgtgaccagaagaccccccgtgctggacgagagctggatcagagagcagaccaccgtggaccacttctggggcctggacgacgacggcgacctgaagggcggcaacaaggccgccatccagggcaacggcgacgtgggcgcctag

SEQ ID NO: 67697 - DNA, 408 bp, Artificial Sequence
  derived and/or modified sequence
atggacttcagcagactgcacatgtacagccccccccagtgcgtgcccgagaacaccggctacacctacgccctgagcagcagctacagcagcgacgccctggacttcgagaccgagcacaagctggaccccgtgttcgacagccccagaatgagcagaagaagcctgagactggccaccaccgcctgcaccctgggcgacggcgaggccgtgggcgccgacagcggcaccagcagcgccgtgagcctgaagaacagagccgccagaaccaccaagcagagaagaagcaccaacaagagcgccttcagcatcaaccacgtgagcagacaggtgaccagcagcggcgtgagccacggcggcaccgtgagcctgcaggacgccgtgaccagaagaccccccgtgctgtag

SEQ ID NO: 67698 - DNA, 360 bp, Artificial Sequence
  derived and/or modified sequence
atggacttcagcagactgcacatgtacagccccccccagtgcgtgcccgagaacaccggctacacctacgccctgagcagcagctacagcagcgacgccctggacttcgagaccgagcacaagctggaccccgtgttcgacagccccagaatgagcagaagaagcctgagactggccaccaccgcctgcaccctgggcgacggcgaggccgtgggcgccgacagcggcaccagcagcgccgtgagcctgaagaacagagccgccagaaccaccaagcagagaagaagcaccaacaagagcgccttcagcatcaaccacgtgagcagacaggtgaccagcagcggcgtgagccacggctag

SEQ ID NO: 67699 - DNA, 774 bp, Artificial Sequence
  derived and/or modified sequence
atggacttctccaggctccatatgtactcacctccacagtgcgtgcctgagaataccggctacacctatgcactctcgtccagctattcctccgacgccctggacttcgagacagaacacaagctggatccggttttcgattcaccgaggatgtctcggcggtctttaagactggcaactacagcatgcaccttaggggacggcgaagcagtcggcgccgattcaggcactagtagtgccgtctcactaaaaaaccgcgcagcccgtacaacaaaacagcgccgatccaccaataaatcagcctttagtatcaatcacgtctcccggcaagtgacatcctccggagtgtcccacgggggcacagttagtcttcaagatgctgtcactcgacgacctccagttctcgatgagtcgtggatccgggagcagactactgtggatcacttttggggcctggacgatgacggggatctgaaaggtggcaacaaagccgccattcagggcaacggcgatgtgggggccgccgctgctaccgcccataatggcttttcctgttccaattgttccatgttgtccgagaggaaggacgtactcacagcacacccagctgccccgggccccgtaagccgggtctacagccgagaccggaaccagaaatgcaaaagccaatcatttaagacccagaaaaaagtgtgtttccccaacctgatctttcccttttgcaagtcccagtgcctccattatctgagttggcggctgaagatcatcccttag

SEQ ID NO: 67700 - DNA, 342 bp, Artificial Sequence
  derived and/or modified sequence
atggacttctctagactccatatgtattcccccccgcagtgtgtacctgagaatactggctatacttacgccctctctagcagctatagctcggacgccctggattttgagaccgagcataaactggatcccgtgtttgactcgcctcgcatgagcagacgatcactgcggctcgccacaacagcctgcaccttgggtgacggagaggcagtcggcgcggattcaggcacatctagcgccgtctcactgaaaaaccgggccgcaaggaccaccaaacagcgcagaagtacaaataagtccgcattctcgataaatcacgttagccgtcaggtgacctcatag

SEQ ID NO: 67701 - DNA, 267 bp, Artificial Sequence
  derived and/or modified sequence
atggatttttctaggctgcatatgtattcccctccccagtgtgttcccgagaacaccggctatacatatgcactgtcctcgtcatattcctccgatgccctagactttgaaaccgagcataaactggacccagtgttcgatagccctcggatgtctagacggagtctcaggctggctacaaccgcatgtaccctgggggacggcgaagctgtcggagccgatagcggcacctcgagcgccgtgtcactcaagaacagggctgcatag

SEQ ID NO: 67702 - DNA, 525 bp, Artificial Sequence
  derived and/or modified sequence
atggattttagcaggctgcacatgtattctcctccgcagtgtgtccccgagaatacaggctatacatacgcactctccagtagttacagctccgatgccctggacttcgaaacggaacataagctagatccagtcttcgattcaccccgcatgtcccggcggtccctacggttggccacaacagcatgtacgctgggggacggcgaggcggtgggggccgattccggcacttcgagcgccgtaagtctaaaaaacagagctgccaggactactaagcagagaagatccaccaataagtcagccttttctattaatcatgtgagtcgccaggtgacatcaagcggtgtgtcacacggcggcacagttagcttgcaggacgctgttacccggcgccctcccgttctggatgagtcctggatcagagagcagacaaccgtcgatcacttttggggtctggacgatgacggcgacttgaaagggggcaacaaagctgctattcaaggtaatggcgacgtgggcgcctag

SEQ ID NO: 67703 - DNA, 408 bp, Artificial Sequence
  derived and/or modified sequence
atggacttcagtcgattgcatatgtacagtcctccccagtgcgtcccggagaacacaggatacacctacgccctgagttcgagctatagttcggacgccctggatttcgagacagaacataaactggatcccgtatttgactctccacgcatgagtcgtaggagcctgagactggctaccacagcatgtacccttggcgatggagaggctgtgggcgccgacagcggaacgtcctccgccgtttcattaaaaaaccgcgctgcccgcaccacaaagcagcgcaggagtactaacaaatctgctttttcaattaaccatgtttcccgccaggtcacctcatccggggtctcgcatggaggcactgtgagcctgcaggatgcggtgactcgacggccacccgtgctatag

SEQ ID NO: 67704 - DNA, 267 bp, Artificial Sequence
  derived and/or modified sequence
atggacttcagtcgcctgcatatgtattcaccacctcagtgcgttcctgaaaacacggggtatacttacgccctctcaagttcttacagctcggacgctcttgattttgagaccgaacacaaactggatccggtttttgattctccaagaatgtcaaggagaagtctcaggctcgccacaaccgcttgtactctgggggatggagaggctgtcggagcagacagcggtacctcgtccgccgtgagcctgaaaaatcgcgctgcatag

SEQ ID NO: 67705 - DNA, 360 bp, Artificial Sequence
  derived and/or modified sequence
atggatttcagtcgcctgcatatgtactcaccaccccagtgcgttcccgaaaatacaggctacacgtatgctctgtcaagttcctatagctccgacgcgttagacttcgaaaccgagcacaaactggatccagtcttcgacagcccccggatgagccggcgttccctaagactggccacaacagcttgcacactcggggacggggaggcagtcggtgctgacagcggcaccagttctgcggttagcttgaagaacagggccgcacggacaaccaagcagcggcggtccacaaacaagagtgcctttagcattaaccacgtaagcagacaggtgactagcagcggcgtgagccatggttag

SEQ ID NO: 67706 - DNA, 774 bp, Artificial Sequence
  derived and/or modified sequence
atggacttcagccggctgcacatgtacagccccccccagtgtgtgcctgaaaatacaggctacacctacgccctgagcagcagctacagcagtgatgccctggactttgaaacagagcacaagctggaccctgtgtttgacagccccaggatgagcagaagaagcctgcggctggccaccacagcctgcaccctgggagatggagaggccgtgggcgctgacagcggcaccagcagcgctgtgtccctgaagaacagagctgcccggaccaccaagcagaggaggagcaccaacaagagcgccttcagcatcaaccacgtgtcccggcaggtgaccagcagcggcgtgagccacggcggcaccgtgtccctgcaggatgctgtgacccggcggccccctgtgctggatgagagctggatccgggagcagaccaccgtggaccacttctggggcctggatgatgatggagacctgaagggcggcaacaaggccgccatccagggcaatggagatgtgggcgctgctgctgccacagcccacaacggcttcagctgcagcaactgcagcatgctgtctgagaggaaggatgtgctgacagcccaccctgctgcccctggccctgtgtcccgggtgtacagccgggacaggaaccagaagtgcaagagccagagcttcaagacccagaagaaggtgtgcttccccaacctgatcttccccttctgcaagagccagtgcctgcactacctgtcctggaggctgaagatcatcccctag

SEQ ID NO: 67707 - DNA, 342 bp, Artificial Sequence
  derived and/or modified sequence
atggacttcagccggctgcacatgtacagccccccccagtgtgtgcctgaaaatacaggctacacctacgccctgagcagcagctacagcagtgatgccctggactttgaaacagagcacaagctggaccctgtgtttgacagccccaggatgagcagaagaagcctgcggctggccaccacagcctgcaccctgggagatggagaggccgtgggcgctgacagcggcaccagcagcgctgtgtccctgaagaacagagctgcccggaccaccaagcagaggaggagcaccaacaagagcgccttcagcatcaaccacgtgtcccggcaggtgaccagctag

SEQ ID NO: 67708 - DNA, 267 bp, Artificial Sequence
  derived and/or modified sequence
atggacttcagccggctgcacatgtacagccccccccagtgtgtgcctgaaaatacaggctacacctacgccctgagcagcagctacagcagtgatgccctggactttgaaacagagcacaagctggaccctgtgtttgacagccccaggatgagcagaagaagcctgcggctggccaccacagcctgcaccctgggagatggagaggccgtgggcgctgacagcggcaccagcagcgctgtgtccctgaagaacagagctgcctag

SEQ ID NO: 67709 - DNA, 525 bp, Artificial Sequence
  derived and/or modified sequence
atggacttcagccggctgcacatgtacagccccccccagtgtgtgcctgaaaatacaggctacacctacgccctgagcagcagctacagcagtgatgccctggactttgaaacagagcacaagctggaccctgtgtttgacagccccaggatgagcagaagaagcctgcggctggccaccacagcctgcaccctgggagatggagaggccgtgggcgctgacagcggcaccagcagcgctgtgtccctgaagaacagagctgcccggaccaccaagcagaggaggagcaccaacaagagcgccttcagcatcaaccacgtgtcccggcaggtgaccagcagcggcgtgagccacggcggcaccgtgtccctgcaggatgctgtgacccggcggccccctgtgctggatgagagctggatccgggagcagaccaccgtggaccacttctggggcctggatgatgatggagacctgaagggcggcaacaaggccgccatccagggcaatggagatgtgggcgcctag

SEQ ID NO: 67710 - DNA, 408 bp, Artificial Sequence
  derived and/or modified sequence
atggacttcagccggctgcacatgtacagccccccccagtgtgtgcctgaaaatacaggctacacctacgccctgagcagcagctacagcagtgatgccctggactttgaaacagagcacaagctggaccctgtgtttgacagccccaggatgagcagaagaagcctgcggctggccaccacagcctgcaccctgggagatggagaggccgtgggcgctgacagcggcaccagcagcgctgtgtccctgaagaacagagctgcccggaccaccaagcagaggaggagcaccaacaagagcgccttcagcatcaaccacgtgtcccggcaggtgaccagcagcggcgtgagccacggcggcaccgtgtccctgcaggatgctgtgacccggcggccccctgtgctgtag

SEQ ID NO: 67711 - DNA, 360 bp, Artificial Sequence
  derived and/or modified sequence
atggacttcagccggctgcacatgtacagccccccccagtgtgtgcctgaaaatacaggctacacctacgccctgagcagcagctacagcagtgatgccctggactttgaaacagagcacaagctggaccctgtgtttgacagccccaggatgagcagaagaagcctgcggctggccaccacagcctgcaccctgggagatggagaggccgtgggcgctgacagcggcaccagcagcgctgtgtccctgaagaacagagctgcccggaccaccaagcagaggaggagcaccaacaagagcgccttcagcatcaaccacgtgtcccggcaggtgaccagcagcggcgtgagccacggctag

SEQ ID NO: 67712 - DNA, 774 bp, Artificial Sequence
  derived and/or modified sequence
atggacttcagccggctgcacatgtacagccccccccagtgcgtgcccgagaacactggttacacctatgccttaagtagctcctattcctctgatgccctcgacttcgagactgaacacaaattggacccagtttttgactctccccgtatgagccgacgcagcctgagactcgccacaaccgcctgcacactgggggacggagaggctgtaggcgccgacagcgggacatcgtcggcggtcagccttaagaaccgagccgcccggacgaccaagcagcgccgcagcacaaataaatccgctttcagtattaatcacgtttcccgacaggtcaccagttccggcgtgtctcatggaggcaccgtgtccctacaggatgctgtgacccgccgccctcccgtactggacgagtcctggataagggaacagaccaccgttgatcatttttggggtttggacgatgacggcgacctgaaaggcggtaacaaagccgctattcagggcaacggtgatgtgggggctgcagccgccaccgcacataacggattttcatgctccaactgcagtatgctgtcagagagaaaggacgttttaacggctcatcctgcagcccctgggcccgtttccagagtgtactcaagggacagaaatcagaagtgtaaatctcagagctttaaaacccagaagaaggtgtgttttcccaatttgatcttccctttttgtaaatctcagtgcctacactatctgtcgtggcggttaaaaattattccatag

SEQ ID NO: 67713 - DNA, 342 bp, Artificial Sequence
  derived and/or modified sequence
atggacttcagccggctgcacatgtacagccccccccagtgcgtgcctgaaaatactggctacacctatgcactttctagctcctattcatctgatgccttggatttcgagactgagcataagttggaccccgtgtttgatagtccgcgcatgtcccggcgatctctgcgtctagctacgactgcctgtacccttggagacggagaggccgtgggggccgacagcgggactagttcagccgttagtctaaaaaatcgcgcagccaggacaacaaagcagaggaggagcaccaataagagcgccttctccatcaatcacgtgtctcggcaggtcacatcttag

SEQ ID NO: 67714 - DNA, 267 bp, Artificial Sequence
  derived and/or modified sequence
atggacttcagccggctgcacatgtacagccccccccagtgcgtgccagaaaacaccggttacacatatgcactgtcgagctcttatagttccgatgcgctggacttcgagaccgagcataaattggatccagtattcgattctccccgcatgagccgtcgttccctccggttggccaccactgcctgcactttgggggatggagaggcagttggtgccgactcaggaacaagtagtgctgtctctcttaaaaatcgggctgcctag

SEQ ID NO: 67715 - DNA, 525 bp, Artificial Sequence
  derived and/or modified sequence
atggacttcagccggctgcacatgtacagccccccccagtgcgtgcctgaaaacacaggatacacctacgccttgagttcgtcgtactctagcgatgctctggacttcgaaactgagcacaaacttgatcccgttttcgattctcctcgcatgagcaggcggagcctgaggctcgccacaactgcatgcacactgggtgacggtgaggcagtgggggccgattccggaacatcgtcagccgttagtctaaaaaaccgcgccgcgagaacaactaagcaaaggagaagtactaacaagtctgcattctccatcaatcacgtgtcacggcaggtaaccagcagtggggtgagtcacgggggcacagtatcgctccaggacgccgtgactaggcgcccacccgttctggatgagagttggattagagagcagactacagtggaccacttctggggccttgacgacgatggggacctaaagggagggaacaaagcagcaatacaggggaatggggacgtgggcgcttag

SEQ ID NO: 67716 - DNA, 408 bp, Artificial Sequence
  derived and/or modified sequence
atggacttcagccggctgcacatgtacagccccccccagtgcgtgcctgagaacaccgggtatacatatgccctaagttctagttacagctccgacgccctggattttgagactgaacataagcttgatcctgtcttcgatagcccccggatgagtcgaagaagcctgaggctggctactaccgcctgcactctgggcgatggggaggcggtaggggccgatagtgggacatcctctgctgtgagcctgaagaatcgagccgctagaaccactaagcagcgacgaagcaccaacaagtctgccttttctataaaccacgtgagtaggcaggtcacatcatcaggtgttagccacggcgggaccgtgtcattgcaggacgctgtgaccaggcggcccccagtgctgtag

SEQ ID NO: 67717 - DNA, 267 bp, Artificial Sequence
  derived and/or modified sequence
atggacttcagccggctgcacatgtacagccccccccagtgcgtgccggaaaacacgggctacacctatgccctcagttctagctattcctccgacgcccttgattttgagactgaacacaagctcgacccagttttcgattccccacggatgtccagacgatccctgcgcctggcaactacagcttgcacattaggcgacggggaagcggtgggagcagattctggcacctctagtgcagtgagcctgaaaaatagggctgcttag

SEQ ID NO: 67718 - DNA, 360 bp, Artificial Sequence
  derived and/or modified sequence
atggacttcagccggctgcacatgtacagccccccccagtgcgtgcctgaaaataccgggtacacttacgctctctcttcctcctattcctccgacgcattagatttcgaaaccgagcacaaacttgaccccgtatttgactctcctagaatgagtcggcgcagcctgagattggctaccactgcctgcacattaggggatggcgaggctgtcggagccgatagtggtacgtctagtgcggtgagcttgaaaaaccgggcagctaggaccacaaagcaacgacggtcaaccaacaaatccgctttttcgataaatcacgtgagccgacaggtgacctcttctggagttagccatggatag

SEQ ID NO: 67719 - DNA, 774 bp, Artificial Sequence
  derived and/or modified sequence
atggatttctcccgcctgcacatgtattctcccccacagtgcgtgccagaaaataccggctacacctacgcactctcttctagctactccagtgacgcactcgactttgagactgaacacaaactggacccggtgttcgatagtccaaggatgtctcgaaggtctctgcgccttgccacaacagcgtgcactttgggagacggtgaggcagtgggggctgactcaggcacaagtagtgcagtctctctcaaaaacagggccgcacggacaaccaagcagagacgcagcactaacaagagcgcctttagcattaatcatgtaagtcggcaggttaccagtagcggtgtgtcgcatggaggaaccgtgtctctgcaggacgcagtgacccggaggccacccgtgttggatgaatcctggattagggagcagactaccgttgatcatttctggggcctggatgatgacggggatctgaaggggggtaacaaagccgcaatccagggtaacggggacgtaggcgctgctgctgccaccgcacataatggcttcagttgctcaaactgcagtatgctctccgaaagaaaggacgtactgactgcccaccccgctgctcccggacccgtttcgagggtttacagtcgagatcggaaccagaagtgcaaatcgcaatcctttaagacacagaaaaaggtctgctttcccaatctgatcttcccgttctgtaaaagtcaatgtctccactatctctcatggcggctgaaaattatcccatag

SEQ ID NO: 67720 - DNA, 342 bp, Artificial Sequence
  derived and/or modified sequence
atggatttttcccgattgcatatgtatagtccccctcagtgcgtacccgagaatactggctacacgtatgccttgtcttcgagctactcatccgatgcactagactttgagaccgaacacaaattagatcctgtcttcgactcccccagaatgtctagaagaagccttcggctcgcaacaaccgcttgcactctgggcgatggagaagcagttggagccgactccggtactagttcggctgtttccctgaagaatagagccgcacggacaactaaacaacggcgatctactaataagagtgccttctctattaaccacgtttcaaggcaggtcacctcctag

SEQ ID NO: 67721 - DNA, 267 bp, Artificial Sequence
  derived and/or modified sequence
atggactttagtcgactccacatgtacagcccgcctcagtgtgtgccagaaaatacagggtacacatatgccctgagctctagctattcaagtgatgccctcgatttcgaaaccgagcacaaactcgacccagtgtttgacagcccccgtatgagcaggaggtctctgcgattggcaactactgcctgcacactgggcgacggggaggccgtgggtgcggactcaggcaccagcagcgctgtgagcttaaaaaatagagccgcttag

SEQ ID NO: 67722 - DNA, 525 bp, Artificial Sequence
  derived and/or modified sequence
atggactttagcagactgcatatgtactctccgcctcagtgtgtccctgaaaacacagggtatacatacgcactctctagctcatactccagtgacgcccttgactttgagactgaacacaaactcgatcctgtgttcgactctccacggatgtccaggaggtctctccgcttggcaaccaccgcctgcactctcggggacggagaagcggttggggcagactccggaacctcctccgccgtctccctgaaaaatcgtgctgcgaggaccaccaagcagcggcgatcaaccaacaaaagtgcctttagtatcaaccatgtgtcccggcaggtgacttctagcggggtatctcatgggggaactgtttcgcttcaggacgccgtgacccgcagacccccagtcctcgatgagtcatggatacgggagcagactacagtggatcatttttggggacttgacgacgatggtgacttgaagggaggtaacaaagcggcaatacaggggaacggcgacgtgggggcttag

SEQ ID NO: 67723 - DNA, 408 bp, Artificial Sequence
  derived and/or modified sequence
atggactttagcagattgcacatgtacagccccccacaatgtgtccccgaaaacactggatatacttacgccctgtcctccagctatagcagtgatgcactggactttgaaacagagcacaagctagaccccgtgttcgattctccgaggatgtctcggcgtagtctgaggctcgccaccaccgcttgtaccctgggagacggtgaggcagtcggcgcagattcaggcaccagctctgctgttagcctgaagaaccgcgcagctcggacgacgaagcaaaggcgctccacgaacaaatccgcgtttagtattaatcacgtctccaggcaagtcactagtagcggcgtcagccatggagggacagtgagtctgcaagacgccgtaacccgacggcctcccgtactgtag

SEQ ID NO: 67724 - DNA, 267 bp, Artificial Sequence
  derived and/or modified sequence
atggatttcagccggctccatatgtatagcccaccacagtgcgttcctgaaaatactggttatacatatgctctgtccagctcatatagtagcgatgcattggattttgaaaccgaacacaagttagacccagtgtttgactctccaaggatgagtaggaggtcactccgacttgcaacaacggcctgtactctgggcgatggtgaggcggtaggcgctgactccgggacatcctcagcagtatcgttgaaaaatagagcagcttag

SEQ ID NO: 67725 - DNA, 360 bp, Artificial Sequence
  derived and/or modified sequence
atggatttttcccgtctgcatatgtactcacctcctcagtgtgttcctgaaaataccgggtatacatatgcactctcctcgtcttactcaagtgatgccctagacttcgagacagaacataagctggatcccgtgttcgatagcccacgcatgtctcgtcgcagccttaggctggcaacgaccgcatgcaccctcggcgatggagaggctgtaggcgcagactctgggacatccagcgctgtgtccctgaagaaccgcgcagcccgaactaccaaacagcggagatcaaccaacaaatccgccttcagtataaaccacgtgtcaaggcaggtaacttcctccggggttagtcatggttag

SEQ ID NO: 67726 - protein, 487 aa, Artificial Sequence
  derived and/or modified sequence
MGSWALLWPPLLFTGLLVRPPGTMAQAQYCSVNKDIFEVEENTNVTEPLVDIHVPEGQEVTLGALSTPFAFRIQGNQLFLNVTPDYEEKSLLEAQLLCQSGGTLVTQLRVFVSVLDVNDNAPEFPFKTKEIRVEEDTKVNSTVIPETQLQAEDRDKDDILFYTLQEMTAGASDYFSLVSVNRPALRLDRPLDFYERPNMTFWLLVRDTPGENVEPSHTATATLVLNVVPADLRPPWFLPCTFSDGYVCIQAQYHGAVPTGHILPSPLVLRPGPIYAEDGDRGINQPIIYSIFRGNVNGTFIIHPDSGNLTVARSVPSPMTFLLLVKGQQADLARYSVTQVTVEAVAAAGSPPRFPQRLYRGTVARGAGAGVVVKDAAAPSQPLRIQAQDPEFSDLNSAITYRITNHSHFRMEGEVVLTTTTLAQAGAFYAEPPTCTGDLRHPAHLRPPAPDPTQRLPGEAEEPMQTPKATHLGAGGLKHLPGVLVPF

SEQ ID NO: 67727 - protein, 745 aa, Artificial Sequence
  derived and/or modified sequence
MRRCRWAALALGLLRLCLAQANFAPHFFDNGVGSTNGNMALFSLPEDTPVGSHVYTLNGTDPEGDPISYHISFDPSTRSVFSVDPTFGNITLVEELDREREDEIEAIISISDGLNLVAEKVVILVTDANDEAPRFIQEPYVALVPEDIPAGSIIFKVHAVDRDTGSGGSVTYFLQNLHSPFAVDRHSGVLRLQAGATLDYERSRTHYITVVAKDGGGRLHGADVVFSATTTVTVNVEDVQDMAPVFVGTPYYGYVYEDTLPGSEVLKVVAMDGDRGKPNRILYSLVNGNDGAFEINETSGAISITQSPAQLQREVYELHVQVTEMSPAGSPAAQATVPVTIRIVDLNNHPPTFYGESGPQNRFELSMNEHPPQGEILRGLKITVNDSDQGANAKFNLQLVGPRGIFRVVPQTVLNEAQVTIIVENSAAIDFEKSKVLTFKLLAVEVNTPEKFSSTADVVIQLLDTNDNVPKFDSLYYVARIPENAPGGSSVVAVTAVDPDTGPWGEVKYSTYGTGADLFLIHPSTGLIYTQPWASLDAEATARYNFYVKAEDMEGKYSVAEVFITLLDVNDHPPQFGKSVQKKTMVLGTPVKIEAIDEDAEEPNNLVDYSITHAEPANVFDINSHTGEIWLKNSIRSLDALHNITPGRDCLWSLEVQAKDRGSPSFSTTALLKIDITDAEVRRLRYMKNSNFPGTTKSVRKPKFKPKKPHSSQGLFLHPHCEIALFNLSNVNLYSRVFQGAAQAS

SEQ ID NO: 67728 - DNA, 2238 bp, Artificial Sequence
  derived and/or modified sequence
atgagacgctgtcggtgggccgcgcttgccctgggtttactgcgcttatgcctcgctcaggcaaactttgctccacactttttcgataatggggtgggatccacaaatggcaacatggcgttgttctccctccctgaagatacccctgtgggttcacacgtgtacaccctcaatgggaccgatccggagggcgaccccattagttatcatattagctttgacccttccacacgttctgttttcagcgtggaccccaccttcggcaacattaccctggttgaggagttagaccgtgaacgggaggacgaaatcgaagccatcatctccatctcagacggactcaacctagtggccgaaaaggtggttattctcgtgacagacgccaatgatgaggccccacgctttattcaggagccgtatgttgctttggtcccggaggacatcccagcaggttctatcatcttcaaagtgcatgctgtcgaccgagatacaggctcggggggttctgtgacctactttttgcagaacctgcacagcccattcgccgtcgaccgacactctggggtcctgagactccaggctggggcaaccctggattacgagcggagccgcacccattatatcacagttgtggcaaaagacggggggggccgccttcacggagccgatgtagttttttcagctaccacaaccgtgactgtgaatgtagaggatgtgcaggacatggctcccgtgttcgtcggcaccccctactatgggtacgtgtacgaggacaccctgcccgggagcgaggttctgaaggttgtcgctatggatggtgatcgcggcaagcctaatagaattctctactctctggtgaatggaaacgacggggcctttgagatcaacgagaccagcggcgcaattagcatcacacagagccctgcgcagcttcaacgcgaggtgtacgagctccacgtacaggtgactgaaatgagccccgcaggttctccggccgcacaggcaactgtacctgtgaccatccggatcgtggacctgaacaatcaccccccaacattctacggagagtctggacctcagaataggttcgaactttcaatgaacgaacaccctccccagggcgaaatccttcgagggctgaagatcacagttaatgactcagatcagggtgcgaatgctaagttcaacctccagcttgtggggcccagaggtattttcagagtggtccctcagacggttctgaacgaggcacaggtgacaatcatcgttgaaaacagtgcggctatcgacttcgaaaaaagcaaggtcctgacttttaagctgcttgctgtggaagtcaatacccctgaaaaattctccagtaccgccgacgtcgtgattcaattgctggacaccaatgacaacgtccctaagtttgactctctttattacgtagcccggatacccgagaatgctccagggggtagttcagtcgtggccgtaacagctgtcgatccggataccggcccttggggggaggtaaagtactcgacttatggcactggcgccgacctgttcctcatacaccccagcacaggattgatctacacgcagccctgggcctctttagatgccgaagccactgcaagatacaacttctacgtaaaggccgaagacatggaaggaaaatattccgtagctgaagtattcattactctcctggacgtgaacgaccatcctccacagttcggcaagtctgttcagaagaaaaccatggtcctgggcacccccgttaagatcgaagccatcgacgaggatgcagaggagcccaacaacctcgtcgactattctataacccacgcagaacctgcaaacgtgtttgacatcaacagtcacactggcgaaatatggctgaaaaactcaatccgttccctggatgccctccacaatattacaccggggcgagactgcctgtggagtctggaggttcaggctaaggaccgtggcagcccgtcgttttccaccaccgcactgctaaaaattgatattaccgatgccgaggttcggaggttgcgatacatgaagaactccaacttcccgggcaccacaaagtccgtgcgtaagccaaagtttaagcccaagaagccacattcaagccaaggcttgtttctccatccccattgtgagatcgcattgtttaaccttagcaacgtgaacctctatagtagggtcttccaaggagccgcccaggcctcctag

SEQ ID NO: 67729 - DNA, 2238 bp, Artificial Sequence
  derived and/or modified sequence
atgaggcgctgccgctgggccgccctggccctgggcctgctgcggctgtgcctggcccaggccaactttgccccccacttctttgacaacggggtgggcagcaccaacggcaacatggccctcttcagcctgcctgaggacacccctgtgggcagccacgtgtacaccctgaatggaacagatcctgagggggaccccatctcctaccacatcagctttgaccccagcaccaggtctgtgttttctgtggaccccacctttggaaacatcaccctggtggaggagctggaccgggagagagaagatgaaattgaggccatcatcagcatcagtgatggcctgaacctggtggccgagaaggtggtgatcctggtgacagatgccaatgatgaggccccccgcttcatccaggagccctacgtggccctggtgcctgaggacatcccagctggcagcatcatcttcaaggtgcatgctgtggaccgggacaccggcagcggcggctctgtgacctacttcctgcagaacctgcacagcccctttgctgtggacagacattctggagtgctgcggctgcaggccggggccaccctggactatgaaagaagcaggacccactacatcaccgtggtggccaaggatggcggcggccgcctgcacggggctgatgtggtgttttctgccaccaccaccgtgacagtgaatgtggaggatgtgcaggacatggcccctgtgtttgtgggcaccccctactacggctacgtgtatgaggacaccctgcccggcagcgaggtgctgaaggtggtggccatggatggagaccggggcaagcccaaccgcatcctgtacagcctggtgaatggaaatgatggagcctttgagatcaatgagaccagcggggccatcagcatcacccagagccctgcccagctgcagcgggaggtgtatgagctgcacgtgcaggtgacagagatgagccctgctggcagccctgctgcccaggccaccgtgcctgtgaccatcagaattgtggacctgaacaaccacccccccaccttctacggggagagcggcccccagaacagatttgagctgtccatgaatgagcaccccccccagggcgagatcctgcggggcctgaagatcaccgtgaatgacagcgaccagggcgccaatgccaagttcaacctgcagctggtgggcccccggggcatcttccgggtggtgccccagacagtgctgaatgaggcccaggtgaccatcatcgtggagaacagcgctgccatcgactttgagaagagcaaggtgctgaccttcaagctgctggccgtggaggtgaacaccccagagaagttcagcagcacagcagatgtggtgatccagctgctggacaccaatgacaacgtgcccaagtttgacagcctgtactacgtggcccgcatcccagaaaatgcccctgggggcagctctgtggtggccgtgacagctgtggaccctgacaccggcccctggggcgaggtgaagtacagcacctacggcaccggggctgacctcttcctgatccaccccagcacaggcctcatctacacccagccctgggccagcctggatgctgaggccacagcccgctacaacttctacgtgaaggccgaggacatggagggcaagtacagcgtggccgaggtgttcatcaccctgctggatgtgaatgaccaccccccccagtttgggaagtctgtgcagaagaagaccatggtgctgggcacccctgtgaagattgaggccattgatgaagatgctgaggagcccaacaacctggtggactacagcatcacccacgccgagcccgccaacgtgtttgacatcaacagccacactggagagatctggctgaagaacagcatccgcagcctggatgccctgcacaacatcaccccaggccgggactgcctgtggagcctggaggtgcaggccaaggaccggggcagccccagcttcagcaccacagccctgctgaagattgacatcacagatgctgaggtgcggcggctgcgctacatgaagaacagcaacttccctggcaccaccaagtctgtgaggaagcccaagttcaagcccaagaagccccacagcagccagggcctcttcctgcacccccactgtgaaattgccctcttcaacctgagcaatgtgaacctgtacagcagggtcttccagggcgccgcccaggccagctag

SEQ ID NO: 67730 - DNA, 2238 bp, Artificial Sequence
  derived and/or modified sequence
atgcggcggtgccggtgggccgccctggccctgggcctgctgcggctgtgtctggctcaggctaatttcgccccccatttttttgacaacggtgtcggttccaccaacgggaatatggccttgttttcattacccgaggacacaccagtgggatctcacgtgtacaccctgaatggaaccgacccagagggagaccccatttcgtatcacatatcttttgacccttcaaccaggtcagtcttctcggtagatcctacgtttggaaatataactttggtcgaagaacttgatcgcgagagggaggacgagattgaggccattatctcaatttctgacggcctgaacctcgtcgccgagaaggtcgtgatcctagtcacagatgccaatgatgaggctccgaggttcatacaagaaccgtatgtcgccctggtgccggaagacatcccagccggctccattatcttcaaagtgcacgcggtcgaccgggacaccggctcaggcggctcagtgacttatttcctgcagaacctgcactctccgttcgccgtggacagacacagcggtgtcctgagactgcaagctggtgcaaccttggattacgagaggtccaggacgcattatataaccgtcgtcgcaaaggacggcgggggccgccttcacggcgccgatgttgttttcagcgctaccactaccgtgacagttaacgtggaggacgtgcaggacatggcaccagtgtttgtaggtactccttattatggatacgtgtatgaagacactctgccaggctcagaagttctcaaagtggtcgccatggatggagatcgtggcaaaccaaatagaatcttgtacagccttgtgaacggcaacgatggagcattcgagattaatgagacctccggagctatctctattactcaaagtccggctcagctgcagagggaggtatacgagcttcacgtacaggtaacggagatgtcacctgctggatcgcctgccgcccaggccaccgtcccagtcacaattcgcattgtggatttgaataatcatcctccaaccttttatggtgagtcaggccctcagaatcgatttgagctaagcatgaatgaacacccacctcaaggcgaaattctccgaggcctgaagattacagtcaacgactccgaccagggcgctaatgcaaagttcaacctgcagttagtgggaccacgggggattttccgtgtggtgccacagacagtgctgaacgaggcacaggtcactattatcgtggagaacagcgctgcaatcgatttcgagaagagcaaggtgctgacattcaagcttctagcggtagaagtcaatacgcctgagaagttcagctccacagccgacgtggtgattcaactgctcgataccaacgacaacgtcccaaagttcgattccctgtactatgttgcaaggattccagagaacgcccccggcggatccagcgttgtggctgttacagccgttgaccccgacaccggcccatggggggaggtgaaatatagtacatatggcacgggcgccgatctctttcttatacacccgagcacagggctgatttacacgcagccttgggccagccttgacgctgaggccactgcccgatacaacttctacgtcaaagccgaagacatggaaggaaagtattcggtggcagaagttttcataaccctgctcgacgttaatgaccatcctcctcaatttggtaagagtgtgcagaaaaagactatggtgctcggcacgcccgtcaaaatcgaggccattgacgaggacgcagaggaaccaaataatcttgttgattatagcatcacccacgctgaacctgccaatgtgttcgacataaacagccacaccggggaaatttggctgaaaaactcaatccggagccttgacgcattacacaacattacccccggtcgtgattgcctgtggagcctcgaggtccaggccaaagataggggcagcccctctttctccacgaccgccctccttaagattgacattaccgatgccgaagtgaggcggcttcgatacatgaaaaattccaatttccctgggactactaagtccgtccggaagcctaaattcaagcctaaaaagcctcattcctcacagggcctattcctgcacccccattgtgagatcgcactgttcaacctatccaatgttaacctctactcccgcgtgttccagggagctgcacaggcctcctag

SEQ ID NO: 67731 - DNA, 2238 bp, Artificial Sequence
  derived and/or modified sequence
atgcgtaggtgtagatgggccgcattggcactcggtctgttacgcctatgccttgcccaggctaattttgctcctcatttttttgacaacggagttggctctactaacggcaatatggctttattttccctgcctgaggacaccccagtgggttcacacgtctacactctgaatgggacagatccagaaggcgatcccatctcctaccacattagcttcgacccctcaacacggagcgttttctctgtcgatccgacatttggaaacatcacactggtcgaagagttggatcgagaacgggaggatgaaattgaggctatcatcagcatatccgatggcttgaacctcgttgcagagaaagttgtgattcttgtgacagatgcgaatgacgaggcaccccgtttcattcaggaaccctatgtcgctctggtgcccgaagatatacccgcaggctctatcatttttaaggtccatgccgtggaccgcgataccggatctgggggaagcgtgacttactttctacagaatctgcactccccgtttgccgtggacaggcactcgggagtcctgcggttgcaggccggagccacactcgactatgaaagatcgaggactcattacattaccgtggtggcaaaggacgggggaggcagattgcacggggctgatgtcgtgttttcggccaccaccaccgtgacggtgaatgtggaggacgtgcaggatatggcccctgtcttcgtgggcactccatactacggctatgtgtacgaagacacactgcccggaagcgaagtgttgaaggttgtagctatggatggcgatagaggaaaacccaaccggatcctatattctttagtgaatgggaatgatggcgcattcgaaattaatgagactagtggcgctatttccattactcagtcaccggctcaactgcaacgggaagtttatgagctgcatgtgcaagtaaccgaaatgtcccccgctggaagccctgcggctcaggcaacagtgcctgtcaccataagaatcgtggacctgaataaccacccgcctactttttatggcgagagtggtcctcagaataggtttgaacttagtatgaacgaacatccccctcagggggagatcctcaggggcctgaaaatcactgttaatgatagcgaccaaggggcaaacgcaaaatttaacctgcagctggtcggccctcgtggaatcttccgggtcgtgcctcaaaccgtgctgaatgaggcgcaagtcacgatcatcgtagagaattcagccgctatagactttgagaaaagcaaagtactgacttttaaactgctggctgtggaggtcaacacacctgagaagttctcatcgaccgctgatgtcgtcattcagttattggataccaacgacaacgtgccaaagtttgactctctgtactacgtggctaggattccagagaacgctccgggagggtcctcggtagtggccgtcaccgctgtggatcctgacaccggcccttggggagaggttaagtattctacctacggcactggggcagatttgttcctaattcaccctagcaccggtctgatctacacgcagccttgggctagtctagacgcagaggccacagccagatataatttttatgtgaaagcagaggacatggaaggcaagtattccgtggcggaggtgtttatcacactgctggacgtcaacgaccaccctccccagtttggcaaatcagtgcaaaaaaagactatggtcctcggtacgccagtcaagatcgaggcaatcgacgaggacgctgaggagcctaacaacctggtggattattctatcactcatgccgagcccgctaacgtgttcgatatcaatagtcataccggagaaatatggcttaagaactctatcaggtcccttgacgctctgcataatatcacaccgggaagagattgtctgtggagcttagaggtgcaggcaaaggatcggggtagtccatctttcagcacgacagccttactgaaaattgatattaccgacgcagaggtcaggcgcctccggtacatgaagaacagcaacttccccggaaccaccaaaagtgtgcggaaacctaagttcaaacccaaaaagccgcactctagccaagggctgttcctccatccacactgcgagatcgccttgttcaacctgtcaaacgtgaacctgtactccagagtcttccagggcgcagctcaggctagctag

SEQ ID NO: 67732 - DNA, 2690 bp, Artificial Sequence
  derived and/or modified sequence
ccgctacccccattgtggtctctgccctccccgcgggcccagggcatgctccgtgcccctgcgcccggtctcggcggcggcaggcgacactccgcgccggcggagacatgaggcgctgccggtgggccgccctggccctggggctgctgcgcctctgcttggctcaggccaacttcgccccgcacttcttcgacaacggggtcggcagcaccaacggaaacatggctctgttcagcctcccagaggacacccctgtaggctctcacgtatacaccctgaatgggacagaccctgagggagaccccatctcctaccacatcagctttgaccccagcactagaagcgtcttttctgttgaccccacttttggaaacatcaccctggttgaagagctggacagagagagggaagatgagattgaagccatcatcagcatttctgatggcctgaatctggtggccgaaaaagtcgtgatcctggtgaccgatgccaatgatgaggcgcccaggttcatccaggagccttatgttgccctggttcccgaggacatacctgctgggagcatcatctttaaggtccatgcagtggacagggacacaggctctggagggagtgtcacctacttcctgcagaacctgcactccccatttgccgtggaccgccacagcggtgtgctgcgcctccaggctggggccactctggactacgagaggtcccggacccactacatcaccgtggtcgccaaggatggcggtgggaggcttcatggggctgatgtggtgttctcagccaccaccacggtcacggtcaatgtggaggatgttcaggacatggcccctgtcttcgtgggcacaccctactatggctatgtgtacgaggacacccttccgggctcggaggtactgaaggtggtcgccatggatggagaccggggcaaacccaatcgaattctctacagccttgtaaatgggaacgatggagcctttgaaattaatgagacatctggagccatctccatcactcagagcccggcccagctccagagagaggtgtatgagctgcatgtacaggtgactgaaatgagccctgcggggagcccagctgcccaggccaccgtcccagtcaccatcaggattgtggacctcaacaaccacccgccaacattctatggagagagcggaccccaaaacaggtttgagctgtccatgaatgagcacccaccccagggagagatcctgcggggcctcaagatcaccgtcaatgactccgaccagggagccaatgccaaattcaacttgcagctggtgggacccaggggcatcttccgagtggttccacagacagtcctgaatgaagcccaagtcacaatcattgtggagaactcagctgccattgactttgaaaagtccaaagtattaaccttcaagctcctggctgttgaagtgaacaccccagagaagttcagttccacagcggatgttgtgatccagctcctggacaccaatgacaatgtccccaagttcgactccctctactacgttgccaggattcctgagaacgccccagggggctccagcgtggtggctgtcacagctgtggatccagatacaggaccctggggcgaagtgaaatattccacctatgggactggggcagacctcttcctgatccacccatccactgggcttatctacacccagccctgggctagcctggacgctgaggccactgccaggtacaacttctatgtgaaggcagaggacatggaaggcaagtacagcgtagctgaggtgtttatcacactgctggatgtcaatgaccacccccctcagtttggaaagagcgttcagaagaagacgatggtgctagggaccccagtgaaaattgaggccatagacgaggatgcagaggaacccaacaacctggtggactattccatcacccatgcagagcccgccaacgtgttcgacatcaattcccacacgggggagatctggctcaagaattccatccgctccctggatgccctgcacaacatcacacctggaagggactgcctatggtccctagaggtgcaggccaaggaccggggctccccatccttcagcaccacagccttactcaagattgacatcacagatgctgaggtgagaagactaaggtacatgaaaaatagtaacttccctggtacaacaaagtcagtaagaaaaccaaaatttaagcccaagaaaccacattccagccagggtctgttcttgcatccccactgcgaaattgccttattcaatctgagtaatgtgaatctgtactctagagtttttcaaggggcagcccaagcatcttaaaaagtatcagattctcagaaatcctccctagaccattttccctctccctaaatttctatgtttacagaagcaactgaatacttccctacccaccaacatgctcctggctctcccctgcactgcttgctgctcttccacagcccttctctcatcctgacccctctgtctcatgtgcaccaccaagcttcttttgcttggcttgaaggtctgaacatccactctcaccttcatggtagcccaggctatttcatgatggtgacaccctcaagatccgtagaccactgtattagttcgttctcatgctgctaataaagatacccgagactgggtaatttatagaggaaa

SEQ ID NO: 67733 - DNA, 2238 bp, Artificial Sequence
  derived and/or modified sequence
atgagaagatgcagatgggccgccctggccctgggcctgctgagactgtgcctggcccaggccaacttcgccccccacttcttcgacaacggcgtgggcagcaccaacggcaacatggccctgttcagcctgcccgaggacacccccgtgggcagccacgtgtacaccctgaacggcaccgaccccgagggcgaccccatcagctaccacatcagcttcgaccccagcaccagaagcgtgttcagcgtggaccccaccttcggcaacatcaccctggtggaggagctggacagagagagagaggacgagatcgaggccatcatcagcatcagcgacggcctgaacctggtggccgagaaggtggtgatcctggtgaccgacgccaacgacgaggcccccagattcatccaggagccctacgtggccctggtgcccgaggacatccccgccggcagcatcatcttcaaggtgcacgccgtggacagagacaccggcagcggcggcagcgtgacctacttcctgcagaacctgcacagccccttcgccgtggacagacacagcggcgtgctgagactgcaggccggcgccaccctggactacgagagaagcagaacccactacatcaccgtggtggccaaggacggcggcggcagactgcacggcgccgacgtggtgttcagcgccaccaccaccgtgaccgtgaacgtggaggacgtgcaggacatggcccccgtgttcgtgggcaccccctactacggctacgtgtacgaggacaccctgcccggcagcgaggtgctgaaggtggtggccatggacggcgacagaggcaagcccaacagaatcctgtacagcctggtgaacggcaacgacggcgccttcgagatcaacgagaccagcggcgccatcagcatcacccagagccccgcccagctgcagagagaggtgtacgagctgcacgtgcaggtgaccgagatgagccccgccggcagccccgccgcccaggccaccgtgcccgtgaccatcagaatcgtggacctgaacaaccacccccccaccttctacggcgagagcggcccccagaacagattcgagctgagcatgaacgagcaccccccccagggcgagatcctgagaggcctgaagatcaccgtgaacgacagcgaccagggcgccaacgccaagttcaacctgcagctggtgggccccagaggcatcttcagagtggtgccccagaccgtgctgaacgaggcccaggtgaccatcatcgtggagaacagcgccgccatcgacttcgagaagagcaaggtgctgaccttcaagctgctggccgtggaggtgaacacccccgagaagttcagcagcaccgccgacgtggtgatccagctgctggacaccaacgacaacgtgcccaagttcgacagcctgtactacgtggccagaatccccgagaacgcccccggcggcagcagcgtggtggccgtgaccgccgtggaccccgacaccggcccctggggcgaggtgaagtacagcacctacggcaccggcgccgacctgttcctgatccaccccagcaccggcctgatctacacccagccctgggccagcctggacgccgaggccaccgccagatacaacttctacgtgaaggccgaggacatggagggcaagtacagcgtggccgaggtgttcatcaccctgctggacgtgaacgaccaccccccccagttcggcaagagcgtgcagaagaagaccatggtgctgggcacccccgtgaagatcgaggccatcgacgaggacgccgaggagcccaacaacctggtggactacagcatcacccacgccgagcccgccaacgtgttcgacatcaacagccacaccggcgagatctggctgaagaacagcatcagaagcctggacgccctgcacaacatcacccccggcagagactgcctgtggagcctggaggtgcaggccaaggacagaggcagccccagcttcagcaccaccgccctgctgaagatcgacatcaccgacgccgaggtgagaagactgagatacatgaagaacagcaacttccccggcaccaccaagagcgtgagaaagcccaagttcaagcccaagaagccccacagcagccagggcctgttcctgcacccccactgcgagatcgccctgttcaacctgagcaacgtgaacctgtacagcagagtgttccagggcgccgcccaggccagctag

SEQ ID NO: 67734 - protein, 1310 aa, Artificial Sequence
  derived and/or modified sequence
MAQLWLSCFLLPALVVSVAANVAPKFLANMTSVILPEDLPVGAQAFWLVAEDQDNDPLTYGMSGPNAYFFAVTPKTGEVKLASALDYETLYTFKVTISVSDPYIQVQREMLVIVEDRNDNAPVFQNTAFSTSINETLPVGSVVFSVLAVDKDMGSAGMVVYSIEKVIPSTGDSEHLFRILANGSIVLNGSLSYNNKSAFYQLELKACDLGGMYHNTFTIQCSLPVFLSISVVDQPDLDPQFVREFYSASVAEDAAKGTSVLTVEAVDGDKGINDPVIYSISYSTRPGWFDIGADGVIRVNGSLDREQLLEADEEVQLQVTATETHLNIYGQEAKVSIWVTVRVMDVNDHKPEFYNCSLPACTFTPEEAQVNFTGYVDEHASPRIPIDDLTMVVYDPDKGSNGTFLLSLGGPDAEAFSVSPERAVGSASVQVLVRVSALVDYERQTAMAVQVVATDSVSQNFSVAMVTIHLRDINDHRPTFPQSLYVLTVPEHSATGSVVTDSIHATDPDTGAWGQITYSLLPGNGADLFQVDPVSGTVTVRNGELLDRESQAVYYLTLQATDGGNLSSSTTLQIHLLDINDNAPVVSGSYNIFVQEEEGNVSVTIQAHDNDEPGTNNSRLLFNLLPGPYSHNFSLDPDTGLLRNLGPLDREAIDPALEGRIVLTVLVSDCGEPVLGTKVNVTITVEDINDNLPIFNQSSYNFTVKEEDPGVLVGVVKAWDADQTEANNRISFSLSGSGANYFMIRGLVLGAGWAEGYLRLPPDVSLDYETQPVFNLTVSAENPDPQGGETIVDVCVNVKDVNDNPPTLDVASLRGIRVAENGSQHGQVAVVVASDVDTSAQLEIQLVNILCTKAGVDVGSLCWGWFSVAANGSVYINQSKAIDYEACDLVTLVVRACDLATDPGFQAYSNNGSLLITIEDVNDNAPYFLPENKTFVIIPELVLPNREVASVRARDDDSGNNGVILFSILRVDFISKDGATIPFQGVFSIFTSSEADVFAGSIQPVTSLDSTLQGTYQVTVQARDRPSLGPFLEATTTLNLFTVDQSYRSRLQFSTPKEEVGANRQAINAALTQATRTTVYIVDIQDIDSAARARPHSYLDAYFVFPNGSALTLDELSVMIRNDQDSLTQLLQLGLVVLGSQESQESDLSKQLISVIIGLGVALLLVLVIMTMAFVCVRKSYNRKLQAMKAAKEARKTAAGVMPSAPAIPGTNMYNTERANPMLNLPNKDLGLEYLSPSNDLDSVSVNSLDDNSVDVDKNSQEIKEHRPPHTPPEPDPEPLSVVLLGRQAGASGQLEGPSYTNAGLDTTDL

SEQ ID NO: 67735 - DNA, 3933 bp, Artificial Sequence
  derived and/or modified sequence
atggcccagctgtggctgagctgcttcctgctgcccgccctggtggtgagcgtggccgccaacgtggcccccaagttcctggccaacatgaccagcgtgatcctgcccgaggacctgcccgtgggcgcccaggccttctggctggtggccgaggaccaggacaacgaccccctgacctacggcatgagcggccccaacgcctacttcttcgccgtgacccccaagaccggcgaggtgaagctggccagcgccctggactacgagaccctgtacaccttcaaggtgaccatcagcgtgagcgacccctacatccaggtgcagagagagatgctggtgatcgtggaggacagaaacgacaacgcccccgtgttccagaacaccgccttcagcaccagcatcaacgagaccctgcccgtgggcagcgtggtgttcagcgtgctggccgtggacaaggacatgggcagcgccggcatggtggtgtacagcatcgagaaggtgatccccagcaccggcgacagcgagcacctgttcagaatcctggccaacggcagcatcgtgctgaacggcagcctgagctacaacaacaagagcgccttctaccagctggagctgaaggcctgcgacctgggcggcatgtaccacaacaccttcaccatccagtgcagcctgcccgtgttcctgagcatcagcgtggtggaccagcccgacctggacccccagttcgtgagagagttctacagcgccagcgtggccgaggacgccgccaagggcaccagcgtgctgaccgtggaggccgtggacggcgacaagggcatcaacgaccccgtgatctacagcatcagctacagcaccagacccggctggttcgacatcggcgccgacggcgtgatcagagtgaacggcagcctggacagagagcagctgctggaggccgacgaggaggtgcagctgcaggtgaccgccaccgagacccacctgaacatctacggccaggaggccaaggtgagcatctgggtgaccgtgagagtgatggacgtgaacgaccacaagcccgagttctacaactgcagcctgcccgcctgcaccttcacccccgaggaggcccaggtgaacttcaccggctacgtggacgagcacgccagccccagaatccccatcgacgacctgaccatggtggtgtacgaccccgacaagggcagcaacggcaccttcctgctgagcctgggcggccccgacgccgaggccttcagcgtgagccccgagagagccgtgggcagcgccagcgtgcaggtgctggtgagagtgagcgccctggtggactacgagagacagaccgccatggccgtgcaggtggtggccaccgacagcgtgagccagaacttcagcgtggccatggtgaccatccacctgagagacatcaacgaccacagacccaccttcccccagagcctgtacgtgctgaccgtgcccgagcacagcgccaccggcagcgtggtgaccgacagcatccacgccaccgaccccgacaccggcgcctggggccagatcacctacagcctgctgcccggcaacggcgccgacctgttccaggtggaccccgtgagcggcaccgtgaccgtgagaaacggcgagctgctggacagagagagccaggccgtgtactacctgaccctgcaggccaccgacggcggcaacctgagcagcagcaccaccctgcagatccacctgctggacatcaacgacaacgcccccgtggtgagcggcagctacaacatcttcgtgcaggaggaggagggcaacgtgagcgtgaccatccaggcccacgacaacgacgagcccggcaccaacaacagcagactgctgttcaacctgctgcccggcccctacagccacaacttcagcctggaccccgacaccggcctgctgagaaacctgggccccctggacagagaggccatcgaccccgccctggagggcagaatcgtgctgaccgtgctggtgagcgactgcggcgagcccgtgctgggcaccaaggtgaacgtgaccatcaccgtggaggacatcaacgacaacctgcccatcttcaaccagagcagctacaacttcaccgtgaaggaggaggaccccggcgtgctggtgggcgtggtgaaggcctgggacgccgaccagaccgaggccaacaacagaatcagcttcagcctgagcggcagcggcgccaactacttcatgatcagaggcctggtgctgggcgccggctgggccgagggctacctgagactgccccccgacgtgagcctggactacgagacccagcccgtgttcaacctgaccgtgagcgccgagaaccccgacccccagggcggcgagaccatcgtggacgtgtgcgtgaacgtgaaggacgtgaacgacaacccccccaccctggacgtggccagcctgagaggcatcagagtggccgagaacggcagccagcacggccaggtggccgtggtggtggccagcgacgtggacaccagcgcccagctggagatccagctggtgaacatcctgtgcaccaaggccggcgtggacgtgggcagcctgtgctggggctggttcagcgtggccgccaacggcagcgtgtacatcaaccagagcaaggccatcgactacgaggcctgcgacctggtgaccctggtggtgagagcctgcgacctggccaccgaccccggcttccaggcctacagcaacaacggcagcctgctgatcaccatcgaggacgtgaacgacaacgccccctacttcctgcccgagaacaagaccttcgtgatcatccccgagctggtgctgcccaacagagaggtggccagcgtgagagccagagacgacgacagcggcaacaacggcgtgatcctgttcagcatcctgagagtggacttcatcagcaaggacggcgccaccatccccttccagggcgtgttcagcatcttcaccagcagcgaggccgacgtgttcgccggcagcatccagcccgtgaccagcctggacagcaccctgcagggcacctaccaggtgaccgtgcaggccagagacagacccagcctgggccccttcctggaggccaccaccaccctgaacctgttcaccgtggaccagagctacagaagcagactgcagttcagcacccccaaggaggaggtgggcgccaacagacaggccatcaacgccgccctgacccaggccaccagaaccaccgtgtacatcgtggacatccaggacatcgacagcgccgccagagccagaccccacagctacctggacgcctacttcgtgttccccaacggcagcgccctgaccctggacgagctgagcgtgatgatcagaaacgaccaggacagcctgacccagctgctgcagctgggcctggtggtgctgggcagccaggagagccaggagagcgacctgagcaagcagctgatcagcgtgatcatcggcctgggcgtggccctgctgctggtgctggtgatcatgaccatggccttcgtgtgcgtgagaaagagctacaacagaaagctgcaggccatgaaggccgccaaggaggccagaaagaccgccgccggcgtgatgcccagcgcccccgccatccccggcaccaacatgtacaacaccgagagagccaaccccatgctgaacctgcccaacaaggacctgggcctggagtacctgagccccagcaacgacctggacagcgtgagcgtgaacagcctggacgacaacagcgtggacgtggacaagaacagccaggagatcaaggagcacagacccccccacaccccccccgagcccgaccccgagcccctgagcgtggtgctgctgggcagacaggccggcgccagcggccagctggagggccccagctacaccaacgccggcctggacaccaccgacctgtag

SEQ ID NO: 67736 - DNA, 3933 bp, Artificial Sequence
  derived and/or modified sequence
atggcacagctgtggctctcctgctttctgctgccggcacttgttgtctcagtggcggctaatgtcgccccgaaatttctggccaatatgacctctgtgatattgcccgaagatctacctgtaggggcccaggctttctggttggtggccgaggaccaggataatgaccccctgacctacggtatgagcggccctaacgcctacttcttcgctgttacccccaagaccggtgaagtaaagctagcatccgcccttgactacgagacgctatatacgttcaaggtgactatcagtgtgtctgatccgtacattcaagtacagagggagatgttagtgatcgtggaggatcggaacgacaacgccccagtctttcagaacaccgcctttagcacgtccataaacgaaacgcttcctgtgggcagtgttgttttttccgtgctggcggtagacaaggacatggggtctgcggggatggtggtgtactcaatagagaaggtgatcccctccacaggcgacagtgaacacttgtttcggatcttggctaatggatctatagtgctcaacgggtccctaagctacaataacaagtcagctttttatcaattggagctgaaggcctgtgatctgggtgggatgtatcacaatacctttactatccaatgcagcctccccgtcttcctgagtatctctgtggtggatcagccggatctcgatcctcagtttgtgagagagttctatagcgcgagtgttgctgaagacgctgctaaggggacctccgtgctaaccgtcgaggctgtcgatggtgataaaggaatcaacgaccccgtcatctacagtatctcttattctacacgaccaggctggttcgatataggtgcagatggcgtcattcgagtgaacgggtccctggatagagagcagttgttagaggcagacgaagaagtgcaattgcaagtcactgcaaccgaaactcatttaaatatttatggccaggaagctaaggtttcaatttgggttactgtgcgagtcatggatgtgaacgaccacaaacccgaattctacaattgtagcctgccagcgtgcacatttactcctgaggaagcccaagtgaacttcactggctacgtggatgagcacgcctcgccccgaattcccatcgacgatctcaccatggtcgtgtacgatcctgataaaggatccaacgggaccttcctgctgagcctcggcggacccgatgcagaggccttctctgtgtcccctgaacgtgccgtggggtccgcatccgtgcaggtcttggtgcgggtttccgctctggttgactacgagcggcaaaccgcaatggcagtgcaggtcgtggctacagactccgtgagccagaattttagcgttgcaatggtgactatccatctacgtgatatcaacgatcatcgaccgaccttcccccagagtctttatgtcctcacagtgcctgaacacagtgccaccggtagtgtggtgaccgactccattcacgctaccgatccggacactggagcctggggccagatcacctacagcctgctccctggaaatggtgcagacctattccaagtcgatcctgtttctggaaccgttacagtacggaatggggaactgttagaccgggagagtcaagccgtgtactatcttaccctccaggcaactgacggcggcaacctctcctcttccacaacgcttcagatccaccttctggatattaacgacaatgcaccggttgtttcgggatcctataacatcttcgttcaggaagaggagggtaatgtgtccgtaacaatccaggcgcatgacaacgacgaacctggtactaacaatagccgactgttattcaatctgctccctgggccctattctcacaatttcagcctggaccccgacactgggctcctccgaaacctgggaccactggatagggaagccatcgatcctgcattggagggccggattgttcttacggtgctcgtgagcgattgcggcgagccggtgcttggaactaaggttaacgtgaccatcaccgtggaggatatcaacgataacttaccgatttttaaccagtccagttacaactttacggtcaaggaggaggacccgggtgtgctagtcggggtcgtgaaagcctgggatgccgaccagacggaggcgaataatcgtatctctttttctctctcgggctcaggggcgaactacttcatgatccggggccttgtccttggagcaggatgggctgagggatatttaaggctcccaccagatgtgtcccttgattacgagacccagcctgtttttaatctgaccgtgtccgccgagaatcctgacccccagggtggtgaaaccatcgtcgatgtatgcgtgaatgtaaaagatgtcaacgataacccacctacgctggatgtggcttcccttaggggtatccgcgtggctgagaacggaagccagcacggtcaggttgcagtggtggttgctagtgatgtcgacacttcagcccagctggaaattcaattggtcaatatcctttgcacaaaagctggcgtggatgttggtagcctgtgttgggggtggttctctgtggcggccaacgggtcagtgtacattaaccagtcaaaagcaattgattacgaggcatgcgatttggtcacactggtcgttagagcgtgcgatctggccaccgacccaggctttcaagcctactcgaataacggctcactgctgataacaatcgaggacgtgaacgacaatgctccttatttccttcctgaaaacaaaacctttgtgattattccagaactggtgttaccgaaccgggaggttgctagcgtgcgcgcaagagacgacgactctggaaacaatggagtgattctcttctccatcctgagggtggactttatctcaaaggacggagccacgattccctttcaaggggtgttctcaatatttaccagcagtgaggccgatgtctttgccgggtccatccagcctgtaacttccttggacagcaccctgcagggcacatatcaggtaactgtgcaggctagggacaggccttctttgggcccttttctggaggcaacaactacactgaaccttttcaccgttgaccagagctatcgatcccgtctgcagtttagcacgcctaaggaagaagtcggagccaacagacaggcaattaatgccgcccttactcaggccacaaggactactgtttacatagtcgacatccaggatatcgacagtgctgccagagcaagacctcactcctatttggatgcttatttcgttttccctaacgggagtgctcttaccctcgatgaactttctgtcatgattcggaacgaccaggactccctaactcagctcttgcagcttggcctggtggtcctcggatcccaggagtctcaagagtcagatctcagcaaacagcttatctccgtgattattggcctgggagtcgcgcttctgctggtcctggtgatcatgacaatggcattcgtttgcgtccgtaagtcctataatagaaaactccaggccatgaaagccgccaaggaagcaagaaaaacggctgccggcgtgatgccatctgcccctgccatccctggaactaacatgtacaacactgagagagccaatcctatgttgaatttaccaaacaaggatttgggcctcgaatatctgagccctagtaacgatcttgactccgtgtccgtcaattcacttgatgataactccgtggacgttgataagaactcccaagaaattaaggaacatcggcccccccacaccccgcctgagcctgaccccgaacctttgtccgtggtgttgttgggccggcaggctggtgccagcggtcagttggaaggcccgtcctacactaacgccgggttggacaccaccgacctgtag

SEQ ID NO: 67737 - DNA, 3933 bp, Artificial Sequence
  derived and/or modified sequence
atggcccagctgtggctgtcctgcttcctactgcccgcactcgtcgtcagcgtggccgctaatgtggcccccaaatttctagccaacatgacttccgtcatactgcccgaggacttacccgtgggcgcccaagcattctggctggtggctgaagatcaagataacgatccgttaacgtacgggatgagcggtcccaatgcatacttttttgccgtgacgcccaaaaccggcgaggttaaactggcgagtgccctggattacgagaccttatacactttcaaagtgaccatcagcgtctctgatccttatattcaggtgcagcgagaaatgttagtgatcgttgaagatagaaatgataatgcccccgtgtttcagaataccgcctttagcactagtatcaacgaaacactgcctgtcggttccgtggtgtttagtgtcctggccgtcgacaaagacatgggctctgcaggaatggtagtgtactcaatcgagaaggtaatcccttctaccggcgatagcgaacatctgtttcgcattctagcaaatggatccattgtgctgaacggatcactgtcctataataacaaatcagctttctatcagttggagttgaaagcttgtgatctagggggaatgtatcacaacaccttcacaatacagtgctctctgcctgtcttcctcagtatcagcgtcgttgatcagcccgatttggaccctcagttcgttagagagttttactctgcaagcgtggctgaggacgccgccaaagggacctcagtcttgaccgtggaagcagtggacggggacaaggggatcaacgatccagtcatttattccatcagttactcaacacggccaggatggttcgacatcggagccgatggcgtgatcagagttaatggttcgctggaccgcgagcaactgttagaggctgacgaggaggttcaattgcaggttacagcgacggagactcaccttaatatctatggtcaggaggctaaagtgagcatctgggtgaccgtgcgggtgatggatgttaacgaccataagcccgagttctacaactgttcattacctgcttgcacttttacacccgaagaggcccaggttaacttcacagggtacgttgacgagcacgcttcaccccggataccaatcgacgacctgactatggttgtctacgacccggataaggggtccaacggtacctttctcctcagcctgggggggcctgacgccgaggccttcagcgtcagtccagagcgcgctgttggctctgccagcgtccaagtgctggtgagagtttctgccctggtagattacgagcgccaaacagccatggccgtgcaagttgtggcgacagatagtgtcagccagaatttcagcgtcgctatggtaaccatccacctgagggacatcaacgaccacaggccaaccttcccccagtccttgtatgtgcttaccgttcccgaacactctgccactggatccgtggtcacggattccattcatgccaccgatcccgacaccggagcgtggggacagatcacctactctcttcttcccggaaatggcgcggacctgtttcaggtggacccagtttcaggtaccgtgaccgtcaggaatggcgagctgctagacagagagtctcaagcggtgtactatctgacattgcaagctactgatggcgggaacctcagctcctcgactactctacaaatccatctcctggatatcaacgataacgcacctgtcgtgtccggttcttacaatatattcgtgcaggaggaagaagggaatgtctccgtgacgatacaggcccacgacaatgatgagccaggaactaataatagtcgcctcctgttcaatctcctccctggcccatacagccataattttagtctcgatcccgatactggattacttagaaatctcggaccacttgatagagaagccattgacccagccctggagggccgcattgttctgaccgtgctcgtaagtgactgtggtgaacctgtgcttggcactaaagtcaatgtcaccataacagtggaggacatcaatgacaacttgccgatcttcaatcaaagctcttacaactttaccgtcaaagaggaggaccctggcgtgttggtaggtgtagtcaaagcgtgggacgctgaccaaaccgaagcgaataaccggatctcgttttccctgtctgggtccggggccaattatttcatgattcgcggcctggtgttaggggctgggtgggccgagggctacctgaggctgccgccagatgtttctctggactatgaaacccaaccagtgttcaatctaacagtctccgccgaaaatcctgatcctcaaggtggcgaaactatcgtggacgtgtgcgtcaatgtcaaagatgtgaatgacaacccacccactctggacgtggcttcccttcgtggaatcagagtggcggaaaatggcagccagcacggccaggtggctgtggtggtcgcttctgacgttgacacctcagctcagctggaaatccaacttgtgaacattctgtgtaccaaggccggagtggatgtcggctcactgtgttggggctggttttctgtcgcagccaatggaagcgtgtacattaatcagagcaaggcgatcgattacgaagcttgtgacctggtcaccctcgttgtacgggcgtgcgacctggctaccgaccccggattccaggcctatagtaacaacggcagccttctgattaccattgaagacgtgaatgataatgctccctacttcctcccagaaaataaaacatttgtcattattcccgagcttgtgcttcctaaccgagaggtggcgtcggtgcgcgcccgggacgacgatagcgggaacaatggagtgatcctgttctctatactccgagtggactttatttccaaagatggcgccactattccatttcagggggtctttagtattttcacgtcaagcgaggccgatgtgtttgctggttcaatccagcccgtgacatctctggacagcacacttcagggaacctatcaggtgacggttcaggccagagatcgacctagtctaggaccattcctggaggcaacaaccactctcaatcttttcaccgttgaccagagctatcggagcaggctgcagttttcgacaccaaaagaagaagtcggtgccaatagacaggccatcaacgccgctttaacccaggccaccagaaccaccgtgtacatcgtggatattcaagatattgattcagccgcccgggcccggccccacagttatttagacgcttattttgtatttccaaacgggagcgctttgactctggatgaactgtctgtgatgatccggaacgatcaggactccttaactcagctgctccagctggggctggtcgtgcttgggtcccaggagagtcaggaatctgacttgagcaagcagctcattagtgtaatcattggactcggcgtcgcgctgttgttggtcctggtgatcatgactatggccttcgtctgcgtaagaaaatcttataacagaaaactccaagccatgaaagctgctaaagaggcccgcaaaacagccgctggcgtcatgcccagcgcccccgccatcccaggtactaacatgtacaatactgagcgtgccaatcccatgctgaaccttcccaacaaggaccttggactggagtatcttagcccatccaatgaccttgattccgtgtccgtaaactccttggacgataattccgtggacgttgataagaacagccaggaaatcaaagaacatcgtccgccccatacgccacccgagcctgaccccgaacctctttctgtggtgctgttggggcggcaggctggcgcatccggccagctggaaggaccatcttatactaatgcaggcctggatactacggatttgtag

SEQ ID NO: 67738 - DNA, 3933 bp, Artificial Sequence
  derived and/or modified sequence
atggcgcagctttggctgagctgttttcttctcccagccctcgtggtgtccgtggccgcaaacgtggcacccaagtttctggcaaacatgactagtgtgatccttccagaggatctcccagttggggcacaggctttttggctggtcgctgaggatcaagataatgaccctttaacatacggaatgagcggtcccaacgcttactttttcgcagtgaccccaaaaaccggggaagtgaagttggcttccgccctcgattacgaaacactctatacattcaaggtcaccatatccgtgagcgatccttatatccaggttcagcgcgagatgttggtcatagttgaggacagaaatgataacgctccggtattccagaatacggcattctctacttctattaacgagacgctgccagttgggtctgttgttttttccgtgctggccgtagacaaagatatgggctccgcaggaatggttgtgtattctatagagaaggtgattccttccaccggtgactcagaacatctctttaggattctcgccaacggaagcatcgtgctgaacgggtctctgtcctataataacaaaagtgctttctaccagttggagttgaaggcttgtgacctcggcgggatgtatcataatacctttaccatccagtgttctctgcctgtgttcttgtccatttctgtcgttgatcagccggacctggacccacagtttgtccgcgaattttactccgctagcgtggcggaagacgccgcgaaaggcactagcgtactgaccgtagaggccgtggatggagataaaggaatcaacgaccccgtcatttattccatcagttattctacaagaccgggctggttcgacatcggggctgacggtgtgatcagggtgaatggctcactcgatagagaacaacttttggaggccgatgaggaagttcagcttcaggtgactgccaccgagactcatctgaacatctacgggcaggaagcgaaagtttcaatttgggtgactgtgcgcgtaatggatgttaacgaccacaaaccagagttctacaactgttcccttccagcctgtacattcacacctgaagaggcccaggtcaattttacgggctatgtggacgaacatgcatcaccacgcatccctattgacgatttgactatggtggtgtacgatcccgacaagggttcaaacgggacttttttgcttagtctgggggggcccgatgccgaggctttcagcgttagcccagagcgggccgtaggctctgcttctgtgcaggtgctggttcgggtgagcgccctggtcgactacgagcggcagacagcgatggcagtgcaggtggttgccacagacagtgtgagtcagaatttttcggtggccatggtgacaatccatctgcgggatattaatgaccatcgacctacctttccgcagagcctctatgttttgaccgtgcccgaacacagtgccactggatccgttgtgaccgacagcattcacgctaccgacccagacacaggggcttggggacagatcacatacagcttactcccaggcaacggcgccgatctgtttcaagtggacccagtgagtggcaccgtgacagttcgtaacggcgagctgttagaccgtgaatcacaggctgtgtattacctcaccttacaggcgaccgacggcgggaacctgagttcctcgaccacactgcagattcacctgctggatattaacgataatgcgcccgtggttagtggttcatataacattttcgtacaggaagaagagggtaacgtttcagtgaccatccaggcccacgataacgatgagcccggtacgaacaactcacgattgctgtttaatttgctgccaggcccgtactcacataatttttcgcttgatccagacaccgggttactgcgtaatttaggaccacttgaccgagaagccatagatcctgctctcgagggccggattgtcttgaccgtactggtgtctgattgcggtgagccagtcttgggcaccaaagttaatgtaaccataactgtggaggatataaatgacaatctgccaatttttaaccaaagttcctataattttactgtaaaggaagaagacccgggagtgcttgtgggagtggtaaaggcttgggacgcggaccaaacagaagccaacaacaggatatccttttcgttgagcggctccggggcaaactattttatgataagagggctggtgctgggcgcgggctgggctgaggggtacctccggctgcctccagacgtttctctggactacgagactcagccagtctttaatctgactgtgtccgccgagaatccagatccgcaaggcggggagaccatagtggacgtgtgtgtgaacgttaaggacgttaacgataatcctcccaccctggacgtcgcctctctgagggggattagagtggccgagaatggaagccagcatggtcaggtcgccgttgtggtcgcctcggatgtggatacgagtgcccagctcgaaatccagctggtaaatattctgtgtaccaaagctggcgtggacgtgggaagcctctgctgggggtggtttagcgtcgcagctaacggaagcgtttatatcaatcaatccaaggcaatcgactatgaagcctgtgacctcgtcacgctggtggtgcgcgcatgtgaccttgcaacagaccctggatttcaggcttacagcaataatggatcactgttgataactattgaggatgtgaatgacaatgcaccatatttcctccctgaaaacaaaacgtttgttattattcctgaactcgtgctacctaatagggaggtcgcaagtgttagagcccgggatgacgatagtggcaacaacggagtgatactctttagtatattgagggtggactttattagcaaggatggagcaacgattccgttccagggggtcttttcaatctttaccagttctgaagccgatgtgtttgcaggcagtatccagcccgtgaccagtttggactctacattgcagggaacctatcaagtgactgtgcaggccagggacagacccagcttgggtccctttttggaagccaccaccacgctgaatctgttcacagtggatcagtcctatagatctagattgcagttctcaacacccaaagaggaggtcggggccaatcgccaagccattaacgcagccctcactcaggccactcggaccaccgtctacatcgtggatatccaggatattgacagcgctgctagggcgcggcctcacagctacctcgacgcctattttgtgtttcctaacggctcggcgctcaccttggacgagttgtcggttatgatccggaacgaccaggattctctgactcagctgctccagctgggcctggtggtgcttggaagccaagagtcccaggaatcagatttgagtaagcaactcatctcggtaatcattgggcttggggtggcccttctccttgttttggtgatcatgaccatggctttcgtttgtgttcgtaaatcttataaccgtaagctgcaggctatgaaagccgccaaggaagcgaggaaaacggctgcgggcgtcatgcctagcgctccagcaatcccgggcacaaatatgtacaataccgagcgcgctaaccctatgctgaatctgcccaacaaagatctaggcctcgagtacctaagcccctctaacgacctggacagtgtctccgtaaactcattagatgataactctgtggatgtggacaagaacagtcaggaaatcaaggagcaccgaccaccacacaccccacccgaaccggatccagagcccctgagcgtcgttctgctgggtaggcaagctggtgccagtggacagctggaagggccaagttacacaaacgccgggctcgacaccactgatctatag

SEQ ID NO: 67739 - DNA, 3933 bp, Artificial Sequence
  derived and/or modified sequence
atggcccagctgtggctgagctgcttcctgctgcctgccctggtggtgtctgtggccgccaacgtggcccccaagttcctggccaacatgaccagcgtcatcctgcctgaggacctgcctgtgggcgcccaggccttctggctggtggccgaggaccaggacaatgaccccctgacctacggcatgagcggccccaatgcctacttctttgctgtgacccccaagacaggagaggtgaagctggccagcgccctggactatgagaccctgtacaccttcaaggtgaccatctctgtgtctgacccctacatccaggtgcagcgggagatgctggtgattgtggaggacagaaatgacaatgcccctgtgttccagaacacagccttcagcaccagcatcaatgagaccctgcctgtgggctctgtggtgttttctgtgctggccgtggacaaggacatgggcagcgctggcatggtggtgtacagcattgagaaggtgatccccagcactggagacagcgagcacctgttccgcatcctggccaacggcagcatcgtgctgaatggcagcctgagctacaacaacaagagcgccttctaccagctggagctgaaggcctgtgacctgggcggcatgtaccacaacaccttcaccatccagtgcagcctgcccgtcttcctgagcatctctgtggtggaccagcctgacctggacccccagtttgtgcgggagttctacagcgcctctgtggccgaggatgctgccaagggcacctctgtgctgactgtggaggccgtggatggagacaagggcatcaatgaccctgtgatctacagcatctcctacagcacccggcccggctggtttgatattggagcagatggagtcatccgggtgaatggcagcctggaccgggagcagctgctggaggctgatgaggaggtgcagctgcaggtgacagccacagagacccacctgaacatctacggccaggaggccaaggtgtccatctgggtgacagtgcgggtgatggatgtgaatgaccacaagccagagttctacaactgcagcctgcctgcctgcaccttcaccccagaggaggcccaggtgaacttcaccggctacgtggatgaacatgccagcccccgcatccccattgatgacctgaccatggtggtgtatgaccctgacaagggcagcaatggcaccttcctgctgagcctgggcggcccagatgctgaggccttctctgtgtccccagagagagctgtgggcagcgcctctgtgcaggtgctggtgcgggtgtctgccctggtggactatgagcggcagacagccatggctgtgcaggtggtggccacagacagcgtgtcccagaacttctctgtggccatggtgaccatccacctgcgggacatcaatgaccaccggcccaccttcccccagagcctgtatgtgctgactgtgcctgagcacagcgccactggatctgtggtgacagacagcatccacgccacagatcctgacaccggggcctggggccagatcacctacagcctgctgcctggaaatggagctgacctcttccaggtggaccctgtgtctggaacagtgacagtgagaaatggagagctgctggaccgggagagccaggccgtgtactacctgaccctgcaggccacagatggcggcaacctgagcagcagcaccaccctgcagatccacctgctggacatcaatgacaatgcccctgtggtgtctggcagctacaacatctttgtgcaggaggaggagggcaatgtgtctgtgaccatccaggcccatgacaatgatgagcccggcaccaacaacagccggctgctcttcaacctgctgcccggcccctacagccacaacttcagcctggaccctgacaccggcctgctgaggaacctgggccccctggaccgggaggccattgatcctgccctggagggcagaattgtgctgactgtgctggtgtctgactgtggggagcctgtgctgggcaccaaggtgaatgtgaccatcaccgtggaggacatcaatgacaacctgcccatcttcaaccagagcagctacaacttcaccgtgaaggaggaggaccccggggtgctggtgggcgtggtgaaggcctgggatgctgaccagacagaggccaacaaccgcatctccttcagcctgagcggcagcggggccaactacttcatgatccggggcctggtgctgggcgccggctgggccgagggctacctgcggctgcccccagatgtgtccctggactatgagacccagcccgtcttcaacctgactgtgtctgcagaaaatccagacccccagggcggggagaccatcgtggatgtgtgtgtgaatgtgaaggatgtgaatgacaacccccccaccctggatgtggccagcctgcggggcatccgggtggccgagaatggcagccagcacggccaggtggccgtggtggtggccagtgatgtggacaccagcgcccagctggagatccagctggtgaacatcctgtgcaccaaggccggcgtggatgtgggcagcctgtgctggggctggttctctgtggccgccaatggatctgtgtacatcaaccagagcaaggccatcgactatgaggcctgtgacctggtgaccctggtggtgcgggcctgtgacctggccacagatcctggcttccaggcctacagcaacaacggcagcctgctgatcaccattgaagatgtgaatgacaatgccccctacttcctgcctgagaacaagacctttgtgatcatccctgagctggtgctgcccaaccgggaggtggcctctgtgcgggccagagatgatgacagcggcaacaatggagtcatcctcttcagcatcctgcgggtggacttcatcagcaaggatggagccaccatccccttccagggcgtcttcagcatcttcaccagcagcgaggctgatgtgtttgctggcagcatccagcctgtgaccagcctggacagcaccctgcagggcacctaccaggtgacagtgcaggcccgggaccggcccagcctgggccccttcctggaggccaccaccaccctgaacctcttcaccgtggaccagagctaccgcagccggctgcagttcagcacccccaaggaggaggtgggcgccaaccggcaggccatcaatgctgccctgacccaggccaccaggaccaccgtgtacatcgtggacatccaggacattgattctgctgcccgggcccggccccacagctacctggatgcctactttgtgttccccaatggaagtgccctgaccctggatgagctgtctgtgatgatcagaaatgaccaggacagcctgacccagctgctgcagctgggcctggtggtgctgggcagccaggagagccaggagagtgacctgagcaagcagctgatcagcgtcatcatcggcctgggcgtggccctgctgctggtgctggtgatcatgaccatggcctttgtgtgtgtgaggaagagctacaacaggaagctgcaggccatgaaggccgccaaggaggccaggaagacagctgctggggtgatgcccagcgccccagccatccctggcaccaacatgtacaacacagagcgggccaaccccatgctgaacctgcccaacaaggacctgggcctggagtacctgagccccagcaatgacctggacagcgtgtctgtgaacagcctggatgacaacagcgtggatgtggacaagaacagccaggagatcaaggagcaccggcccccccacaccccacctgagccagaccctgagcccctgtctgtggtgctgctgggccggcaggccggggccagcggccagctggagggccccagctacaccaatgccggcctggacaccacagacctgtag

SEQ ID NO: 67740 - DNA, 3933 bp, Artificial Sequence
  derived and/or modified sequence
atggcccagctgtggctgagctgcttcctgctgcccgccctggtggtctctgtggcagccaacgtagccccgaagtttctggctaatatgacatctgtgatactgcctgaagatctgccagtgggcgcccaggcgttctggctcgttgccgaggatcaggataatgatccgctcacatacggaatgtcagggcctaacgcctactttttcgcggttacccccaaaaccggagaggttaaactggcctcagccctcgactatgagaccctgtatacatttaaagtgacgataagcgtgtcagacccatatatacaggtacagcgggagatgctggtgatcgtggaagacagaaatgataatgccccagtgttccagaataccgccttctctaccagcatcaacgagacgttacccgttggttccgtcgtcttttcggtcctggctgtcgataaagatatgggctccgccggaatggtagtatacagcattgagaaggtcattccgtctacgggtgacagtgagcatctttttcgaattttagctaacgggagcatcgtcctgaacggctccttatcttataataataagtccgcattttatcagctggagttaaaggcctgtgacttgggtgggatgtaccataacacgtttaccatccagtgttcccttcccgtgtttttgtccatcagcgttgtggaccagccagatttagacccacagtttgtccgcgaattctattcagcgagtgtagcagaggatgcagcaaagggcacaagtgtacttaccgtggaagccgtcgatggtgataaagggatcaacgaccccgtcatctatagcatatcctatagtaccagacctggctggtttgacattggtgccgatggcgtgattcgagtgaacggaagcctggacagggaacagctgttggaggcagatgaggaggtccaactgcaggtcacagctactgagacgcatctgaacatctacggccaggaggccaaggtgagtatctgggtgactgtgcgggtgatggatgtcaatgaccacaagccagagttctataattgctcactgcctgcttgtactttcactccagaagaagcccaagtgaactttacaggatatgttgatgaacacgcatcaccccgaattccaatcgatgacctcacgatggttgtgtatgatcctgataaaggttcgaatggcacattcctgttatcattgggaggaccagatgctgaagccttttcagtgagccccgaaagagctgtgggttctgcttccgtgcaggtgttggtccgggtcagcgccttggtcgattacgagcggcaaactgccatggctgtccaggtggtagccaccgatagcgtttcgcaaaacttctctgtggctatggttacgattcacctgagagatatcaatgatcatcggcccacatttccacagagtctgtacgtgctaacagtgccagagcactcagccaccgggtccgtggtaactgacagcattcatgcaactgaccccgatacgggggcctggggccagattacttactctctgctcccggggaacggagcagatcttttccaagtggatcctgtgtccggcaccgtgactgtgcgaaacggtgagctactagacagagaatcccaggccgtctattatctcacacttcaggcaacagatggaggcaacctcagcagctctactacactccagattcatctgcttgacatcaatgacaatgccccagtcgtctccggcagctacaatatcttcgtgcaggaggaggagggcaacgtatccgtaacaatccaggcccacgataatgacgaaccgggcaccaataatagccgcttgcttttcaacctccttcctggtccgtattcccacaatttctcacttgaccctgatactggcctacttcgtaacctcggtccgttggatagggaagccatcgacccagccttggagggcaggatcgttctcaccgtcctggtgagtgactgcggtgaacccgtgcttggaacaaaagtgaacgtgacaatcactgttgaagacattaatgataatctgcccatctttaaccagtctagctacaacttcaccgtaaaggaggaagaccccggcgtgctcgtgggcgtggtgaaagcctgggacgccgaccaaaccgaggccaataatcgcatctcctttagtttgtcaggatctggcgctaactatttcatgattcgaggattagtactcggcgcgggatgggctgagggatacctccgcctaccaccagacgttagtctagactatgagacgcagcctgtgtttaacttaacggtcagcgcggagaacccggatcctcagggcggtgagacgatcgtcgacgtgtgtgttaacgtcaaagacgttaacgataacccgccgaccctagacgtggcatctctgcggggaatcagggtggcagagaacgggagccaacacggccaggttgccgtcgtggtcgccagcgatgtggacacctcggctcagttagagatccaacttgtgaacatcctgtgcaccaaggccggtgtagacgttggcagtctatgttggggttggttcagcgtagcagcaaacggatccgtctacattaaccaaagcaaggccattgattatgaggcatgcgatctggttaccttggtggttcgggcatgtgatctcgccactgatccgggctttcaggcgtacagcaacaatggctccctccttatcacaatcgaagacgtgaacgataatgccccgtactttctgcctgagaacaaaaccttcgttatcattcctgaacttgtcctccctaaccgggaggtggcctccgtcagggctagggatgatgacagcgggaacaatggcgtcatcttgttcagtatccttcgcgtggattttattagcaaggacggcgcaacaatcccctttcagggagttttctctatttttacttcttcggaagcagacgtgttcgccgggtccatccagcccgtgacttccctcgattccacgctgcaaggtacgtatcaagtaacagtccaggcccgtgacagaccctctctgggcccgtttctcgaagccaccacaactttaaatctgtttactgtggaccaatcgtatcgcagccggttacagtttagcactccaaaagaagaggtgggtgcaaatagacaggcgatcaacgctgcactcactcaggccaccagaaccactgtgtacatcgtagatatacaggacattgactctgctgcaagggccaggccacatagttatttggatgcatatttcgtgttccccaatggttctgcactcactctagatgagctaagtgtcatgattcgtaatgatcaggattcactcacccagttgctgcagctcggcctggttgtgctggggtcacaggagagccaggagtctgatctctccaaacagctgattagcgtcatcatcggccttggagtcgcattgctactggtgcttgtgattatgactatggcgttcgtatgtgtgcgcaagtcctacaacagaaaactgcaggcaatgaaagctgctaaggaagcgcgcaaaacagccgcaggcgtcatgccaagcgcgcctgccatcccgggcacaaacatgtataataccgaaagagcgaaccccatgttgaacctcccgaataaagatctaggcctcgagtatttgtccccctcgaatgatctggactccgtaagcgtgaactccctagacgacaatagtgtggatgtggacaaaaacagccaggaaattaaggagcatcggcctccacatacacctccagagcccgatcctgagcccctgtctgttgtgctgctggggagacaagctggagcaagtggacagctagaaggcccttcatacacaaatgccggattggataccactgacctgtag

SEQ ID NO: 67741 - DNA, 3933 bp, Artificial Sequence
  derived and/or modified sequence
atggcccagctgtggctgagctgcttcctgctgcccgccctggtggtcagcgttgccgctaacgtcgccccaaagttcctggccaacatgacatccgtgatcctgcccgaagatttgcctgtaggcgcccaggcattctggctggtcgccgaggaccaggacaacgaccccctcacttacggaatgtccggccccaatgcctacttttttgctgtaacccctaaaaccggagaggtgaagctggcttccgctctagattacgagactctgtataccttcaaggtgaccatttctgtgagcgacccctatattcaggtgcagagggaaatgctcgtgatagtcgaagatcggaatgataacgcccctgtgttccagaacacagcgttctccactagtattaatgaaacccttccagtggggtccgtggtgtttagcgtactggccgtggataaggatatgggaagcgccgggatggtggtgtactctatagagaaagtgattccttccaccggggacagtgaacatctatttagaatccttgcgaatggctctatcgtgctcaatgggagtctttcatataataataagtccgccttctaccagttggagttgaaagcttgcgatctgggcggaatgtaccacaacactttcaccattcagtgcagcttacctgtttttctgtctatttcagttgtggaccagcccgacctggacccacagtttgtgcgggagttttactctgcctctgtggctgaagatgcagccaaaggcaccagtgtactgaccgtcgaagcggtggatggggataagggtatcaatgaccccgtcatctacagtatctcttacagcacacgtccgggttggttcgatattggggctgatggggtaattcgggtgaacggttcgcttgaccgcgagcagctgttagaggccgacgaagaggtacagctccaggtgacagcaacagaaactcacttgaatatatatggccaggaggcgaaggtttctatctgggtaaccgtgagagttatggacgtgaacgatcacaaacctgagttttacaactgtagcttacctgcttgcactttcaccccagaggaggcccaggtaaacttcacgggttatgttgatgagcatgcgagcccgagaatccctatagacgacctgacaatggtggtgtatgatccagataaggggtcgaatggcactttcctgctgtccctgggagggcccgatgcagaggcatttagtgtgtcgcctgagcgggctgtgggatcggcctctgtacaggtgctagtgcgggtgtccgctctggttgattacgaacggcagacagccatggcagtccaagtcgttgccactgatagcgtgtctcagaacttctctgtggccatggttacaattcacctgcgagatataaacgaccataggcctacatttccgcaaagcctctacgttctgactgtaccagaacatagcgctaccggctctgtggtgacggacagcattcacgctacagatcctgacactggagcatggggacagattacttactcactgcttcccggaaatggcgccgatttatttcaggtcgaccccgtgtctggcaccgtgactgtgcgaaatggcgagctcctcgatagagaaagccaggctgtgtactacctcacgctccaagccaccgatggcggtaacctgtcgtcgagcaccacgctgcagatccatctgctagatattaatgacaacgccccagttgtctcagggtcctacaatattttcgtacaagaagaggaagggaatgtgtcggtcactattcaggcacacgataatgacgagcctggcaccaataactctcgcctgttgtttaatctcctgccaggtccctattctcacaatttttctctcgacccagacacaggccttctgcgaaacctcggacctctggatagagaggctatcgatcctgccttggagggacgcatcgtgttgaccgtgctggtctcagattgtggagaacccgttctaggaacgaaagtgaacgtaacaatcacggtggaggacattaatgacaaccttccaatttttaaccagtcgagctacaacttcactgttaaagaagaggaccctggagtcctggtcggggtcgttaaggcttgggacgccgatcagactgaggccaataatcggatatcatttagtttgtccggatccggagctaactatttcatgataagaggcctggtactcggggctggctgggctgaaggctatctacgcctcccccctgatgtctcactcgattacgagactcagccagtgttcaatctgaccgtgagcgcagaaaaccccgaccctcagggcggcgagactattgtagacgtttgcgttaatgtgaaagatgtgaacgacaatcccccgacgctcgacgtggccagcctccgcggaattagggtggcagagaatgggtcccagcacggacaggtcgcggttgtggttgcttctgacgttgatacttcagcacagctggaaatccaactggttaacatcctgtgcacaaaagccggggttgatgtcgggagcttgtgttggggatggttttccgtcgccgctaatgggtccgtgtacatcaaccaatcaaaagccatcgactacgaagcttgcgatttggtcacactggtggttagagcttgcgacttggctactgatcctggcttccaggcttactcaaataacgggtccctgcttattacaatcgaggacgttaatgataatgcaccctactttctgcctgagaataagacttttgttatcatccctgagctggtgctgcctaacagagaagtcgctagcgtgagagcaagggatgatgatagtggcaataatggcgtcattctcttcagtattctgagagtcgacttcatttctaaagacggcgccaccatcccatttcaaggtgtgttcagtattttcacatcctccgaagcggatgtttttgcaggcagcattcagccagtcacttctcttgactctaccctgcaagggacctaccaggtgactgtgcaggccagagatcgaccaagcctgggtccgttcctggaagccactacaaccctgaacctgtttactgttgatcagtcttaccgatccagactgcagttctccaccccgaaggaagaggtcggagcgaatagacaggctatcaatgccgcactcacgcaggcaacacggacgacagtttatattgtggatattcaggatatagacagtgctgcccgggccagaccacattcttatttggacgcatactttgtctttcccaatggctcagccctcacactggatgaactttctgtcatgattaggaacgaccaggatagcctcacccagttactccagctgggtctggtggtcctgggatcccaggaaagccaggagtccgacctctctaagcaattaatttccgttatcatcggcctaggcgtagctcttctgctcgtgctggtgataatgacaatggcattcgtttgcgtgaggaagagttataaccgaaaattacaggctatgaaggccgcaaaggaagcgcggaagacagcagcgggggtgatgccctcagcccccgctatcccaggaacaaacatgtataatactgaacgggccaatcccatgctgaaccttccgaacaaagatctgggcctggagtacctgtccccatccaatgacctagatagcgtgtctgtgaatagcctggatgacaattctgtggacgttgacaaaaattcacaagagattaaggaacacaggcctccccacactcctcccgagcctgatcctgaacccttgagtgtggtccttctgggtagacaagcgggcgcatccgggcagctggagggtccttcttatactaacgccgggctggataccacagacctctag

SEQ ID NO: 67742 - DNA, 3933 bp, Artificial Sequence
  derived and/or modified sequence
atggcccagctgtggctgagctgcttcctgctgcccgccctggtggttagcgttgcagctaatgtggcaccaaagtttctcgcaaacatgacctccgtgatcctgccagaagaccttcccgtgggagcccaggcgttttggctggtagctgaagaccaggataacgatccactgacttacggtatgagtggaccaaatgcgtatttcttcgcggtaaccccaaagactggagaggtaaaactcgcgtccgccctggactatgagaccctttatactttcaaagtgacaatttccgtttccgacccctatatccaagtgcagagagaaatgctggtcatagtcgaagaccgaaacgacaacgcccccgtgtttcagaacactgctttctccacctctattaatgagaccctgccagtgggttctgttgtcttctctgtcctggcagtagacaaagatatggggagcgcaggcatggtggtctactcaatcgagaaagtgattccttcgacaggggatagcgaacacctttttaggatactggcgaatggctccattgtgctgaacggatccctgtcctataataacaagtcagctttttatcagcttgaattgaaggcatgcgacctgggaggcatgtaccacaacacctttaccattcaatgctcactaccagtgttcctttcaatatccgttgtcgatcaacccgatttagacccacagtttgtgcgtgagttctattctgccagcgtcgctgaggatgcagcgaaggggacatccgtgttgactgttgaagccgtggatggcgataaagggataaatgacccagtaatttactcaattagttacagcacaaggccaggatggtttgatatcggcgcagatggagtcattcgtgtgaatggctctctagaccgggaacagctgctcgaagccgatgaagaagtgcagttgcaggtgactgctacagaaactcaccttaacatctacggccaagaggccaaggtgtctatttgggtgactgtaagagtgatggacgtcaatgaccacaaacctgaattttacaactgtagtctgcccgcatgtactttcaccccggaggaggcccaggttaatttcacaggatatgtcgacgagcatgcatcccccagaatacccatcgatgacttaaccatggtggtatacgaccccgataaggggagtaatgggacatttctgttatcgttaggtgggcccgatgccgaggcattctctgtatccccagaacgagctgtagggagcgcatcggttcaggttttggttcgagtgagtgcactggtggattacgaacgacagacggccatggctgtgcaagtggtcgcaaccgattctgttagtcagaactttagcgtggctatggtcacgatccacctgcgagacatcaacgatcaccgccctacatttccccagtcactgtacgtcttgacggtgcccgaacattccgctaccggctcagtcgtgaccgactccattcacgcgaccgaccccgatacgggcgcatgggggcagatcacctactcccttcttccgggtaatggagcagacctatttcaagtggatcctgtcagtggcaccgtgacggtcagaaatggtgagctcctggaccgcgagtctcaagccgtgtattacctgacccttcaggctacagatggtggaaacctgtcttctagtactacactgcaaatacacctcctggatatcaacgacaatgcacctgtggtgtctggctcttataatatttttgtgcaagaggaggagggtaacgtgtcagtgactattcaagcccacgacaacgacgagccaggaaccaacaattctcgcctgctctttaacctactcccgggtccatactcgcataatttcagtttggacccggacactggtctcctcaggaacctgggccccctagatcgagaggccattgatcctgccttagagggccgaatagtactgacagtgcttgtgagtgactgcggcgagcccgttctgggtacaaaagtcaacgttaccatcacagtcgaggatattaacgataacctgcccattttcaatcaaagcagttataacttcaccgttaaggaagaagacccaggcgtcctagtgggtgtagtcaaggcgtgggacgcggaccaaacagaagctaacaatcggatttcattcagccttagtggtagtggggccaactattttatgattagaggactggtgcttggagccggctgggccgagggctacctgaggctcccgcctgatgtgagcttggactacgagactcagccagtattcaacttaacagtgtcggctgagaacccagatccacaggggggcgagacaattgtggacgtctgtgtcaatgtcaaggatgtgaatgacaaccctccaacgcttgacgtggcctcgctccgcggcataagggtggcagagaacgggagtcagcacggccaggttgctgtggtagtggcttctgacgtggacacgtctgcgcaactcgaaatccagctcgttaatattctctgtacgaaggcaggggtagacgtaggatcactgtgctgggggtggttcagcgtggcagccaatggttctgtctatataaaccagagtaaagctatcgactatgaggcgtgcgacctggtcaccctggtggttcgtgcttgtgatctggccacagaccccggtttccaggcttactctaacaatggtagcctcttgatcaccatcgaggatgtgaacgacaatgccccctactttctgcccgagaataagacattcgtgattattcccgagctcgtgctccccaatcgtgaggtggctagcgtccgggcgcgggatgacgatagcgggaataacggggttattctattcagcatcctccgggtggacttcattagcaaggacggggcgacaatcccatttcagggcgtcttcagcatctttacaagcagcgaagcggacgttttcgcaggcagcatccagccggtgacctctctcgactctacattgcagggtacatatcaggtaacagtgcaggctcgggaccggccaagccttggaccatttctagaggctacaaccacgttaaacctgttcaccgtagaccaatcgtataggagccgcctccagttttcaacccccaaggaagaggtgggggccaaccggcaagctatcaatgcagcattgactcaggcaacaaggaccaccgtgtacattgtagacatccaggatatcgacagtgccgctcgagcacgcccccattcttatctggacgcatactttgtctttccaaacggatccgctctgacactggacgagctatccgtgatgatcaggaacgatcaagatagtttaactcagctgctccagctgggcctggtagtactggggagccaggagtcccaggagtcagacctctccaaacagttgatctcagtcataattggactcggtgtcgctctgctcctagtgctggttatcatgaccatggcgttcgtctgtgtgagaaaaagctataaccgcaagctacaggccatgaaagccgctaaggaagcaagaaagacagctgctggcgtaatgcccagcgcaccggccattccgggtactaacatgtacaacaccgagagggcaaaccccatgctgaaccttcccaataaggatctaggactggaatacctcagccccagcaatgacctggactcagtgtccgtgaattccttagacgataactctgtggacgttgataaaaacagtcaggagatcaaagagcatcggccccctcatactccaccagagccagatcccgagcccctttctgtcgtgctgttggggagacaagccggagccagtgggcaactggagggccctagctacacaaacgctggcctggataccactgatctttag

SEQ ID NO: 67743 - DNA, 3933 bp, Artificial Sequence
  derived and/or modified sequence
atggctcaactatggctctcctgctttcttctcccagcccttgtggtcagcgtcgccgctaacgtagccccaaaattcttagctaacatgacctccgttatcctcccagaagacctgcctgtgggtgcacaggcattctggctggttgccgaagatcaggataacgatcctctgacctatggtatgagcgggcctaacgcctatttcttcgccgtcactccgaaaactggcgaggttaagctggcttccgccctcgattacgagacattatacactttcaaagtgaccatatcggtatcagacccctatatccaagtgcagagggagatgctcgtgatcgtggaggaccgcaatgacaacgcgccagtctttcagaatactgctttcagcacctctattaacgagacactgcccgttggctctgttgtcttctctgtcctggccgtggacaaagacatgggctccgctggaatggttgtgtacagtattgaaaaagtcattccgagcaccggcgactccgagcacctgtttaggattctcgccaatggatccatcgtattgaacggaagtctgtcttacaacaacaagtccgccttttaccagctggagcttaaagcctgcgatctcggcggaatgtaccataacactttcactatacagtgttctctgcccgttttcctctctatctctgtagttgaccaacctgatctcgatccccaatttgtgcgcgagttctactccgctagcgtggctgaagatgctgctaaggggacctccgtactaactgtagaagcagttgatggcgacaaaggtattaatgaccccgtcatatatagcatcagctattcgaccaggcccggatggttcgacataggcgcagacggcgtgattagagttaatggctcgctggatagggagcagctcctcgaggcagacgaagaggtccaattacaggttactgctacagagacacacttgaacatctacggccaagaggcaaaagtgtccatctgggtaacagtgcgagtgatggacgtcaatgatcataagcccgagttttataactgctctttacctgcttgcacgttcacccctgaagaagcacaggtcaattttaccgggtatgtggacgagcatgccagcccgcgtatccctatcgacgacctgaccatggttgtgtacgatcctgacaaaggcagtaacggcactttcctactatctttgggaggcccagatgccgaagctttctcagtaagccccgagagagcagtaggatctgcttccgttcaggtgctggtccgtgtctcagcacttgtagattacgaacgacagaccgccatggccgttcaggtggtggccacggacagcgttagtcagaattttagtgtggccatggtgaccatccatctgcgggacattaatgaccatcgcccaacattccctcaatccctttatgtgctgaccgtgccagagcatagcgctactggttccgtcgtcaccgatagcatccatgccaccgatcccgacactggcgcatgggggcagattacatactctctgctgcccggaaatggagcagatctgttccaggtggatccggtcagtggaaccgtgacagtccgaaacggcgagctgctcgatagggagagtcaggccgtctactacctgaccctccaggctactgatggcggaaacctaagtagtagcacaacactgcaaatccacctactggatatcaatgataatgcaccagtcgtaagcggctcctacaacatattcgtgcaggaagaagaaggaaatgtttcagtcacaattcaagcccacgacaatgatgagccaggtactaacaattcccgtctgcttttcaatctattaccgggaccctacagccataacttcagcctcgatcccgatactgggctcttaagaaatttgggcccactggatagggaagcaattgatcctgcccttgagggccgaatcgttctcactgttctggtctcagactgcggggagcctgttctgggcacaaaagtgaacgtcactatcaccgtggaagatatcaacgacaacctccccatctttaatcagagttcatataacttcactgttaaggaggaggaccctggcgtgctggtcggagtagtaaaagcctgggacgccgaccaaaccgaagctaataatcggatcagcttcagcctctcggggtccggcgcaaactacttcatgataagggggctggtcctgggggcagggtgggcagagggctatctcaggttgcctcccgatgtgagcctggactacgagactcaacccgtgtttaacttgacagtgtctgccgaaaatccagacccccagggcggagagaccatagtggatgtgtgcgtgaatgttaaggacgttaacgataacccaccaacccttgatgtggcctcgctcaggggtatcagggtggcagagaacggcagtcagcacggccaggtcgccgttgtcgtcgcttccgatgtggacaccagtgcgcagctggagatacaactggtaaatatactctgcaccaaggctggcgtggatgtcggtagtttgtgttggggctggtttagcgtagccgcaaacggcagtgtgtacataaatcaatccaaagcaatagattacgaggcatgcgacctcgtcacactagtggtgcgagcctgcgatttagccaccgatcccggattccaggcctactctaacaacggctcactgttgatcacaatcgaagacgtaaacgacaatgccccttatttcttgccagagaataaaaccttcgtgataattccagaactggtgcttcccaatagagaagtggcttcagtgagagccagggatgacgactcaggcaataatggagtcatactgtttagcatcctacgggtggactttatttccaaggacggagctacaatcccttttcaaggggtcttttcaatcttcaccagttcagaagctgatgtgtttgcagggtcaatccaacctgtcaccagccttgattctactttacaaggtacttatcaggttactgtgcaggcacgcgatagaccgagtttgggtcctttcttagaggccactacgaccctgaatctttttacagtggatcagtcatacaggagccgattacagttttcgacgcctaaggaggaggtcggagccaatagacaggctattaacgctgcactcactcaagcaactaggaccacagtttacattgtagatattcaagatatagattctgcagccagagcgaggccacactcctatctggacgcgtattttgtgttcccaaacgggtctgcactgaccctggacgaacttagcgtcatgattagaaacgatcaggattccctaacacagctccttcagcttggcctggtggtgctgggctcgcaggaaagtcaggagtccgacctgtccaaacagttgatatcagtgataattggactgggagtcgccctgttgttggtgttggtgatcatgacaatggcattcgtttgtgtgaggaagagttataatcggaagcttcaggccatgaaggccgcaaaagaggcgcgtaaaacagccgcaggagtcatgccctcggccccagcaatccccggaaccaatatgtacaataccgaacgggctaatcctatgttgaatttaccaaacaaagacctggggttggaatacttgtccccatccaacgaccttgatagtgtgtctgtgaactccctggatgacaatagtgtggacgtggataaaaattcgcaagaaatcaaggaacacaggccccctcacactccccctgagcccgacccggagcccttgagtgtcgtgttgctcggtcgacaggccggtgccagtggacagctagaaggcccttcatacacaaatgccggattagacacgaccgacctctag

SEQ ID NO: 67744 - DNA, 3933 bp, Artificial Sequence
  derived and/or modified sequence
atggcccagctgtggctgagctgcttcttgctgcccgctcttgttgtaagcgtcgctgcaaatgtggcccctaagttcctggctaatatgacctcagtcattctcccagaggatctccccgtcggggctcaggccttttggctggtcgccgaggaccaggacaatgatcccctgacatatggtatgtcaggccctaatgcatatttcttcgctgtgacgccaaagactggcgaggtgaagctggcttctgctcttgactatgagaccctctatactttcaaggtgacaattagtgtttccgacccttacatccaggtccagcgagagatgctcgtgatcgtagaagaccgtaacgacaacgcaccagtgttccaaaacacagctttctccacgagtatcaatgagactctccccgtgggaagtgtggtcttctccgtgttggcagtggataaggacatggggagtgcagggatggtagtgtattccattgagaaggttatcccctctacaggggactcagaacacctgtttaggatcctagctaatgggtctatcgtcctcaacgggagcctgtcttacaataacaagagcgcattttaccagcttgaactcaaagcatgtgatctaggtggcatgtaccacaatacatttaccattcagtgtagcttacctgtctttctcagtataagtgtcgtggaccaaccggatttggatccgcagttcgttagagaattctatagcgccagcgtagcggaggatgctgccaaagggacatcagtgttgacagtcgaggccgtggatggagataagggtattaatgatcccgtaatctattcaatctcctactccacccggccagggtggttcgatatcggcgcagacggggtgatccgtgtgaatggaagccttgatcgtgagcagctcctcgaagcagatgaggaggtccagctgcaagtaacagccacagagacccaccttaacatctacggccaggaggccaaagtttcaatctgggtaactgtgagagtgatggacgtgaacgaccacaagccggagttttacaattgcagcctcccagcctgtacatttacaccggaagaagcgcaggtgaactttacaggatacgtggatgagcatgccagccctcgcatccccattgacgatctaaccatggtggtctacgatcccgataaggggagtaatggtacattcctgttaagcctcggcggacctgatgccgaggcattctcggtgtctcccgagcgggctgtgggctctgcctccgtccaggtgctggtaagagtgagtgccctggtggactacgagcgtcagactgcaatggctgtacaggtcgtggccacagactctgtaagtcaaaatttttccgtggctatggtcacaattcatctgagagacataaatgaccataggcctacctttccccagtcattgtacgtcctaaccgtaccagagcattcggcaaccggctcagtggtgaccgacagtatccacgcaactgatccagacacaggcgcatgggggcagatcacctatagcttactgcctgggaatggggcagatctctttcaggttgaccccgtgtctgggacagtcactgttaggaacggcgagctgttggacagggagagccaagctgtttactacctgacgctgcaggccaccgacgggggtaacttgtcttcctccaccaccttgcagatccacctgctggacattaatgacaatgctccagtcgtgtcagggagttataatatcttcgtgcaggaggaggaaggaaatgtaagtgtgactattcaagcacatgacaatgacgaacccggaacaaacaattcccgcctgttgtttaatttactgcctggcccttatagccacaactttagcctggacccagacactggactgcttcggaatctcggacctttggatcgggaagctatcgacccagctctggagggtaggatcgtgctaacggttctggtatccgattgtggggagcctgtgcttggcacaaaggtaaatgtgacaattacagtcgaggacatcaacgacaaccttcccatcttcaaccagtcttcatataacttcacagtcaaggaggaggaccccggtgttctggtgggcgtcgttaaggcctgggacgccgaccagacagaggctaacaatagaatcagttttagtctgtctggaagcggagctaactattttatgattcggggactggtcctgggtgcaggctgggctgaagggtacctgcgcctgcctcctgacgttagtctggattacgagacacagccagtatttaatctaactgtgagtgctgagaatcccgatccacaggggggagagactatcgtggatgtctgtgtgaacgtgaaagacgtgaacgacaatcccccaaccctggatgttgcgtcactccgaggcatacgtgttgcagagaatggctctcagcacggccaagtggcggtggtggtcgcctctgacgtcgacaccagcgctcagttggaaatccaattagtgaacatcctctgcactaaggccggagtagatgtcggctctctttgctggggttggttctccgtggccgctaatgggagtgtctacattaaccagagcaaagctatcgattacgaggcctgtgatctggtgactcttgtggtgcgcgcttgcgacttggctaccgatcctggcttccaggcctactcaaacaacgggtctcttctcataacaatcgaggatgttaatgacaatgcaccttatttcctgccagaaaacaagactttcgtgattattcccgagctcgtcctgccaaaccgggaagtggcgtccgtgcgcgctagagatgacgactccgggaataacggtgtgatattgtttagtatcctccgggtggatttcatatcgaaagatggtgcaacaattccatttcaaggcgtcttcagtatttttacctcgagcgaagccgacgtgtttgcgggtagcattcaacctgtcaccagccttgactcaacgctacagggaacataccaagtgactgtgcaggcaagggaccgcccatcactgggcccattcctggaagcaacaacaaccctgaacctattcacagtagatcagtcttatagatcccggctccagttttctactccaaaggaggaggtgggcgctaacaggcaggctatcaatgcagccctgacccaggctacgcgtactactgtgtacatcgtcgatatacaggacatagatagcgccgcacgcgcaagacctcattcgtatctagatgcatactttgtgtttcctaatgggtcagccttgaccctcgatgaactcagcgtcatgatcaggaacgatcaggatagcctgacccagctgctgcaactgggcttggtagtgttaggatctcaagaatctcaggaatctgatctgtctaaacagctgattagcgtgataattgggctcggcgtggcattgttgctggtgctggtgataatgacaatggcgtttgtttgtgtccgaaagtcgtacaacaggaaactgcaggccatgaaagcagctaaagaggcacggaaaaccgctgctggggttatgccctcagccccagctatacccggtacgaacatgtataacacagaaagagccaacccgatgttgaacctgcccaacaaagacttgggtttggagtatttgtccccatctaacgatctggacagcgtttctgtgaatagtctcgacgacaattcagtggacgttgataaaaatagtcaggagattaaagagcaccggcctccccatacgcctcctgagccggatcccgaacctttatcggtggtgctgctggggagacaagctggggcttcagggcagttggaggggccatcatatacaaacgcgggactcgatacgacggatctctag

SEQ ID NO: 67745 - DNA, 3933 bp, Artificial Sequence
  derived and/or modified sequence
atggcacagctgtggctgagttgctttcttcttcctgcccttgtggtgtcagtggcagctaatgtagcacctaaatttctcgccaatatgacaagtgtcattctgccggaggacctgcccgtgggagctcaggccttctggctggtggctgaggaccaggataacgaccctctgacatacggtatgtctggcccaaacgcatatttcttcgccgtgactcctaagactggagaggtaaagctggcaagtgcactcgactacgaaactctttacacctttaaagtgacaattagcgtgagcgacccctacattcaagtgcaaagagagatgcttgtgatcgtggaggatcgcaatgataacgcccctgttttccagaacactgcatttagcaccagcatcaatgaaaccctgcccgtagggagtgttgtgttcagcgtgttggccgtcgacaaggacatggggagtgcaggaatggtggtctatagcatcgaaaaggtcattccctcaaccggggactccgagcacctgttcaggattctcgcgaacggaagcattgtcctgaacggttccctctcctataataataagagtgctttttatcaactggaactaaaggcatgtgacctggggggaatgtaccacaacaccttcacaatccagtgtagtcttcccgtgttccttagcatctccgtcgtggatcaacctgatttggaccctcagttcgtgcgagagttttattcagcaagcgtggccgaagacgctgccaagggcaccagtgtcctgacagttgaagcagtcgatggcgacaaggggattaacgaccccgtcatttatagcatctcctacagtacacggcctggatggtttgatatcggggctgacggagtgatccgggtcaacgggtccctggatagggagcagttattggaggcggatgaagaagtccagcttcaggtaactgctacagagactcatctgaacatttacgggcaggaagctaaggttagcatctgggtaaccgttcgggtgatggacgtgaatgaccacaagccggaattttataactgttctctgccagcctgtactttcacccccgaagaagctcaggtgaacttcacaggctatgtagacgagcatgcttctcccaggattcccattgacgatctgaccatggttgtgtacgacccagataaaggttcaaacggaacttttcttctgagtctgggtggccctgacgctgaagctttctccgtgtctccagagcgggcagttggtagtgcaagcgtgcaggtattggttcgcgtgtcggccctggtcgactacgagcgccaaacagcaatggcggtccaagtagtcgccaccgacagcgtgtcccaaaactttagcgttgcaatggtgaccatacatcttagagacatcaatgaccatagacctacctttccccagagtctttatgtgttaacagttcctgaacattcagccactggctctgtggtgaccgactcgatccacgctacagacccagacaccggggcatggggtcagatcacatactctttgctgcccggaaacggtgccgatctgttccaggtggacccagtgtctggcactgtgaccgtgcggaatggagaactgttagatagggagtcccaggcagtgtactacctaaccttgcaggcaaccgatggcggtaacctcagttccagcacaaccctccagattcatctgttagatattaacgacaacgccccagtcgtatcgggctcctataacatttttgtgcaggaagaagaaggcaacgtttccgttacaatccaggcacatgacaatgatgagccaggcacgaacaatagcagactgctctttaaccttctcccgggaccctactctcataatttctcactggaccccgacactgggttacttcgtaatctcggacctctcgacagagaagctatagatcccgctcttgagggcagaatagtacttacagtgctagttagcgattgcggggagcccgtcctgggcacaaaagtgaatgtcactatcacagtcgaagatatcaacgataatctgcccattttcaaccagagtagctataactttacggtaaaggaggaggacccaggggtattagtgggcgtggtgaaggcatgggatgccgaccagacagaggctaataaccgtatctctttctccttaagtgggtctggagccaattattttatgataagaggacttgtgttgggggcagggtgggccgaggggtacctgcggctccccccagacgtgtctctggattacgagacacagcctgtgttcaatctgaccgtctccgcggaaaatcccgacccccagggaggcgaaactatagtggacgtgtgcgttaacgtgaaggatgtgaatgacaatcctcctactctggatgtggcctccctccgcggtatacgcgtggctgagaacggtagccaacatggccaggtcgcagtggttgtcgctagtgacgtggataccagcgctcaactcgaaatccaactggttaatattttgtgcactaaagcgggagtcgacgtaggtagtctgtgttggggctggtttagcgtggccgctaatggctctgtatacataaatcaatctaaagccatcgattatgaagcctgtgacctggtcactctggtcgtgagggcatgcgacctcgctaccgatcctggattccaggcttactcaaacaacggctcactcctgataacgatcgaagacgtgaacgacaatgccccttattttctcccggaaaacaaaacttttgtaattataccggagttagttctgcctaatcgcgaagtggcctcagtgcgggctcgtgatgatgactccggcaataatggcgtgattctttttagtattctgcgcgtagacttcatctcaaaggacggagcgacaatcccctttcaaggggtgtttagtattttcaccagcagcgaggccgatgtgttcgccggaagcatccagcccgtgacttccctggactccacactacagggaacttatcaggtgactgtacaggcccgagaccgacccagccttggcccttttctggaggccacaacaactctcaacctttttactgtggaccagagctacagaagccgtctgcagtttagcacacccaaggaggaggtgggggctaaccgtcaggcgattaatgccgctttaacacaggcaactcgtaccacggtttacattgtcgatatccaggacatagactctgctgctagggcacggccacacagctatcttgatgcttatttcgttttcccaaacgggagcgccctgactctggatgaactgtccgtcatgatcaggaatgatcaggactccctgacacagctcctccagctgggcctggtggtgctaggctcgcaagaatcacaggagtcagatctcagcaagcagctcataagcgtgataataggtctcggggttgctttgctcttagtccttgtcattatgaccatggcttttgtgtgcgtccgaaagtcctataatagaaagcttcaggcaatgaaagccgcaaaggaagcgcgaaaaaccgcagcaggtgttatgccttcagcacccgcaatccctgggacaaacatgtacaatacagagcgagcgaacccaatgctcaatctgccaaacaaagacctgggcctcgaatatctatcgccgagtaacgatctggactcagtgtcggtgaattccctggacgataatagtgttgacgtggacaaaaactcccaagagatcaaggaacacaggccacctcacaccccccctgagccggatcctgaaccactgtcagttgttctgctgggcagacaggcaggggcttctgggcaactggaggggcctagctatacaaacgctgggctagataccaccgacctgtag

SEQ ID NO: 67746 - DNA, 4068 bp, Artificial Sequence
  derived and/or modified sequence
gcctccgtggcgaaggggacacaggtccctgcggatgtgatggcccagctatggctgtcctgcttcctccttcctgccctcgtggtgtctgtggcagccaacgtggccccgaagttcctagccaacatgacgtcagtgatcctgcctgaggacctgcctgtgggtgcccaggccttctggttggtagcggaagaccaggacaatgaccctctgacctatgggatgagcggccccaatgcctacttcttcgctgtcactccgaaaactggggaagtgaagctggccagcgctctggactacgagacactctacacattcaaagtcaccatctccgtgagcgacccctacatccaggtgcagagggagatgctggtgattgtggaagatagaaacgacaacgcacccgttttccagaacaccgctttctccaccagcatcaacgagaccctgcccgtgggcagtgtggtgttctccgtgctggccgtggataaagacatggggtctgcaggcatggtcgtgtactccatagagaaggtcatccctagcactggggacagcgagcatctcttccggatcctggccaatggctccatagtcctcaatggcagcctcagctacaacaacaagagcgctttctaccagctggagctgaaggcctgtgacttgggcggcatgtaccacaacaccttcaccatccagtgctccctgcctgtcttcctgtccatctccgtggtggaccagcctgaccttgacccccagtttgtcagggagttttactcggcctctgtggctgaggatgcagccaagggaacctcggtgctgacggtggaggctgtggatggcgacaaaggcatcaatgaccctgtgatctacagcatctcctactccacgcggcccggctggtttgacatcggggcagatggggtgatcagggtcaacggctccctggaccgtgagcagctgctggaggcggatgaggaggtgcagctgcaggtcacggccaccgagacacacctcaacatctacgggcaggaggccaaggtgagcatctgggtgacagtgagagtgatggacgtcaatgaccacaaacctgagttttacaactgcagcctcccagcctgcaccttcacccccgaagaggcccaagtgaacttcactggctacgtggacgagcatgcctccccccgcatccccatcgatgacctcaccatggtggtctacgacccggacaagggcagcaatggcaccttcctgttgtcgctggggggccccgatgcagaagccttcagcgtctccccggagcgggcagtgggctcagcctccgttcaggtgctggtgagagtatccgcgctggtggactacgagaggcagacggcgatggcggtgcaggttgtggccacagactccgtcagccagaacttctccgtcgccatggtgaccatccaccttagagacattaatgaccacaggcccacgtttccccagagcttgtacgtcctcacggtgccagagcacagcgccaccggctctgtggtcaccgacagcatccacgccacggacccagacacgggcgcgtggggccaaattacctacagcctgctcccaggaaatggggcagacctcttccaagtggatcccgtctcagggacggtgacggtgaggaacggtgagctgctggaccgggagagccaggccgtgtactacctgacgctgcaggccacagacggcgggaacctgtcctcctccaccacactgcagatccacctgctggacatcaacgacaatgcacccgtggttagcggctcctacaacatcttcgtccaggaggaggagggcaatgtctccgtgaccatccaggcccacgacaatgatgagccgggcaccaacaacagccgtctgctcttcaacctgctgcctggcccctacagccacaacttctccttggaccctgacacagggctcctcagaaacctggggcccctggacagagaggccatcgaccccgccctggagggccgcattgtgctgacagtgcttgtgtctgactgcggcgagcctgtcctcggcaccaaagtcaatgtcaccatcactgtggaggacatcaatgataacctgcccatcttcaatcagtccagctacaactttacggtgaaggaggaggatccaggagtgctagtgggcgtggtgaaggcctgggacgcggaccagacggaagccaacaaccgcatcagcttcagcctgtcggggagtggtgccaactacttcatgatccgaggcttggtgctgggggctgggtgggctgagggctacctccggctgcccccggacgtgagcctggattacgagacacagcccgtcttcaacttgacagtgagtgctgagaacccagacccccaggggggtgagaccatagtagacgtctgcgtgaatgtgaaagacgtgaacgacaatccccccaccctggatgtagcctcactccggggcatccgtgtggctgagaatggctcacagcacggccaggtggctgtggtggttgcctcggatgtggacaccagtgcccagctggagatacagcttgtgaacattctctgcaccaaggccggggtcgatgtgggcagcctatgctggggctggttctcagtggcggccaacggctctgtgtacatcaaccagagcaaagccatcgactacgaggcctgtgacctggtcacgctggttgtgcgggcctgtgacctagccacggaccccggcttccaggcctacagcaacaatggaagcctcctcattaccattgaggacgtgaatgacaatgcaccctattttctgcctgagaataagacttttgtgatcatccctgaactcgtgctgcccaaccgggaggtggcttctgtccgggccagagacgatgattcagggaacaatggcgtcatcctgttctccatcctccgagtagacttcatctctaaggacggggccaccatccctttccagggtgtcttctcgatcttcacctcctccgaggccgacgtgttcgctgggagcattcagccggtgaccagcctcgactccactctccaaggcacctaccaagtgacagtccaggccagggacagaccttccttgggtcctttcctggaagccaccaccaccctgaatctcttcaccgtggaccagagttaccgctcgcggctgcagttctccacaccgaaggaggaggtgggcgccaacagacaggcgattaatgcggctcttacccaggcaaccaggactacagtatacattgtggacattcaggacatagattctgcagctcgggcccgacctcactcctacctcgatgcctactttgtcttccccaatgggtcagccctgacccttgatgagctgagtgtgatgatccggaatgatcaggactcgctgacgcagctgctgcagctggggctggtggtgctgggctcccaggagagccaggagtcagacctgtcgaaacagctcatcagtgtcatcataggattgggagtggctttgctgctggtccttgtgatcatgaccatggccttcgtgtgtgtgcggaagagctacaaccggaagcttcaagctatgaaggctgccaaggaggccaggaagacagcagcaggggtgatgccctcagcccctgccatcccagggactaacatgtacaacactgagcgagccaaccccatgctgaacctccccaacaaagacctgggcttggagtacctctctccctccaatgacctggactctgtcagcgtcaactccctggacgacaactctgtggatgtggacaagaacagtcaggaaatcaaggagcacaggccaccacacacaccaccagagccagatccagagcccctgagcgtggtcctgttaggacggcaggcaggcgcaagtggacagctggaggggccatcctacaccaacgctggcctggacaccacggacctgtgacaggggcccccactcttctggaccccttgaagaggccctaccacaccctaactgcacctgtctccctggagatgaaaatatatgacgctgccctgc

SEQ ID NO: 67747 - DNA, 4005 bp, Artificial Sequence
  derived and/or modified sequence
tccaggagccattccctgacctcttcccttaggtccctgcggatgtgatggcccagctatggctgtcctgcttcctccttcctgccctcgtggtgtctgtggcagccaacgtggccccgaagttcctagccaacatgacgtcagtgatcctgcctgaggacctgcctgtgggtgcccaggccttctggttggtagcggaagaccaggacaatgaccctctgacctatgggatgagcggccccaatgcctacttcttcgctgtcactccgaaaactggggaagtgaagctggccagcgctctggactacgagacactctacacattcaaagtcaccatctccgtgagcgacccctacatccaggtgcagagggagatgctggtgattgtggaagatagaaacgacaacgcacccgttttccagaacaccgctttctccaccagcatcaacgagaccctgcccgtgggcagtgtggtgttctccgtgctggccgtggataaagacatggggtctgcaggcatggtcgtgtactccatagagaaggtcatccctagcactggggacagcgagcatctcttccggatcctggccaatggctccatagtcctcaatggcagcctcagctacaacaacaagagcgctttctaccagctggagctgaaggcctgtgacttgggcggcatgtaccacaacaccttcaccatccagtgctccctgcctgtcttcctgtccatctccgtggtggaccagcctgaccttgacccccagtttgtcagggagttttactcggcctctgtggctgaggatgcagccaagggaacctcggtgctgacggtggaggctgtggatggcgacaaaggcatcaatgaccctgtgatctacagcatctcctactccacgcggcccggctggtttgacatcggggcagatggggtgatcagggtcaacggctccctggaccgtgagcagctgctggaggcggatgaggaggtgcagctgcaggtcacggccaccgagacacacctcaacatctacgggcaggaggccaaggtgagcatctgggtgacagtgagagtgatggacgtcaatgaccacaaacctgagttttacaactgcagcctcccagcctgcaccttcacccccgaagaggcccaagtgaacttcactggctacgtggacgagcatgcctccccccgcatccccatcgatgacctcaccatggtggtctacgacccggacaagggcagcaatggcaccttcctgttgtcgctggggggccccgatgcagaagccttcagcgtctccccggagcgggcagtgggctcagcctccgttcaggtgctggtgagagtatccgcgctggtggactacgagaggcagacggcgatggcggtgcaggttgtggccacagactccgtcagccagaacttctccgtcgccatggtgaccatccaccttagagacattaatgaccacaggcccacgtttccccagagcttgtacgtcctcacggtgccagagcacagcgccaccggctctgtggtcaccgacagcatccacgccacggacccagacacgggcgcgtggggccaaattacctacagcctgctcccaggaaatggggcagacctcttccaagtggatcccgtctcagggacggtgacggtgaggaacggtgagctgctggaccgggagagccaggccgtgtactacctgacgctgcaggccacagacggcgggaacctgtcctcctccaccacactgcagatccacctgctggacatcaacgacaatgcacccgtggttagcggctcctacaacatcttcgtccaggaggaggagggcaatgtctccgtgaccatccaggcccacgacaatgatgagccgggcaccaacaacagccgtctgctcttcaacctgctgcctggcccctacagccacaacttctccttggaccctgacacagggctcctcagaaacctggggcccctggacagagaggccatcgaccccgccctggagggccgcattgtgctgacagtgcttgtgtctgactgcggcgagcctgtcctcggcaccaaagtcaatgtcaccatcactgtggaggacatcaatgataacctgcccatcttcaatcagtccagctacaactttacggtgaaggaggaggatccaggagtgctagtgggcgtggtgaaggcctgggacgcggaccagacggaagccaacaaccgcatcagcttcagcctgtcggggagtggtgccaactacttcatgatccgaggcttggtgctgggggctgggtgggctgagggctacctccggctgcccccggacgtgagcctggattacgagacacagcccgtcttcaacttgacagtgagtgctgagaacccagacccccaggggggtgagaccatagtagacgtctgcgtgaatgtgaaagacgtgaacgacaatccccccaccctggatgtagcctcactccggggcatccgtgtggctgagaatggctcacagcacggccaggtggctgtggtggttgcctcggatgtggacaccagtgcccagctggagatacagcttgtgaacattctctgcaccaaggccggggtcgatgtgggcagcctatgctggggctggttctcagtggcggccaacggctctgtgtacatcaaccagagcaaagccatcgactacgaggcctgtgacctggtcacgctggttgtgcgggcctgtgacctagccacggaccccggcttccaggcctacagcaacaatggaagcctcctcattaccattgaggacgtgaatgacaatgcaccctattttctgcctgagaataagacttttgtgatcatccctgaactcgtgctgcccaaccgggaggtggcttctgtccgggccagagacgatgattcagggaacaatggcgtcatcctgttctccatcctccgagtagacttcatctctaaggacggggccaccatccctttccagggtgtcttctcgatcttcacctcctccgaggccgacgtgttcgctgggagcattcagccggtgaccagcctcgactccactctccaaggcacctaccaagtgacagtccaggccagggacagaccttccttgggtcctttcctggaagccaccaccaccctgaatctcttcaccgtggaccagagttaccgctcgcggctgcagttctccacaccgaaggaggaggtgggcgccaacagacaggcgattaatgcggctcttacccaggcaaccaggactacagtatacattgtggacattcaggacatagattctgcagctcgggcccgacctcactcctacctcgatgcctactttgtcttccccaatgggtcagccctgacccttgatgagctgagtgtgatgatccggaatgatcaggactcgctgacgcagctgctgcagctggggctggtggtgctgggctcccaggagagccaggagtcagacctgtcgaaacagctcatcagtgtcatcataggattgggagtggctttgctgctggtccttgtgatcatgaccatggccttcgtgtgtgtgcggaagagctacaaccggaagcttcaagctatgaaggctgccaaggaggccaggaagacagcagcaggggtgatgccctcagcccctgccatcccagggactaacatgtacaacactgagcgagccaaccccatgctgaacctccccaacaaagacctgggcttggagtacctctctccctccaatgacctggactctgtcagcgtcaactccctggacgacaactctgtggatgtggacaagaacagtcaggaaatcaaggagcacaggccaccacacacaccaccagagccagatccagagcccctgagcgtggtcctgttaggacggcaggcaggcgcaagtggacagctggaggggccatcctacaccaacgctggcctggacaccacggacctgtgacaggggcccccactcttctggaccc

SEQ ID NO: 67748 - DNA, 4509 bp, Artificial Sequence
  derived and/or modified sequence
aaagggggcaggaaccgtcacattgttcagtgatgaaaaccgagggctgcaggagtgcggaccctggaagatcgaggaagacaagtctacccgaatcccccactgtccctccatcttactcgtcctccttccctcacttcccagcccccggcaccagctcgactcgagcttagtggctttcaggcaacggaagctgtgtgaccttgggcaagacacggactctctccggaccccgcagcgttccgacatccagaatgcagtccctgcggatgtgatggcccagctatggctgtcctgcttcctccttcctgccctcgtggtgtctgtggcagccaacgtggccccgaagttcctagccaacatgacgtcagtgatcctgcctgaggacctgcctgtgggtgcccaggccttctggttggtagcggaagaccaggacaatgaccctctgacctatgggatgagcggccccaatgcctacttcttcgctgtcactccgaaaactggggaagtgaagctggccagcgctctggactacgagacactctacacattcaaagtcaccatctccgtgagcgacccctacatccaggtgcagagggagatgctggtgattgtggaagatagaaacgacaacgcacccgttttccagaacaccgctttctccaccagcatcaacgagaccctgcccgtgggcagtgtggtgttctccgtgctggccgtggataaagacatggggtctgcaggcatggtcgtgtactccatagagaaggtcatccctagcactggggacagcgagcatctcttccggatcctggccaatggctccatagtcctcaatggcagcctcagctacaacaacaagagcgctttctaccagctggagctgaaggcctgtgacttgggcggcatgtaccacaacaccttcaccatccagtgctccctgcctgtcttcctgtccatctccgtggtggaccagcctgaccttgacccccagtttgtcagggagttttactcggcctctgtggctgaggatgcagccaagggaacctcggtgctgacggtggaggctgtggatggcgacaaaggcatcaatgaccctgtgatctacagcatctcctactccacgcggcccggctggtttgacatcggggcagatggggtgatcagggtcaacggctccctggaccgtgagcagctgctggaggcggatgaggaggtgcagctgcaggtcacggccaccgagacacacctcaacatctacgggcaggaggccaaggtgagcatctgggtgacagtgagagtgatggacgtcaatgaccacaaacctgagttttacaactgcagcctcccagcctgcaccttcacccccgaagaggcccaagtgaacttcactggctacgtggacgagcatgcctccccccgcatccccatcgatgacctcaccatggtggtctacgacccggacaagggcagcaatggcaccttcctgttgtcgctggggggccccgatgcagaagccttcagcgtctccccggagcgggcagtgggctcagcctccgttcaggtgctggtgagagtatccgcgctggtggactacgagaggcagacggcgatggcggtgcaggttgtggccacagactccgtcagccagaacttctccgtcgccatggtgaccatccaccttagagacattaatgaccacaggcccacgtttccccagagcttgtacgtcctcacggtgccagagcacagcgccaccggctctgtggtcaccgacagcatccacgccacggacccagacacgggcgcgtggggccaaattacctacagcctgctcccaggaaatggggcagacctcttccaagtggatcccgtctcagggacggtgacggtgaggaacggtgagctgctggaccgggagagccaggccgtgtactacctgacgctgcaggccacagacggcgggaacctgtcctcctccaccacactgcagatccacctgctggacatcaacgacaatgcacccgtggttagcggctcctacaacatcttcgtccaggaggaggagggcaatgtctccgtgaccatccaggcccacgacaatgatgagccgggcaccaacaacagccgtctgctcttcaacctgctgcctggcccctacagccacaacttctccttggaccctgacacagggctcctcagaaacctggggcccctggacagagaggccatcgaccccgccctggagggccgcattgtgctgacagtgcttgtgtctgactgcggcgagcctgtcctcggcaccaaagtcaatgtcaccatcactgtggaggacatcaatgataacctgcccatcttcaatcagtccagctacaactttacggtgaaggaggaggatccaggagtgctagtgggcgtggtgaaggcctgggacgcggaccagacggaagccaacaaccgcatcagcttcagcctgtcggggagtggtgccaactacttcatgatccgaggcttggtgctgggggctgggtgggctgagggctacctccggctgcccccggacgtgagcctggattacgagacacagcccgtcttcaacttgacagtgagtgctgagaacccagacccccaggggggtgagaccatagtagacgtctgcgtgaatgtgaaagacgtgaacgacaatccccccaccctggatgtagcctcactccggggcatccgtgtggctgagaatggctcacagcacggccaggtggctgtggtggttgcctcggatgtggacaccagtgcccagctggagatacagcttgtgaacattctctgcaccaaggccggggtcgatgtgggcagcctatgctggggctggttctcagtggcggccaacggctctgtgtacatcaaccagagcaaagccatcgactacgaggcctgtgacctggtcacgctggttgtgcgggcctgtgacctagccacggaccccggcttccaggcctacagcaacaatggaagcctcctcattaccattgaggacgtgaatgacaatgcaccctattttctgcctgagaataagacttttgtgatcatccctgaactcgtgctgcccaaccgggaggtggcttctgtccgggccagagacgatgattcagggaacaatggcgtcatcctgttctccatcctccgagtagacttcatctctaaggacggggccaccatccctttccagggtgtcttctcgatcttcacctcctccgaggccgacgtgttcgctgggagcattcagccggtgaccagcctcgactccactctccaaggcacctaccaagtgacagtccaggccagggacagaccttccttgggtcctttcctggaagccaccaccaccctgaatctcttcaccgtggaccagagttaccgctcgcggctgcagttctccacaccgaaggaggaggtgggcgccaacagacaggcgattaatgcggctcttacccaggcaaccaggactacagtatacattgtggacattcaggacatagattctgcagctcgggcccgacctcactcctacctcgatgcctactttgtcttccccaatgggtcagccctgacccttgatgagctgagtgtgatgatccggaatgatcaggactcgctgacgcagctgctgcagctggggctggtggtgctgggctcccaggagagccaggagtcagacctgtcgaaacagctcatcagtgtcatcataggattgggagtggctttgctgctggtccttgtgatcatgaccatggccttcgtgtgtgtgcggaagagctacaaccggaagcttcaagctatgaaggctgccaaggaggccaggaagacagcagcaggggtgatgccctcagcccctgccatcccagggactaacatgtacaacactgagcgagccaaccccatgctgaacctccccaacaaagacctgggcttggagtacctctctccctccaatgacctggactctgtcagcgtcaactccctggacgacaactctgtggatgtggacaagaacagtcaggaaatcaaggagcacaggccaccacacacaccaccagagccagatccagagcccctgagcgtggtcctgttaggacggcaggcaggcgcaagtggacagctggaggggccatcctacaccaacgctggcctggacaccacggacctgtgacaggggcccccactcttctggaccccttgaagaggccctaccacaccctaactgcacctgtctccctggagatgaaaatatatgacgctgccctgcctcctgcttttggccaatcacggcagacaggggttggggaaatattttattaccaatgtatactgtgacagtttgtagccaaaaactgcggctggaggggtggggacgggacactgagtggtcacaagggacttgggctcacagcacaggggggacaaggggctggagagggtggcctttaaaagacaactgtggttatagaatga

SEQ ID NO: 67749 - protein, 432 aa, Artificial Sequence
  derived and/or modified sequence
MPHSPLISIPHVWCHPEEEERMHDELLQAVSKGPVMFRDVSIDFSQEEWECLDADQMNLYKEVMLENFSNLVSVGLSNSKPAVISLLEQGKEPWMVDRELTRGLCSDLESMCETKILSLKKRHFSQVIITREDMSTFIQPTFLIPPQKTMSEEKPWECKICGKTFNQNSQFIQHQRIHFGEKHYESKEYGKSFSRGSLVTRHQRIHTGKKPYECKECGKAFSCSSYFSQHQRIHTGEKPYECKECGKAFKYCSNLNDHQRIHTGEKPYECKVCGKAFTKSSQLFLHLRIHTGEKPYECKECGKAFTQHSRLIQHQRMHTGEKPYECKQCGKAFNSASTLTNHHRIHAGEKLYECEECRKAFIQSSELIQHQRIHTDEKPYECNECGKAFNKGSNLTRHQRIHTGEKPYDCKECGKAFGSRSDLIRHEGIHTG

SEQ ID NO: 67750 - DNA, 1805 bp, Artificial Sequence
  derived and/or modified sequence
agaacacatctgctttcctgtgtgagggtgaggcttgggccgggttccccgggaggctcatctccattgcgcagcgctacggcgacccgcaactccgaggctcggctggatgttgagagttgagggagcagccgtttcgggtgggcccaggcgaggagctgacaggaatcggcgtgggtcccgctctggactacatttcccagagggcctggtggcctgccacttttctcgcaggaattcgaacgtttcgtcactcctggcgggacccttagatctgggaggaaacctctctgaggtctggtcagattccaaccctggacagcagtgaacacaacctttcccctgagccactggaattggacagaatgccccattctcctctgatctccattcctcatgtgtggtgtcacccagaagaggaggaaagaatgcatgatgaacttctacaagcagtatccaaggggccggtgatgttcagggatgtttccatagacttctctcaagaggaatgggaatgcctggacgctgatcagatgaatttatacaaagaagtgatgttggagaatttcagcaacctggtttcagtgggactttccaattctaagccagctgtgatctccttattggaacaaggaaaagagccctggatggttgatagagagctgactagaggcctgtgttcagatctggaatcaatgtgtgagaccaaaatattatctctaaagaagagacatttcagtcaagtaataattacccgtgaagacatgtctacttttattcagcccacatttcttattccacctcaaaaaactatgagtgaagagaaaccatgggaatgtaagatatgtggaaagacctttaatcaaaactcacaatttatccaacatcagagaattcattttggtgaaaaacactatgaatctaaggagtatgggaagtcctttagtcgtggctcactcgttactcgacatcagaggattcacactggtaaaaaaccctatgaatgtaaggaatgtggcaaggcttttagttgtagttcatatttttctcaacatcagaggattcacactggtgagaaaccctatgaatgtaaggaatgtggaaaagcctttaagtattgctcaaaccttaatgatcatcagagaattcacactggtgagaaaccctatgaatgtaaagtatgtggaaaagcctttactaaaagttcacaactttttctacatctgagaattcatactggtgagaaaccttatgaatgtaaagaatgtgggaaagcctttactcaacactcaaggcttattcagcatcagagaatgcatactggtgagaaaccttatgaatgtaagcagtgtgggaaggcctttaatagtgcctcaacacttactaaccatcacagaattcatgctggtgagaagctctatgaatgtgaagaatgtagaaaggcctttattcagagctcagaacttattcaacatcagagaatccatacagatgaaaaaccatatgaatgtaatgaatgtgggaaggcctttaataaaggctcaaatcttactcgacatcagagaattcacactggtgagaaaccctatgactgtaaggaatgtggaaaggcttttggtagtcgctctgacctcattcgccatgagggaattcatactggttgaatgacagtaaagtaagaccattttgttaacctttataataatttttttaaaacaggtaaggagaacaaattaggatacatattatcaaaggttctcctatgtattcgtttttaaacgatacgataacaaagtaccaagtac

SEQ ID NO: 67751 - DNA, 4977 bp, Artificial Sequence
  derived and/or modified sequence
agatctgggaggtgagatattttggtccccaggagaactggctcaggtctgcaagttcccatccgggatgactggaaagggcttaggtgaggataccgaagaccgatggggagctggcgccttgggcccctgcgggcggagcggcctgaaaggtggaggttgtgtttgggaggccgaggcaggaggatcacgaggtcaagagatcgagaccatcctggccaacatggaaacctctctgaggtctggtcagattccaaccctggacagcagtgaacacaacctttcccctgagccactggaattggacagaatgccccattctcctctgatctccattcctcatgtgtggtgtcacccagaagaggaggaaagaatgcatgatgaacttctacaagcagtatccaaggggccggtgatgttcagggatgtttccatagacttctctcaagaggaatgggaatgcctggacgctgatcagatgaatttatacaaagaagtgatgttggagaatttcagcaacctggtttcagtgggactttccaattctaagccagctgtgatctccttattggaacaaggaaaagagccctggatggttgatagagagctgactagaggcctgtgttcagatctggaatcaatgtgtgagaccaaaatattatctctaaagaagagacatttcagtcaagtaataattacccgtgaagacatgtctacttttattcagcccacatttcttattccacctcaaaaaactatgagtgaagagaaaccatgggaatgtaagatatgtggaaagacctttaatcaaaactcacaatttatccaacatcagagaattcattttggtgaaaaacactatgaatctaaggagtatgggaagtcctttagtcgtggctcactcgttactcgacatcagaggattcacactggtaaaaaaccctatgaatgtaaggaatgtggcaaggcttttagttgtagttcatatttttctcaacatcagaggattcacactggtgagaaaccctatgaatgtaaggaatgtggaaaagcctttaagtattgctcaaaccttaatgatcatcagagaattcacactggtgagaaaccctatgaatgtaaagtatgtggaaaagcctttactaaaagttcacaactttttctacatctgagaattcatactggtgagaaaccttatgaatgtaaagaatgtgggaaagcctttactcaacactcaaggcttattcagcatcagagaatgcatactggtgagaaaccttatgaatgtaagcagtgtgggaaggcctttaatagtgcctcaacacttactaaccatcacagaattcatgctggtgagaagctctatgaatgtgaagaatgtagaaaggcctttattcagagctcagaacttattcaacatcagagaatccatacagatgaaaaaccatatgaatgtaatgaatgtgggaaggcctttaataaaggctcaaatcttactcgacatcagagaattcacactggtgagaaaccctatgactgtaaggaatgtggaaaggcttttggtagtcgctctgacctcattcgccatgagggaattcatactggttgaatgacagtaaagtaagaccattttgttaacctttataataatttttttaaaacaggtaaggagaacaaattaggatacatattatcaaaggttctcctatgtattcgtttttaaacgatacgataacaaagtaccaagtaccaaaaccttggtggcttaaaacaagagaaatttattctctcatagtttagagcctggaaatctaaactcaagggtgctgatcgttttggttccttctgaggactctgaggatctgttctatgcctttttcctaacctctgttaacagctggcagtccttggcattccatggcttttacatacaccattccaatctctgcctccatcttcacattgcattctcgctgtgtatctctgtgtatgtcttttatttggacaccagtcaggttagattggggttacctggtgacctcatcttaacttgattatatctgccaagaccctgtttccaagtaaggtcacatttaccggtaccaggggttaggacttcagcatatctttttaggggatacagttcaacccataataccctgttagaatgattttgtctaatatatttgtaatttccttttatacataagttgttagtcaaatttattttattttattttattttgagacagagtctcgctctgttgcccaggctggagtgcagtggtgtgatctcagctcactgcaacctccagctcctgagttcaagcgattcttgtgcctcagcctctcaagtagttgggattacaggcatgcgccaccatgcccggctaattttttttttttttttttttgtatttttagtagcgacggggtttcaccatgttggccaggctggtcttgaactcctgacttcaagtgatctgcccgcctcagcctcccaaagtgctgggattacagacgtgagccaccgtgatggccaaaacagactttataccaacaaaaattaaaaaggacaaagaaggtcatttataatgataaaggataaattcaacaagaagataaaacaatcctaaatatgtatgcacccaacactgcaacacccagatccataacacagatactactagacctaagaaaagagatagacagcaatacaacaatagcaggggacttcaccactccattgacagcactagacagatcactgggacagaaatcaacaaagaaactctggacttaaattggactctacaccaaatggacccaacagacatctgaagaacattctacccaacaaccacagaatatatactcttctcttctgtgcatggaacattctcaaaaataggtcatatactggaccacaaagcaagtatcaataaattttaaaaaaacaaaatcatatctaacatcttctctgaccatagtggaataaaactagatatcaataccaagaggaactctcaaaacagatacatggaatttaaacagcttgctcctgaatgatttttggatcaatgatgaaactaaggtggaaatttaaaattttttgaaataaatgaaaatagagacaaaacacatgaaaacatctgagatacagcaaaagcagtgctaagagaggattttatagcattaaatgcctacaccaaaaagatagaaaaatctcaaatgaatagcctaacgtcacatctcaaggaactaggaaaaaacaaaacaaactcaacccaaagctggcagaagaaaagcaataacaaatatcagagcaggcaaaaatgagactgagaacaaaggaatgcaaaagatcaataaaagaaaaagttggttctttgcaaagataaaactgacagaccactagctagattaaccaagaaaaaaagaagattcaaataaatacaatcagaaatgataaggtgatattataactgataacacagacatataaaatatcagcagaaactatatgcacatattagaaaacctagaggaagtggataaattcctagaaacacataaccttccaagattgaaccagggagaaataggaatcctcaacagactactgagtattgaaattgaatcagtaatagaaaaaaatcttgcaaaaacaaaaagcccaggaccagacagattcacagctgaattctactagacatgcaaggaagaactagtaacagcactattgaaactattccaaaaattataggagggaatcctccctaactcattctacaaagccagtatcatcctgatactgaagccaggcaaggataaaacacacaaaaaaactacaagccaatatccctgatgaaaatagacacaaaaatcttcagcaaaatactagcaaaccaaatcaaacagtacataaaaaagatagtaacagcacagtcaagtggattttattcctggggtgtaaggatggctcaacatatgcaactcaatacatgattcatcacatacacagaattaaaaataagccaggcactcacacctgtaatcccagcactttgcaaggccaaggcgggcagatcacatgatgtcaagagtttgagaccagtctggctgacatggcgaaaccctgtctctactaaaaatagaaaaattggctgggcatggtggcaggcactgtagtcccagctacttgggaggctgaggcaggagaattacttgaacctgagaagcggaggttgcagtgagctgagatagtgccattgcactccagcctgggcaacagagcaaattgcttgaatgtgggaggtggaggttgcagtgagccgagattatgccattgcactccagccgggggagcaacaaagccagactccatctcaaaaaaaaaccaaaaaaaatcctatttagtacaaggtacattatttaggtaatgagtccattaaaagccaacactttccccactacactatatgtgtatgtaacacaactgcccttgtaacttcctaaacctataattaagaaacaataaaaggcaaattaagaatgcttttttaaaaggtgggggcattatgctaataagttactgtggatttcagagtgcagagtagaaagatcacaagaatttagtgtggtaggtgggaacagaaaatgggtgtataaattttattgacgtgggagtactggatattgtagagacagatatcatcagggcaaggagattaaagatttttgcattgacggtttgacactatattgtggtaataacactgtatgtgttgggagatagaacaggaaacatcttccctggaatatgtatactattaaatgttttatcaaacttttgatcaaacaagacagcacaatttataatttcatttctatttctatgttatgagaaactgatcatttattcaaatgtttaacaggcatgttcatgttactataaactcttctgtttcaccatca

SEQ ID NO: 67752 - DNA, 1065 bp, Artificial Sequence
  derived and/or modified sequence
atgggcttcgagcccctggcctacagaggcctggagaccggcagcagagaggtggtgagccacgtgatcaagcagggcaagatcgtgttcgtgctgagcagcgccctgaacccctggaacaaggagatgggcgaccacctggtgaagcacggcgacggcgtgaaggacatcgccttcgaggtggaggactgcgactacatcgtgcagaaggccagagagagaggcgccaagatcatgagagagccctgggtggagcaggacaagttcggcaaggtgaagttcgccgtgctgcagacctacggcgacaccacccacaccctggtggagaagatgaactacatcggccagttcctgcccggctacgaggcccccgccttcatggaccccctgctgcccaagctgcccaagtgcagcctggagatgatcgaccacatcgtgggcaaccagcccgaccaggagatggtgagcgccagcgagtggtacctgaagaacctgcagttccacagattctggagcgtggacgacacccaggtgcacaccgagtacagcagcctgagaagcatcgtggtggccaactacgaggagagcatcaagatgcccatcaacgagcccgcccccggcaagaagaagagccagatccaggagtacgtggactacaacggcggcgccggcgtgcagcacatcgccctgaagaccgaggacatcatcaccgccatcagacacctgagagagagaggcctggagttcctgagcgtgcccagcacctactacaagcagctgagagagaagctgaagaccgccaagatcaaggtgaaggagaacatcgacgccctggaggagctgaagatcctggtggactacgacgagaagggctacctgctgcagatcttcaccaagcccgtgcaggacagacccaccctgttcctggaggtgatccagagacacaaccaccagggcttcggcgccggcaacttcaacagcctgttcaaggccttcgaggaggagcagaacctgagaggcaacctgaccaacatggagaccaacggcgtggtgcccggcatgtag

SEQ ID NO: 67753 - DNA, 1065 bp, Artificial Sequence
  derived and/or modified sequence
atgggcttcgaaccactggcttatcgggggctggagactggctccagagaggtcgtctcacacgtgatcaaacagggtaagatcgtatttgtgctttctagcgcactcaacccgtggaataaggagatgggtgatcatttggtcaagcacggagatggagtgaaggatattgccttcgaggttgaggattgcgactacatcgtacagaaagccagagaaaggggcgcaaagattatgcgcgagccttgggtggagcaagacaaatttggtaaggttaaattcgccgtgctgcagacttacggagatacaacgcacaccttggtggagaagatgaattacattggtcagtttctccctggatatgaagctccagcattcatggatcctcttctcccaaaactccccaaatgttctttggagatgattgatcacatagtgggcaatcagcccgaccaggagatggtgtccgcgtccgaatggtacctgaagaatctgcagtttcatcggttttggagtgtggacgacacccaggtgcataccgagtactcttctctgagatctattgttgtagctaactacgaggaatccattaagatgcccatcaacgagccagcccccggaaagaaaaagtctcaaatccaagaatacgttgactacaatgggggggcaggcgtgcaacacatcgcccttaaaactgaggatatcattacggcgatccggcatcttagggagagagggctagaatttctcagcgtgccaagcacatactataagcagctcagggaaaaactgaaaactgccaagatcaaagtcaaagaaaacatcgatgctttggaggagctcaaaatactggtcgactacgatgaaaaagggtatctgctccagatatttactaaacctgtgcaggatcggcctaccctctttttggaggttattcaacgtcacaaccatcaaggctttggagccgggaattttaactccctgtttaaagcctttgaggaagagcaaaacctcagaggcaacttaaccaacatggaaacaaatggcgtggtgcccggaatgtag

SEQ ID NO: 67754 - DNA, 1065 bp, Artificial Sequence
  derived and/or modified sequence
atgggctttgagcccctggcctaccggggcctggagaccggcagccgggaggtggtgagccacgtgatcaagcagggcaagatcgtgtttgtgctgagcagcgccctgaacccctggaacaaggagatgggagaccacctggtgaagcatggagatggagtgaaggacatcgcctttgaggtggaggactgtgactacatcgtgcagaaggcccgggagcggggggccaagatcatgagggagccctgggtggagcaggacaagtttgggaaggtgaagtttgctgtgctgcagacctacggggacaccacccacaccctggtggagaagatgaactacatcggccagttcctgcccggctatgaggccccagccttcatggaccccctgctgcccaagctgcccaagtgcagcctggagatgattgaccacatcgtgggcaaccagcctgaccaggagatggtgtctgccagcgagtggtacctgaagaacctgcagttccaccgcttctggagcgtggatgacacccaggtgcacacagagtacagcagcctgcggagcatcgtggtggccaactatgaggagagcatcaagatgcccatcaatgagcccgcccctgggaagaagaagagccagatccaggagtatgtggactacaacggcggggccggcgtgcagcacatcgccctgaagacagaggacatcatcacagccatccgccacctgcgggagcggggcctggagttcctgtctgtgcccagcacctactacaagcagctgcgggagaagctgaagacagccaagatcaaggtgaaggaaaatattgatgccctggaggagctgaagatcctggtggactatgatgagaagggctacctgctgcagatcttcaccaagcctgtgcaggaccggcccaccctcttcctggaggtgatccagaggcacaaccaccagggctttggagctggcaacttcaacagcctcttcaaggcctttgaggaggagcagaacctgcggggcaacctgaccaacatggagaccaacggggtggtgcccggcatgtag

SEQ ID NO: 67755 - DNA, 1065 bp, Artificial Sequence
  derived and/or modified sequence
atgggcttcgagcccctggcctaccggggcctggagaccggcagcagggaagtggtgtcccatgtgattaaacagggaaagatcgtttttgtgctgtcctcagctctgaatccgtggaataaggagatgggagatcacttggtcaagcacggcgacggcgttaaagatatagcttttgaggtcgaggactgtgattacatagtacagaaagcccgagaaaggggggcaaagattatgcgggagccttgggtggaacaggataaattcggcaaagtaaaatttgccgtgttacagacatacggagacacaactcacacattggtcgagaaaatgaactacatcggtcaatttctgcctggctacgaggcccctgcgttcatggacccgctactgcctaagctgccaaaatgttctttggagatgatcgaccatatcgtcggtaaccagcccgaccaagagatggtatccgcaagcgaatggtatctcaaaaacctacaattccaccgcttttggtctgtggatgacacccaggtacataccgagtattcgtcactccggagcatcgtggtggccaactatgaggaaagcataaagatgccaatcaacgaacccgcccccggcaagaagaagtctcaaatccaagaatatgtcgactacaacgggggagccggcgtccagcatatcgcgcttaagactgaggatatcatcaccgccattcgccacctgagagaacgtgggttggagttcctttctgtgcctagtacatactacaaacaactgcgcgaaaagctgaaaacggccaaaattaaagttaaggagaatatcgatgcactggaggaactgaaaattctggtggactacgacgagaaggggtaccttctccagatctttactaaaccagttcaagaccgcccaaccctgttcctggaggttatccagagacataaccaccagggatttggtgccggcaactttaattctctgtttaaggctttcgaagaagaacagaatctccgaggtaaccttaccaatatggaaaccaatggagtggtgcccggcatgtag

SEQ ID NO: 67756 - DNA, 1065 bp, Artificial Sequence
  derived and/or modified sequence
atggggtttgaacccctcgcgtacaggggactggaaacaggcagtcgcgaggttgtgtcacatgtgataaagcagggtaagattgtattcgtgttaagcagcgctctcaatccctggaacaaagagatgggggatcatctggtaaagcatggtgatggtgtcaaagatattgcttttgaggtggaagactgcgactatatcgtgcaaaaagccagggagcgcggtgcaaaaataatgcgcgagccatgggttgaacaggacaaattcggaaaggtgaagtttgctgtccttcaaacctacggcgacacgacccataccctcgtagagaaaatgaactacatcggacagttcctgccagggtacgaggctccagcctttatggatcctctcctcccaaaacttcccaagtgttcgctcgagatgatcgaccatattgtggggaaccaaccagaccaggagatggtgtccgcgtccgaatggtacctgaaaaatctacagttccaccgtttttggagcgtggacgatacgcaggtccatactgagtattccagcctcagaagtatcgtagttgcaaattacgaagaatccatcaaaatgcctattaatgaacctgccccaggcaaaaaaaagagccagattcaggagtatgtggactacaatgggggagcaggggtccagcatattgcgctcaaaacagaagatataattacggccatccggcacctgcgcgagcggggactggaattcctaagcgtgccttccacctattacaagcagctgcgagaaaaacttaagactgcgaagattaaggtgaaggagaacatcgacgcattggaagaactcaagatcctagtcgactatgacgagaaaggctatcttctgcagatttttactaagccagttcaagacagaccaacactgtttttggaggtaatccagcgtcataatcatcagggattcggcgcagggaatttcaattccctgttcaaggcttttgaggaggaacaaaatctgcggggaaacttgaccaacatggaaaccaacggcgtggtgcccggtatgtag

SEQ ID NO: 67757 - protein, 319 aa, Artificial Sequence
  derived and/or modified sequence
MTPGIPIFSPMMPYGTGLTPQPIQNTNSLSILEEQQRQQQQQQQQQQQQQQQQQQQQQQQQQQQQQQQQQQQQQQAVAAAAVQQSTSQQATQGTSGQAPQLFHSQTLTTAPLPGTTPLYPSPMTPMTPITPATPASESSGIVPQLQNIVSTVNLGCKLDLKTIALRARNAEYNPKRFAAVIMRIREPRTTALIFSSGKMVCTGAKSEEQSRLAARKYARVVQKLGFPAKFLDFKIQNMVGSCDVKFPIRLEGLVLTHQQFSSYEPELFPGLIYRMIKPRIVLLIFVSGKVVLTGAKVRAEIYEAFENIYPILKGFRKTT

SEQ ID NO: 67758 - DNA, 951 bp, Artificial Sequence
  derived and/or modified sequence
atggaccagaacaacagcctgcccccctacgcccagggcctggccagcccccagggcgccatgacccccggcatccccatcttcagccccatgatgccctacggcaccggcctgaccccccagcccatccagaacaccaacagcctgagcatcctggaggagcagcagagacagcagcagcagcagcagcagcagcagcagcagcagcagcagcaggccgtggccgccgccgccgtgcagcagagcaccagccagcaggccacccagggcaccagcggccaggccccccagctgttccacagccagaccctgaccaccgcccccctgcccggcaccacccccctgtaccccagccccatgacccccatgacccccatcacccccgccacccccgccagcgagagcagcggcatcgtgccccagctgcagaacatcgtgagcaccgtgaacctgggctgcaagctggacctgaagaccatcgccctgagagccagaaacgccgagtacaaccccaagagattcgccgccgtgatcatgagaatcagagagcccagaaccaccgccctgatcttcagcagcggcaagatggtgtgcaccggcgccaagagcgaggagcagagcagactggccgccagaaagtacgccagagtggtgcagaagctgggcttccccgccaagttcctggacttcaagatccagaacatggtgggcagctgcgacgtgaagttccccatcagactggagggcctggtgctgacccaccagcagttcagcagctacgagcccgagctgttccccggcctgatctacagaatgatcaagcccagaatcgtgctgctgatcttcgtgagcggcaaggtggtgctgaccggcgccaaggtgagagccgagatctacgaggccttcgagaacatctaccccatcctgaagggcttcagaaagaccacctag

SEQ ID NO: 67759 - DNA, 306 bp, Artificial Sequence
  derived and/or modified sequence
tgagaggagcagagcagactggccgccagaaagtacgccagagtggtgcagaagctgggcttccccgccaagttcctggacttcaagatccagaacatggtgggcagctgcgacgtgaagttccccatcagctacgagcccgagctgttccccggcctgatctacagaatgatcaagcccagaatcgtgctgctgatcttcgtgagcggcaaggtggtgctgaccggcgccaaggtgagagccgagatctacgaggccttcgagaacatctaccccatcctgaagggcttcagaaagaccacctag

SEQ ID NO: 67760 - DNA, 960 bp, Artificial Sequence
  derived and/or modified sequence
atgacccccggcatccccatcttcagccccatgatgccctacggcaccggcctgaccccccagcccatccagaacaccaacagcctgagcatcctggaggagcagcagagacagcagcagcagcagcagcagcagcagcagcagcagcagcagcagcagcagcagcagcagcagcagcagcagcagcagcagcagcagcagcagcagcagcagcagcagcagcaggccgtggccgccgccgccgtgcagcagagcaccagccagcaggccacccagggcaccagcggccaggccccccagctgttccacagccagaccctgaccaccgcccccctgcccggcaccacccccctgtaccccagccccatgacccccatgacccccatcacccccgccacccccgccagcgagagcagcggcatcgtgccccagctgcagaacatcgtgagcaccgtgaacctgggctgcaagctggacctgaagaccatcgccctgagagccagaaacgccgagtacaaccccaagagattcgccgccgtgatcatgagaatcagagagcccagaaccaccgccctgatcttcagcagcggcaagatggtgtgcaccggcgccaagagcgaggagcagagcagactggccgccagaaagtacgccagagtggtgcagaagctgggcttccccgccaagttcctggacttcaagatccagaacatggtgggcagctgcgacgtgaagttccccatcagactggagggcctggtgctgacccaccagcagttcagcagctacgagcccgagctgttccccggcctgatctacagaatgatcaagcccagaatcgtgctgctgatcttcgtgagcggcaaggtggtgctgaccggcgccaaggtgagagccgagatctacgaggccttcgagaacatctaccccatcctgaagggcttcagaaagaccacctag

SEQ ID NO: 67761 - DNA, 951 bp, Artificial Sequence
  derived and/or modified sequence
atggaccagaacaatagtctgccaccatatgcgcaaggcttggcgagtcctcagggcgcgatgacccccggaatacctatcttctcgccaatgatgccttatggcaccggtttgacgcctcagccaatccagaacacgaattcattgtccatacttgaggagcagcagagacagcaacagcaacaacagcagcagcaacagcagcaacagcagcaggcggtggccgctgccgctgtgcaacagtctacatcgcaacaggccactcagggaaccagcgggcaggcccctcagctcttccactcccagacattgacaactgcgcccctgcctggcactaccccactgtatccttcccctatgacaccgatgacacctatcacgcccgccaccccagccagtgagtcatctggtattgtgccacagcttcagaacatcgtctccacagtgaatttgggatgtaaattagacctgaagacaattgcactcagagcaagaaacgctgagtataaccccaaacgtttcgcggcagttatcatgagaattcgcgagccgagaacaaccgctttgattttctcgtcgggtaaaatggtctgtacaggggctaagtccgaagagcagtcgagactcgcggctagaaagtacgcccgggtggtgcagaagttaggcttccccgctaagtttttagatttcaagatccagaacatggtaggaagctgcgacgtcaaattccccatcaggctggaaggcttggtcctgacccatcagcagttcagtagctacgagccagaactgtttcccggcctgatctataggatgatcaagcccaggatcgttcttctgattttcgtctctggtaaggtcgtcctgaccggcgctaaagtgagagcagagatatacgaagcattcgagaatatctatccaatcttaaagggttttagaaagactacctag

SEQ ID NO: 67762 - DNA, 306 bp, Artificial Sequence
  derived and/or modified sequence
taagaggaacagagtaggttggcagctcgtaaatatgcaagagtggtgcagaagttagggttccccgccaagttcctagactttaaaatacagaacatggtcgggagctgcgacgttaagtttcccatctcctacgagcctgagctgtttccaggacttatttatcgcatgataaagcccagaatagtgctgcttatcttcgtgtctggcaaggtagtgcttaccggtgccaaggtgagggccgaaatctacgaagccttcgaaaatatctaccccatcctgaaaggttttcggaaaacgacatag

SEQ ID NO: 67763 - DNA, 960 bp, Artificial Sequence
  derived and/or modified sequence
atgactcccggcatccctatcttctctccaatgatgccctatggaactgggttgacaccacagccaatacagaacaccaatagcctgagtatcctggaagagcagcagcgccagcagcagcaacagcaacagcagcagcagcagcaacaacagcagcaacagcagcaacaacagcagcagcaacagcagcagcaacagcagcagcagcagcagcagcagcaacaggccgtggctgcggctgcggtacagcaatctaccagtcaacaggcgacccagggtacctctgggcaggctccgcagctgtttcattcacagacactgaccaccgccccactacccggcacaacaccactgtatccctccccaatgacacctatgacacctatcactccagcgaccccggcatccgaatctagtggcatagtcccccagctccagaacattgtatcaactgtgaatcttggctgtaaacttgatcttaaaactatagccctgagagctaggaatgcagaatacaatccgaagcgcttcgcagccgttattatgcggataagagagccacgaactactgcgctgatcttctcaagtggtaaaatggtgtgcaccggagctaaatctgaggaacagagcagattggcagcacggaagtatgcacgggtcgttcagaagctcggctttcccgccaaatttttggactttaagatccaaaatatggtaggtagttgcgatgtgaaatttcctatccgactggagggcttagtgcttacccaccagcagttctcttcttatgagcccgaactcttccccggcttgatttaccgaatgattaagccaaggattgtcctgctgatctttgtgagtggcaaggttgtcctgaccggtgctaaggtcagagctgagatttacgaggcctttgagaatatttacccgatcctgaagggatttcggaagactacctag

SEQ ID NO: 67764 - DNA, 951 bp, Artificial Sequence
  derived and/or modified sequence
atggaccagaacaacagcctgcccccctatgcccagggcctggccagcccccagggcgccatgaccccaggcatccccatcttcagccccatgatgccctacggcaccggcctgaccccccagcccatccagaacaccaacagcctgagcatcctggaggagcagcagaggcagcagcagcagcagcagcagcagcagcagcagcagcagcagcaggccgtggccgctgctgctgtgcagcagagcaccagccagcaggccacccagggcaccagcggccaggccccccagctgttccacagccagaccctgaccacagcccccctgcccggcaccacccccctgtaccccagccccatgacccccatgacccccatcaccccagccaccccagccagcgagagcagcggcatcgtgccccagctgcagaacatcgtgtccacagtgaacctgggctgcaagctggacctgaagaccatcgccctgcgggccagaaatgctgagtacaaccccaagagatttgctgctgtgatcatgaggatccgggagcccaggaccacagccctgatcttcagcagcggcaagatggtgtgcacaggagccaagtctgaggagcagagccggctggccgccaggaaatatgcccgggtggtgcagaagctgggcttccctgccaagttcctggacttcaagatccagaacatggtgggcagctgtgatgtgaagttccccatccggctggagggcctggtgctgacccaccagcagttcagcagctatgagcctgagctgtttcctggcctcatctacaggatgatcaagcccagaattgtgctgctgatctttgtgtctgggaaggtggtgctgaccggggccaaggtgcgggcagagatctatgaggcctttgagaacatctaccccatcctgaagggcttcaggaagaccacctag

SEQ ID NO: 67765 - DNA, 306 bp, Artificial Sequence
  derived and/or modified sequence
tgagaagagcagagccggctggccgccaggaaatatgcccgggtggtgcagaagctgggcttccctgccaagttcctggacttcaagatccagaacatggtgggcagctgtgatgtgaagttccccatctcctatgagcctgagctgtttcctggcctcatctacaggatgatcaagccccgcatcgtgctgctgatctttgtgtctgggaaggtggtgctgactggagccaaggtgcgggcagagatctatgaggcctttgagaacatctaccccatcctgaagggcttcaggaagaccacctag

SEQ ID NO: 67766 - DNA, 960 bp, Artificial Sequence
  derived and/or modified sequence
atgaccccaggcatccccatcttcagccccatgatgccctacggcaccggcctgaccccccagcccatccagaacaccaacagcctgagcatcctggaggagcagcagaggcagcagcagcagcagcagcagcagcagcagcagcagcagcagcagcagcagcagcagcagcagcagcagcagcagcagcagcagcagcagcagcagcagcagcagcagcagcaggccgtggccgctgctgctgtgcagcagagcaccagccagcaggccacccagggcaccagcggccaggccccccagctgttccacagccagaccctgaccacagcccccctgcccggcaccacccccctgtaccccagccccatgacccccatgacccccatcaccccagccaccccagccagcgagagcagcggcatcgtgccccagctgcagaacatcgtgtccacagtgaacctgggctgcaagctggacctgaagaccatcgccctgcgggccagaaatgctgagtacaaccccaagagatttgctgctgtgatcatgaggatccgggagcccaggaccacagccctgatcttcagcagcggcaagatggtgtgcaccggggccaagtctgaggagcagagccggctggccgccaggaaatatgcccgggtggtgcagaagctgggcttccctgccaagttcctggacttcaagatccagaacatggtgggcagctgtgatgtgaagttccccatccggctggagggcctggtgctgacccaccagcagttcagcagctatgagcctgagctgtttcctggcctcatctacaggatgatcaagccccgcatcgtgctgctgatctttgtgtctgggaaggtggtgctgactggagccaaggtgcgggcagagatctatgaggcctttgagaacatctaccccatcctgaagggcttcaggaagaccacctag

SEQ ID NO: 67767 - DNA, 951 bp, Artificial Sequence
  derived and/or modified sequence
atggaccagaacaacagcctgcccccctacgcccagggcctggcctcaccccagggggccatgacacccggcatccctattttcagccctatgatgccctacggaacaggtctgacaccccagcctattcagaatactaactcactctccatactggaagagcaacagcgccagcaacagcagcagcaacagcagcagcagcagcagcagcagcaggccgtcgccgcagcagccgtgcagcagtctacaagccagcaggccacacagggcacttcagggcaagcaccccagctttttcatagccagactcttaccaccgctcctctgcctgggactactccattatacccctcaccaatgacgcccatgacccccatcactcctgccaccccggcctcagaaagctcaggtatcgtcccccagctgcagaacattgtttcaacggtcaatctgggctgtaagctcgacttgaaaacaatcgctcttagggcacgtaacgccgaatataatcccaaacgctttgctgccgtgattatgcgcattcgtgaaccccgaaccacggctctgatcttttcctcagggaagatggtgtgcaccggggctaagagcgaagaacagtctcggcttgccgcccggaagtatgcacgggtcgtgcagaagctgggcttccctgccaaatttctggattttaaaatccaaaacatggtggggagttgtgatgtaaaattccccatccggctcgaggggttggtgctcacacaccagcagttctcaagctatgagcccgaattgtttcccggactgatttatcgcatgattaaaccccgcatcgtgttgctcatttttgtttctggtaaggtagtgctaaccggtgcaaaagtgagggcggaaatttacgaggccttcgagaacatatatcctatcctcaaagggtttaggaaaaccacttag

SEQ ID NO: 67768 - DNA, 306 bp, Artificial Sequence
  derived and/or modified sequence
tgagaggagcagagccggctggccgcccggaagtacgcccgggtggtgcaaaagctgggcttccccgctaagtttctggattttaagattcaaaacatggttggctcttgcgacgtcaagtttccgatttcctacgaacccgagctgttccccggactgatctacagaatgatcaaaccccggatcgtcctgctaatttttgtcagcggcaaggtggtgctgaccggagccaaagttcgcgcggaaatttacgaggccttcgagaacatttaccctattctcaaggggtttaggaagacgacttag

SEQ ID NO: 67769 - DNA, 960 bp, Artificial Sequence
  derived and/or modified sequence
atgacccccggcatccccatcttcagccccatgatgccctacggcacaggcctcacaccacaacctattcagaacactaattccttgagtatcctggaggagcagcagcgccagcagcagcagcagcagcagcagcaacagcagcagcagcagcagcaacagcagcagcagcagcagcaacaacaacagcagcaacagcagcagcaacagcagcagcagcagcaggcagtcgccgccgccgccgtccagcaaagcacatctcaacaggctacacaaggcactagtggccaagctccccagctcttccactcacaaaccctaacaaccgctcccctgccgggcacaacacccttgtatccgtcaccaatgacgcccatgacccccataacacccgccacaccagcatccgaatccagcggtatagttccccagctgcaaaatatcgtttcaactgtgaatcttggctgcaaactggacctgaaaaccattgctcttcgggcacggaacgccgagtataatcctaaacgatttgctgcagtcattatgcgcattagggaacctagaacaactgctctgatcttcagctctggcaagatggtctgtactggcgcgaaatcagaggagcagtcacgcctggccgcacggaagtatgcgcgggtcgtccagaagctgggattcccagcaaaattcctggattttaaaatacagaacatggttgggtcctgcgacgttaaatttcccataaggcttgagggcctggtcttaacgcatcagcagttctctagttacgaaccagagctgttcccagggttgatctatcggatgataaaacccagaattgttctgctcatctttgtgagcggaaaagtggtattgacaggtgctaaagtcagggctgaaatctacgaggctttcgaaaatatctatcctattttgaagggattccgcaaaacaacatag

SEQ ID NO: 67770 - DNA, 951 bp, Artificial Sequence
  derived and/or modified sequence
atggatcagaacaatagcttgccaccatatgcacaaggattagcttctccacaaggcgcaatgacccccggaatcccgatttttagcccaatgatgccctacgggactgggctcacaccacagccaattcaaaacacaaactctctcagcattctcgaagaacaacagcgccagcagcaacagcagcagcagcagcagcagcaacaacagcagcaagccgtagccgcagccgctgtgcaacagagtacctcacaacaggctacacagggcacttccggccaggcaccccaactgttccatagccagacccttaccacagctcccctgccaggtaccacacctctgtacccatctcccatgacgccgatgactccgataactcccgctacccctgcatctgagagctcaggaatcgtcccccagctccaaaatatcgtgtccacggtcaaccttggctgtaaactggatcttaagacaatagccctgagagccaggaacgcagaatacaaccctaagcggttcgcagccgtcatcatgaggatccgcgagcccaggacaacagctttaatctttagttccggtaagatggtttgtacaggggcaaagtctgaagaacaaagtcgtctggctgccagaaagtacgccagagtcgtgcagaagctgggtttcccggcaaaatttctggatttcaagatccaaaatatggtcggctcctgcgacgttaaatttcccatccgcctagagggtctggtcttgactcaccagcagtttagctcctatgagccagagttattcccaggcctaatctacaggatgatcaagcctaggatcgtgcttttgatttttgtgagtggtaaggtagtgctcacaggcgctaaggtgagagccgagatctacgaggccttcgagaacatctatccaattcttaaaggtttccgcaagacaacctag

SEQ ID NO: 67771 - DNA, 306 bp, Artificial Sequence
  derived and/or modified sequence
taagaggagcagtcgagactggcagccagaaagtacgctcgagtggttcagaaactgggtttcccagcgaagtttctagactttaaaatacagaatatggtaggctcctgtgacgtgaagttcccaatcagttatgagcctgagttgtttcccggtttaatttataggatgattaaacctcgtattgtcctgcttatctttgtgagcggcaaggtcgtgctgactggcgcaaaggtgcgagccgagatctacgaagccttcgaaaacatttaccctatactaaaaggtttccgcaaaacaacatag

SEQ ID NO: 67772 - DNA, 960 bp, Artificial Sequence
  derived and/or modified sequence
atgaccccaggcatccctattttctccccaatgatgccatatggcacgggtctgactccacagcctatccaaaatacaaatagcctttcaattctcgaagaacaacaaaggcagcagcagcaacagcagcagcagcagcagcagcagcaacagcagcagcagcagcagcaacagcaacaacaacagcagcagcaacagcagcagcaacagcagcaacaacaacaggcggtggcagccgctgccgtccagcagtctaccagccagcaagcaacacagggtacaagcgggcaggctcctcagctttttcatagtcagaccctgaccaccgctccacttcccggtaccacccccttatacccgagcccaatgacccccatgaccccaattactcctgctacccctgcaagcgaatcatcaggcattgttccgcagttgcagaacatagtttcaactgtaaatcttggttgcaagctggatctaaagacaatcgctctccgggctaggaatgcagagtacaaccccaaaaggtttgctgcagtcattatgcggatccgcgaaccgagaactacggcactgatattctctagtggaaagatggtgtgtaccggggcaaagtccgaggaacagagcaggctggccgctagaaaatacgcacgcgtggtccagaagttaggcttccctgccaagtttctcgacttcaaaatccagaatatggtggggtcctgtgatgtcaagttccctatccgccttgaaggtctagtgctcacgcatcagcaattctcctcatacgaaccggagctctttcccggtctgatttaccggatgatcaaaccacggatcgtcctcttgatctttgtgtccgggaaagtggttctgaccggtgccaaagtacgtgcagagatttacgaagcttttgaaaacatctatcctatcctcaaaggcttccggaagaccacatag

SEQ ID NO: 67773 - DNA, 1453 bp, Artificial Sequence
  derived and/or modified sequence
aggttcgctgtggcgggcgcctgggccgccggctgtttaacttcgcttccgctggcccatagtgatctttgcagtgacccagcatcactgtttcttggcgtgtgaagataacccaaggaattgaggaagttgctgagaagagtgtgctggagatgctctaggaaaaaattgaatagtgagacgagttccagcgcaagggtttctggtttgccaagaagaaagtgaacatcatggatcagaacaacagcctgccaccttacgctcagggcttggcctcccctcagggtgccatgactcccggaatccctatctttagtccaatgatgccttatggcactggactgaccccacagcctattcagaacaccaatagtctgtctattttggaagagcaacaaaggcagcagcagcaacaacaacagcagcagcagcagcagcagcaacaggcagtggcagctgcagccgttcagcagtcaacgtcccagcaggcaacacagggaacctcaggccaggcaccacagctcttccactcacagactctcacaactgcacccttgccgggcaccactccactgtatccctcccccatgactcccatgacccccatcactcctgccacgccagcttcggagagttctgggattgtaccgcagctgcaaaatattgtatccacagtgaatcttggttgtaaacttgacctaaagaccattgcacttcgtgcccgaaacgccgaatataatcccaagcggtttgctgcggtaatcatgaggataagagagccacgaaccacggcactgattttcagttctgggaaaatggtgtgcacaggagccaagagtgaagaacagtccagactggcagcaagaaaatatgctagagttgtacagaagttgggttttccagctaagttcttggacttcaagattcagaatatggtggggagctgtgatgtgaagtttcctataaggttagaaggccttgtgctcacccaccaacaatttagtagttatgagccagagttatttcctggtttaatctacagaatgatcaaacccagaattgttctccttatttttgtttctggaaaagttgtattaacaggtgctaaagtcagagcagaaatttatgaagcatttgaaaacatctaccctattctaaagggattcaggaagacgacgtaatggctctcatgtacccttgcctcccccacccccttctttttttttttttaaacaaatcagtttgttttggtacctttaaatggtggtgttgtgagaagatggatgttgagttgcagggtgtggcaccaggtgatgcccttctgtaagtgcccaccgcgggatgccgggaaggggcattatttgtgcactgagaacaccgcgcagcgtgactgtgagttgctcataccgtgctgctatctgggcagcgctgcccatttatttatatgtagatt

SEQ ID NO: 67774 - DNA, 892 bp, Artificial Sequence
  derived and/or modified sequence
tgaagaacagtccagactggcagcaagaaaatatgctagagttgtacagaagttgggttttccagctaagttcttggacttcaagattcagaatatggtggggagctgtgatgtgaagtttcctataagttatgagccagagttatttcctggtttaatctacagaatgatcaaacccagaattgttctccttatttttgtttctggaaaagttgtattaacaggtgctaaagtcagagcagaaatttatgaagcatttgaaaacatctaccctattctaaagggattcaggaagacgacgtaatggctctcatgtacccttgcctcccccacccccttctttttttttttttaaacaaatcagtttgttttggtacctttaaatggtggtgttgtgagaagatggatgttgagttgcagggtgtggcaccaggtgatgcccttctgtaagtgcccaccgcgggatgccgggaaggggcattatttgtgcactgagaacaccgcgcagcgtgactgtgagttgctcataccgtgctgctatctgggcagcgctgcccatttatttatatgtagattttaaacactgctgttgacaagttggtttgagggagaaaactttaagtgttaaagccacctctataattgattggactttttaattttaatgtttttccccatgaaccacagtttttatatttctaccagaaaagtaaaaatcttttttaaaagtgttgtttttctaatttataactcctaggggttatttctgtgccagacacattccacctctccagtattgcaggacagaatatatgtgttaatgaaaatgaatggctgtacatatttttttctttcttcagagtactctgtacaataaatgcagtttataaaa

SEQ ID NO: 67775 - protein, 305 aa, Artificial Sequence
  derived and/or modified sequence
MASRKENAKSANRVLRISQLDALELNKALEQLVWSQFTQCFHGFKPGLLARFEPEVKACLWVFLWRFTIYSKNATVGQSVLNIKYKNDFSPNLRYQPPSKNQKIWYAVCTIGGRWLEERCYDLFRNHHLASFGKVKQCVNFVIGLLKLGGLINFLIFLQRGKFATLTERLLGIHSVFCKPQNICEVGFEYMNRELLWHGFAEFLIFLLPLINVQKLKAKLSSWCIPLTGAPNSDNTLATSGKECALCGEWPTMPHTIGCEHIFCYFCAKSSFLFDVYFTCPKCGTEVHSLQPLKSGIEMSEVNAL

SEQ ID NO: 67776 - protein, 180 aa, Artificial Sequence
  derived and/or modified sequence
MASRKENAKSANRVLRISQLDALELNKALEQLVWSQFTQCFHGFKPGLLARFEPEVKACLWVFLWRFTIYSKNATVGQSVLNIKYKNDFSPNLRYQPPSKNQKIWYAVCTIGGRWLEERCYDLFRNHHLASFGKVKQCVNFVIGLLKLGGLINFLIFLQRGKFATLTERLLGIHSVFCKP

SEQ ID NO: 67777 - DNA, 1922 bp, Artificial Sequence
  derived and/or modified sequence
aatctcaagcagaagagcaagagaagcaaaactcggttccctgtgaactcaagaggctttgcccagaagggatgcaaccagttatttcagcattaaatatccagacacagacagtacagacccatcctgctccaagaaacacatcagagcactgcactctgcctgcctgtgatgcccaggaagagcacagagatactgttgacggctccatcgcaaggactgagtcagcttcaggggaaatttggagacagacacacatggacggagaacatcatgtgaacacaaaggcagagatcagtgtgatgtcggcaaaccaaggagcaccaaggattaccagcaagccaccagaagcgaggagagaggcccgggacagatctctccctagcgccttcagcctgcgtggcctcactgacactttgatcttgggcttctgtcctccagaactgtgagacaatcaatttctgctgtgtaagccacctggtctgcggcactttgttatagcagccctagaaaactaagatggaactcgccggctggtcactgtcttccctcttatcacactaccttcccttactgcagctacttatttaactgtttcccaccaaaagaccctaacatccaggagtgtggggcccacatctgcctaattcgccactacggcccaagcccacctctggcacactggaggtgttcaagatgtgagctgacatatgaaagagctgtcctgactagttctagaatctcaggcatgtgactccccctcccagaatgtcaatttccccatctctctgcagagggaaaagaaaataattggagtagatgacctctgtgagtccttcgggctcaaaagatggccgggactcaccactgaaggtgtctgcatccatcatggtcagatcaggccatgagaaaccccactagaggtgctaaacagagggaatgggtcacagaggtgtgggaagcctgagaaaccactgcggccttcctgctggacttcagagaagggctggcctcattttatgggctttctgaaacccatattcagagaaacacacccaattcagcatggactggcaatgcctatccccaaggaaactccaaaaggggtgagtctcctgggcagtggtcactgagttactacaaggcctttggggttggggtggggatggtgggtcaacaggctcccctagaagccctgtgccctgacaaagtaaacaatggcaaaacatgtgcttcccagcactcacctccccacctccttctaacatcagaactgggtttctgatgatgggagaaaatgtaaatgaaatcaacggaaggatgatcctgtgagtaatctgacaagggagaaccagcttcctctcccatgaaccccagctgccttggctttcacccagacccctggcccacccggtgtcctccccagacagtggtactcacccacactgctgagggagctgctgctttctgagtctgagggcatggtggacaggacgctgtaggtagaacctggggaaagaggggagaccatgttactaaccccaaggggtcactcgtcttcaccccaagccagctgatcatcagtcaatgccaggccatgagagctacatgcaccaggcactagaaatccacatccacgggccaagcagaggaggcgcgctcagcagatctggacttcggtgtttctgccaggcctcccacctcactttatcggcccctcctgctctgggcaggcgggcagaggggaacttggagtcagtcagctggcttcttgttgggacatctggggaaaggcttagcaagggagtgacatgccccaggtaaacatggggtgtgggggtttcctccacatctctagcaatatgattctggcttccatgcagagggtaacagagcagaaattaaagaacaactgaactatc

SEQ ID NO: 67778 - DNA, 918 bp, Artificial Sequence
  derived and/or modified sequence
atggctagcaggaaggagaatgctaaatcagctaacagagtgctgcgaattagtcagctggacgcactcgagctgaacaaggcccttgagcagctcgtctggagtcagttcacgcagtgtttccacgggtttaaacccggccttctcgcaagattcgaaccagaggtgaaagcatgcctctgggtcttcctgtggaggttcaccatctattccaaaaatgccaccgtgggccaatctgtgcttaacattaagtataagaacgacttttccccaaatctcagataccagcccccaagcaaaaatcagaagatatggtatgcagtctgtacaattggcggccgttggcttgaagagaggtgttacgatttatttcgtaatcaccatttagcgtctttcggaaaggtgaagcagtgcgtcaacttcgtgatcggtttactcaaactgggggggctgatcaatttcctcatcttcctccagcgcgggaaattcgcaacgctgacagaacgtctcctgggcatccatagtgtgttctgcaaacctcaaaacatttgcgaagttgggttcgaatacatgaaccgggagcttctgtggcacgggtttgccgaatttcttattttcctgcttcctctgataaacgtgcagaagctgaaggccaagctctcttcttggtgcattccactcactggagcacccaatagcgacaacaccctcgctacctctggaaaggagtgtgccctgtgcggagaatggcctaccatgccccatactattggttgtgaacacatcttttgttacttttgcgctaaatcttcgttcctgttcgacgtgtatttcacttgcccaaagtgtggtaccgaggtccactctctccaacctctgaaaagcgggattgagatgagcgaggtgaacgccttatag

SEQ ID NO: 67779 - DNA, 918 bp, Artificial Sequence
  derived and/or modified sequence
atggcctcaagaaaggaaaatgcaaagagtgcaaaccgcgttctgcggatctcccaactggacgctcttgagttgaacaaagcattggagcaactggtctggtcacaattcacccagtgttttcacggttttaagccgggccttctggcacggttcgagcctgaagtgaaagcctgcctgtgggtcttcctctggcggtttacaatctattccaagaacgcaacggtcgggcaaagtgtcctgaacattaagtataagaacgacttttcccctaacctccggtaccagccaccctcgaagaaccagaagatctggtacgcagtttgcacaatcggaggccgctggttagaggaaagatgctacgacctctttagaaaccatcatttggccagcttcggcaaagtaaagcaatgtgtaaactttgtaatcggcctcctaaaactgggcggcctaatcaattttttgatcttcctgcaaagaggtaagttcgcaaccctgacggagaggctactgggtatccattctgtgttctgtaaaccacagaatatctgtgaggtgggcttcgagtatatgaaccgggaactgctgtggcatgggttcgccgaattccttatttttctattaccccttataaatgtgcagaagctgaaagccaaactgtcctcatggtgcatccctcttactggcgcacctaattcagacaacactctggccacatcaggcaaggaatgtgcgctctgtggcgagtggccgactatgccacatacaattggatgcgaacatatcttttgctatttttgcgctaagtcctccttcctctttgacgtgtacttcacatgcccaaaatgtgggaccgaggtgcatagcctgcaacctttaaagagcggaatcgagatgtcagaggttaatgcactctag

SEQ ID NO: 67780 - DNA, 543 bp, Artificial Sequence
  derived and/or modified sequence
atggcttctcggaaagagaacgctaagtctgctaatcgggtcctgagaataagccagttagacgcactcgaactgaataaagcactggaacagctggtctggtctcagttcactcagtgcttccatggctttaagcctggcttgctggccagattcgagccggaagtgaaggcctgtctgtgggtgtttctgtggcggttcacgatctattccaaaaacgccactgtggggcagtctgtgctgaatatcaagtacaaaaacgatttcagccccaacctaagataccagccaccaagcaagaaccagaaaatttggtacgctgtctgtacaattggaggtcgatggctggaagaaaggtgctatgatctctttaggaatcaccaccttgcatcttttggcaaagtgaagcagtgcgtgaactttgtcatcgggttgctgaagctggggggcctgatcaatttcctcattttcttgcagcggggcaagttcgccactctaactgaacggctcctgggtatccatagcgtgttttgtaagccttag

SEQ ID NO: 67781 - DNA, 918 bp, Artificial Sequence
  derived and/or modified sequence
atggcaagccggaaagagaatgccaagagcgccaaccgggtgcttagaatttcgcagctcgacgccctcgagctaaacaaggccttggagcagttggtgtggtctcaatttactcaatgcttccacggattcaagcccggcctgcttgccagatttgagcctgaggtgaaagcttgcctgtgggtgtttttatggcggttcacaatttacagcaaaaatgccacggtagggcaaagtgtgttgaatatcaaatacaagaacgatttttctcccaacctacgctaccaacctccgtctaagaaccaaaaaatctggtatgccgtctgtaccattggcggtagatggttggaggagcgctgctatgacctgttccggaatcatcacttggcctctttcgggaaagtcaagcagtgtgtaaattttgtgataggcttgttgaaacttgggggcctgattaactttctcatttttctccagcgcgggaaattcgcaactctcacagagcggcttctgggcatccactcggttttctgtaagccgcagaacatctgtgaggtgggttttgagtatatgaatcgagagctcctgtggcatggatttgctgaattccttatatttcttcttccactcattaacgttcagaagcttaaagctaaactcagctcttggtgtattccccttaccggggctcccaattctgacaacacgctggcaacctctggcaaggaatgcgcactgtgtggtgagtggcctaccatgccacataccatagggtgcgagcatatcttctgttacttctgcgccaagagcagcttcttgtttgacgtttatttcacatgccctaagtgtgggaccgaagtgcacagcttgcagccgcttaagagcggcatcgagatgagcgaggtgaacgccctgtag

SEQ ID NO: 67782 - DNA, 918 bp, Artificial Sequence
  derived and/or modified sequence
atggcgtcccgcaaagaaaatgctaagagcgctaatagagtcttgcggattagccagctggatgctctcgagctgaacaaagccctagaacaattggtgtggtctcaattcactcagtgctttcatgggtttaaacctggtttactggcacgcttcgagccagaggtcaaagcatgtttatgggtttttctttggaggtttaccatctatagcaagaatgcgaccgtgggccaaagtgttcttaacataaagtacaaaaacgatttctcaccaaacctcaggtaccagccaccttccaagaaccagaagatctggtacgctgtgtgcacaatcggcggtcggtggctcgaggagcgctgctacgatttgtttagaaaccaccatctggcttcattcggcaaggtcaaacagtgtgtgaatttcgtcattggccttctgaagttgggagggctcataaacttcctaatatttctgcagcgcgggaagttcgccaccctcacggaacggctgctgggtatccatagcgtcttctgcaagccacaaaacatctgcgaggtgggatttgagtatatgaaccgtgaattgttatggcacggatttgctgaatttctcatcttcctcctgccacttattaatgtccaaaagctcaaagcaaaactatcttcatggtgtataccgctcaccggtgcccctaacagtgacaacactctggccaccagcggaaaagaatgtgccctgtgtggagaatggccgaccatgccacacaccatcgggtgtgagcatattttctgctatttctgcgccaaaagctcattcctttttgatgtctactttacctgccccaagtgcggaacagaggtacacagcctgcagccccttaagagtggcattgaaatgtcagaggtcaacgcattatag

SEQ ID NO: 67783 - DNA, 918 bp, Artificial Sequence
  derived and/or modified sequence
atggccagcaggaaagaaaatgccaagagcgccaacagagtgctgcgcatcagccagctggatgccctggagctgaacaaggccctggagcagctggtgtggagccagttcacccagtgcttccacggcttcaagccaggcctgctggccaggtttgagcctgaggtgaaggcctgcctgtgggtgttcctgtggaggttcaccatctacagcaagaatgccaccgtgggccagagcgtgctgaacatcaagtacaagaatgacttcagccccaacctgcgctaccagccccccagcaagaaccagaagatctggtatgctgtgtgcaccatcggcggccgctggctggaggagcgctgctatgacctcttcaggaaccaccacctggccagctttgggaaggtgaagcagtgtgtgaactttgtgattggcctgctgaagctgggcggcctcatcaacttcctgatcttcctgcagaggggcaagtttgccaccctgacagagcggctgctgggcatccacagcgtcttctgcaagccccagaacatctgtgaggtgggctttgagtacatgaaccgggagctgctgtggcacggctttgctgagttcctgatcttcctgctgcccctcatcaacgtgcagaagctgaaggccaagctgagctcctggtgcatccccctgaccggggcccccaacagcgacaacaccctggccaccagcggcaaggaatgtgccctgtgtggggagtggcccaccatgccccacaccatcggctgtgagcacatcttctgctacttctgtgccaagagcagcttcctgtttgatgtgtacttcacctgccccaagtgtggcacagaggtgcacagcctgcagcccctgaagtctggaattgagatgtctgaggtgaatgccctgtag

SEQ ID NO: 67784 - DNA, 543 bp, Artificial Sequence
  derived and/or modified sequence
atggccagcaggaaagaaaatgccaagagcgccaacagagtgctgcgcatcagccagctggatgccctggagctgaacaaggccctggagcagctggtgtggagccagttcacccagtgcttccacggcttcaagccaggcctgctggccaggtttgagcctgaggtgaaggcctgcctgtgggtgttcctgtggaggttcaccatctacagcaagaatgccaccgtgggccagagcgtgctgaacatcaagtacaagaatgacttcagccccaacctgcgctaccagccccccagcaagaaccagaagatctggtatgctgtgtgcaccatcggcggccgctggctggaggagcgctgctatgacctcttcaggaaccaccacctggccagctttgggaaggtgaagcagtgtgtgaactttgtgattggcctgctgaagctgggcggcctcatcaacttcctgatcttcctgcagaggggcaagtttgccaccctgacagagcggctgctgggcatccacagcgtcttctgcaagccctag

SEQ ID NO: 67785 - DNA, 918 bp, Artificial Sequence
  derived and/or modified sequence
atggccagccggaaggagaacgccaagagcgccaaccgggtgctgaggatttcccagctggatgccctggagctgaacaaggcactggaacagctcgtatggagtcaatttacgcagtgctttcacgggttcaagcccggtctcctggcccgatttgaacctgaagtaaaagcctgtctttgggtgttcctctggcgctttacaatctattccaagaacgcgactgttgggcagagcgtgcttaacattaagtacaaaaacgatttcagcccaaatctaagatatcaacctccctccaaaaaccagaagatatggtacgcagtgtgtacgataggcgggcgatggctggaagagaggtgttatgatttatttcgtaaccaccaccttgcctctttcggaaaggttaaacaatgtgtaaacttcgtgattggcctgctgaaactgggcgggttgatcaattttctcatatttctgcagagaggcaagtttgccacgctgacagaacgtctcctcggcatccactctgtcttttgtaagccccagaacatttgcgaggtgggcttcgagtatatgaaccgggaacttctgtggcacggatttgccgagttcttgattttcctgttgcctctaatcaatgttcagaagctgaaagccaagctaagctcctggtgcattcctctgaccggcgcaccaaatagcgataacaccctggccacttcaggaaaggagtgtgctttgtgtggggaatggcccacaatgccccatacgattgggtgcgaacacattttctgctatttctgcgcaaagtcctcttttctttttgatgtatatttcacctgtccaaaatgtggaactgaagtgcatagtctccagcctctcaaaagcggcatcgaaatgtcagaggtgaacgcactgtag

SEQ ID NO: 67786 - DNA, 918 bp, Artificial Sequence
  derived and/or modified sequence
atggccagccggaaggagaacgccaagagcgccaaccgggtgctgcggatttcacaactcgacgccctcgaactgaacaaagctctggagcagctggtttggtctcagttcacccagtgctttcatggcttcaaacccggcctgctcgctcggttcgagccagaggttaaggcttgcctgtgggtttttctatggaggttcaccatctacagtaaaaacgctaccgtcgggcagtctgtattgaacattaaatacaagaacgatttttcacctaacctgcgataccagcctccaagcaaaaatcagaagatctggtatgccgtgtgtacaatcggaggacgttggctggaagagaggtgctacgacctttttcggaatcatcaccttgcatctttcgggaaggtaaagcagtgcgtcaattttgtgattggcttgctcaagctgggtggcctgatcaattttttgatattcctgcagagaggtaagttcgcaacactgactgaaaggctacttgggatccacagtgtgttttgtaagcctcaaaacatctgtgaagtgggcttcgagtacatgaaccgagaactcttgtggcacgggtttgctgaatttctcatcttcctgctgcccctgatcaatgtgcagaaactcaaggcgaaacttagctcatggtgtattccactgacaggggcacccaactctgacaataccctagctacatcgggtaaggagtgcgcattgtgcggcgaatggcctacaatgcctcacaccatcggctgcgagcatatcttctgctatttctgcgctaagagttcatttctgttcgacgtctattttacctgtcccaagtgcgggacagaggtccacagcctccagcccttaaagtcgggaattgagatgtccgaagtcaacgccttgtag

SEQ ID NO: 67787 - DNA, 543 bp, Artificial Sequence
  derived and/or modified sequence
atggccagccggaaggagaacgccaagagcgccaaccgggtgctgcggataagtcagctggatgcactggagttgaacaaggctctcgagcaattggtttggagccagtttactcagtgctttcatgggttcaaaccaggcttgttggctaggtttgagcctgaagtaaaggcctgcctgtgggtgtttttgtggcggtttactatttacagcaagaacgctaccgtggggcagtccgtgctgaacattaaatacaagaatgacttctcacctaatctacggtatcagcccccttcgaaaaaccagaaaatttggtatgctgtgtgcacaataggcggcaggtggcttgaggaacgctgctatgatctctttagaaatcatcacttggctagctttggcaaagttaagcagtgcgtcaactttgtgattggcttattgaagctgggcggcctgattaattttcttatttttctgcaaaggggcaagttcgcaacactgaccgagcgcctgcttggcatccactcggtattttgtaagccttag

SEQ ID NO: 67788 - DNA, 918 bp, Artificial Sequence
  derived and/or modified sequence
atggccagccggaaggagaacgccaagagcgccaaccgggtgctgcggattagccaactcgacgccctggagctgaacaaagcactggaacagctggtgtggagccaattcacccaatgctttcacggcttcaaaccaggcctgctggcgcgttttgagcccgaagtgaaggcgtgtttatgggtcttcctctggcggtttacgatttatagcaagaacgctacagtcggacaaagtgttttgaatattaagtataagaatgacttttcacccaatctcagatatcagccgccctcaaaaaatcaaaaaatttggtatgcagtgtgcaccattgggggtagatggctagaagagcggtgttatgatctattccggaaccatcatctggcctcttttggtaaggtgaagcagtgtgtaaatttcgtgattggcctgttaaagttgggcggcctcattaacttcctgatttttctgcagagagggaagttcgccacgctgaccgaacgactgctggggattcatagcgtgttttgtaaaccacaaaacatttgcgaggtcggctttgaatacatgaatcgagaactgctgtggcacggattcgctgaatttttgattttcttactccctctgatcaatgtgcaaaagctcaaagccaaactgagctcctggtgcatccctctcactggcgctccgaacagtgacaacacactcgcaaccagcgggaaagaatgcgctttatgcggtgaatggccaaccatgcctcataccatcggatgcgaacatattttctgttatttttgtgctaagtcatcattcctctttgacgtgtattttacatgccctaaatgtggcaccgaagtgcattcactgcagccgctgaagtcaggcatcgagatgtcagaggtgaacgccctctag

SEQ ID NO: 67789 - DNA, 918 bp, Artificial Sequence
  derived and/or modified sequence
atggccagccggaaggagaacgccaagagcgccaaccgggtgctgagaataagccagctggatgcactggagctgaataaggcgctcgaacagctggtgtggagccagtttacacagtgttttcacggattcaagcccggcctcctagctcggttcgagcctgaagtgaaagcctgcctctgggtgtttctatggagatttactatttactctaagaacgccaccgtagggcagtctgtcctgaacatcaagtataaaaacgatttttcaccgaacctcaggtaccaacccccttccaagaatcagaaaatctggtatgccgtgtgtaccatcggaggcaggtggctcgaggagagatgctacgatttattcaggaatcaccatctcgctagcttcggtaaagtgaaacagtgcgtgaatttcgtcattggactactgaagctcggcgggcttattaatttcttgatcttcctgcagagagggaagtttgccacattaactgaaagactgctcgggatccattcggttttttgtaagcctcagaatatatgcgaggtggggttcgaatacatgaatcgcgagttactgtggcacgggtttgcagagtttttaatttttctgctgcctctgataaacgtacagaagctgaaggcgaagctgagcagctggtgcatacccctaactggggcacccaattcggacaacactctggctaccagcgggaaggagtgtgccttatgcggggagtggcccaccatgccacacacaatcggctgcgaacatatattctgttatttttgcgctaagtcatctttcctattcgatgtgtactttacatgccctaaatgcggcactgaagtgcattctctgcagcctcttaagtcaggaatcgagatgagcgaggtgaacgctctttag

SEQ ID NO: 67790 - DNA, 4317 bp, Artificial Sequence
  derived and/or modified sequence
tgtcggcgttcgcggttgtttggccatccagtgccttcagcagcgccgctaaagcgcagttctcgttggtgtaactttttcttttttttttcagccacttccggctcctgcgtcgctccggaagcctgcgagttccggaagccttggtaatccagattcggctaggaaaagacaagctttccagagaatgtttcagagaaagttacgtggagcgtgggcgtttcgcagactcctaagtggtctggaacctaacctgcagtgtctctgagcttctggcaagtatgaggcaaggatttcacagaagaacttggagcaaaaattcccactgtcatagctataggctgtccagtcttgagggagctgcaggaacaggaaaaagagaccttcagagaagacatggcttccagaaaagagaatgcgaagagtgcaaacagagtgctaagaataagccagttggatgcacttgaactaaacaaggccctggagcagctagtttggtcccagtttactcagtgctttcatggatttaaacctgggctgttagctcgctttgagccagaggtgaaagcgtgcttatgggttttcttgtggagattcaccatctactccaaaaatgccacagtgggacagtcagttttgaatattaagtacaaaaatgatttttcccctaacctgagatatcagccacccagtaaaaatcaaaaaatctggtatgctgtttgtacaattggtggcaggtggttagaagaacgatgctatgatttgtttcgaaaccatcatttagcatcatttgggaaagtcaagcagtgtgtgaattttgtgattggacttttgaaattaggtgggctgattaattttttgattttccttcagaggggaaagtttgcaactttgacagaacgtctcctaggtattcattctgtattttgcaagcctcaaaacatatgtgaagttggctttgaatacatgaatagggaacttctctggcatggttttgctgaatttctgatttttctcttaccacttatcaatgtccagaagttgaaagccaagctgtcttcatggtgtattcctcttactggtgcacctaatagtgacaatacattagccaccagtggcaaagaatgcgctctatgtggagagtggcccaccatgcctcacaccataggatgtgagcatattttctgttatttctgtgctaagagtagtttcttatttgacgtgtactttacttgtcctaagtgtggcacagaagtacacagtctgcagccactgaaatcaggaatcgagatgtcagaagtaaatgctctttagaaactaaaattgcttcctttgaggaaaaaaatgcaccgtgtttaaattcttaatattagtcatcctaagtataccatttatgtatcctttataaggaatgtgctcctagccactgtcttctcctttccaggcatgactgaaatctaatcactggaaaccatgtgattctaaatatattatgtaaatgttaatgtattatgttttttaaatcattgcattcaatttttaatgtcaagaataatggacagcttttgtcaggtgactactaacaatgctccttcattttactacttcttaaaacaaggttggattctaaagataaagattttggagactctgggatgagtgtgcatttattttcagagttgacataatatgataatgtgacaattatgagactgttttaaaccttaagacctgatgcctcagttgtaacttttttttttttttctgagacggtgtcctgctctgtcacccaggctggagtgcagtggcgcgatctctgctcactgcaacgtccgcctcccgggttcaagcaattctcctgcctcagcctcccgagtagctggcactgcaggtgcatgccaccatgcccgggtaatttttgtatttttagtagagatggggttcactgtgttagccaggatggtctctatctcctgatctggtgatccacctgcgtcagcctcccaaagtgctgagattacagacgtgagccactgtgcttggccgcctcagttgtaatgttatgcttttctctgaagccaatttttaagaagttcagtcctcagctgtctgacccctccacagttggctttatattcagaaagtaaaaattacttaaggcagcttggaagtgaggcctgggaactactgggggcaactagtatgaacagcactatttacaggtctctttctcttgcctttgattcagagctgtcattctcagtaaatattgatagttttattgaaacaaaaggggtctttagcatgggaatagtaacagcagtgcataatcaagataattctgtatccttcactctttttctctgcctttttttacttaaaagtaaattcagactcttaaaatggtatagaattattagcttgaacattgaattatctcgtcttaactagaatgttttttaaaaaacagtttttaaatgtttttaaataaacatcttgctagtatgatggaaatacactgccagttcatttttctcttcacctttcattgaacaagtactcaggtgccaggtactgatgtagccattagaggcacaacagtatattaagcaggaaaaatcaagttaccttcatggagtttacattctgtgattgaatgaactgtaagtttaatttaggttcaatttagtgtaagatactgaagaagttttgtagtttgagttaagagtattttacatcttaagaatttgccttcttttgccttctgtaattttaaaacattattgtagaaaacaccaacaattcaggaaaaaatataaaatcaactttcccacaattttttgagagagatcatcactatattttactatatttgtagatttgttgcacgtacatttcttatttacaaaattattataatgcataaaaaatagcattttttcctatgtataaatattcttcaaaactattttagggctgagcacaatggctcatgcctgtaatcccaggctccctacttagggaggctgagcccaggagtttgagttcgtttctaaaaaaataaaaatatatacaaacgtctttgttttttgtttgtttgtttgtttttggtgagaaagggcctcacccagtcacccaggttggagtgcagtggtgtgatcatggctaaccgcagcctttccctcccagggctcaagcgatcctcccatctgagcctcccaagttgctgggaccacaggcccataccaccatgcctggctaatttttgtagagatgaggtctcactttgttgcccaggctggtcttgaacttctgggctcaagcagtcctcctaccctggcctcccaaagttgtgggattacaggcatgagccactgcacccagccataatatatttttaaaatgctatgtatatgccatcatattcctattcctattattatttaaccaccatcatagagcatttaggttcttttcactttctgttgtgaataatgcaatgttgaatctgagttcattaagtgaagagtccagctgcacactgcaggcccagtctggatgtaggtgctcagatggttctctttgagacaggctttatcctttggctctcatttttttgatgagtgtacatggcatgagggacacagattccgctagaattcaaatcccacttgtgtataacctagggcaatgtgccacatctctgcacatctgttcattgtaaggattacatgtttagtgtatataaagctcttaaaacaatgcctgacacatagtaaatagaatataatagtagtgctttcctttgctgttgtcagtattactctgagtcggtttcattctcacacagaatgatggccgctagaagctcaaggcttataatctgctagctttctgatcccactggcatgagatactcttgcctaatagttacagctaaagtccaggagctcactgttactggtctgccttggattatgtgcacattcctgaaccagccactatagctaggggatggaaaatactgttcctggttacttaaatgtaggtgatgctcctcccatataccacatgaacctaaaggagtcctggaggaggccgttcaccacaggaaactgaggtgttcttagaagggtggatgctggcagatctctactagttagagtctacatttgccttactcatttcaaaagtccacattgcagtctcattttaccagtgatctagcttgataaggacattcataagtaactggatgattctttaacattgcagatttgaaaggattaaataaagtcaacaaaattgttatatcaa

SEQ ID NO: 67791 - DNA, 4386 bp, Artificial Sequence
  derived and/or modified sequence
ggaggtaagaactaagacgttcttaaaccctactacgtgctggaatcctgaagtgcctgccatcattcaaacttaagcactaactctctagagagacactgccattcataccacagaacgagaaggcagtggcgatcctcaacggctacatgtcactgcctgccacttccggctcctgcgtcgctccggaagcctgcgagttccggaagccttggtaatccagattcggctaggaaaagacaagctttccagagaatgtttcagagaaagttacgtggagcgtgggcgtttcgcagactcctaaggtcagtgtctgccctagagagccgtgtatgtagcttctggcaagtatgaggcaaggatttcacagaagaacttggagcaaaaattcccactgtcatagctataggctgtccagtcttgagggagctgcaggaacaggaaaaagagaccttcagagaagacatggcttccagaaaagagaatgcgaagagtgcaaacagagtgctaagaataagccagttggatgcacttgaactaaacaaggccctggagcagctagtttggtcccagtttactcagtgctttcatggatttaaacctgggctgttagctcgctttgagccagaggtgaaagcgtgcttatgggttttcttgtggagattcaccatctactccaaaaatgccacagtgggacagtcagttttgaatattaagtacaaaaatgatttttcccctaacctgagatatcagccacccagtaaaaatcaaaaaatctggtatgctgtttgtacaattggtggcaggtggttagaagaacgatgctatgatttgtttcgaaaccatcatttagcatcatttgggaaagtcaagcagtgtgtgaattttgtgattggacttttgaaattaggtgggctgattaattttttgattttccttcagaggggaaagtttgcaactttgacagaacgtctcctaggtattcattctgtattttgcaagcctcaaaacatatgtgaagttggctttgaatacatgaatagggaacttctctggcatggttttgctgaatttctgatttttctcttaccacttatcaatgtccagaagttgaaagccaagctgtcttcatggtgtattcctcttactggtgcacctaatagtgacaatacattagccaccagtggcaaagaatgcgctctatgtggagagtggcccaccatgcctcacaccataggatgtgagcatattttctgttatttctgtgctaagagtagtttcttatttgacgtgtactttacttgtcctaagtgtggcacagaagtacacagtctgcagccactgaaatcaggaatcgagatgtcagaagtaaatgctctttagaaactaaaattgcttcctttgaggaaaaaaatgcaccgtgtttaaattcttaatattagtcatcctaagtataccatttatgtatcctttataaggaatgtgctcctagccactgtcttctcctttccaggcatgactgaaatctaatcactggaaaccatgtgattctaaatatattatgtaaatgttaatgtattatgttttttaaatcattgcattcaatttttaatgtcaagaataatggacagcttttgtcaggtgactactaacaatgctccttcattttactacttcttaaaacaaggttggattctaaagataaagattttggagactctgggatgagtgtgcatttattttcagagttgacataatatgataatgtgacaattatgagactgttttaaaccttaagacctgatgcctcagttgtaacttttttttttttttctgagacggtgtcctgctctgtcacccaggctggagtgcagtggcgcgatctctgctcactgcaacgtccgcctcccgggttcaagcaattctcctgcctcagcctcccgagtagctggcactgcaggtgcatgccaccatgcccgggtaatttttgtatttttagtagagatggggttcactgtgttagccaggatggtctctatctcctgatctggtgatccacctgcgtcagcctcccaaagtgctgagattacagacgtgagccactgtgcttggccgcctcagttgtaatgttatgcttttctctgaagccaatttttaagaagttcagtcctcagctgtctgacccctccacagttggctttatattcagaaagtaaaaattacttaaggcagcttggaagtgaggcctgggaactactgggggcaactagtatgaacagcactatttacaggtctctttctcttgcctttgattcagagctgtcattctcagtaaatattgatagttttattgaaacaaaaggggtctttagcatgggaatagtaacagcagtgcataatcaagataattctgtatccttcactctttttctctgcctttttttacttaaaagtaaattcagactcttaaaatggtatagaattattagcttgaacattgaattatctcgtcttaactagaatgttttttaaaaaacagtttttaaatgtttttaaataaacatcttgctagtatgatggaaatacactgccagttcatttttctcttcacctttcattgaacaagtactcaggtgccaggtactgatgtagccattagaggcacaacagtatattaagcaggaaaaatcaagttaccttcatggagtttacattctgtgattgaatgaactgtaagtttaatttaggttcaatttagtgtaagatactgaagaagttttgtagtttgagttaagagtattttacatcttaagaatttgccttcttttgccttctgtaattttaaaacattattgtagaaaacaccaacaattcaggaaaaaatataaaatcaactttcccacaattttttgagagagatcatcactatattttactatatttgtagatttgttgcacgtacatttcttatttacaaaattattataatgcataaaaaatagcattttttcctatgtataaatattcttcaaaactattttagggctgagcacaatggctcatgcctgtaatcccaggctccctacttagggaggctgagcccaggagtttgagttcgtttctaaaaaaataaaaatatatacaaacgtctttgttttttgtttgtttgtttgtttttggtgagaaagggcctcacccagtcacccaggttggagtgcagtggtgtgatcatggctaaccgcagcctttccctcccagggctcaagcgatcctcccatctgagcctcccaagttgctgggaccacaggcccataccaccatgcctggctaatttttgtagagatgaggtctcactttgttgcccaggctggtcttgaacttctgggctcaagcagtcctcctaccctggcctcccaaagttgtgggattacaggcatgagccactgcacccagccataatatatttttaaaatgctatgtatatgccatcatattcctattcctattattatttaaccaccatcatagagcatttaggttcttttcactttctgttgtgaataatgcaatgttgaatctgagttcattaagtgaagagtccagctgcacactgcaggcccagtctggatgtaggtgctcagatggttctctttgagacaggctttatcctttggctctcatttttttgatgagtgtacatggcatgagggacacagattccgctagaattcaaatcccacttgtgtataacctagggcaatgtgccacatctctgcacatctgttcattgtaaggattacatgtttagtgtatataaagctcttaaaacaatgcctgacacatagtaaatagaatataatagtagtgctttcctttgctgttgtcagtattactctgagtcggtttcattctcacacagaatgatggccgctagaagctcaaggcttataatctgctagctttctgatcccactggcatgagatactcttgcctaatagttacagctaaagtccaggagctcactgttactggtctgccttggattatgtgcacattcctgaaccagccactatagctaggggatggaaaatactgttcctggttacttaaatgtaggtgatgctcctcccatataccacatgaacctaaaggagtcctggaggaggccgttcaccacaggaaactgaggtgttcttagaagggtggatgctggcagatctctactagttagagtctacatttgccttactcatttcaaaagtccacattgcagtctcattttaccagtgatctagcttgataaggacattcataagtaactggatgattctttaacattgcagatttgaaaggattaaataaagtcaacaaaattgttatatcaa

SEQ ID NO: 67792 - DNA, 700 bp, Artificial Sequence
  derived and/or modified sequence
ggcagtgtggagaatgcactgaaggaggcagaagcttctggcaagtatgaggcaaggatttcacagaagaacttggagcaaaaattcccactgtcatagctataggctgtccagtcttgagggagctgcaggaacaggaaaaagagaccttcagagaagacatggcttccagaaaagagaatgcgaagagtgcaaacagagtgctaagaataagccagttggatgcacttgaactaaacaaggccctggagcagctagtttggtcccagtttactcagtgctttcatggatttaaacctgggctgttagctcgctttgagccagaggtgaaagcgtgcttatgggttttcttgtggagattcaccatctactccaaaaatgccacagtgggacagtcagttttgaatattaagtacaaaaatgatttttcccctaacctgagatatcagccacccagtaaaaatcaaaaaatctggtatgctgtttgtacaattggtggcaggtggttagaagaacgatgctatgatttgtttcgaaaccatcatttagcatcatttgggaaagtcaagcagtgtgtgaattttgtgattggacttttgaaattaggtgggctgattaattttttgattttccttcagaggggaaagtttgcaactttgacagaacgtctcctaggtattcattctgtattttgcaagcc

SEQ ID NO: 67793 - DNA, 1470 bp, Artificial Sequence
  derived and/or modified sequence
actgccattcataccacagaacgagaaggcagtggcgatcctcaacggctacatgtcactgcctgccacttccggctcctgcgtcgctccggaagcctgcgagttccggaagccttggtaatccagattcggctaggaaaagacaagctttccagagaatgtttcagagaaagttacgtggagcgtgggcgtttcgcagactcctaagagaccttcagagaagacatggcttccagaaaagagaatgcgaagagtgcaaacagagtgctaagaataagccagttggatgcacttgaactaaacaaggccctggagcagctagtttggtcccagtttactcagtgctttcatggatttaaacctgggctgttagctcgctttgagccagaggtgaaagcgtgcttatgggttttcttgtggagattcaccatctactccaaaaatgccacagtgggacagtcagttttgaatattaagtacaaaaatgatttttcccctaacctgagatatcagccacccagtaaaaatcaaaaaatctggtatgctgtttgtacaattggtggcaggtggttagaagaacgatgctatgatttgtttcgaaaccatcatttagcatcatttgggaaagtcaagcagtgtgtgaattttgtgattggacttttgaaattaggtgggctgattaattttttgattttccttcagaggggaaagtttgcaactttgacagaacgtctcctaggtattcattctgtattttgcaagcctcaaaacatatgtgaagttggctttgaatacatgaatagggaacttctctggcatggttttgctgaatttctgatttttctcttaccacttatcaatgtccagaagttgaaagccaagctgtcttcatggtgtattcctcttactggtgcacctaatagtgacaatacattagccaccagtggcaaagaatgcgctctatgtggagagtggcccaccatgcctcacaccataggatgtgagcatattttctgttatttctgtgctaagagtagtttcttatttgacgtgtactttacttgtcctaagtgtggcacagaagtacacagtctgcagccactgaaatcaggaatcgagatgtcagaagtaaatgctctttagaaactaaaattgcttcctttgaggaaaaaaatgcaccgtgtttaaattcttaatattagtcatcctaagtataccatttatgtatcctttataaggaatgtgctcctagccactgtcttctcctttccaggcatgactgaaatctaatcactggaaaccatgtgattctaaatatattatgtaaatgttaatgtattatgttttttaaatcattgcattcaatttttaatgtcaagaataatggacagcttttgtcaggtgactactaacaatgctccttcattttactacttcttaaaacaaggttggattctaaagataaagatt

SEQ ID NO: 67794 - DNA, 1627 bp, Artificial Sequence
  derived and/or modified sequence
gggtgtccgcttcggcttttcggcccttcggctcttcggcttgtcggcgttcgcggttgtttggccatccagtgccttcagcagcgccgctaaagcgcagttctcgttggtgtaactttttcttttttttttcagccacttccggctcctgcgtcgctccggaagcctgcgagttccggaagccttggtaatccagattcggctaggaaaagacaagctttccagagaatgtttcagagaaagttacgtggagcgtgggcgtttcgcagactcctaagcttctggcaagtatgaggcaaggatttcacagaagaacttggagcaaaaattcccactgtcatagctataggctgtccagtcttgagggagctgcaggaacaggaaaaagagaccttcagagaagacatggcttccagaaaagagaatgcgaagagtgcaaacagagtgctaagaataagccagttggatgcacttgaactaaacaaggccctggagcagctagtttggtcccagtttactcagtgctttcatggatttaaacctgggctgttagctcgctttgagccagaggtgaaagcgtgcttatgggttttcttgtggagattcaccatctactccaaaaatgccacagtgggacagtcagttttgaatattaagtacaaaaatgatttttcccctaacctgagatatcagccacccagtaaaaatcaaaaaatctggtatgctgtttgtacaattggtggcaggtggttagaagaacgatgctatgatttgtttcgaaaccatcatttagcatcatttgggaaagtcaagcagtgtgtgaattttgtgattggacttttgaaattaggtgggctgattaattttttgattttccttcagaggggaaagtttgcaactttgacagaacgtctcctaggtattcattctgtattttgcaagcctcaaaacatatgtgaagttggctttgaatacatgaatagggaacttctctggcatggttttgctgaatttctgatttttctcttaccacttatcaatgtccagaagttgaaagccaagctgtcttcatggtgtattcctcttactggtgcacctaatagtgacaatacattagccaccagtggcaaagaatgcgctctatgtggagagtggcccaccatgcctcacaccataggatgtgagcatattttctgttatttctgtgctaagagtagtttcttatttgacgtgtactttacttgtcctaagtgtggcacagaagtacacagtctgcagccactgaaatcaggaatcgagatgtcagaagtaaatgctctttagaaactaaaattgcttcctttgaggaaaaaaatgcaccgtgtttaaattcttaatattagtcatcctaagtataccatttatgtatcctttataaggaatgtgctcctagccactgtcttctcctttccaggcatgactgaaatctaatcactggaaaccatgtgattctaaatatattatgtaaatgttaatgtattatgttttttaaatcattgcattcaatttttaatgtcaagaataatggacagcttttgtcaggtgactactaacaatgctccttcattttactacttcttaaaacaag

SEQ ID NO: 67795 - DNA, 918 bp, Artificial Sequence
  derived and/or modified sequence
atggcctctcggaaggagaatgcaaagtccgcaaatcgagtgctgaggattagccagcttgacgcattggagctcaacaaggcactcgaacagttagtgtggagccagtttacgcagtgctttcatgggttcaagcctggattactggctagatttgagcccgaggtaaaggcttgcctctgggtgtttctctggaggttcactatctactctaaaaatgcaaccgtcgggcagtccgtcctaaatataaagtataagaatgacttcagccctaatttgcgctaccaaccaccatctaagaatcagaagatttggtacgccgtatgtacgatcgggggacgttggctggaggagagatgttatgacctgttccgtaaccatcacctggcttcatttggaaaggtgaagcagtgtgtgaactttgtgatcggactgcttaagctcgggggtttaataaatttcttgatatttctgcaaagaggcaaatttgctaccctcaccgagaggcttctggggatccactccgtcttttgtaagcctcagaatatttgtgaggtcggtttcgaatacatgaacagggaactgctttggcatgggtttgctgagttcctaatctttctcctgcccttgattaacgtacagaaattgaaggctaaattatcctcatggtgtatccccctgactggcgcaccaaacagcgataatacgctggcgacatccggaaaggagtgtgcactgtgcggcgaatggccaaccatgccgcacactatcggttgtgagcacattttctgttacttctgcgccaagtcctcgttcctgttcgacgtctactttacctgtcccaagtgcggcacagaagtgcactcactacagcctctgaaatccggtatcgagatgtcggaggttaatgcgctgtag

SEQ ID NO: 67796 - DNA, 918 bp, Artificial Sequence
  derived and/or modified sequence
atggcttctaggaaagaaaacgctaagagtgctaacagggtactcaggatctcgcagctcgatgcactcgagttgaacaaggcccttgagcagctggtgtggagtcagtttacacagtgcttccatggattcaagcccggacttctggcgaggtttgaaccagaggtaaaagcgtgcttatgggtcttcctgtggagattcactatttattctaaaaacgctactgtcggacagtctgttcttaatataaagtacaagaatgacttttcccctaacctgcgctaccagccaccttctaagaaccaaaaaatctggtacgccgtttgcacaatcggcggacgttggctggaggagcgttgttacgatctcttcagaaatcatcatctcgcatcttttgggaaggttaagcagtgtgtaaacttcgtgataggccttcttaaactgggaggcctgattaacttcctgatatttctacagcggggtaagtttgccactctaaccgaaaggttgctcggcatccatagcgtgttctgcaagccgcagaacatctgcgaagtgggatttgagtatatgaaccgcgagctactttggcacggcttcgcagagtttctgatttttttactgccgcttataaatgtgcaaaaactcaaggccaagctctcttcttggtgcattcctctgaccggcgcaccgaattccgacaacacactggcgaccagcgggaaagagtgtgcactgtgtggcgaatggccgacaatgcctcataccatcgggtgtgagcatattttctgttatttttgcgccaagtcttcgttcctttttgacgtctactttacctgcccaaagtgcgggactgaagtccatagccttcaacccttgaaaagtggaattgagatgtcagaagtgaatgcgctctag

SEQ ID NO: 67797 - DNA, 543 bp, Artificial Sequence
  derived and/or modified sequence
atggcatccaggaaggagaacgcaaaaagtgccaaccgggtgctgaggatcagccaactcgatgcactcgaactgaacaaagcgctggaacagcttgtatggagccaatttacccagtgcttccacgggttcaagccaggcctgctggcacgcttcgaacccgaagtgaaggcttgtctctgggtttttctgtggcggttcactatatacagcaaaaacgctactgtgggccaaagcgtgctgaacattaaatacaaaaatgacttctcacccaacctccgatatcagccgccttccaagaatcagaaaatatggtatgctgtgtgcactatcggcggtagatggctagaggaacggtgctatgacttgtttcggaatcatcacttggccagttttgggaaggttaagcagtgcgttaacttcgttattggcctgttaaaactgggaggcctcatcaactttctgatatttttgcagcgtggaaagttcgccaccctcaccgaaagactcctggggatccattctgtgttctgcaaaccatag

SEQ ID NO: 67798 - DNA, 918 bp, Artificial Sequence
  derived and/or modified sequence
atggcctcacggaaggagaatgccaagtcagccaaccgagtgctgcgtataagccagctggacgctctggaactgaacaaggcactggagcagcttgtatggtcccagttcacgcaatgcttccacggctttaaacccggactcttggctcggttcgaaccggaggttaaggcgtgtttgtgggtgttcctctggcgattcaccatctactctaaaaatgctaccgtcgggcagagcgtcctgaatattaagtataaaaacgattttagtcccaatttgaggtaccagcccccttcaaagaaccagaaaatctggtacgccgtgtgtacaattggaggtcgctggctggaagagagatgttacgatctattcaggaatcatcaccttgcctcattcgggaaggtgaagcagtgtgtgaatttcgtgattggcctgctgaagctgggaggtttgattaattttctgatctttttgcagagggggaagtttgccaccttgacagagcggttgctcggtattcacagcgttttctgtaaaccacagaacatctgcgaggttggattcgaatatatgaatcgcgagctactatggcacggattcgccgagtttctcatttttctcctcccgcttataaacgtgcagaaactgaaggccaagctgtctagctggtgtattccgttaaccggggcacctaattccgacaacacattggcaacctctgggaaggaatgcgctctttgcggcgagtggccaaccatgccacacacaatcggctgcgagcatattttttgttacttctgcgctaaaagcagcttcctgttcgatgtgtactttacctgtcctaaatgtggcaccgaagtacactccctccaacccctgaaatctggaattgagatgagcgaagtaaacgcattatag

SEQ ID NO: 67799 - DNA, 918 bp, Artificial Sequence
  derived and/or modified sequence
atggcctctagaaaagagaatgcaaaatctgcgaatagagttctaaggatatcacaactggacgctctcgaacttaacaaggcactggaacagcttgtttggtctcagttcacgcaatgttttcatggatttaagccgggacttctggcaagatttgaacctgaggtgaaggcttgtctgtgggtcttcctgtggagattcaccatctactccaagaacgcaaccgttggccagtccgtgctgaatatcaaatacaaaaacgatttctcacctaacctgcggtaccaacctcctagtaagaatcagaagatctggtatgccgtatgtaccatcggcggacggtggctcgaagagcgttgctatgatttattcagaaatcatcacctagccagctttggtaaggtgaaacagtgcgtgaattttgtgatcggtttgttgaagctgggcggtctgatcaacttcttaattttccttcagaggggtaaatttgccactctcacagagagacttttaggaatccattcagttttttgtaagcctcagaacatctgcgaggtcggtttcgagtacatgaaccgcgagctgctgtggcacggattcgccgagtttctcatatttctattgcctttgataaacgtccagaaactcaaggcaaaactttcttcatggtgcattccactgaccggagcgcctaactcagacaacaccttagcaacctcaggcaaagagtgtgctctgtgcggcgagtggccgaccatgccacacacaattggttgtgagcacattttttgttacttttgtgcaaaatccagcttcctgtttgacgtatattttacgtgtccaaaatgcggaaccgaagtgcattccttgcagcctctcaaaagcggaattgaaatgtctgaggttaatgcactgtag

SEQ ID NO: 67800 - DNA, 918 bp, Artificial Sequence
  derived and/or modified sequence
atggccagcagaaaggagaacgccaagagcgccaacagagtgctgagaatcagccagctggacgccctggagctgaacaaggccctggagcagctggtgtggagccagttcacccagtgcttccacggcttcaagcccggcctgctggccagattcgagcccgaggtgaaggcctgcctgtgggtgttcctgtggagattcaccatctacagcaagaacgccaccgtgggccagagcgtgctgaacatcaagtacaagaacgacttcagccccaacctgagataccagccccccagcaagaaccagaagatctggtacgccgtgtgcaccatcggcggcagatggctggaggagagatgctacgacctgttcagaaaccaccacctggccagcttcggcaaggtgaagcagtgcgtgaacttcgtgatcggcctgctgaagctgggcggcctgatcaacttcctgatcttcctgcagagaggcaagttcgccaccctgaccgagagactgctgggcatccacagcgtgttctgcaagccccagaacatctgcgaggtgggcttcgagtacatgaacagagagctgctgtggcacggcttcgccgagttcctgatcttcctgctgcccctgatcaacgtgcagaagctgaaggccaagctgagcagctggtgcatccccctgaccggcgcccccaacagcgacaacaccctggccaccagcggcaaggagtgcgccctgtgcggcgagtggcccaccatgccccacaccatcggctgcgagcacatcttctgctacttctgcgccaagagcagcttcctgttcgacgtgtacttcacctgccccaagtgcggcaccgaggtgcacagcctgcagcccctgaagagcggcatcgagatgagcgaggtgaacgccctgtag

SEQ ID NO: 67801 - DNA, 543 bp, Artificial Sequence
  derived and/or modified sequence
atggccagcagaaaggagaacgccaagagcgccaacagagtgctgagaatcagccagctggacgccctggagctgaacaaggccctggagcagctggtgtggagccagttcacccagtgcttccacggcttcaagcccggcctgctggccagattcgagcccgaggtgaaggcctgcctgtgggtgttcctgtggagattcaccatctacagcaagaacgccaccgtgggccagagcgtgctgaacatcaagtacaagaacgacttcagccccaacctgagataccagccccccagcaagaaccagaagatctggtacgccgtgtgcaccatcggcggcagatggctggaggagagatgctacgacctgttcagaaaccaccacctggccagcttcggcaaggtgaagcagtgcgtgaacttcgtgatcggcctgctgaagctgggcggcctgatcaacttcctgatcttcctgcagagaggcaagttcgccaccctgaccgagagactgctgggcatccacagcgtgttctgcaagccctag

SEQ ID NO: 67802 - DNA, 639 bp, Artificial Sequence
  derived and/or modified sequence
atggaccccgtggtgctgagctacatggacagcctgctgagacagagcgacgtgagcctgctggacccccccagctggctgaacgaccacatcatcggcttcgccttcgagtacttcgccaacagccagttccacgactgcagcgaccacgtgagcttcatcagccccgaggtgacccagttcatcaagtgcaccagcaaccccgccgagatcgccatgttcctggagcccctggacctgcccaacaagagagtggtgttcctggccatcaacgacaacagcaaccaggccgccggcggcacccactggagcctgctggtgtacctgcaggacaagaacagcttcttccactacgacagccacagcagaagcaacagcgtgcacgccaagcaggtggccgagaagctggaggccttcctgggcagaaagggcgacaagctggccttcgtggaggagaaggcccccgcccagcagaacagctacgactgcggcatgtacgtgatctgcaacaccgaggccctgtgccagaacttcttcagacagcagaccgagagcctgctgcagctgctgacccccgcctacatcaccaagaagagaggcgagtggaaggacctgatcaccaccctggccaagaagtag

SEQ ID NO: 67803 - DNA, 639 bp, Artificial Sequence
  derived and/or modified sequence
atggatccagtggtgctgtcctacatggatagtttgttaagacagtctgacgtgagcctgctcgacccaccatcttggttgaacgaccacataataggttttgcgtttgagtacttcgcaaacagccagtttcacgattgcagtgaccacgtgagctttataagccctgaggtcacacagttcatcaagtgcacaagtaatcccgccgagatcgccatgtttctggaaccattagatctgccaaacaaaagagtcgtgtttctcgcaatcaacgacaattctaaccaagccgctggaggcacacactggtctctcctggtttatctgcaggataagaacagtttcttccattacgacagccacagcaggagcaactcagtacacgcaaagcaagtggccgaaaaactggaggcctttctcggtagaaagggcgacaagctggcctttgtcgaggaaaaggcgcctgcacaacaaaacagctacgactgcgggatgtatgtgatctgtaacaccgaagcgttgtgccaaaattttttcagacagcagacagagtcgctactgcagcttcttacacctgcctatatcacaaagaagcggggggagtggaaggatcttatcactacgttggccaaaaaatag

SEQ ID NO: 67804 - DNA, 639 bp, Artificial Sequence
  derived and/or modified sequence
atggaccccgtggtactcagttacatggattccttgttacggcaatcagacgtctccttgctggatccgccaagttggctcaacgatcatattattggcttcgcctttgagtatttcgcgaatagtcaatttcatgactgcagtgatcacgtgagttttattagccctgaagtgacacagttcatcaagtgcaccagcaatccagcggagatagcaatgtttctggagccacttgacttgcccaacaagcgcgttgtgtttctagctatcaatgacaacagcaaccaggctgcggggggcacccattggtcgctattagtataccttcaagacaaaaattcttttttccactatgatagccatagccggtctaactcagtacatgccaaacaggtagctgagaaactggaggcctttctcgggcgcaaaggcgataagcttgcgtttgtcgaagaaaaggctccagcccagcagaacagctatgattgtggcatgtacgtgatttgcaatactgaggctctatgtcagaatttttttagacagcaaacagagtcgctgctccagttacttaccccggcatacattaccaaaaaacggggcgagtggaaggatctgatcaccactctggccaagaaatag

SEQ ID NO: 67805 - DNA, 639 bp, Artificial Sequence
  derived and/or modified sequence
atggaccccgtcgtcttgtcctacatggattcactgctgagacagagcgacgtgtcactgctagatccgccttcttggttgaacgatcatatcatcgggttcgcgttcgagtacttcgccaatagccaatttcacgactgctctgaccacgtatcttttataagcccggaagtgacccagtttatcaagtgtacctccaaccctgcggaaatcgctatgtttctggaacctctggatctccctaataaacgcgtcgtgtttcttgcgattaacgacaactcgaaccaggccgcaggtgggacccactggtccttgcttgtgtacctgcaagacaaaaattcattcttccattacgattctcacagtaggtctaatagtgttcatgccaagcaggttgccgagaagctggaggcttttcttggcagaaagggtgataagctcgccttcgtggaagaaaaggcccctgcccaacagaatagctatgactgcggcatgtacgtgatatgcaatactgaggcgctctgtcaaaatttctttcgccagcagacagaatccctgctgcaactgcttacacccgcttacatcacgaaaaagcgcggcgagtggaaggacctcataaccacactggccaaaaagtag

SEQ ID NO: 67806 - DNA, 639 bp, Artificial Sequence
  derived and/or modified sequence
atggaccctgtggttttgtcttatatggacagtctcctaaggcagagcgacgtgagcctgcttgacccaccttcttggttgaatgaccacatcataggctttgcctttgagtactttgctaattcacagtttcacgattgcagcgatcatgtgtctttcatcagcccagaggtcacccagtttattaagtgtactagcaacccagccgagatcgcgatgtttctcgagcctctcgatctgcccaacaagagagttgttttcttggcgatcaacgataattctaaccaggccgcgggcggtactcattggtccctcctcgtgtacctccaggataagaactcctttttccattacgattcccattctagatccaatagtgtgcatgccaaacaggtagccgagaaactggaagccttcctgggcaggaagggtgacaaactggcctttgtggaggaaaaagccccggctcagcagaactcatatgactgcggcatgtacgtgatttgtaatactgaggcactgtgccaaaatttttttaggcagcagacagagtccctcttacagctgcttactccggcctatatcactaaaaaacgaggcgagtggaaggatctgattaccaccttagccaagaagtag

SEQ ID NO: 67807 - DNA, 639 bp, Artificial Sequence
  derived and/or modified sequence
atggaccctgtggtgctgagctacatggacagcctgctgcggcagagtgatgtgtccctgctggaccccccatcctggctgaatgaccacatcatcggctttgcctttgagtactttgccaacagccagttccatgactgcagcgaccacgtgtccttcatcagccctgaggtgacccagttcatcaagtgcaccagcaacccagctgagatcgccatgttcctggagcccctggacctgcccaacaagagggtggtgttcctggccatcaatgacaacagcaaccaggccgccggcggcacccactggagcctgctggtgtacctgcaggacaagaacagcttcttccactatgacagccacagccgcagcaacagcgtgcacgccaagcaggtggccgagaagctggaggccttcctgggcaggaaaggagacaagctggcctttgtggaggagaaggccccagcccagcagaacagctatgactgtggcatgtatgtgatctgcaacacagaggccctgtgccagaacttcttccggcagcagacagagagcctgctgcagctgctgaccccagcctacatcaccaagaagagaggagagtggaaggacctgatcaccaccctggccaagaagtag

SEQ ID NO: 67808 - DNA, 639 bp, Artificial Sequence
  derived and/or modified sequence
atggaccccgtggtgctgagctacatggacagcctgctgcggcagtccgatgtctccctgctggacccgccaagttggttgaatgaccatatcattggatttgcattcgagtactttgcgaactcccaattccatgattgctctgaccacgtttctttcatctccccagaagttacccagttcatcaaatgtaccagtaacccggcagagatcgccatgtttttggaacccctcgatctgcctaacaagcgagtcgtgttcctcgccatcaatgacaattcaaatcaagcagccggcggcacccactggagcctcctcgtctacctacaagacaagaattcctttttccactacgacagtcattccaggagtaattccgttcacgccaagcaggtcgcagagaaattggaagctttcctgggtagaaaaggagataagttagcgtttgtggaggagaaagctccggcgcagcagaattcttatgactgcggcatgtacgtgatatgcaatacggaggctctgtgtcagaactttttccgccagcaaactgagtctttgctgcagcttctgaccccagcgtatattaccaagaagcggggagagtggaaagatcttatcactactttggccaagaagtag

SEQ ID NO: 67809 - DNA, 639 bp, Artificial Sequence
  derived and/or modified sequence
atggaccccgtggtgctgagctacatggacagcctgctgcggcagtctgatgtaagcctcctggacccgcccagctggctgaatgaccacatcatcggcttcgcatttgaatactttgctaattcccagttccatgactgcagtgatcatgtatctttcataagccccgaagtcactcaatttataaaatgcacatcaaaccccgcagagatagctatgtttctggaacccctcgacttacctaataagcgcgtcgtgttcctcgcgataaatgataattccaaccaggcagctggagggactcactggtcgctgctggtttaccttcaggacaagaacagttttttccattacgatagccatagtcgctccaacagcgtacacgccaagcaagtagccgagaagctggaagcgttcctgggtcggaagggagataagctggcttttgtggaggagaaagctccagctcagcagaattcttacgattgcggaatgtatgttatatgtaacacagaggccctatgccagaatttcttccggcagcagacagagagtctgcttcagctgctgaccccagcgtatattaccaaaaaacgtggagaatggaaagatctgattactacacttgccaagaaatag

SEQ ID NO: 67810 - DNA, 639 bp, Artificial Sequence
  derived and/or modified sequence
atggaccccgtggtgctgagctacatggacagcctgctgcggcagagtgatgttagcctcctcgacccccctagctggctaaacgatcacatcattggatttgcttttgagtactttgccaactctcaattccatgactgtagcgatcacgtgtccttcatctcaccggaggtgacccagtttataaagtgcacctctaaccccgcagaaatcgcaatgtttctagagccgctggacctgcctaataaaagagtggtcttcctggctatcaacgacaactcaaatcaggccgctggggggacccactggtcgctcttggtctacttacaggataaaaacagttttttccattatgactctcactcccgatccaattctgtacacgccaaacaggttgccgaaaagctggaggcctttctgggtcggaaaggcgacaaacttgcgttcgtcgaggagaaggcgccagctcaacagaactcctatgactgcggcatgtatgtcatctgtaatactgaagccctctgtcaaaatttttttagacaacagaccgaatccctgctgcagctgctgacccccgcctatatcacaaagaagagaggggagtggaaagacctgatcaccactctggctaaaaagtag

SEQ ID NO: 67811 - DNA, 639 bp, Artificial Sequence
  derived and/or modified sequence
atggaccccgtggtgctgagctacatggacagcctgctgcggcagagcgacgtgtccctgttggatcccccctcatggctcaacgatcacattatagggtttgcatttgagtatttcgccaactcccagtttcacgattgtagtgaccacgtgagttttatctcccctgaggtgacccagttcatcaaatgcactagtaacccggcagaaattgccatgttcctcgaacccctagatttaccaaataaaagagttgtgtttctagctatcaacgataacagcaatcaagccgctgggggaactcattggtccctgcttgtctatcttcaggacaaaaattccttttttcactacgattcccactctaggagcaactcggtgcatgcaaagcaggtggctgaaaaactggaggctttccttgggcgcaagggagataagctggctttcgtggaggagaaagcccctgcccagcagaactcatacgactgtggcatgtatgtcatctgcaatactgaggccctgtgtcagaatttcttccgtcagcagacagagtcactgctccagttattaacgccagcttatattacgaagaaaaggggggaatggaaagacttgattactacactggccaaaaagtag

SEQ ID NO: 67812 - DNA, 639 bp, Artificial Sequence
  derived and/or modified sequence
atggaccctgttgtcttgtcctacatggatagtttgttgagacagagcgatgtgagtctcttggatcccccatcttggctgaatgatcacattattggattcgcttttgagtacttcgccaacagccagtttcatgactgttccgatcatgtcagctttatctcgcctgaggttacacagtttatcaagtgcacttccaaccccgcagagattgccatgttcctggaaccgcttgatcttcccaacaaacgagtggtgtttttagccataaacgacaacagcaaccaggccgcaggcggtactcactggagtctgttggtgtatctccaggataagaatagctttttccactacgactctcattcaaggagtaactctgtgcacgccaaacaagtggctgagaagttagaagcttttctgggtcggaagggggacaaacttgcatttgtcgaagaaaaagcacctgcccaacagaattcgtacgactgcggcatgtacgtgatctgcaatactgaagctctgtgccagaatttctttcggcagcagactgagtcgctgctccagctcctcacacctgcctatattacaaagaaacggggtgaatggaaagacttgattaccacattggctaagaagtag

SEQ ID NO: 67813 - DNA, 639 bp, Artificial Sequence
  derived and/or modified sequence
atggacccagtggttctctcctacatggactcattgttacggcagtccgatgtgtcactcctggatccaccaagctggctcaatgatcatatcatcggctttgccttcgagtatttcgctaactcccagttccatgattgttctgatcacgtgtctttcattagcccagaggtcacccagttcatcaagtgcactagcaaccccgcagagatcgctatgtttctggagcccctggatttacccaacaagagagtggtctttctagctattaatgacaattcaaaccaggctgccggtggcacacattggagtctcctggtgtacctgcaggacaaaaactccttttttcattatgatagccatagtcggagcaacagcgttcacgcaaaacaagtcgccgaaaaactcgaagctttcctcgggagaaagggcgataagttggcgttcgtagaagagaaggccccagcacagcagaatagctacgattgcggaatgtatgtgatatgtaacacagaagccctctgccagaactttttcagacagcagaccgagtcacttttacagctcctgactcctgcttacatcaccaagaagagaggggaatggaaggatttaattactacattagcaaagaaatag

SEQ ID NO: 67814 - DNA, 639 bp, Artificial Sequence
  derived and/or modified sequence
atggacccggtggtgctcagttacatggacagcctactgaggcagtccgatgtgtccttgctggatcccccaagctggttgaatgaccatataatcggttttgcgtttgagtatttcgccaattcccaatttcacgactgtagcgaccacgtgtcattcatcagtcctgaggtgacgcaatttatcaagtgtacaagcaatcctgccgagatagctatgttcctggagccgcttgacctgcccaacaagcgagtcgtgttcctcgccatcaatgacaactcgaatcaggctgctgggggaacccactggtccctgctcgtgtatttgcaagacaagaattccttctttcattacgacagtcatagtcgctcaaacagcgttcatgctaagcaggtcgctgaaaagttggaagcttttcttggaagaaagggcgataaattggccttcgtggaggagaaggctccggctcagcaaaactcttatgactgtgggatgtatgtgatttgtaacacagaggccctgtgccagaactttttcaggcagcagaccgagagtttattgcaactgttaacaccggcttacataactaagaagagaggcgagtggaaggatcttattacaacattagcaaagaagtag

SEQ ID NO: 67815 - DNA, 639 bp, Artificial Sequence
  derived and/or modified sequence
atggacccagtggtattgagttatatggatagcctactcagacagtcagatgtctcccttctggacccacccagttggctcaacgaccacatcatcggcttcgcctttgaatatttcgccaactctcaattccacgactgcagcgatcacgtgtcctttatcagtccagaggttacccagttcattaagtgtaccagtaatccagcagagatagcaatgttcctggagcccttggatctacctaacaagcgtgtagtatttctggccatcaacgacaactccaaccaggccgctggaggtactcactggtccctcctcgtttatctgcaggataagaactccttcttccactacgactcccactctaggagcaactccgtccacgccaagcaggttgctgagaagctggaagcattcctgggaagaaaaggggataagctcgcatttgtggaggagaaggcgccagcccagcaaaactcatacgactgcgggatgtatgttatatgtaacaccgaggccctatgccagaatttctttcggcagcagacagagagcctgttgcagttgctgacacccgcttacattactaagaagcggggagaatggaaggacctgatcactacactagccaaaaaatag

SEQ ID NO: 67816 - protein, 1163 aa, Artificial Sequence
  derived and/or modified sequence
MERGAREMAAPGDCPAGKAAGTSRPTRSLSTAQLVQPSGGLQASVISNIVLMKGQAKGLGFSIVGGKDSIYGPIGIYVKTIFAGGAAAADGRLQEGDEILELNGESMAGLTHQDALQKFKQAKKGLLTLTVRTRLTAPPSLCSHLSPPLCRSLSSSTCITKDSSSFALESPSAPISTAKPNYRIMVEVSLQKEAGVGLGIGLCSVPYFQCISGIFVHTLSPGSVAHLDGRLRCGDEIVEISDSPVHCLTLNEVYTILSHCDPGPVPIIVSRHPDPQVSEQQLKEAVAQAVENTKFGKERHQWSLEGVKRLESSWHGRPTLEKEREKNSAPPHRRAQKVMIRSSSDSSYMSGSPGGSPGSGSAEKPSSDVDISTHSPSLPLAREPVVLSIASSRLPQESPPLPESRDSHPPLRLKKSFEILVRKPMSSKPKPPPRKYFKSDSDPQKSLEERENSSCSSGHTPPTCGQEARELLPLLLPQEDTAGRSPSASAGCPGPGIGPQTKSSTEGEPGWRRASPVTQTSPIKHPLLKRQARMDYSFDTTAEDPWVRISDCIKNLFSPIMSENHGHMPLQPNASLNEEEGTQGHPDGTPPKLDTANGTPKVYKSADSSTVKKGPPVAPKPAWFRQSLKGLRNRASDPRGLPDPALSTQPAPASREHLGSHIRASSSSSSIRQRISSFETFGSSQLPDKGAQRLSLQPSSGEAAKPLGKHEEGRFSGLLGRGAAPTLVPQQPEQVLSSGSPAASEARDPGVSESPPPGRQPNQKTLPPGPDPLLRLLSTQAEESQGPVLKMPSQRARSFPLTRSQSCETKLLDEKTSKLYSISSQVSSAVMKSLLCLPSSISCAQTPCIPKEGASPTSSSNEDSAANGSAETSALDTGFSLNLSELREYTEGLTEAKEDDDGDHSSLQSGQSVISLLSSEELKKLIEEVKVLDEATLKQLDGIHVTILHKEEGAGLGFSLAGGADLENKVITVHRVFPNGLASQEGTIQKGNEVLSINGKSLKGTTHHDALAILRQAREPRQAVIVTRKLTPEAMPDLNSSTDSAASASAASDVSVESTEATVCTVTLEKMSAGLGFSLEGGKGSLHGDKPLTINRIFKGAASEQSETVQPGDEILQLGGTAMQGLTRFEAWNIIKALPDGPVTIVIRRKSLQSKETTAAGDS

SEQ ID NO: 67817 - protein, 657 aa, Artificial Sequence
  derived and/or modified sequence
MWLPVKELTIHECQQMSTYRAPNQEARELLPLLLPQEDTAGRSPSASAGCPGPGIGPQTKSSTEGEPGWRRASPVTQTSPIKHPLLKRQARMDYSFDTTAEDPWVRISDCIKNLFSPIMSENHGHMPLQPNASLNEEEGTQGHPDGTPPKLDTANGTPKVYKSADSSTVKKGPPVAPKPAWFRQSLKGLRNRASDPRGLPDPALSTQPAPASREHLGSHIRASSSSSSIRQRISSFETFGSSQLPDKGAQRLSLQPSSGEAAKPLGKHEEGRFSGLLGRGAAPTLVPQQPEQVLSSGSPAASEARDPGVSESPPPGRQPNQKTLPPGPDPLLRLLSTQAEESQGPVLKMPSQRARSFPLTRSQSCETKLLDEKTSKLYSISSQVSSAVMKSLLCLPSSISCAQTPCIPKEGASPTSSSNEDSAANGSAETSALDTGFSLNLSELREYTEGLTEAKEDDDGDHSSLQSGQSVISLLSSEELKKLIEEVKVLDEATLKQLDGIHVTILHKEEGAGLGFSLAGGADLENKVITVHRVFPNGLASQEGTIQKGNEVLSINGKSLKGTTHHDALAILRQAREPRQAVIVTRKLTPEAMPDLNSSTDSAASASAASDVSVESTEATVCTVTLEKMSAGLGFSLEGGKGSLHGDKPLTINRIFK

SEQ ID NO: 67818 - protein, 560 aa, Artificial Sequence
  derived and/or modified sequence
MDYSFDTTAEDPWVRISDCIKNLFSPIMSENHGHMPLQPNASLNEEEGTQGHPDGTPPKLDTANGTPKVYKSADSSTVKKGPPVAPKPAWFRQSLKGLRNRASDPRGLPDPALSTQPAPASREHLGSHIRASSSSSSIRQRISSFETFGSSQLPDKGAQRLSLQPSSGEAAKPLGKHEEGRFSGLLGRGAAPTLVPQQPEQVLSSGSPAASEARDPGVSESPPPGRQPNQKTLPPGPDPLLRLLSTQAEESQGPVLKMPSQRARSFPLTRSQSCETKLLDEKTSKLYSISSQVSSAVMKSLLCLPSSISCAQTPCIPKEGASPTSSSNEDSAANGSAETSALDTGFSLNLSELREYTEGLTEAKEDDDGDHSSLQSGQSVISLLSSEELKKLIEEVKVLDEATLKQLDGIHVTILHKEEGAGLGFSLAGGADLENKVITVHRVFPNGLASQEGTIQKGNEVLSINGKSLKGTTHHDALAILRQAREPRQAVIVTRKLTPEAMPDLNSSTDSAASASAASDVSVESTEATVCTVTLEDVGRAGLQPGRREGLPTRRQASHH

SEQ ID NO: 67819 - protein, 1331 aa, Artificial Sequence
  derived and/or modified sequence
MESHSRAGKSRKSAKFRSISRSLMLCNAKTSDDGSSPDEKYPDPFEISLAQGKEGIFHSSVQLADTSEAGPSSVPDLALASEAAQLQAAGNDRGKTCRRIFFMKESSTASSREKPGKLEAQSSNFLFPKACHQRARSNSTSVNPYCTREIDFPMTKKSAAPTDRQPYSLCSNRKSLSQQLDCPAGKAAGTSRPTRSLSTAQLVQPSGGLQASVISNIVLMKGQAKGLGFSIVGGKDSIYGPIGIYVKTIFAGGAAAADGRLQEGDEILELNGESMAGLTHQDALQKFKQAKKGLLTLTVRTRLTAPPSLCSHLSPPLCRSLSSSTCITKDSSSFALESPSAPISTAKPNYRIMVEVSLQKEAGVGLGIGLCSVPYFQCISGIFVHTLSPGSVAHLDGRLRCGDEIVEISDSPVHCLTLNEVYTILSHCDPGPVPIIVSRHPDPQVSEQQLKEAVAQAVENTKFGKERHQWSLEGVKRLESSWHGRPTLEKEREKNSAPPHRRAQKVMIRSSSDSSYMSGSPGGSPGSGSAEKPSSDVDISTHSPSLPLAREPVVLSIASSRLPQESPPLPESRDSHPPLRLKKSFEILVRKPMSSKPKPPPRKYFKSDSDPQKSLEERENSSCSSGHTPPTCGQEARELLPLLLPQEDTAGRSPSASAGCPGPGIGPQTKSSTEGEPGWRRASPVTQTSPIKHPLLKRQARMDYSFDTTAEDPWVRISDCIKNLFSPIMSENHGHMPLQPNASLNEEEGTQGHPDGTPPKLDTANGTPKVYKSADSSTVKKGPPVAPKPAWFRQSLKGLRNRASDPRGLPDPALSTQPAPASREHLGSHIRASSSSSSIRQRISSFETFGSSQLPDKGAQRLSLQPSSGEAAKPLGKHEEGRFSGLLGRGAAPTLVPQQPEQVLSSGSPAASEARDPGVSESPPPGRQPNQKTLPPGPDPLLRLLSTQAEESQGPVLKMPSQRARSFPLTRSQSCETKLLDEKTSKLYSISSQVSSAVMKSLLCLPSSISCAQTPCIPKEGASPTSSSNEDSAANGSAETSALDTGFSLNLSELREYTEGLTEAKEDDDGDHSSLQSGQSVISLLSSEELKKLIEEVKVLDEATLKQLDGIHVTILHKEEGAGLGFSLAGGADLENKVITVHRVFPNGLASQEGTIQKGNEVLSINGKSLKGTTHHDALAILRQAREPRQAVIVTRKLTPEAMPDLNSSTDSAASASAASDVSVESTEATVCTVTLEKMSAGLGFSLEGGKGSLHGDKPLTINRIFKGAASEQSETVQPGDEILQLGGTAMQGLTRFEAWNIIKALPDGPVTIVIRRKSLQSKETTAAGDS

SEQ ID NO: 67820 - protein, 594 aa, Artificial Sequence
  derived and/or modified sequence
MESHSRAGKSRKSAKFRSISRSLMLCNAKTSDDGSSPDEKYPDPFEISLAQGKEGIFHSSVQLADTSEAGPSSVPDLALASEAAQLQAAGNDRGKTCRRIFFMKESSTASSREKPGKLEAQSSNFLFPKACHQRARSNSTSVNPYCTREIDFPMTKKSAAPTDRQPYSLCSNRKSLSQQLDCPAGKAAGTSRPTRSLSTAQLVQPSGGLQASVISNIVLMKGQAKGLGFSIVGGKDSIYGPIGIYVKTIFAGGAAAADGRLQEGDEILELNGESMAGLTHQDALQKFKQAKKGLLTLTVRTRLTAPPSLCSHLSPPLCRSLSSSTCITKDSSSFALESPSAPISTAKPNYRIMVEVSLQKEAGVGLGIGLCSVPYFQCISGIFVHTLSPGSVAHLDGRLRCGDEIVEISDSPVHCLTLNEVYTILSHCDPGPVPIIVSRHPDPQVSEQQLKEAVAQAVENTKFGKERHQWSLEGVKRLESSWHGRPTLEKEREKNSAPPHRRAQKVMIRSSSDSSYMSGSPGGSPGSGSAEKPSSDVDISTHSPSLPLAREPVVLSIASSRLPQESPPLPESRDSHPPLRLKKSFEILVRKPMS

SEQ ID NO: 67821 - DNA, 2163 bp, Artificial Sequence
  derived and/or modified sequence
atgtgcagcgtgctgcccgtggccgtgaccggcgtgaagagactggagagcagctggcacggcagacccaccctggagaaggagagagagaagaacagcgcccccccccacagaagagcccagaaggtgatgatcagaagcagcagcgacagcagctacatgagcggcagccccggcggcagccccggcagcggcagcgccgagaagcccagcagcgacgtggacatcagcacccacagccccagcctgcccctggccagagagcccgtggtgctgagcatcgccagcagcagactgccccaggagagcccccccctgcccgagagcagagacagccacccccccctgagactgaagaagagcttcgagatcctggtgagaaagcccatgagcagcaagcccaagcccccccccagaaagtacttcaagagcgacagcgacccccagaagagcctggaggagagagagaacagcagctgcagcagcggccacaccccccccacctgcggccaggaggccagagagctgctgcccctgctgctgccccaggaggacaccgccggcagaagccccagcgccagcgccggctgccccggccccggcatcggcccccagaccaagagcagcaccgagggcgagcccggctggagaagagccagccccgtgacccagaccagccccatcaagcaccccctgctgaagagacaggccagaatggactacagcttcgacaccaccgccgaggacccctgggtgagaatcagcgactgcatcaagaacctgttcagccccatcatgagcgagaaccacggccacatgcccctgcagcccaacgccagcctgaacgaggaggagggcacccagggccaccccgacggcaccccccccaagctggacaccgccaacggcacccccaaggtgtacaagagcgccgacagcagcaccgtgaagaagggcccccccgtggcccccaagcccgcctggttcagacagagcctgaagggcctgagaaacagagccagcgaccccagaggcctgcccgaccccgccctgagcacccagcccgcccccgccagcagagagcacctgggcagccacatcagagccagcagcagcagcagcagcatcagacagagaatcagcagcttcgagaccttcggcagcagccagctgcccgacaagggcgcccagagactgagcctgcagcccagcagcggcgaggccgccaagcccctgggcaagcacgaggagggcagattcagcggcctgctgggcagaggcgccgcccccaccctggtgccccagcagcccgagcaggtgctgagcagcggcagccccgccgccagcgaggccagagaccccggcgtgagcgagagccccccccccggcagacagcccaaccagaagaccctgccccccggccccgaccccctgctgagactgctgagcacccaggccgaggagagccagggccccgtgctgaagatgcccagccagagagccagaagcttccccctgaccagaagccagagctgcgagaccaagctgctggacgagaagaccagcaagctgtacagcatcagcagccaggtgagcagcgccgtgatgaagagcctgctgtgcctgcccagcagcatcagctgcgcccagaccccctgcatccccaaggagggcgccagccccaccagcagcagcaacgaggacagcgccgccaacggcagcgccgagaccagcgccctggacaccggcttcagcctgaacctgagcgagctgagagagtacaccgagggcctgaccgaggccaaggaggacgacgacggcgaccacagcagcctgcagagcggccagagcgtgatcagcctgctgagcagcgaggagctgaagaagctgatcgaggaggtgaaggtgctggacgaggccaccctgaagcagctggacggcatccacgtgaccatcctgcacaaggaggagggcgccggcctgggcttcagcctggccggcggcgccgacctggagaacaaggtgatcaccgtgcacagagtgttccccaacggcctggccagccaggagggcaccatccagaagggcaacgaggtgctgagcatcaacggcaagagcctgaagggcaccacccaccacgccagaccccagctgctgcactag

SEQ ID NO: 67822 - DNA, 3492 bp, Artificial Sequence
  derived and/or modified sequence
atggagagaggcgccagagagatggccgcccccggcgactgccccgccggcaaggccgccggcaccagcagacccaccagaagcctgagcaccgcccagctggtgcagcccagcggcggcctgcaggccagcgtgatcagcaacatcgtgctgatgaagggccaggccaagggcctgggcttcagcatcgtgggcggcaaggacagcatctacggccccatcggcatctacgtgaagaccatcttcgccggcggcgccgccgccgccgacggcagactgcaggagggcgacgagatcctggagctgaacggcgagagcatggccggcctgacccaccaggacgccctgcagaagttcaagcaggccaagaagggcctgctgaccctgaccgtgagaaccagactgaccgccccccccagcctgtgcagccacctgagcccccccctgtgcagaagcctgagcagcagcacctgcatcaccaaggacagcagcagcttcgccctggagagccccagcgcccccatcagcaccgccaagcccaactacagaatcatggtggaggtgagcctgcagaaggaggccggcgtgggcctgggcatcggcctgtgcagcgtgccctacttccagtgcatcagcggcatcttcgtgcacaccctgagccccggcagcgtggcccacctggacggcagactgagatgcggcgacgagatcgtggagatcagcgacagccccgtgcactgcctgaccctgaacgaggtgtacaccatcctgagccactgcgaccccggccccgtgcccatcatcgtgagcagacaccccgacccccaggtgagcgagcagcagctgaaggaggccgtggcccaggccgtggagaacaccaagttcggcaaggagagacaccagtggagcctggagggcgtgaagagactggagagcagctggcacggcagacccaccctggagaaggagagagagaagaacagcgcccccccccacagaagagcccagaaggtgatgatcagaagcagcagcgacagcagctacatgagcggcagccccggcggcagccccggcagcggcagcgccgagaagcccagcagcgacgtggacatcagcacccacagccccagcctgcccctggccagagagcccgtggtgctgagcatcgccagcagcagactgccccaggagagcccccccctgcccgagagcagagacagccacccccccctgagactgaagaagagcttcgagatcctggtgagaaagcccatgagcagcaagcccaagcccccccccagaaagtacttcaagagcgacagcgacccccagaagagcctggaggagagagagaacagcagctgcagcagcggccacaccccccccacctgcggccaggaggccagagagctgctgcccctgctgctgccccaggaggacaccgccggcagaagccccagcgccagcgccggctgccccggccccggcatcggcccccagaccaagagcagcaccgagggcgagcccggctggagaagagccagccccgtgacccagaccagccccatcaagcaccccctgctgaagagacaggccagaatggactacagcttcgacaccaccgccgaggacccctgggtgagaatcagcgactgcatcaagaacctgttcagccccatcatgagcgagaaccacggccacatgcccctgcagcccaacgccagcctgaacgaggaggagggcacccagggccaccccgacggcaccccccccaagctggacaccgccaacggcacccccaaggtgtacaagagcgccgacagcagcaccgtgaagaagggcccccccgtggcccccaagcccgcctggttcagacagagcctgaagggcctgagaaacagagccagcgaccccagaggcctgcccgaccccgccctgagcacccagcccgcccccgccagcagagagcacctgggcagccacatcagagccagcagcagcagcagcagcatcagacagagaatcagcagcttcgagaccttcggcagcagccagctgcccgacaagggcgcccagagactgagcctgcagcccagcagcggcgaggccgccaagcccctgggcaagcacgaggagggcagattcagcggcctgctgggcagaggcgccgcccccaccctggtgccccagcagcccgagcaggtgctgagcagcggcagccccgccgccagcgaggccagagaccccggcgtgagcgagagccccccccccggcagacagcccaaccagaagaccctgccccccggccccgaccccctgctgagactgctgagcacccaggccgaggagagccagggccccgtgctgaagatgcccagccagagagccagaagcttccccctgaccagaagccagagctgcgagaccaagctgctggacgagaagaccagcaagctgtacagcatcagcagccaggtgagcagcgccgtgatgaagagcctgctgtgcctgcccagcagcatcagctgcgcccagaccccctgcatccccaaggagggcgccagccccaccagcagcagcaacgaggacagcgccgccaacggcagcgccgagaccagcgccctggacaccggcttcagcctgaacctgagcgagctgagagagtacaccgagggcctgaccgaggccaaggaggacgacgacggcgaccacagcagcctgcagagcggccagagcgtgatcagcctgctgagcagcgaggagctgaagaagctgatcgaggaggtgaaggtgctggacgaggccaccctgaagcagctggacggcatccacgtgaccatcctgcacaaggaggagggcgccggcctgggcttcagcctggccggcggcgccgacctggagaacaaggtgatcaccgtgcacagagtgttccccaacggcctggccagccaggagggcaccatccagaagggcaacgaggtgctgagcatcaacggcaagagcctgaagggcaccacccaccacgacgccctggccatcctgagacaggccagagagcccagacaggccgtgatcgtgaccagaaagctgacccccgaggccatgcccgacctgaacagcagcaccgacagcgccgccagcgccagcgccgccagcgacgtgagcgtggagagcaccgaggccaccgtgtgcaccgtgaccctggagaagatgagcgccggcctgggcttcagcctggagggcggcaagggcagcctgcacggcgacaagcccctgaccatcaacagaatcttcaagggcgccgccagcgagcagagcgagaccgtgcagcccggcgacgagatcctgcagctgggcggcaccgccatgcagggcctgaccagattcgaggcctggaacatcatcaaggccctgcccgacggccccgtgaccatcgtgatcagaagaaagagcctgcagagcaaggagaccaccgccgccggcgacagctag

SEQ ID NO: 67823 - DNA, 1974 bp, Artificial Sequence
  derived and/or modified sequence
atgtggctgcccgtgaaggagctgaccatccacgagtgccagcagatgagcacctacagagcccccaaccaggaggccagagagctgctgcccctgctgctgccccaggaggacaccgccggcagaagccccagcgccagcgccggctgccccggccccggcatcggcccccagaccaagagcagcaccgagggcgagcccggctggagaagagccagccccgtgacccagaccagccccatcaagcaccccctgctgaagagacaggccagaatggactacagcttcgacaccaccgccgaggacccctgggtgagaatcagcgactgcatcaagaacctgttcagccccatcatgagcgagaaccacggccacatgcccctgcagcccaacgccagcctgaacgaggaggagggcacccagggccaccccgacggcaccccccccaagctggacaccgccaacggcacccccaaggtgtacaagagcgccgacagcagcaccgtgaagaagggcccccccgtggcccccaagcccgcctggttcagacagagcctgaagggcctgagaaacagagccagcgaccccagaggcctgcccgaccccgccctgagcacccagcccgcccccgccagcagagagcacctgggcagccacatcagagccagcagcagcagcagcagcatcagacagagaatcagcagcttcgagaccttcggcagcagccagctgcccgacaagggcgcccagagactgagcctgcagcccagcagcggcgaggccgccaagcccctgggcaagcacgaggagggcagattcagcggcctgctgggcagaggcgccgcccccaccctggtgccccagcagcccgagcaggtgctgagcagcggcagccccgccgccagcgaggccagagaccccggcgtgagcgagagccccccccccggcagacagcccaaccagaagaccctgccccccggccccgaccccctgctgagactgctgagcacccaggccgaggagagccagggccccgtgctgaagatgcccagccagagagccagaagcttccccctgaccagaagccagagctgcgagaccaagctgctggacgagaagaccagcaagctgtacagcatcagcagccaggtgagcagcgccgtgatgaagagcctgctgtgcctgcccagcagcatcagctgcgcccagaccccctgcatccccaaggagggcgccagccccaccagcagcagcaacgaggacagcgccgccaacggcagcgccgagaccagcgccctggacaccggcttcagcctgaacctgagcgagctgagagagtacaccgagggcctgaccgaggccaaggaggacgacgacggcgaccacagcagcctgcagagcggccagagcgtgatcagcctgctgagcagcgaggagctgaagaagctgatcgaggaggtgaaggtgctggacgaggccaccctgaagcagctggacggcatccacgtgaccatcctgcacaaggaggagggcgccggcctgggcttcagcctggccggcggcgccgacctggagaacaaggtgatcaccgtgcacagagtgttccccaacggcctggccagccaggagggcaccatccagaagggcaacgaggtgctgagcatcaacggcaagagcctgaagggcaccacccaccacgacgccctggccatcctgagacaggccagagagcccagacaggccgtgatcgtgaccagaaagctgacccccgaggccatgcccgacctgaacagcagcaccgacagcgccgccagcgccagcgccgccagcgacgtgagcgtggagagcaccgaggccaccgtgtgcaccgtgaccctggagaagatgagcgccggcctgggcttcagcctggagggcggcaagggcagcctgcacggcgacaagcccctgaccatcaacagaatcttcaagtag

SEQ ID NO: 67824 - DNA, 3996 bp, Artificial Sequence
  derived and/or modified sequence
atggagagccacagcagagccggcaagagcagaaagagcgccaagttcagaagcatcagcagaagcctgatgctgtgcaacgccaagaccagcgacgacggcagcagccccgacgagaagtaccccgaccccttcgagatcagcctggcccagggcaaggagggcatcttccacagcagcgtgcagctggccgacaccagcgaggccggccccagcagcgtgcccgacctggccctggccagcgaggccgcccagctgcaggccgccggcaacgacagaggcaagacctgcagaagaatcttcttcatgaaggagagcagcaccgccagcagcagagagaagcccggcaagctggaggcccagagcagcaacttcctgttccccaaggcctgccaccagagagccagaagcaacagcaccagcgtgaacccctactgcaccagagagatcgacttccccatgaccaagaagagcgccgcccccaccgacagacagccctacagcctgtgcagcaacagaaagagcctgagccagcagctggactgccccgccggcaaggccgccggcaccagcagacccaccagaagcctgagcaccgcccagctggtgcagcccagcggcggcctgcaggccagcgtgatcagcaacatcgtgctgatgaagggccaggccaagggcctgggcttcagcatcgtgggcggcaaggacagcatctacggccccatcggcatctacgtgaagaccatcttcgccggcggcgccgccgccgccgacggcagactgcaggagggcgacgagatcctggagctgaacggcgagagcatggccggcctgacccaccaggacgccctgcagaagttcaagcaggccaagaagggcctgctgaccctgaccgtgagaaccagactgaccgccccccccagcctgtgcagccacctgagcccccccctgtgcagaagcctgagcagcagcacctgcatcaccaaggacagcagcagcttcgccctggagagccccagcgcccccatcagcaccgccaagcccaactacagaatcatggtggaggtgagcctgcagaaggaggccggcgtgggcctgggcatcggcctgtgcagcgtgccctacttccagtgcatcagcggcatcttcgtgcacaccctgagccccggcagcgtggcccacctggacggcagactgagatgcggcgacgagatcgtggagatcagcgacagccccgtgcactgcctgaccctgaacgaggtgtacaccatcctgagccactgcgaccccggccccgtgcccatcatcgtgagcagacaccccgacccccaggtgagcgagcagcagctgaaggaggccgtggcccaggccgtggagaacaccaagttcggcaaggagagacaccagtggagcctggagggcgtgaagagactggagagcagctggcacggcagacccaccctggagaaggagagagagaagaacagcgcccccccccacagaagagcccagaaggtgatgatcagaagcagcagcgacagcagctacatgagcggcagccccggcggcagccccggcagcggcagcgccgagaagcccagcagcgacgtggacatcagcacccacagccccagcctgcccctggccagagagcccgtggtgctgagcatcgccagcagcagactgccccaggagagcccccccctgcccgagagcagagacagccacccccccctgagactgaagaagagcttcgagatcctggtgagaaagcccatgagcagcaagcccaagcccccccccagaaagtacttcaagagcgacagcgacccccagaagagcctggaggagagagagaacagcagctgcagcagcggccacaccccccccacctgcggccaggaggccagagagctgctgcccctgctgctgccccaggaggacaccgccggcagaagccccagcgccagcgccggctgccccggccccggcatcggcccccagaccaagagcagcaccgagggcgagcccggctggagaagagccagccccgtgacccagaccagccccatcaagcaccccctgctgaagagacaggccagaatggactacagcttcgacaccaccgccgaggacccctgggtgagaatcagcgactgcatcaagaacctgttcagccccatcatgagcgagaaccacggccacatgcccctgcagcccaacgccagcctgaacgaggaggagggcacccagggccaccccgacggcaccccccccaagctggacaccgccaacggcacccccaaggtgtacaagagcgccgacagcagcaccgtgaagaagggcccccccgtggcccccaagcccgcctggttcagacagagcctgaagggcctgagaaacagagccagcgaccccagaggcctgcccgaccccgccctgagcacccagcccgcccccgccagcagagagcacctgggcagccacatcagagccagcagcagcagcagcagcatcagacagagaatcagcagcttcgagaccttcggcagcagccagctgcccgacaagggcgcccagagactgagcctgcagcccagcagcggcgaggccgccaagcccctgggcaagcacgaggagggcagattcagcggcctgctgggcagaggcgccgcccccaccctggtgccccagcagcccgagcaggtgctgagcagcggcagccccgccgccagcgaggccagagaccccggcgtgagcgagagccccccccccggcagacagcccaaccagaagaccctgccccccggccccgaccccctgctgagactgctgagcacccaggccgaggagagccagggccccgtgctgaagatgcccagccagagagccagaagcttccccctgaccagaagccagagctgcgagaccaagctgctggacgagaagaccagcaagctgtacagcatcagcagccaggtgagcagcgccgtgatgaagagcctgctgtgcctgcccagcagcatcagctgcgcccagaccccctgcatccccaaggagggcgccagccccaccagcagcagcaacgaggacagcgccgccaacggcagcgccgagaccagcgccctggacaccggcttcagcctgaacctgagcgagctgagagagtacaccgagggcctgaccgaggccaaggaggacgacgacggcgaccacagcagcctgcagagcggccagagcgtgatcagcctgctgagcagcgaggagctgaagaagctgatcgaggaggtgaaggtgctggacgaggccaccctgaagcagctggacggcatccacgtgaccatcctgcacaaggaggagggcgccggcctgggcttcagcctggccggcggcgccgacctggagaacaaggtgatcaccgtgcacagagtgttccccaacggcctggccagccaggagggcaccatccagaagggcaacgaggtgctgagcatcaacggcaagagcctgaagggcaccacccaccacgacgccctggccatcctgagacaggccagagagcccagacaggccgtgatcgtgaccagaaagctgacccccgaggccatgcccgacctgaacagcagcaccgacagcgccgccagcgccagcgccgccagcgacgtgagcgtggagagcaccgaggccaccgtgtgcaccgtgaccctggagaagatgagcgccggcctgggcttcagcctggagggcggcaagggcagcctgcacggcgacaagcccctgaccatcaacagaatcttcaagggcgccgccagcgagcagagcgagaccgtgcagcccggcgacgagatcctgcagctgggcggcaccgccatgcagggcctgaccagattcgaggcctggaacatcatcaaggccctgcccgacggccccgtgaccatcgtgatcagaagaaagagcctgcagagcaaggagaccaccgccgccggcgacagctag

SEQ ID NO: 67825 - DNA, 1785 bp, Artificial Sequence
  derived and/or modified sequence
atggagagccacagcagagccggcaagagcagaaagagcgccaagttcagaagcatcagcagaagcctgatgctgtgcaacgccaagaccagcgacgacggcagcagccccgacgagaagtaccccgaccccttcgagatcagcctggcccagggcaaggagggcatcttccacagcagcgtgcagctggccgacaccagcgaggccggccccagcagcgtgcccgacctggccctggccagcgaggccgcccagctgcaggccgccggcaacgacagaggcaagacctgcagaagaatcttcttcatgaaggagagcagcaccgccagcagcagagagaagcccggcaagctggaggcccagagcagcaacttcctgttccccaaggcctgccaccagagagccagaagcaacagcaccagcgtgaacccctactgcaccagagagatcgacttccccatgaccaagaagagcgccgcccccaccgacagacagccctacagcctgtgcagcaacagaaagagcctgagccagcagctggactgccccgccggcaaggccgccggcaccagcagacccaccagaagcctgagcaccgcccagctggtgcagcccagcggcggcctgcaggccagcgtgatcagcaacatcgtgctgatgaagggccaggccaagggcctgggcttcagcatcgtgggcggcaaggacagcatctacggccccatcggcatctacgtgaagaccatcttcgccggcggcgccgccgccgccgacggcagactgcaggagggcgacgagatcctggagctgaacggcgagagcatggccggcctgacccaccaggacgccctgcagaagttcaagcaggccaagaagggcctgctgaccctgaccgtgagaaccagactgaccgccccccccagcctgtgcagccacctgagcccccccctgtgcagaagcctgagcagcagcacctgcatcaccaaggacagcagcagcttcgccctggagagccccagcgcccccatcagcaccgccaagcccaactacagaatcatggtggaggtgagcctgcagaaggaggccggcgtgggcctgggcatcggcctgtgcagcgtgccctacttccagtgcatcagcggcatcttcgtgcacaccctgagccccggcagcgtggcccacctggacggcagactgagatgcggcgacgagatcgtggagatcagcgacagccccgtgcactgcctgaccctgaacgaggtgtacaccatcctgagccactgcgaccccggccccgtgcccatcatcgtgagcagacaccccgacccccaggtgagcgagcagcagctgaaggaggccgtggcccaggccgtggagaacaccaagttcggcaaggagagacaccagtggagcctggagggcgtgaagagactggagagcagctggcacggcagacccaccctggagaaggagagagagaagaacagcgcccccccccacagaagagcccagaaggtgatgatcagaagcagcagcgacagcagctacatgagcggcagccccggcggcagccccggcagcggcagcgccgagaagcccagcagcgacgtggacatcagcacccacagccccagcctgcccctggccagagagcccgtggtgctgagcatcgccagcagcagactgccccaggagagcccccccctgcccgagagcagagacagccacccccccctgagactgaagaagagcttcgagatcctggtgagaaagcccatgagctag

SEQ ID NO: 67826 - DNA, 2163 bp, Artificial Sequence
  derived and/or modified sequence
atgtgcagcgtactgcctgtggccgtgactggagtcaagcgcttagagagttcctggcatggacggcccaccctggagaaagagagggaaaaaaacagcgcgcctccacatcgaagagctcagaaggtcatgatacgtagttcttctgattcgagctacatgtcgggatctcccggcgggtctccgggatccgggtccgctgaaaagccctctagcgacgtggatatatccacccactcgccctcactacctctggccagagagccagtcgtgttgagtatcgcgtcctctagactcccacaggaatcacccccactgcccgaatcaagggatagtcatccgccattacggttaaagaagagcttcgagatattggtacgaaagcctatgtcctctaagcctaagccacctccaaggaaatatttcaaaagtgactccgacccccaaaagagtctcgaggagcgggagaattcttcttgttctagcgggcacaccccccccacttgtggtcaggaagcccgggaactgctgccactgctgctgccccaggaggacacggccggtagatcgccctccgccagcgccgggtgccccggtccaggaatcggaccccagacaaaatccagcaccgagggcgagcccggatggcgccgggcttctcccgtcacgcaaacatcccctattaagcacccactgctcaaaaggcaagctcgcatggactactctttcgacaccacagccgaggacccatgggtgagaataagcgactgtattaagaatctgttttctcccattatgtcagaaaaccacggccacatgccactgcaacccaacgcgtctctgaacgaggaggagggcacacagggacatccagacgggactccgcctaagctcgacacagctaatgggacaccaaaggtgtacaagtctgccgactcttcaaccgtaaaaaaaggccctcccgtcgccccgaagccagcctggtttcgtcagagcttgaaaggactccggaatcgtgcgagcgaccctagggggctaccggaccccgcattgtccacccaaccagcgccagctagtcgagaacacctggggagccatatcagggcctctagctccagttcttcaattcgtcagcggatcagctccttcgagacattcggctcctcccagcttcctgacaaaggtgcccagagattaagcctgcagccctcctctggcgaggcagcaaagccactgggaaaacatgaagaagggcgattctcagggctgctgggcagaggagcggccccgacactggtcccgcagcaaccggaacaggtactcagctcaggatcccccgcagcgtccgaggctcgggacccgggtgtatcagaatcccccccacctggaaggcagcccaatcaaaagactctgcccccaggtcccgacccgctacttcgccttctgagtactcaagccgaggaatcccaaggacctgttctcaagatgccctcccagcgggcccgctcgtttccacttactaggagccaatcttgtgagacaaagctgctggacgagaaaacctcgaaattatattcaatctcatcccaagtctccagcgccgtgatgaaaagccttctttgtctgccatcatcaatctcttgcgcccagacaccttgtatcccaaaagagggtgccagccccacttcatcctccaacgaggactccgctgcaaatggcagcgcagagactagcgccctggacaccggcttctcactcaatttgtctgagctgagagaatatactgagggattaaccgaagccaaggaggacgatgatggggatcattcctccctgcaatcggggcaatctgtgatctccctgctcagctccgaggagctaaaaaaactcatcgaagaagttaaagtcttggacgaagccacactgaagcagctagatgggatccacgtcacgattctccacaaggaagaaggggccggattaggcttttccctagctgggggggcagacctggagaacaaggtgatcaccgtccaccgcgtgtttcctaatgggctggctagccaggaaggcacgatacagaagggcaacgaggttctctcaataaacggcaaatccctgaagggaaccacgcaccacgcccggccccaacttctgcactag

SEQ ID NO: 67827 - DNA, 3492 bp, Artificial Sequence
  derived and/or modified sequence
atggaaaggggggctcgcgagatggccgctccaggagattgtcctgctggcaaggcagccgggacatcacgtccaacccggagtctaagcactgcacagcttgtgcagccatccggcggactgcaagctagtgtcatctccaatattgtgctaatgaaaggccaggcgaaggggcttggcttcagcattgtggggggaaaggactccatatatggccccatcggcatttacgtcaaaacaatttttgccgggggggcggcggcggctgatggacgactacaggagggtgatgaaatccttgaactgaacggcgaatccatggcaggcctcacacaccaggacgcactgcagaaattcaagcaggcaaagaagggtctgctgaccctcacagtacgcacaaggctgaccgcccctccaagcttatgcagccatctgtctccccccttgtgtcgcagcctaagcagttctacatgtataactaaggactcttcttccttcgcccttgaaagcccatctgcgccaatcagcacggctaaacctaattatagaataatggtagaagtatctctccagaaggaggccggcgtgggtctggggattggattgtgctcagttccctacttccagtgtatctctggtatttttgtgcacaccttgtcgccaggtagtgtcgctcatttggacggtcggctgcgttgcggggatgaaattgtcgaaatcagtgattctcctgttcactgtctcacactcaatgaagtctataccatcttatcccactgcgatcccggcccggttcctattatcgtgtccagacatccagacccccaggtgagcgagcagcagctaaaggaagcagtcgcccaggcagtggagaacactaaatttggaaaggagaggcatcagtggagcttggagggagtgaaaagattggagtctagttggcacggaagacctaccctggagaaggagagggagaaaaattccgccccacctcaccggcgagctcagaaggtcatgatcaggtcctctagtgattcgagctacatgagcggtagtcccgggggcagcccagggtctggctctgcagagaaaccctcttcagatgtggacatcagtacacacagccccagcctgccactggcccgtgaacccgtggtgctaagcatcgctagcagtaggttaccgcaggaatcccccccactgccagaatcacgagactctcatccgcccctgcggctgaagaagtcgtttgaaatcctggtgaggaaaccgatgagttcaaaacccaaaccacccccacgcaaatactttaagtctgattctgatccacagaagtcactggaggagcgcgaaaacagttcatgcagtagcggacatacccctcccacctgtgggcaggaggccagagagctactacccctgctgctgcctcaggaggacactgccgggcggtctccttctgcctccgcagggtgcccaggaccaggtattggtccacaaacaaaaagcagcaccgagggcgagcctgggtggagacgcgcttctcctgtcactcagaccagtcccatcaaacatccccttcttaagaggcaggcaaggatggattactccttcgacaccacagcggaggacccatgggtaaggatttccgattgcattaaaaatttgttcagtccgatcatgagtgaaaaccacggccacatgcccctgcagccaaatgcctctctcaacgaggaagaggggacccaaggtcatcctgatggaaccccgccgaaacttgatacggcaaacggtactcccaaggtatacaagagcgcagactctagcactgtgaagaagggacccccggtggccccaaaacctgcttggttccgccagtccctaaagggactgcgtaaccgagcctcagacccccgtggcctgcctgatccagctctatctacccagccagcaccggccagccgtgagcatctgggcagtcacataagagccagctcgtctagctccagtatccgacagcggatctcctcctttgaaacctttgggtcatcgcagctcccagataagggcgcccagcgcctctcactgcaaccgagcagcggagaggcggcgaaaccattaggcaaacatgaagaaggaaggtttagtgggctgctgggacgtggggccgctcctacactcgtgccccagcaacccgagcaggtacttagttcgggctcgcctgcagctagcgaggccagggacccaggcgtgtctgaatcaccaccgcccggaagacagcccaaccagaagaccctgccaccagggcccgatccactgctgcggttactcagcacccaggctgaggaatctcagggccctgtcctcaaaatgcctagccagagagcgcgcagctttcctctgacccggtctcaatcttgtgagacaaagctgctagacgagaagacatctaaattgtattccattagtagtcaggtctctagtgccgtaatgaaaagcctcctgtgcctgcccagttcaatctcgtgtgctcagaccccatgtattccaaaagagggtgcatcccccaccagtagctctaacgaggacagtgccgccaacggctcagccgagacctctgcgctggacacaggcttctccctgaatctgtctgaactccgggagtataccgagggactgactgaagccaaagaggacgacgatggcgaccactcatcccttcagtctggccagtcagttatcagcctgctatcatctgaagaactgaaaaagctgatagaagaagtgaaggtgctggacgaggccactctgaagcagctggatggcatccacgttaccatcctgcataaagaagaaggagccggtctcgggtttagtttggcaggcggagccgatttagagaataaagttataactgtacatagagtctttcccaatggactagcttcgcaggaaggaaccatacagaagggcaacgaggttctgagcatcaacgggaagagcctcaaagggactacccaccacgacgccttagctatactgcggcaggctcgtgaaccccgacaggcagtaattgtcaccagaaagctgaccccagaagccatgccggacctgaattcttcgacagacagcgctgcttctgcgtctgctgcctccgatgtcagtgttgagtccaccgaggccacggtctgcacagtgacactggaaaagatgtccgccggactgggattcagcttggagggggggaagggatctttgcatggtgataagccactaacgattaaccggatcttcaaaggagccgcctcagaacaatctgagacagttcaacctggggacgagattctccagctgggcggcaccgctatgcaggggctgactcggttcgaagcctggaacataatcaaagccctgccagacgggcccgtgaccattgtgatccggcgaaaaagccttcagtctaaagagaccactgcggctggggattcctag

SEQ ID NO: 67828 - DNA, 1974 bp, Artificial Sequence
  derived and/or modified sequence
atgtggttgcctgtgaaggagcttactattcacgagtgccaacagatgtccacatacagagcccccaaccaggaagccagggagctgctccccctcttacttcctcaggaagacacggcagggaggagtccatctgcctctgcagggtgtcctggccccggaatcggaccccaaaccaagagctccaccgagggcgaaccaggctggcgacgcgctagtcccgtgactcaaacttcacctattaaacaccctctcctgaaacgtcaggctcgcatggattacagctttgatacaaccgctgaagacccatgggtcagaatttcggattgcattaagaaccttttttctcccattatgtcagaaaatcacggacacatgcccctgcagcccaatgcttcactaaacgaggaagagggcacacagggccatccagacggcaccccccctaagctggacaccgccaatggtacgcccaaagtctacaagtctgcggattccagcacagtcaagaagggccctcccgtggcccctaaacctgcgtggttcagacagagtctcaaagggctgaggaacagagcctcggacccccgcggacttcccgaccccgcactatctacacagccagccccagccagtagggagcatcttgggtcccacatccgggcaagcagcagcagctcttctatccggcaaagaatctcgtctttcgaaactttcggcagtagccagctcccagacaaaggggcccagagactttcacttcagccaagttctggagaggcagccaaaccgctgggaaagcacgaagaggggcgcttctctgggctgctggggcgaggcgccgcccccacccttgtacctcagcagccggagcaggtgctctcctctggcagccctgccgccagtgaggcgcgcgatcctggcgtgtccgaatcgccgccgcccggccgccagcctaatcagaaaactctgccgcctggaccggaccccttgctgcgactgctttcgactcaggccgaggagtctcaagggcctgtgcttaaaatgcccagccaacgagcccggtccttcccattgactagatcgcagtcctgcgaaactaaactgttagatgagaaaacatctaaactgtactccatatctagtcaggtgtcttcagccgtcatgaaaagtttgctttgcctgccatcatccataagctgcgctcagactccgtgcatcccaaaggaaggtgccagcccgactagttcttctaacgaggattctgccgccaatggctctgctgaaaccagcgccctggatacaggcttctcccttaatctttcggaacttcgggaatatacggaaggactgaccgaagccaaggaggacgacgatggggaccatagctcactacagtccgggcaatccgtgatatctctgctgtcatccgaggagctcaagaagctgatagaggaagttaaggttcttgacgaagcaactctgaagcagctggatgggatccacgtcaccattctacacaaggaggagggagctggactgggattttccctcgctggtggagcggatcttgagaacaaagtcattacagtgcaccgtgtgtttcccaacggcctggcttcccaggaagggaccattcagaaagggaatgaggtgctgtcgatcaatggcaaaagcctcaaaggaaccactcatcatgatgctcttgcgattctaagacaggctcgggagccacgccaggcagtgatagtaacaagaaaactaacacctgaagcaatgcccgatcttaactcaagcacggacagcgccgccagtgcttccgctgcctcggacgtctcagtggagtctaccgaagccactgtatgcactgtcactttggaaaagatgtctgcaggcttgggatttagcttggagggtgggaaaggaagcttacacggagacaagccactgaccattaatcggattttcaaatag

SEQ ID NO: 67829 - DNA, 3996 bp, Artificial Sequence
  derived and/or modified sequence
atggaatcgcactcacgcgcaggcaaatccaggaaaagcgccaaatttcgctctatcagtaggtccctgatgctttgcaacgccaaaacatccgacgatggaagcagcccggatgagaagtatccagatccattcgagatctccttggcacagggtaaggaagggattttccatagctccgtccagctcgctgatacttccgaggccggcccgtcttcggtcccagatctagccctggcctcagaggcggcacagctgcaggctgcaggcaacgatagaggaaaaacatgtcgacgcattttctttatgaaggagtcttccaccgcgtctagcagggagaagcccggcaagctggaagcacagagttccaactttctgttcccaaaagcgtgccaccagagggctcgcagcaactcaacatctgtgaatccctactgcacaagagagatcgacttccccatgacaaagaaaagcgcagcaccaaccgacagacaaccctattctctgtgctctaatcgtaaatccctttctcagcaactcgattgccctgcaggaaaagctgcgggcacctctaggccaactcgatcattatcaacagcgcaattggtgcagccgtcggggggcctccaggcctccgtgatctctaacatcgtgttgatgaaaggccaagcgaaagggctgggcttcagcattgtgggcggtaaagattccatttatggtccgattggcatctacgttaaaactatattcgccggcggggcggccgccgctgacgggcgcctgcaggaaggtgacgaaatattggagctaaacggcgaatccatggccggtctcacgcaccaggatgctctccagaagttcaaacaggccaaaaaagggctgttgacgcttaccgttcgtacaaggctgactgcccctcccagtctttgctctcacctgagccctcccctttgccgaagcctttcaagttctacctgcatcaccaaagactcatccagcttcgcactggaatccccctctgcacctataagcacagcaaaacccaactaccggattatggttgaggtgagcctgcagaaagaagcaggagtgggactgggtatcgggctctgttccgttccctattttcagtgtatttccggcatttttgtccacacgcttagcccgggcagcgtagcccatctggacggtcgtctcaggtgcggagatgagatagttgaaatctccgactcaccggttcactgcctaaccctgaacgaggtgtacacaattctttcccactgtgatcccggaccagtgccaataatcgtttcccggcatcctgatccacaggtttccgagcaacagttgaaagaggcagtggcacaggcagtcgaaaataccaagtttggcaaggagcgccatcagtggtctctagaaggcgtcaagcgccttgaaagttcatggcatggcagaccaactctggaaaaagagcgcgaaaagaacagtgccccgccacacagacgggcccagaaggtgatgattcgctcctcatccgactccagctatatgagcggcagccccgggggcagcccaggctcaggttctgcagagaagccatcgtcagacgttgacatctctacccactctcctagcctgcctttggccagagagcccgtcgtgctgtcaattgcttcctcacggttgccccaggagtccccgcccctgcccgagtctagagattcccacccccccctgcgtcttaaaaaaagttttgagattttagtccggaaacccatgtcaagcaagcccaaaccccccccaaggaagtactttaaatctgactctgaccctcagaaatctctcgaggaaagagaaaacagtagttgttctagcggacacactccaccaacctgcggacaggaggctcgtgaattactgccgctcctgctgccacaggaagacactgcaggcagaagtccatccgcgagtgcaggctgccctggaccggggattgggccccaaaccaagagctccacggaaggtgagccgggttggagacgtgcttctcctgtgacccagacaagcccaattaagcaccctctgctgaaacgtcaggcacgaatggattactcattcgacaccaccgcggaggatccatgggtgaggataagcgactgtataaaaaatctgttctctcctataatgtcagagaaccacgggcacatgcccctacagcctaatgcatccctgaacgaggaagaagggacccaaggtcaccccgatggcacgccccctaagctggatacagctaacggcactcccaaagtatataaaagcgcagattcctccacagttaagaaagggcctccagttgctcccaagccagcatggttcaggcaatctctgaagggccttcgaaacagagcgtctgatccccgcggccttcccgacccagccctgtccacacagcccgcacccgccagcagggagcacctgggtagccacataagggcctcttcctcgagctcttccatcagacaaaggatctccagttttgagaccttcggctctagccagctgcctgacaagggggctcagcgactgtccctccagccaagcagcggcgaggccgccaaacctttgggcaagcatgaagaagggaggtttagcgggctattaggcaggggcgctgcacctacactggttcctcagcagccggaacaggtgttgtcatcgggaagtcccgctgcttccgaggcaagagatccgggtgtctccgaatctccaccgcctggacggcaaccgaatcaaaaaactctgcctccaggcccggatcccttacttcgccttctgagtacccaggctgaggagtctcaggggcccgtgctcaagatgcccagtcagcgggcaaggtccttcccactgactcgctcacagtcttgtgaaacgaaattactggatgagaagactagtaagctctactccatcagctcacaggtctcgagcgcagtaatgaagtcactactgtgccttccgagttctatcagttgtgcgcagaccccgtgcatccctaaagaaggagcctccccgaccagtagcagcaatgaagactctgctgccaatggcagcgccgaaactagcgcactggacacaggatttagcctgaacctatctgagctgcgagagtacacggagggcctcactgaggcaaaagaagacgacgacggggatcatagttccctccagtccggccagagcgtgatttcactactgtcctcagaggaacttaaaaaactcatcgaggaggtgaaggtgctcgatgaagcaactttaaaacaattggacggtatccacgtgacaatcctccataaggaggagggcgctgggctggggttttccttagccggaggtgccgacttagagaataaggtgattactgtccaccgggtgttcccaaatggtcttgcgtcacaggagggaaccattcagaagggcaatgaggtactgagcattaatggtaagtctttgaaaggcactactcatcatgacgcactggctattctgcgtcaggcccgggagcctagacaagccgtgattgtaacaaggaagctgaccccagaggcaatgcctgatcttaactccagtacggactctgcggcctccgcttctgctgcatctgatgtgagcgtggaatcaacggaggcaacggtgtgcaccgtcacactcgagaaaatgtccgccggccttggctttagtttagaagggggcaagggctccctgcatggggataaaccgctcaccattaaccgaatcttcaagggcgcagcctctgagcagtcagagacagttcaacctggtgacgagattctgcagctggggggtaccgcaatgcaaggcctcacgcgattcgaagcctggaacattatcaaagccctccctgatggacctgtgaccatcgtcatacggagaaaatccctccagagcaaagaaacaaccgccgccggagatagttag

SEQ ID NO: 67830 - DNA, 1785 bp, Artificial Sequence
  derived and/or modified sequence
atggaaagccactcgagggccggtaagtcccgcaaatccgccaagttcagatctatttcacgctccttgatgctctgtaacgccaagacaagcgatgacggctctagtccagacgaaaaatatcccgatccatttgagatcagcctagctcaggggaaagagggtattttccacagttcagtacaattggctgacacttcagaggctggtcctagctctgtgcctgacctggcccttgcgtcggaggccgctcagctccaggcggctggcaacgacagaggtaagacctgcagaagaatctttttcatgaaggagtcatcaacagcttcttcacgagaaaaaccaggtaagctcgaagcacagtcctctaatttcttgttccccaaggcctgccaccagcgcgccagaagcaatagtacaagcgtgaatccttattgtacccgtgaaatcgacttccccatgacaaagaaaagcgctgccccaactgatcggcagccatatagtctgtgctcaaatcggaagtcgctgtcccagcaactggactgccctgccggcaaggcagcaggcacatccagacccacaaggtctctgagtaccgcacagctagtccagccaagcggaggactgcaggctagcgttatctccaacatcgtcctgatgaagggccaggctaaaggtctggggttttctattgtgggaggaaaagactctatttatggtcctataggcatctatgtgaaaaccatctttgctggcggggccgctgcagccgacgggaggctgcaagagggcgatgagattctcgaactcaacggcgaaagcatggcaggactaacacaccaggatgcgctccaaaagtttaagcaggccaagaaaggactgttaaccctgacagtgcggactcggttgacagccccaccttctctgtgcagccatctttctccacctctgtgtcgaagcctgtccagtagcacatgtataacaaaggattcaagcagcttcgccctcgaaagcccatcagcacccatcagtacagccaaacccaattatcgtataatggttgaagtcagcctccagaaagaggccggcgtgggtctaggaattggtttatgcagcgtcccgtacttccaatgtatatctggcatcttcgtgcacacactctctccaggcagcgttgcgcatctcgatggcaggctgaggtgcggtgacgagatcgtcgagatctccgattcaccagtccattgcctcactttgaatgaggtgtatacaatcctgtcccactgcgatcccggtcccgtgccaatcattgtctctcgccacccagacccccaggtaagcgaacagcaactgaaggaagccgtggcacaggctgttgaaaacaccaaatttggaaaggagaggcaccagtggagcctggagggggtgaagcgtctcgaaagcagctggcacggcagacccacgcttgagaaagagagggaaaaaaactcagcgccaccacatagaagggcccagaaggtcatgatacgaagcagctcagactcttcttacatgagtggcagtcctgggggctcccccggctccgggagcgccgagaagcctagtagtgatgtagatatctcgacccactctccgagcttgcccctggcacgcgaacccgttgtgctgtctatcgcatcatctagactgccccaagagagtccccctctccctgaaagtagggatagtcacccgccactgagactgaagaaatcttttgagatccttgttcggaaacctatgtcgtag

SEQ ID NO: 67831 - DNA, 2163 bp, Artificial Sequence
  derived and/or modified sequence
atgtgcagcgtgctgcctgtggccgtgactggagtgaagaggctggagagctcctggcacggccggcccaccctggagaaggagcgggagaagaacagcgccccaccccaccggcgggcccagaaggtgatgatccgcagcagcagtgacagcagctacatgagcggcagccctgggggcagccctggcagcggcagcgctgagaagcccagcagtgatgtggacatcagcacccacagccccagcctgcccctggcccgggagcctgtggtgctgagcatcgccagcagccggctgccccaggagagcccccccctgcctgagagccgggacagccacccccccctgcggctgaagaagagctttgagatcctggtgaggaagcccatgagcagcaagcccaagcccccacccaggaagtacttcaagagtgacagcgacccccagaagagcctggaggagcgggagaacagcagctgcagcagcggccacaccccacccacctgtggccaggaggcccgggagctgctgcccctgctgctgccccaggaggacacagctggccgcagccccagcgccagcgctggctgccccggccctggcatcggcccccagaccaagagcagcacagaaggagagcccggctggaggcgggccagccctgtgacccagaccagccccatcaagcaccccctgctgaagaggcaggccaggatggactacagctttgacaccacagctgaggacccctgggtgcgcatcagtgactgcatcaagaacctcttcagccccatcatgtctgagaaccacggccacatgcccctgcagcccaatgccagcctgaatgaggaggagggcacccagggccacccagatggcaccccacccaagctggacacagccaacggcacccccaaggtgtacaagtctgctgacagcagcacagtgaagaagggcccccctgtggcccccaagccagcctggttccggcagagcctgaagggcctgaggaacagagccagtgacccccggggcctgcctgaccctgccctgagcacccagcctgccccagccagccgggagcacctgggcagccacatccgggccagcagcagcagcagcagcatccggcagaggatcagcagctttgagaccttcggcagcagccagctgcctgacaagggggcccagaggctgagcctgcagcccagcagtggagaggccgccaagcccctgggcaagcatgaggagggccgcttcagcggcctgctgggccgcggggccgcccccaccctggtgccccagcagcctgagcaggtgctgagcagcggcagccctgctgccagcgaggcccgggaccccggggtgtctgagagccccccacctggccggcagcccaaccagaagaccctgcccccaggccctgaccccctgctgcggctgctgagcacccaggccgaggagagccagggccctgtgctgaagatgcccagccagagggcccgctccttccccctgaccaggagccagagctgtgagaccaagctgctggatgagaagaccagcaagctgtacagcatcagcagccaggtgtcctctgctgtgatgaagagcctgctgtgcctgcccagcagcatcagctgtgcccagaccccctgcatccccaaggagggcgccagccccaccagcagcagcaatgaagattctgctgccaacggcagcgctgagaccagcgccctggacaccggcttcagcctgaacctgtctgagctgcgggagtacacagagggcctgacagaggccaaggaggatgatgatggagaccacagcagcctgcagagcggccagagcgtcatcagcctgctgagcagcgaggagctgaagaagctgattgaggaggtgaaggtgctggatgaggccaccctgaagcagctggatggcatccacgtgaccatcctgcacaaggaggagggcgccggcctgggcttcagcctggccggcggcgctgacctggagaacaaggtgatcaccgtgcacagggtcttccccaacggcctggccagccaggagggcaccatccagaagggaaatgaggtgctgagcatcaatggcaagagcctgaagggcaccacccaccacgcccggccccagctgctgcactag

SEQ ID NO: 67832 - DNA, 3492 bp, Artificial Sequence
  derived and/or modified sequence
atggagcggggggcccgggagatggccgcccctggggactgcccagctgggaaggccgccggcaccagccggcccaccaggagcctgagcacagcccagctggtgcagcccagcggcggcctgcaggccagcgtcatcagcaacatcgtgctgatgaagggccaggccaagggcctgggcttcagcatcgtgggcggcaaggacagcatctacggccccatcggcatctacgtgaagaccatctttgctggaggagctgctgctgctgatggccgcctgcaggagggagatgagatcctggagctgaatggagagagcatggccggcctgacccaccaggatgccctgcagaagttcaagcaggccaagaagggcctgctgaccctgactgtgaggacccggctgacagccccacccagcctgtgcagccacctgagcccccccctgtgccgcagcctgagcagcagcacctgcatcaccaaggacagcagcagctttgccctggagagccccagcgcccccatcagcacagccaagcccaactaccgcatcatggtggaggtgtccctgcagaaggaggccggcgtgggcctgggcatcggcctgtgcagcgtgccctacttccagtgcatcagcggcatctttgtgcacaccctgagccctggctctgtggcccacctggatggccgcctgcgctgtggagatgaaattgtggagatcagtgacagccctgtgcactgcctgaccctgaatgaggtgtacaccatcctgagccactgtgaccccggccctgtgcccatcatcgtgagccgccacccagacccccaggtgtctgagcagcagctgaaggaggccgtggcccaggccgtggagaacaccaagtttgggaaggagcggcaccagtggagcctggagggcgtgaagaggctggagagctcctggcacggccggcccaccctggagaaggagcgggagaagaacagcgccccaccccacagaagagcccagaaggtgatgatccgcagcagcagtgacagcagctacatgagcggcagccctgggggcagccctggcagcggcagcgctgagaagcccagcagtgatgtggacatcagcacccacagccccagcctgcccctggcccgggagcctgtggtgctgagcatcgccagcagccggctgccccaggagagcccccccctgcctgagagccgggacagccacccccccctgcggctgaagaagagctttgagatcctggtgaggaagcccatgagcagcaagcccaagcccccacccaggaagtacttcaagagtgacagcgacccccagaagagcctggaggagcgggagaacagcagctgcagcagcggccacaccccacccacctgtggccaggaggcccgggagctgctgcccctgctgctgccccaggaggacacagctggccgcagccccagcgccagcgctggctgccccggccctggcatcggcccccagaccaagagcagcacagaaggagagcccggctggaggcgggccagccctgtgacccagaccagccccatcaagcaccccctgctgaagaggcaggccaggatggactacagctttgacaccacagctgaggacccctgggtgcgcatcagtgactgcatcaagaacctcttcagccccatcatgtctgaaaatcatggccacatgcccctgcagcccaatgccagcctgaatgaggaggagggcacccagggccacccagatggcaccccacccaagctggacacagccaacggcacccccaaggtgtacaagtctgctgacagcagcacagtgaagaagggcccccctgtggcccccaagccagcctggttccggcagagcctgaagggcctgaggaacagagccagtgacccccggggcctgcctgaccctgccctgagcacccagcctgccccagccagccgggagcacctgggcagccacatccgggccagcagcagcagcagcagcatccggcagaggatcagcagctttgagaccttcggcagcagccagctgcctgacaagggggcccagaggctgagcctgcagcccagcagcggggaggccgccaagcccctgggcaagcatgaggagggccgcttcagcggcctgctgggcagaggagctgcccccaccctggtgccccagcagcctgagcaggtgctgagcagcggcagccctgctgccagcgaggcccgggaccccggggtgtctgagagccccccacctggccggcagcccaaccagaagaccctgcccccaggccctgaccccctgctgcggctgctgagcacccaggccgaggagagccagggccctgtgctgaagatgcccagccagagggcccggagcttccccctgaccaggagccagagctgtgagaccaagctgctggatgagaagaccagcaagctgtacagcatcagcagccaggtgagcagcgctgtgatgaagagcctgctgtgcctgcccagcagcatcagctgtgcccagaccccctgcatccccaaggagggcgccagccccaccagcagcagcaatgaagacagcgctgccaatggatctgctgagaccagcgccctggacaccggcttcagcctgaacctgtctgagctgcgggagtacacagagggcctgacagaggccaaggaggatgatgatggagaccacagcagcctgcagagcggccagagcgtcatcagcctgctgagcagcgaggagctgaagaagctgattgaggaggtgaaggtgctggatgaggccaccctgaagcagctggatggcatccacgtgaccatcctgcacaaggaggagggcgccggcctgggcttcagcctggccggcggcgctgacctggagaacaaggtgatcaccgtgcacagggtcttccccaacggcctggccagccaggagggcaccatccagaagggaaatgaggtgctgagcatcaacgggaagagcctgaagggcaccacccaccatgatgccctggccatcctgcggcaggcccgggagccccggcaggccgtgattgtgaccaggaagctgaccccagaggccatgccagacctgaacagcagcacagacagcgctgccagcgccagcgctgccagtgatgtgtctgtggagagcacagaggccaccgtgtgcaccgtgaccctggagaagatgtctgctggcctgggcttcagcctggagggcggcaagggcagcctgcatggagacaagcccctgaccatcaaccgcatcttcaagggagctgccagcgagcagagcgagaccgtgcagcctggagatgagatcctgcagctgggcggcacagccatgcagggcctgaccaggtttgaggcctggaacatcatcaaggccctgcctgatggccctgtgaccatcgtcatccggaggaagagcctgcagagcaaggagaccacagctgctggggacagctag

SEQ ID NO: 67833 - DNA, 1974 bp, Artificial Sequence
  derived and/or modified sequence
atgtggctgcctgtgaaggagctgaccatccacgagtgccagcagatgagcacctaccgggcccccaaccaggaggcccgggagctgctgcccctgctgctgccccaggaggacacagctggccgcagccccagcgccagcgctggctgccccggccctggcatcggcccccagaccaagagcagcacagaaggagagcccggctggaggcgggccagccctgtgacccagaccagccccatcaagcaccccctgctgaagaggcaggccaggatggactacagctttgacaccacagctgaggacccctgggtgcgcatcagtgactgcatcaagaacctcttcagccccatcatgtctgaaaatcatggccacatgcccctgcagcccaatgccagcctgaatgaggaggagggcacccagggccacccagatggcaccccacccaagctggacacagccaacggcacccccaaggtgtacaagtctgctgacagcagcacagtgaagaagggcccccctgtggcccccaagccagcctggttccggcagagcctgaagggcctgaggaacagagccagtgacccccggggcctgcctgaccctgccctgagcacccagcctgccccagccagccgggagcacctgggcagccacatccgggccagcagcagcagcagcagcatccggcagaggatcagcagctttgagaccttcggcagcagccagctgcctgacaagggggcccagaggctgagcctgcagcccagcagcggggaggccgccaagcccctgggcaagcatgaggagggccgcttcagcggcctgctgggcagaggagctgcccccaccctggtgccccagcagcctgagcaggtgctgagcagcggcagccctgctgccagcgaggcccgggaccccggggtgtctgagagccccccacctggccggcagcccaaccagaagaccctgcccccaggccctgaccccctgctgcggctgctgagcacccaggccgaggagagccagggccctgtgctgaagatgcccagccagagggcccggagcttccccctgaccaggagccagagctgtgagaccaagctgctggatgagaagaccagcaagctgtacagcatcagcagccaggtgagcagcgctgtgatgaagagcctgctgtgcctgcccagcagcatcagctgtgcccagaccccctgcatccccaaggagggcgccagccccaccagcagcagcaatgaagacagcgctgccaatggatctgctgagaccagcgccctggacaccggcttcagcctgaacctgtctgagctgcgggagtacacagagggcctgacagaggccaaggaggatgatgatggagaccacagcagcctgcagagcggccagagcgtcatcagcctgctgagcagcgaggagctgaagaagctgattgaggaggtgaaggtgctggatgaggccaccctgaagcagctggatggcatccacgtgaccatcctgcacaaggaggagggcgccggcctgggcttcagcctggccggcggcgctgacctggagaacaaggtgatcaccgtgcacagggtcttccccaacggcctggccagccaggagggcaccatccagaagggaaatgaggtgctgagcatcaacgggaagagcctgaagggcaccacccaccatgatgccctggccatcctgcggcaggcccgggagccccggcaggccgtgattgtgaccaggaagctgaccccagaggccatgccagacctgaacagcagcacagacagcgctgccagcgccagcgctgccagtgatgtgtctgtggagagcacagaggccaccgtgtgcaccgtgaccctggagaagatgtctgctggcctgggcttcagcctggagggcggcaagggcagcctgcatggagacaagcccctgaccatcaaccgcatcttcaagtag

SEQ ID NO: 67834 - DNA, 3996 bp, Artificial Sequence
  derived and/or modified sequence
atggagagccacagcagagctgggaagagcaggaagagcgccaagttccgcagcatcagccgcagcctgatgctgtgcaatgccaagaccagtgatgatggcagcagcccagatgagaagtacccagacccctttgagatcagcctggcccagggcaaggagggcatcttccacagctctgtgcagctggccgacaccagcgaggccggccccagctctgtgcctgacctggccctggccagcgaggccgcccagctgcaggccgctggaaatgaccggggcaagacctgccgccgcatcttcttcatgaaggagagcagcacagccagcagccgggagaagccaggcaagctggaggcccagagcagcaacttcctgttccccaaggcctgccaccagagggcccggagcaacagcacctctgtgaacccctactgcacccgggagattgacttccccatgaccaagaagtctgctgcccccacagaccggcagccctacagcctgtgcagcaacaggaagagcctgagccagcagctggactgcccagctgggaaggccgccggcaccagccggcccaccaggagcctgagcacagcccagctggtgcagcccagcggcggcctgcaggccagcgtcatcagcaacatcgtgctgatgaagggccaggccaagggcctgggcttcagcatcgtgggcggcaaggacagcatctacggccccatcggcatctacgtgaagaccatctttgctggaggagctgctgctgctgatggccgcctgcaggagggagatgagatcctggagctgaatggagagagcatggccggcctgacccaccaggatgccctgcagaagttcaagcaggccaagaagggcctgctgaccctgactgtgaggacccggctgacagccccacccagcctgtgcagccacctgagcccccccctgtgccgcagcctgagcagcagcacctgcatcaccaaggacagcagcagctttgccctggagagccccagcgcccccatcagcacagccaagcccaactaccgcatcatggtggaggtgtccctgcagaaggaggccggcgtgggcctgggcatcggcctgtgcagcgtgccctacttccagtgcatcagcggcatctttgtgcacaccctgagccctggctctgtggcccacctggatggccgcctgcgctgtggagatgaaattgtggagatcagtgacagccctgtgcactgcctgaccctgaatgaggtgtacaccatcctgagccactgtgaccccggccctgtgcccatcatcgtgagccgccacccagacccccaggtgtctgagcagcagctgaaggaggccgtggcccaggccgtggagaacaccaagtttgggaaggagcggcaccagtggagcctggagggcgtgaagaggctggagagctcctggcacggccggcccaccctggagaaggagcgggagaagaacagcgccccaccccacagaagagcccagaaggtgatgatccgcagcagcagtgacagcagctacatgagcggcagccctgggggcagccctggcagcggcagcgctgagaagcccagcagtgatgtggacatcagcacccacagccccagcctgcccctggcccgggagcctgtggtgctgagcatcgccagcagccggctgccccaggagagcccccccctgcctgagagccgggacagccacccccccctgcggctgaagaagagctttgagatcctggtgaggaagcccatgagcagcaagcccaagcccccacccaggaagtacttcaagagtgacagcgacccccagaagagcctggaggagcgggagaacagcagctgcagcagcggccacaccccacccacctgtggccaggaggcccgggagctgctgcccctgctgctgccccaggaggacacagctggccgcagccccagcgccagcgctggctgccccggccctggcatcggcccccagaccaagagcagcacagaaggagagcccggctggaggcgggccagccctgtgacccagaccagccccatcaagcaccccctgctgaagaggcaggccaggatggactacagctttgacaccacagctgaggacccctgggtgcgcatcagtgactgcatcaagaacctcttcagccccatcatgtctgaaaatcatggccacatgcccctgcagcccaatgccagcctgaatgaggaggagggcacccagggccacccagatggcaccccacccaagctggacacagccaacggcacccccaaggtgtacaagtctgctgacagcagcacagtgaagaagggcccccctgtggcccccaagccagcctggttccggcagagcctgaagggcctgaggaacagagccagtgacccccggggcctgcctgaccctgccctgagcacccagcctgccccagccagccgggagcacctgggcagccacatccgggccagcagcagcagcagcagcatccggcagaggatcagcagctttgagaccttcggcagcagccagctgcctgacaagggggcccagaggctgagcctgcagcccagcagcggggaggccgccaagcccctgggcaagcatgaggagggccgcttcagcggcctgctgggcagaggagctgcccccaccctggtgccccagcagcctgagcaggtgctgagcagcggcagccctgctgccagcgaggcccgggaccccggggtgtctgagagccccccacctggccggcagcccaaccagaagaccctgcccccaggccctgaccccctgctgcggctgctgagcacccaggccgaggagagccagggccctgtgctgaagatgcccagccagagggcccggagcttccccctgaccaggagccagagctgtgagaccaagctgctggatgagaagaccagcaagctgtacagcatcagcagccaggtgagcagcgctgtgatgaagagcctgctgtgcctgcccagcagcatcagctgtgcccagaccccctgcatccccaaggagggcgccagccccaccagcagcagcaatgaagacagcgctgccaatggatctgctgagaccagcgccctggacaccggcttcagcctgaacctgtctgagctgcgggagtacacagagggcctgacagaggccaaggaggatgatgatggagaccacagcagcctgcagagcggccagagcgtcatcagcctgctgagcagcgaggagctgaagaagctgattgaggaggtgaaggtgctggatgaggccaccctgaagcagctggatggcatccacgtgaccatcctgcacaaggaggagggcgccggcctgggcttcagcctggccggcggcgctgacctggagaacaaggtgatcaccgtgcacagggtcttccccaacggcctggccagccaggagggcaccatccagaagggaaatgaggtgctgagcatcaacgggaagagcctgaagggcaccacccaccatgatgccctggccatcctgcggcaggcccgggagccccggcaggccgtgattgtgaccaggaagctgaccccagaggccatgccagacctgaacagcagcacagacagcgctgccagcgccagcgctgccagtgatgtgtctgtggagagcacagaggccaccgtgtgcaccgtgaccctggagaagatgtctgctggcctgggcttcagcctggagggcggcaagggcagcctgcatggagacaagcccctgaccatcaaccgcatcttcaagggagctgccagcgagcagagcgagaccgtgcagcctggagatgagatcctgcagctgggcggcacagccatgcagggcctgaccaggtttgaggcctggaacatcatcaaggccctgcctgatggccctgtgaccatcgtcatccggaggaagagcctgcagagcaaggagaccacagctgctggggacagctag

SEQ ID NO: 67835 - DNA, 1785 bp, Artificial Sequence
  derived and/or modified sequence
atggagagccacagcagagctgggaagagcaggaagagcgccaagttccgcagcatcagccgcagcctgatgctgtgcaatgccaagaccagtgatgatggcagcagcccagatgagaagtacccagacccctttgagatcagcctggcccagggcaaggagggcatcttccacagctctgtgcagctggccgacaccagcgaggccggccccagctctgtgcctgacctggccctggccagcgaggccgcccagctgcaggccgctggaaatgaccggggcaagacctgccgccgcatcttcttcatgaaggagagcagcacagccagcagccgggagaagccaggcaagctggaggcccagagcagcaacttcctgttccccaaggcctgccaccagagggcccggagcaacagcacctctgtgaacccctactgcacccgggagattgacttccccatgaccaagaagtctgctgcccccacagaccggcagccctacagcctgtgcagcaacaggaagagcctgagccagcagctggactgcccagctgggaaggccgccggcaccagccggcccaccaggagcctgagcacagcccagctggtgcagcccagcggcggcctgcaggccagcgtcatcagcaacatcgtgctgatgaagggccaggccaagggcctgggcttcagcatcgtgggcggcaaggacagcatctacggccccatcggcatctacgtgaagaccatctttgctggaggagctgctgctgctgatggccgcctgcaggagggagatgagatcctggagctgaatggagagagcatggccggcctgacccaccaggatgccctgcagaagttcaagcaggccaagaagggcctgctgaccctgactgtgaggacccggctgacagccccacccagcctgtgcagccacctgagcccccccctgtgccgcagcctgagcagcagcacctgcatcaccaaggacagcagcagctttgccctggagagccccagcgcccccatcagcacagccaagcccaactaccgcatcatggtggaggtgtccctgcagaaggaggccggcgtgggcctgggcatcggcctgtgcagcgtgccctacttccagtgcatcagcggcatctttgtgcacaccctgagccctggctctgtggcccacctggatggccgcctgcgctgtggagatgaaattgtggagatcagtgacagccctgtgcactgcctgaccctgaatgaggtgtacaccatcctgagccactgtgaccccggccctgtgcccatcatcgtgagccgccacccagacccccaggtgtctgagcagcagctgaaggaggccgtggcccaggccgtggagaacaccaagtttgggaaggagcggcaccagtggagcctggagggcgtgaagaggctggagagctcctggcacggccggcccaccctggagaaggagcgggagaagaacagcgccccaccccacagaagagcccagaaggtgatgatccgcagcagcagtgacagcagctacatgagcggcagccctgggggcagccctggcagcggcagcgctgagaagcccagcagtgatgtggacatcagcacccacagccccagcctgcccctggcccgggagcctgtggtgctgagcatcgccagcagccggctgccccaggagagcccccccctgcctgagagccgggacagccacccccccctgcggctgaagaagagctttgagatcctggtgaggaagcccatgtcctag

SEQ ID NO: 67836 - DNA, 2163 bp, Artificial Sequence
  derived and/or modified sequence
atgtgcagcgtgctgcccgtggccgtgaccggcgtgaagcggctggagtctagctggcacggccgccccacactggagaaggagcgggaaaaaaattcggcgcctcctcaccgcagagctcaaaaggtcatgatccgctcctcttctgacagttcttatatgtccggatctcctggtggaagccctggcagtgggagtgctgaaaaaccatcctccgacgttgacatttcgacacatagtccatccctgcccttggcacgtgaacccgttgtcctgtccattgcatcctcccggcttcctcaagagtctccgcctctcccggagagccgtgattcacacccacccctccgcctaaagaagagcttcgagatcctagtgaggaaacctatgagctctaaaccgaagccaccacccaggaagtatttcaagagtgacagtgatccacagaagtcattggaagagagggaaaattcaagctgcagtagtgggcatactcctcccacctgcgggcaggaggctagagagctgctgcccttactgttacctcaggaggacaccgcagggcggtccccaagcgcctcagccggttgtccaggccccgggatcggaccccagacgaaatcctccacagagggagaacctgggtggagaagggcttctccagtcacacagactagtccaattaaacaccctctcttgaaaagacaggcccgtatggactacagttttgataccacagcagaagatccatgggtccggatcagtgattgtatcaagaatctgtttagccccatcatgtcagaaaatcatggacacatgccattacaaccaaacgcctccctaaatgaagaggagggcacacagggtcaccccgatgggacccctcccaaactggacacggccaatgggacccctaaagtgtataagagcgccgacagtagtaccgtcaagaaaggacctccggtcgccccaaaaccagcctggttcaggcaaagccttaagggtctgagaaacagggcaagcgatccaagggggctccctgacccggctcttagcacgcaacccgcacccgctagccgcgaacacttaggaagtcatattagggcaagtagctcctcttcatctataaggcaacggatcagcagtttcgagacgttcggatcatctcagctgcccgacaagggagcccagcgcctatccttgcaaccgagctccggggaggctgccaagccattgggtaaacatgaagagggccgctttagcgggctactggggcgaggtgccgctcctaccctagtcccccagcagccggaacaggtgctctcatcaggctcacctgccgccagcgaggcccgtgatcccggcgtgtcagaatcacccccacccgggaggcagcccaatcaaaaaactcttccaccaggaccagacccccttttaagactcctgtccacccaagcagaggaaagccagggacccgtcctgaagatgccttcgcagagggcgagatctttcccattgacgcggtcccagtcctgtgagactaagctcctggacgaaaaaaccagcaaactgtactcaattagcagccaggtgtctagtgccgttatgaaaagcctgttgtgcctcccctcttctatttcttgcgcccagaccccatgcattccaaaggaaggagcgtcacctacctcgagctccaatgaggacagtgccgccaatggatctgccgagacttccgcactggatacaggcttctctctgaatctctcagagctgcgggaatatactgagggcctgacggaagccaaagaagatgatgatggggaccactcaagtctgcaatcaggccagtctgtgatatcgttgcttagttctgaagaactgaaaaaactgatcgaagaggtcaaggtgctggacgaagccaccctgaagcaactggacggaattcatgtcactatcctgcataaagaggaaggagccggcctgggattcagcctcgccggtggcgctgacctcgagaacaaagtaatcactgttcacagggtcttccctaatggcctggccagtcaggagggtacgatccaaaaagggaatgaggtgttgtccatcaacggcaaatccctaaaagggaccactcatcacgctagaccacagttgttgcattag

SEQ ID NO: 67837 - DNA, 3492 bp, Artificial Sequence
  derived and/or modified sequence
atggagcggggcgcccgggagatggccgcccccggcgactgccccgccgggaaagcagcaggaactagccgtccaacaaggtcactgtcaaccgctcagctcgtccaaccgtcaggaggcttgcaggcttccgtgatcagcaacatagtgcttatgaagggtcaggccaaagggctgggcttcagcatagtcggtggcaaagactctatctacggaccgatcggtatttacgtgaaaacgattttcgctggaggcgctgccgcagccgatggccgactgcaggagggggatgaaattctcgagttgaacggcgagtccatggccggcctgacccatcaagatgctctgcaaaagttcaaacaagccaagaagggcctgctgacactgacagtgcgcaccaggctcacagcaccacccagcttatgcagccatttatctcctcccctgtgccgctccctatcctctagtacctgcattacgaaagatagttcatccttcgctctggagagcccctcggccccaatttctacggctaagcctaattaccggataatggtcgaggtcagcctgcagaaagaggcaggtgtaggcttaggtattgggctttgtagcgtgccatacttccaatgtatcagcggaatctttgtgcatactctcagccctggaagtgtggcccacctggatgggcgcctccggtgcggcgacgagatcgtcgagatctcagattcccccgttcactgtctgactttgaatgaagtttacaccattctgtcacattgcgaccctggacctgtgccaatcattgtaagcaggcatcccgatccccaggtctccgaacagcagctgaaggaagccgtggcccaggcagtcgaaaacacaaaattcggaaaagagcggcaccagtggtcgcttgaaggcgtcaagagattggagtcatcgtggcatgggcggcctacgctcgagaaggaaagagaaaagaacagcgctcctccacaccgacgagcccaaaaggtaatgattcgctcgagttccgacagctcttacatgtccggctcccccggaggctctccaggctccgggtccgccgagaagcccagttccgacgtagatataagtactcactcgccttcactcccattagcacgcgaaccggtcgttttgagcattgcaagcagtaggttaccacaggaaagtccccccctccccgagagccgcgactcccatcctcccctccgcctcaagaagagcttcgaaatcttggtccggaaaccaatgtcatccaagcctaaacctccccccagaaagtatttcaaatctgactcggatccgcaaaaatcactggaggagcgagaaaatagcagctgtagttcaggccatacacctcctacatgtggacaggaggcgagagagctactgcccctactgctcccccaggaagacaccgccggtcggtccccatctgcaagcgctggctgtccggggcctggtatcgggccccagaccaagtctagcaccgagggcgagccagggtggagacgagcatcaccagtgacccagactagcccaatcaagcatccactcttaaagagacaggcccgaatggactatagttttgatacaaccgctgaggatccctgggtgcgtatctcagactgcatcaaaaatctatttagcccaattatgtctgaaaaccacgggcacatgcctcttcagccgaatgcctctctcaatgaggaagaggggacccaggggcatccggacggcacgccacccaaattagacactgctaatggcaccccaaaggtatataaaagcgcagactctagcacagtgaagaaaggccctcccgttgccccaaagccggcatggttccgacaaagtctcaaggggctgcggaaccgcgcaagtgacccgaggggcctccccgatcccgccttgagcacgcagcccgcccctgcaagtcgagagcaccttgggtctcacattagggcaagtagttcttcctctagcattagacagcggatttcaagcttcgaaacatttggaagttcccaactgcctgacaagggcgcccagaggctgtcactccagccgagtagcggggaggcagccaagccgttaggcaaacatgaggaggggcgcttctctggactgttaggcaggggggccgcccccaccctcgttccacagcaacctgaacaagtgctgtcctccggtagccccgcagcatctgaagccagggaccccggcgtgtccgaatccccacctccagggaggcagcctaaccagaaaacgctgcccccaggaccagatccactcctacgcctgctgtccactcaggcggaggagagtcaggggcccgttcttaagatgccgagccagagggctcggagttttcctctcacacgctctcagagctgcgaaacaaaactactcgatgagaagacgtctaaactctattccattagcagccaggtctcatccgctgtgatgaagtcccttctgtgtttaccatctagtatatcttgtgcccagacaccttgtatcccaaaagaaggcgcctctcctacgagtagtagcaatgaggactcagctgccaatggcagcgctgagacgtccgctctggatacaggcttttctctcaacctcagtgaactccgggaatacaccgaggggctcaccgaggcaaaggaagatgatgatggcgatcactccagcctgcagtcagggcaaagcgttattagcctgctaagctccgaggaactgaaaaagctaattgaagaggtgaaagtgttggatgaggcaacccttaagcagctcgatggcattcacgtcactatactgcacaaggaggaaggtgctggcttggggttcagtctggcaggcggggctgacctggaaaacaaggtgattaccgtccaccgtgtattcccaaacggccttgccagccaggaaggtacaatccagaaggggaacgaggtgttatccatcaacggaaaatcactaaaaggtacaacccaccacgatgcattggcgatactcaggcaggcgcgagagcctcgccaggccgtaatagtgacgcggaaacttaccccagaagccatgccagatctcaactcatccaccgatagcgctgcctcagcttctgcagcctccgacgtgtcagtggagtccacggaggcaaccgtttgtaccgtcacactggagaagatgtctgccggcttaggcttttcgctggaaggtgggaaaggctccctgcatggcgacaagcccctgaccataaaccgaatctttaaaggggcagcatccgaacagtctgagacagtgcagcctggagatgaaattttgcagttgggtgggaccgcaatgcagggtttaacgcgctttgaggcatggaatattattaaggcactaccagacggcccggtgacgatcgttattaggaggaaaagtctacagtcaaaggaaacaactgcagccggagatagctag

SEQ ID NO: 67838 - DNA, 1974 bp, Artificial Sequence
  derived and/or modified sequence
atgtggctgcccgtgaaggagctgaccatccacgagtgccagcagatgagcacttatcgagcaccgaaccaggaggctagggaactgctgcccctactattgccacaggaagatacagcaggaagatccccgtctgcgagcgccggatgtccagggccaggaatcgggccacagacgaaatcaagtaccgaaggcgagccggggtggaggcgagccagcccagtgacccagacaagtcccataaagcaccctctgttaaaacgccaggcacggatggactacagctttgacactacggctgaggatccctgggttagaatttctgattgtatcaaaaatctattctcgcctatcatgtctgaaaaccacggccacatgccacttcaaccgaatgcgtctctgaacgaggaggagggaacgcagggacaccctgacggcacgcccccgaagctcgacactgcaaacgggacgcctaaggtgtacaagtctgccgatagttccaccgtaaagaaggggccgcctgtagcccctaagcccgcctggtttcggcaaagcctcaagggtctccgcaaccgggctagtgacccacgcggcctgccagatcctgcgctgtcaacacaaccggctcccgcctcacgcgagcacctgggcagtcatattagagccagtagctcctcgagcagcatccgccaaagaatatcctcctttgagacctttggctcgagccaactaccggataagggtgcccagaggcttagcctgcagccatcttcaggagaggcagcaaaaccgctcggcaaacacgaagaggggaggttttcaggcctcctgggccgaggcgcagcgcctaccctggtgcctcagcagcccgagcaggttctctccagcgggtctcccgcagcctcggaagctagggatccaggggtgagtgaatcgcctccaccgggccgccagcccaaccagaaaacgctacctccaggtccagaccctttgttacgactgctgtccacccaggctgaggagtcacagggcccagttctcaaaatgcccagtcagagggcgcggagttttcccctgactaggagccagtcgtgcgaaaccaaactcctggacgaaaagactagcaagttgtactccatctcctcacaggtgtcttccgcagtcatgaaatctctcctctgcctgccatccagtataagttgcgcacagaccccctgcatccctaaggaaggggcatcccccacgagtagctcaaacgaagatagtgcagctaacggcagtgccgaaacatcagctctcgacaccgggttcagtctgaatctcagtgagctccgcgaatatacagaaggcctcaccgaggccaaggaagatgacgacggcgatcacagctcgctgcagtcaggacagagcgtcatttcactcttgtctagcgaggagctcaagaaactgattgaagaggtaaaggtgctggacgaggccacgctcaagcagctcgacggaatacatgtgacgattctgcataaggaggagggggctggcctgggcttctccctggcaggcggcgctgacttggagaataaggttataaccgttcacagagtctttcccaacggcctggccagccaggaggggactatccagaaaggcaatgaggttctgtctatcaatggaaagagcctaaaggggaccacacaccatgatgcacttgccatcctgagacaggctcgcgaacccaggcaagccgtgatcgtcacgagaaagttgacccccgaggcaatgcccgacctgaactcttcgacagatagtgccgcatccgcttcagcggcttcagacgtcagcgtggagagtaccgaagccacagtctgtacagtgaccctcgagaaaatgtctgcaggccttggattctcactcgaaggtgggaaagggagtctgcacggcgacaaaccattgaccatcaatcgaatcttcaaatag

SEQ ID NO: 67839 - DNA, 3996 bp, Artificial Sequence
  derived and/or modified sequence
atggagagccacagccgggccggcaagagccggaagagcgccaagtttagaagcatctcgagaagtctgatgctgtgcaatgctaaaacaagtgatgatggctcctcgcctgatgagaaataccctgatccctttgagatctccctggctcagggtaaggagggcatctttcatagttctgtgcaattggccgatactagcgaggctgggccttccagcgtccctgatctcgctctggcctctgaagcggcacagctccaagccgccggtaacgaccggggcaagacttgcaggcgtatcttttttatgaaagaatcttcaaccgccagtagccgtgagaaaccagggaagctggaggcgcagtcctctaactttttgttcccgaaggcatgtcaccagcgcgcgcgtagtaatagcacttccgtgaacccttattgcacgagggaaatagatttcccgatgactaaaaaatcagcagctccaactgatcgccagccctattccttgtgtagtaatcgcaaatcactttctcagcagctggattgccctgccggcaaggctgctggaacatcacgcccaacaagaagtctaagcacggcgcagctcgtccaaccgtctgggggtctgcaggcctccgtcatatctaatatcgtcctgatgaagggacaggctaagggcttgggatttagtattgtgggcggcaaagattccatttacggtcctatcggaatttacgtaaagaccatctttgccggaggggcagcagcagccgatggacgactgcaggaaggagatgaaatccttgaattaaacggcgagtccatggccggcctaactcatcaggacgctctgcagaaattcaaacaggctaagaaaggacttctgactttaactgtgcgcacgaggctcaccgcaccacctagcctgtgttctcatctctccccccccttgtgcaggagcctttcctcttccacctgtattacaaaagactccagttcttttgctctggagtccccatccgcccccatctctacagcaaagccaaactatcgtatcatggttgaagtgagtctgcagaaagaggcgggcgtggggttgggcataggattgtgttccgtaccgtacttccagtgtatctctgggatatttgtccacacattatcgccgggatctgtggcgcacctcgatggccgactccgttgcggtgacgagatcgtggagatttcagactcacctgttcactgcctgacgctgaatgaagtgtataccatactgagtcactgtgatcctggccccgttcctatcatcgtgagtcggcaccctgatccccaggtgtcagaacagcagcttaaggaggccgtcgcccaggctgtggaaaatactaaatttggcaaagagagacaccagtggagcctggagggcgtaaagaggttggaatcatcttggcatgggagacctaccctagaaaaggagcgcgaaaagaacagcgccccccctcaccggagggctcagaaggtgatgattcgttcaagcagcgattccagttacatgagcggcagtcccggagggtctcctggtagcggcagcgcagaaaaaccatcttccgacgtggacatatccacacattctccctccctcccgcttgctagagagcctgtggtgctgagtatcgcatcctccagactacctcaggagagcccgcccctgcccgaatcacgtgattctcaccctccactcagactgaagaaaagctttgagatactcgtgcggaagccaatgagtagcaaacctaagccccctcctagaaagtatttcaagagtgacagtgaccctcagaagtccctggaagagagagagaatagttcatgctcctctggccataccccacctacctgtggtcaagaggcccgcgagttgttaccgctgctgctgccccaggaggacacagccggaagatcaccatcggcctccgccggttgcccaggaccaggaattggcccccagaccaagagttccaccgaaggagagccgggatggcggagggcctcaccagtgacgcagacgtcaccaattaagcatcctctactgaagagacaagctaggatggactattcattcgacacgaccgccgaggacccctgggtgaggatctcagattgcatcaaaaacttgtttagccccatcatgagtgagaatcatgggcacatgccactgcagcctaatgccagcctcaacgaagaggaaggtacccagggccatccagacgggaccccgccaaagttggacacagcaaatggtacacctaaggtttataagtccgcagactcctccacagtgaagaaaggtcctcctgtcgcccccaagccagcttggttccgacagagcttgaagggtctccgcaaccgggcatctgacccaagaggtctaccagacccagcattatccacacagcctgcccctgcgtcacgggagcatctgggctcccacatcagagcgagttcaagtagcagctcgataaggcaacgtatttcatcattcgagacgttcggatctagccagttacctgacaaaggcgcacagaggctaagccttcagccaagtagtggagaggcagcgaagcccctgggaaagcatgaggaaggtcggttttctggactgcttggcaggggggctgcccccacactggtgccacagcagcctgaacaagtgctcagtagtgggtcccccgcggcctccgaagctcgcgacccgggggtaagcgagtcgccaccccccgggcgccagcctaaccaaaagaccttgccccctggacctgacccgctcctcaggctcctctcaacacaggctgaggaatctcaaggccccgttctcaagatgccatcccagcgggcccggtctttcccattgacgagatcccagtcatgtgagaccaagcttctggatgagaaaacctcaaagttatattctatctcttctcaagtgtcaagcgccgtgatgaagagtctgctgtgtctgcctagctccatttcatgtgcacaaacaccttgcattcctaaggagggtgctagccctactagcagctccaatgaggattcagccgctaacgggtccgcagagacttcggccttggacacaggtttctccctaaatcttagtgaactgcgggagtacactgaaggactcacggaagctaaggaagatgatgacggagatcactctagccttcagagcgggcaaagcgtgatatccctgctcagcagcgaggaactcaaaaagctaatcgaggaggtcaaggttttggatgaagctactttaaagcagttagacggcattcatgtgactattctgcacaaggaagagggggcaggcctaggctttagtctggccggcggtgctgatctcgagaataaggtcatcaccgtgcacagagtcttcccaaacggtctggcaagtcaggagggcaccattcagaaggggaatgaggtcctgagcatcaatggcaagagtctgaaggggaccacacaccacgacgcactcgctattctgcgccaggcgagagagcctcgtcaagccgtgatcgtgacacgcaaactgacacctgaagctatgccggatcttaattcttccaccgatagcgctgctagcgcctccgctgcgtcagatgtaagcgtggagtctactgaggctacagtttgtaccgtgactctggagaagatgagtgcaggcctgggattttctcttgagggcggtaaaggtagcctccacggcgacaaaccccttactatcaacagaattttcaaaggcgcagcttctgagcagtcggagacagtgcagcccggggatgagattctgcagctgggggggacagcaatgcaggggctgacccgattcgaggcttggaatatcatcaaggccctgccagatgggcctgtcacgatagtgatcagaaggaagtctcttcaatctaaggagactacagctgccggggactcctag

SEQ ID NO: 67840 - DNA, 1785 bp, Artificial Sequence
  derived and/or modified sequence
atggagagccacagccgggccggcaagagccggaagagcgccaagttccgttcaataagccgaagcctgatgctgtgtaatgcaaagacatcagatgacgggagctcccctgatgaaaagtatccagatcccttcgagattagcctcgcccagggaaaggaaggcatctttcactcctcagttcagttggccgacacaagcgaagcaggtccgtcaagtgtgccagatttagcgctagcatcagaagcggcccagctgcaggcggctgggaatgaccgcggtaagacctgtcgccgcatcttcttcatgaaggagtcgagcacagcttccagtcgtgaaaagcctggaaagctggaagcacagtcctcaaatttcctgttcccgaaagcgtgtcaccaaagggctcgctccaactctacatcagtaaacccctactgtacacgggaaattgacttccccatgactaaaaagtcagctgccccgaccgaccgtcagccatactccctctgcagtaaccgtaaaagtctatcacagcagctcgattgcccagctggcaaagcggccggcacctccaggcctacccggagtctctcaaccgcacaactggtgcagccctccgggggattacaggccagtgtgattagcaatatcgtcctgatgaagggacaggccaaaggattaggcttttccatcgtgggtggtaaggactcgatctacggtccaatcggcatctatgtgaagaccatctttgctgggggagctgccgctgccgacggccgcctgcaagagggagacgaaattttagaactaaacggagaatcaatggctggactgactcaccaggatgccttacagaaatttaagcaagccaaaaaggggctgctcactcttacagttcgcactcgcctaactgccccccccagtctctgcagtcatctctcaccccccctttgtcgatctttatccagctccacgtgtatcactaaggattcttcaagcttcgctctggagtctccatccgctcctatctcaactgctaagccgaactaccgcatcatggttgaagtttccctgcagaaagaagctggagtgggtctgggcattggcctctgctccgtcccctattttcagtgtattagcggcatctttgtccacacccttagccccggatcagttgcacatcttgatgggaggctgagatgcggagacgaaattgtggaaatttccgatagccccgttcactgtttgactttgaacgaagtgtatactatcttgagccattgcgatccaggccccgttccaatcatcgtgtcccggcacccagatcctcaagtgtcggaacagcagcttaaagaagcagtggcgcaggcagtggaaaatacaaaatttggcaaggaacggcaccaatggtcactcgaaggcgtcaagcgcctggagtcaagctggcacgggcgccccaccctcgaaaaggaacgcgagaagaattccgctcctccccacagaagagcccagaaggtcatgattcgctcgagttccgactcctcctacatgtctggttctcctggcggctcgccgggtagtggctcagccgagaaacctagttctgacgtggatattagtacacactctcctagtctccctttggcgcgagagcctgtggtcctcagcattgcttcctcacgcctgccccaggagagccccccgctgcctgaaagccgggattctcacccacccctgcgcctcaagaagagtttcgaaattctcgttaggaaaccaatgtcctag

SEQ ID NO: 67841 - DNA, 2163 bp, Artificial Sequence
  derived and/or modified sequence
atgtgtagcgttctccctgtggctgtgacgggagtgaaacggctggaatctagttggcatgggcgtcccacattggagaaagagagggaaaaaaacagtgctcctccacaccgacgggctcagaaagttatgattagaagctctagcgattcctcttatatgtctggctcccccggagggtcaccgggatccgggtcagctgagaaaccctctagcgacgtcgatatctcaacccactctccttcgctgcctttagcgagggagcctgttgtgctgagcatagccagttcgcgacttcctcaggaatccccccctctgcctgagagccgagattcacatcctcccctccggttgaagaaaagttttgaaatcttggtgcggaagcctatgtcctctaagcctaagccaccaccaaggaagtacttcaagtctgattcagacccccagaaatcccttgaggaacgagagaacagctcttgcagcagcgggcacacccctcccacttgcggacaggaagctagagaactgctgcctctgttgctgcctcaggaggataccgccggaaggtcccctagcgcctccgcgggatgtcctgggcctggtatcggaccacagactaaatcaagcaccgaaggggaaccgggttggcgccgagcctctcctgtgacacaaacatcgccaatcaagcacccactcttgaaacggcaggctaggatggactattcctttgatactacagcagaggatccatgggtccggatatcggattgcattaagaatctgttctctcctatcatgtcggaaaatcacgggcacatgccactgcagcccaatgcatctctgaatgaggaagaaggtacccagggccatccagacgggacgcctcctaaacttgatacagctaacgggaccccgaaggtgtataagtctgctgatagctctaccgtaaaaaagggccctcctgtcgctcctaaacccgcatggttccggcagagcctgaaggggctgaggaatagggctagcgatccccgagggctcccagaccctgcactgtcgacccaaccagcacctgcgtctcgcgaacacctgggttcccacatacgcgcttctagtagcagttcgtctatacgccagcgcatttctagcttcgagacgttcgggtcttcacagctgcctgacaagggtgcgcagcggctgagcctgcagccatcgagtggtgaggcagcaaagccgcttggaaaacatgaggaggggaggttcagtggtctcttgggcagaggcgcagctcccacgctggtcccccagcagcctgagcaggttctctcctcaggctccccggctgcatccgaggcgagagacccaggagtgtcagaatcgcccccacctggcaggcaaccaaaccagaaaacattacctcccggtccggatccccttctgcgacttctatcaacacaggctgaggagtcacagggccctgtattgaagatgcccagtcagcgagcccgatccttcccactcaccagaagccagtcctgtgaaacaaaactccttgatgagaaaaccagcaaactctattccattagctcccaggtgagctctgctgtgatgaagtccctgctttgcctgccctctagcatctcatgcgcgcagacaccctgtattcccaaggagggggcaagtcccaccagctcctccaatgaagactctgccgctaacggaagcgccgagacctctgccctggacactgggtttagcttgaacttaagcgaactgagagagtacacagaaggactgactgaggcaaaggaggatgatgatggagaccacagtagcctgcagtccggtcagtctgtgatcagcctgctctcctctgaggagttgaagaagcttatcgaggaggtgaaggttctagacgaagccaccttgaagcagctggacggcatccatgtgacaattttgcacaaggaggagggcgctggccttggcttcagtctagcagggggagcggacctcgagaacaaagtgatcactgtccatcgggtcttccctaatgggctcgcttcacaggagggcacaatccagaaaggcaacgaagttttatccattaacggtaaaagtcttaaaggaacaacacatcatgctcggccacagctgctgcactag

SEQ ID NO: 67842 - DNA, 3492 bp, Artificial Sequence
  derived and/or modified sequence
atggagcggggagcccgtgaaatggccgctccaggcgactgcccggctggcaaggcagctggcacatctcgtcccacacggagcctgtctaccgcacagctggttcagccatccgggggacttcaagcaagcgtgatttcgaatatagtactcatgaaggggcaggcgaagggccttgggttcagcatcgtgggagggaaggattctatttatgggccaattggaatctacgtcaaaaccatttttgcaggaggagccgcagcagccgatggacggctgcaggaaggcgacgagattctcgagctgaacggggagagcatggccggactgacccaccaggatgccctgcagaagtttaagcaggcaaaaaaaggtctcttaacgctcacagtgcgtactcgcttgaccgccccacctagcttgtgctcacacctcagtcctcccctgtgtcgaagcttgtctagttccacatgcattaccaaagactcgtcgtccttcgctctcgaaagcccaagtgcacccatatctaccgccaagccaaattataggattatggttgaagtgtcactgcagaaggaggctggtgttggcctcggcattggcttgtgctcggtgccttatttccagtgcatcagtggaatttttgtgcacaccctgtccccaggaagtgtcgcccacctggatggtcggttgcgctgtggtgatgagattgtggagattagcgacagtcccgtgcactgcctcaccctaaatgaggtttacacaatcctgtctcactgcgacccaggtccggtaccaattatcgtttcccgacatccagatccacaggtctctgagcagcagctcaaagaggcagtggcacaggccgtagaaaacacgaaattcggtaaggagagacatcagtggtctctggagggggttaaacgtcttgagtcgtcgtggcatggaagacccaccctggaaaaagaacgggagaaaaactccgcccctccccatagacgggctcagaaggttatgatcaggagttctagcgattcctcctatatgagcggctccccaggtgggtcacctgggtcagggagcgccgaaaaaccctctagcgatgtcgatattagcactcactctccaagcctgccgctcgccagggagcctgtcgtcctgagtatcgcctcttccagactgcctcaggagtcgccccctctgcctgagtctcgcgatagccatcctccattgaggctgaaaaaaagtttcgagattttagtgcgcaaacccatgtctagtaagcccaagcccccaccaaggaagtactttaaaagtgacagcgacccacaaaagtctctggaagaacgggaaaacagctcttgtagctccggtcacacaccacccacatgcggtcaggaggcccgagagcttctgcccctccttctgccgcaggaagatacagctggccgatcaccatctgcgagcgcaggttgcccgggacctgggattggaccacagaccaagtcatcaaccgaaggcgagcctggctggcggagagccagccctgtcactcagacctcgcccatcaaacacccactcctcaagcggcaggccagaatggactacagcttcgacaccacagctgaggatccctgggttagaatctctgactgtattaagaatctattctcccctatcatgtcagagaaccacggtcatatgcccctgcagcctaacgctagccttaatgaagaagaaggcactcaaggccatcctgacggcacaccgccaaaactggacactgctaacggcactccaaaagtgtataagagcgccgactctagtaccgtgaagaaaggcccaccagttgctcctaagccagcctggttcagacagtcattgaagggcctcagaaatagggctagtgatcccaggggactgcccgatccagctctgagcacccaacccgcacctgcttctcgagagcacctgggttcacatattcgggcttcctctagtagctctagtatcagacaaagaatttcatccttcgaaacttttggaagctcccagttgcccgataagggagcacagcgtctttccttgcaaccgtccagcggcgaggcagcaaagcctcttggtaaacacgaagagggtcgattttccggtctgcttggcagaggcgcagcgcctactctcgtgcctcagcagcccgagcaagtgctaagctctgggtctcccgcagcatctgaggccagagacccaggagtatcagaatcacctccacctggcaggcaaccaaaccagaagacactgcccccaggcccagacccgctgctgaggctcctgagtactcaggccgaggagagccaggggcctgtgctgaagatgccaagccagcgcgcacgctcctttcccctgactcgtagccagagttgcgagacaaaacttctggacgagaagaccagtaaactgtactctatcagcagtcaggtcagcagtgctgttatgaaatcactgctttgtctgccctcttcgatctcatgcgcacagacgccatgcataccgaaagagggcgcatccccaacatcctcctcgaacgaagattctgctgccaatggatccgcagagacctccgccctcgacacaggcttttctttgaatctgtcggagctaagggaatacaccgaaggcctcactgaggccaaggaggacgatgatggggaccacagttctctccaatccggccagtccgtgatctccctgctcagcagcgaggagctcaaaaagctgattgaagaggtgaaagtgctggatgaggccactctgaaacagctggacggcattcacgtgacaatactccataaggaggagggggcagggctgggcttttccctggcagggggagcagacctagagaataaggtcatcacggtgcaccgggtcttccctaacggtctggcctctcaagagggaactatacagaagggcaatgaggttttgtcaattaacggaaagagcttgaagggaacgacgcatcatgacgctctcgccatactaaggcaagcacgcgaaccgaggcaagccgtgatcgtgactagaaaactgactcccgaggcaatgccagatctcaattcctcgacagactcagcagcgtctgccagtgcagcgtcagatgtgtccgtggagtccacagaagctaccgtctgtactgtcacccttgagaagatgagcgcagggctgggttttagcctggaggggggaaagggcagtttgcacggcgacaagcccctgaccatcaatcgtattttcaaaggagcagcttccgagcagtccgagaccgttcagccaggagacgagatactgcagctcggcggtactgctatgcaggggttaaccaggttcgaagcttggaatataatcaaggccctgccggatggcccagtcactattgttattaggagaaagagcttacaaagcaaagagacgactgcggctggtgattcctag

SEQ ID NO: 67843 - DNA, 1974 bp, Artificial Sequence
  derived and/or modified sequence
atgtggttacctgtgaaggaacttaccatccacgagtgccaacagatgagtacctatagagcgcctaaccaggaggcccgagagcttttgccactcctccttccgcaggaggatacagctggacggtctccaagcgcttcggctggatgccccggacccggaatcggacctcagaccaagtcttccaccgagggcgagcccggttggcgccgagccagcccagtcacccagacaagcccaatcaaacacccacttttgaagcgacaggctcgcatggactattcgttcgacacaaccgcagaagacccttgggtgaggataagcgattgtattaagaacctcttttcacccatcatgagcgaaaatcacgggcatatgcccctgcagcccaatgcctccctaaacgaggaggaaggcacccagggacatcctgatggcacaccacctaaactggacaccgctaatgggacacccaaagtttacaagagcgccgacagctccaccgtgaagaaaggacctccagttgctccaaagccagcgtggttccgccagtcattaaagggacttagaaatcgcgcaagtgaccccaggggtctgcctgacccagctctgtcgacacaaccagctccagcctctagagagcacctgggatcccacatcagggcttcaagtagcagtagctctattaggcagcgaatcagcagcttcgaaactttcggctcctcccagctgcccgacaagggagctcaacggctttcactccagcctagctccggcgaggctgccaaaccgctgggcaaacatgaggaggggaggttttcaggactgcttgggaggggggcagctcctacacttgtgccgcagcagcccgaacaggttcttagcagcggaagcccagccgcttccgaagccagagatccgggagtgagcgagtctccccctcctggacgtcagccaaatcagaagactttgcccccaggcccagaccctctattgagattgctgtctactcaagccgaggagagccaagggcctgtcctgaagatgccatcacagagggctcgcagcttcccgctgacgcgctcccaaagctgtgaaacaaagctgctggacgagaagacttcgaagttgtattctataagctctcaggtgtcctcagccgtgatgaaaagcctgctgtgcctgccatcgtctatctcttgcgctcaaacaccatgcattcctaaagagggggctagtccaacaagttcctcaaatgaagacagtgctgcaaacgggtcagcggaaacaagcgccctcgacaccgggttttcactgaatctgtccgagctgagagagtacacagaaggcctgacagaggcgaaggaggacgacgacggggaccactcatcgttacagagtggtcagagcgtgatctctctcctgagcagtgaagaactgaaaaagctgattgaagaagttaaagttctagacgaagccacacttaagcagctggacgggattcatgttacaatcctgcacaaagaagagggtgccggactcggcttctcactggctggtggcgcagacctggaaaacaaagtaatcactgtgcaccgcgtgtttccaaatggtctggcgtctcaagaaggcaccatacagaaaggcaatgaagtgctgagtatcaatggaaagagcctcaagggcaccacccaccatgacgctctggcgatccttagacaggcaagagagcctaggcaggcagtgatcgtgacgaggaagctgacccccgaggccatgccggatttgaactcctcaaccgattcagctgcaagcgcctcagccgcatccgacgtgtcagtggagtccaccgaggctactgtttgcacagtgaccctcgaaaaaatgagcgccggtctcgggttctccttggaaggcggaaaaggcagccttcatggggataaacccttgactataaatcgcatatttaaatag

SEQ ID NO: 67844 - DNA, 3996 bp, Artificial Sequence
  derived and/or modified sequence
atggaatcccacagccgcgcagggaagagcagaaagtctgccaaatttagatccataagccgctctctcatgctgtgtaacgccaaaacctcagacgacggtagttcacccgatgaaaaatatccggatccatttgagatttccctcgcgcaagggaaagagggcatttttcatagctccgtgcagctcgctgatacatccgaagccggaccgtcatcagtgccagatctagctctggcttccgaagcggcacaactccaggctgctggcaatgataggggaaaaacctgccgcagaatattctttatgaaagaaagctctaccgcctcttctcgagaaaagcccggaaagcttgaggcgcagagtagcaattttctgtttccaaaggcatgccatcagcgggcaagaagtaactctacttctgtaaacccttattgcacccgggaaattgacttccctatgaccaagaagtccgcagcaccaacagacaggcaaccttacagcttatgttccaacagaaagtctttgtctcagcagttggattgccccgctgggaaggccgctggaaccagccgacctacccgcagcctgtctactgctcaattggtgcagcctagtggcggtctgcaggcctccgtcatctctaatattgtgcttatgaagggacaggctaagggtctcggattcagcatcgtgggcggtaaagactccatctacgggcctatcgggatatacgtcaagaccattttcgccggaggtgccgctgccgcagatggcaggctccaggagggagatgaaatcctcgagctcaacggcgaatccatggctggcttgacgcaccaagatgctctccaaaagtttaaacaggcaaagaaggggttgttgactttaacggtgcggaccaggctcactgcgcctccatccttgtgttcgcacttgtccccccctctctgtcgcagcttgtccagctcaacatgtatcacgaaggacagctcttctttcgctctcgaatcaccttccgctccaattagcacggcaaagcccaactatcggatcatggtagaggtaagtttgcagaaggaagcaggggtgggcctgggcatcggcctgtgtagcgtcccatattttcaatgtatctctgggatattcgtgcacacactgtctcccggaagcgtggcccatcttgacgggaggctgcgctgcggggacgagatcgtggaaatatccgatagccctgtgcactgtcttactctgaatgaggtgtacactatcctcagtcattgcgacccaggtccagttcctattatagtcagccgacatcccgatccgcaggtgtcagagcaacaactgaaggaagccgtcgcccaggccgtcgaaaacacaaaattcggaaaggagcgacaccagtggtcactagaaggcgtgaagagattggagtcgagttggcacgggaggcccacgctggagaaggaaagggaaaagaacagtgctccccctcaccgaagagcccaaaaagtgatgattcggtcgagcagtgactccagctacatgagtggctcccccggaggtagtccagggtctggcagcgcagaaaagccttcttccgacgtcgacatttctactcattcacctagtctgccgctagcccgtgagcccgtggtgcttagcatcgcctcttcccgattgccccaggagtcgccccctttgccagaatcaagagatagccacccccctttacgtctgaagaaatcttttgaaatactggtccggaaaccaatgtcatccaagcccaaacctcccccacgaaaatattttaaatccgactccgacccacaaaagagcctggaggagcgagagaacagtagctgctcctctggtcatactccccctacctgtggccaggaagcacgcgagttgctaccattacttctcccccaggaggataccgccggacgctcccctagtgcttctgctggttgccccggacccggtataggcccacaaaccaagtccagcaccgagggcgaacccggatggagacgcgctagtcccgtaacacagacttctcctattaagcaccccctgctcaagcgccaagcaagaatggattattcctttgatactactgccgaggacccgtgggtgcgcatctctgattgtatcaaaaatcttttttctcccatcatgagtgaaaaccacggccacatgcccctgcaacctaacgcttctttgaacgaagaggagggaactcaaggccaccctgacggcacaccccctaagttggatacagcaaatggaacgcccaaggtgtataaaagcgccgactcatcaaccgttaaaaaaggtccccctgtggcacccaagcccgcttggtttcgacagagtctcaaaggattgcgcaatcgtgcctccgatcccaggggattaccagaccccgcactgagtacacagccagcccctgccagcagggagcacctcggctcccatatccgggctagttcatcttcctcctcaattcgccagcggattagtagcttcgagacattcggaagctcgcaactgcccgacaagggcgcacaacggttgtccttgcagcccagttcgggcgaggctgctaagcccctgggcaaacacgaggaagggagattctctgggctcttgggtcgaggcgctgctcccacattggtacctcagcagccggagcaggtcctaagctcagggagtcctgctgccagtgaggcaagggacccgggagtttctgagtcccctcctcctggacgtcagcctaaccagaaaacactgcctcccggtccagatcctctcctgcgtctcttgtccactcaggcagaggagtcccagggccctgtgctgaaaatgccctcccagcgcgctcgctccttcccactaaccaggtcccagtcctgcgagacgaagcttctcgacgagaaaacatccaagctgtactctatctccagtcaagtgtcgagcgccgtgatgaagtctctcttgtgtctaccctccagcatctcctgcgcgcagaccccttgtattcctaaagaaggggcatcacctaccagtagcagtaacgaagacagcgctgctaatgggtctgctgaaacatctgcgcttgacactggtttctccttgaacctatctgaactaagggagtacactgagggcctgacagaggcaaaggaagacgatgatggcgaccattctagtctccaaagcgggcagtctgttatttcgttactgagttcagaggaactcaagaagctcatcgaggaagttaaggtactcgacgaagctactctcaagcagctcgatggcatccacgtgaccatcctgcataaagaggaaggagctggtctgggtttctctctggccggtggagccgatctggaaaataaggtgatcacagtccaccgagttttcccgaacggtctagcgagccaggagggaaccatccagaagggtaatgaggtgctgtcaattaacgggaagagcttgaaaggcacaacacaccatgatgcactggccatcctcagacaagcacgtgagcctagacaggcagtgatcgtaactagaaaacttacaccggaggcaatgccagacctcaacagctccaccgacagcgcggcaagcgcttcagccgcttccgacgtgtctgtggagtccaccgaggccaccgtttgcactgtgacactggaaaagatgagcgcagggctggggttctctttggaaggcggaaaggggagcctgcatggcgataagcccctgactatcaatcgcatttttaagggtgcggcttcagaacagtccgaaacagttcagccgggtgatgagattctgcagcttggagggacagcgatgcaggggctgacaaggtttgaggcctggaatatcataaaggctctgcccgacggacccgtgaccatcgtgatccggaggaaatccctgcagtccaaggagaccaccgccgcaggagactcctag

SEQ ID NO: 67845 - DNA, 1785 bp, Artificial Sequence
  derived and/or modified sequence
atggagtcacatagccgagctggcaaatcccggaaaagtgccaagttccggagcataagtcggagcctgatgctgtgcaatgccaagacttcagatgatggatcctcccccgacgagaaataccccgaccctttcgagataagcttggcccaaggaaaggaaggcatattccacagctcagtgcagctggcggatacgtcagaggccggaccctccagcgtgcctgatttagcactggcaagcgaagccgctcagttacaggccgctgggaatgatagaggtaagacttgtcgcagaattttttttatgaaagagtctagcaccgccagctcgcgggaaaaacctggaaaactggaggctcagtctagtaatttcctctttcctaaggcctgccatcaacgagcgagatccaatagtacctcagtgaatccttactgtacgagagagattgattttcctatgaccaaaaagtcggccgcacctaccgatcggcagccgtactcgctatgctccaacagaaaatcactctcacagcaactcgactgccccgcagggaaagctgcagggacttcccgtcccaccaggtcattgtcaacagctcaactcgtgcaacccagcggcggtctccaggcctccgtcatctctaatatcgtcttaatgaagggccaggctaaaggccttggattctccatagtcggtggcaaggatagtatctacgggcctatcggaatctacgtgaagactatctttgcagggggagcggctgcagccgacgggcgactgcaggagggcgatgagattctagaactgaacggcgagagcatggctggtctcacacaccaagacgcactgcagaaattcaagcaggcaaagaaggggctgttgaccctgactgtgcgtactagactgactgcgcctcctagcttatgcagtcatctttctcccccactgtgcagatcgttgtccagcagcacatgcatcaccaaggactcctcaagctttgcactcgaatctccttctgcccctatctctacagccaaacctaattatcgcattatggttgaggtcagtctgcagaaggaggcgggagtaggcctcggtatcggcctttgttcagtgccatatttccagtgcatctccgggatctttgtccacactctttcacccggaagcgtggcccatttggacggaagactgagatgcggtgacgaaatcgttgaaatcagcgacagccctgtgcactgtttaactctaaatgaagtgtacaccatcctctctcactgcgaccctggacctgtgccgattatcgtcagcagacaccccgatccacaggtgagcgagcagcagcttaaggaggcggtggctcaggccgtagaaaatacgaagttcggcaaagaaaggcaccagtggagtcttgagggagttaaaaggcttgaatcctcttggcacggcagacccacccttgagaaggagcgggagaagaattcagccccaccccaccggagagctcagaaggtgatgatccggtcgagtagcgatagcagctacatgtcaggcagtcccggagggagtcctggtagcggaagcgctgagaagccatccagcgacgttgatatatccacccacagccctagcctgccccttgccagagagccggtagtactgagtatcgcttcctctaggcttccgcaggagtccccccctctccccgaatcccgggacagtcacccacctctgcggttgaagaaaagctttgaaatccttgttcggaagcccatgtcctag

SEQ ID NO: 67846 - DNA, 2930 bp, Artificial Sequence
  derived and/or modified sequence
agaaagcttgaatgattttcccaacccaaagtcatacagctcgccagggaccaacaccaagactgccatactccagatccacagtgacttcagataagaagcagatggccgatgtgcagtgtgctgcccgtggcagtcacaggtgtcaaaaggctggaaagcagttggcacgggcggcccaccttggagaaggaacgagagaagaactcagcacccccgcatcgcagggctcagaaggtcatgatccgctccagcagtgacagcagctacatgtctgggtccccagggggaagtcctgggagtggcagtgctgagaagccgtcctctgacgtggacatcagcacacacagccccagcttgcctctggcacgggagccagtggtgctttctatagcatcctccaggctgccccaggagagcccacccctcccagagagccgggacagccacccgccgctgagactgaagaaatcctttgagattttggtgagaaagcctatgtcctccaagcccaagcctccacccagaaaatactttaaaagtgacagtgaccctcagaagagtctggaagagagagagaactcctcatgctcttctgggcacaccccacccacctgtggccaggaagcgagagagctgctgccactgctgctaccacaggaagacacagcagggagaagccctagtgcctctgccggctgcccaggacctggtatcggcccacagaccaagtcctccacagagggcgagccagggtggagaagagccagcccagtgacccaaacatccccgataaaacacccactgcttaagaggcaggctcggatggactatagctttgataccacagccgaagacccttgggttaggatttctgactgcatcaaaaacttatttagccccatcatgagtgagaaccatggccacatgcctctacagcccaatgccagcctgaatgaagaagaagggacacagggccacccagatgggaccccaccaaagctggacaccgccaatggcactcccaaagtttacaagtcagcagacagcagcactgtgaagaaaggtcctcctgtggctcccaagccagcctggtttcgccaaagcttgaaaggtttgaggaatcgtgcttcagacccaagagggctccctgatcctgccttgtccacccagccagcacctgcttccagggagcacctaggatcacacatccgggcctcctcctcctcctcctccatcaggcagagaatcagctcctttgaaacctttggctcctctcaactgcctgacaaaggagcccagagactgagcctccagccctcctctggggaggcagcaaaacctcttgggaagcatgaggaaggacggttttctggactcttggggcgaggggctgcacccactcttgtgccccagcagcctgagcaagtactgtcctcggggtcccctgcagcctccgaggccagagacccaggtgtgtctgagtcccctcccccagggcggcagcccaatcagaaaactctcccccctggcccggacccgctcctaaggctgctgtcaacacaggctgaggaatctcaaggcccagtgctcaagatgcctagccagcgagcacggagcttccccctgaccaggtcccagtcctgtgagacgaagctacttgacgaaaagaccagcaaactctattctatcagcagccaagtgtcatcggctgtcatgaaatccttgctgtgccttccatcttctatctcctgtgcccagactccctgcatccccaaggaaggggcatctccaacatcatcatccaacgaagactcagctgcaaatggttctgctgaaacatctgccttggacacagggttctcgctcaacctttcagagctgagagaatatacagagggtctcacggaagccaaggaagacgatgatggggaccacagttcccttcagtctggtcagtccgttatctccctgctgagctcagaagaattaaaaaaactcatcgaggaggtgaaggttctggatgaagcaacattaaagcaattagacggcatccatgtcaccatcttacacaaggaggaaggtgctggtcttgggttcagcttggcaggaggagcagatctagaaaacaaggtgattacggttcacagagtgtttccaaatgggctggcctcccaggaagggactattcagaagggcaatgaggttctttccatcaacggcaagtctctcaaggggaccacgcaccatgcccgacctcaactcctccactgactctgcagcctcagcctctgcagccagtgatgtttctgtagaatctacagaggccacagtctgcacggtgacactggagaagatgtcggcagggctgggcttcagcctggaaggagggaagggctccctacacggagacaagcctctcaccattaacaggattttcaaaggagcagcctcagaacaaagtgagacagtccagcctggagatgaaatcttacagctgggtggcactgccatgcagggcctcacacggtttgaagcctggaacatcatcaaggcactgcctgatggacctgtcacgattgtcatcaggagaaaaagcctccagtccaaggaaaccacagctgctggagactcctaggcaggacatgctgaagccaaagccaataacacacagctaacacacagctcccataaccgctgattctcagggtctctgctgccgccccacccagatgggggaaagcacaggtgggcttcccagtggctgctgcccaggcccagaccttctaggacgccacccagcaaaaggttgttcctaaaataagggcagagtcacacgggggcagctgatacaaattgcagactgtgtaaaaagagagcttaatgataatattgtggtgccacaaataaaatggatttattagaatttc

SEQ ID NO: 67847 - DNA, 3996 bp, Artificial Sequence
  derived and/or modified sequence
acatttgtcctgagtcacctgtccagagcaggtggtgaatattgtgtcctactcacggcatctcaactatcggagcctgggatctgactcaaaggccggcctccgtctgagaactgagcgtccatttctcaatccttgccggctctgacccaggcctgggccacaggctgtccgggaataagtggtgctgcaatccctgctgggcagatggagagaggagcaagggagatggcagccccgggggactgtccagcaggaaaggctgcgggaacttcgagaccaacacggtccctgagcacagctcagctcgtgcagccatctgggggcctccaggcttcagtcatctccaacatcgtgctgatgaagggccaggctaagggtctgggcttcagcatcgttgggggaaaagacagcatttatggccccattgggatttacgtcaaaaccatttttgcagggggagcagcagcagccgatggaaggctacaggaaggtgatgaaattctggagctcaatggtgaatcaatggctggactaacacatcaggatgctttgcagaagttcaagcaagccaaaaaggggctcctcaccctcaccgtgagaacccgcctgacggcgcctccttccctgtgcagccacctgtctcccccactgtgccgctccctgagctccagcacttgtatcaccaaggacagcagctccttcgccttggaaagcccctcggctcccatcagcaccgccaagcccaattacagaatcatggtggaggtttctctgcagaaagaggccggcgtgggcctgggcatcggcctgtgcagcgttccctacttccaatgcatctctggcattttcgtccacacgctgtcaccaggatccgtggcgcacctggacggacgtctccggtgtggggacgagattgtggaaatcagtgattcccctgtgcactgcctgacgctcaatgaagtctacacgatcctgagtcactgtgatcccggtccagtccccatcattgttagccgacatccagacccacaggtctctgaacagcaactcaaagaagctgtggcccaggctgtggaaaacaccaagtttggaaaggagaggcatcagtggagtctggaaggtgtcaaaaggctggaaagcagttggcacgggcggcccaccttggagaaggaacgagagaagaactcagcacccccgcatcgcagggctcagaaggtcatgatccgctccagcagtgacagcagctacatgtctgggtccccagggggaagtcctgggagtggcagtgctgagaagccgtcctctgacgtggacatcagcacacacagccccagcttgcctctggcacgggagccagtggtgctttctatagcatcctccaggctgccccaggagagcccacccctcccagagagccgggacagccacccgccgctgagactgaagaaatcctttgagattttggtgagaaagcctatgtcctccaagcccaagcctccacccagaaaatactttaaaagtgacagtgaccctcagaagagtctggaagagagagagaactcctcatgctcttctgggcacaccccacccacctgtggccaggaagcgagagagctgctgccactgctgctaccacaggaagacacagcagggagaagccctagtgcctctgccggctgcccaggacctggtatcggcccacagaccaagtcctccacagagggcgagccagggtggagaagagccagcccagtgacccaaacatccccgataaaacacccactgcttaagaggcaggctcggatggactatagctttgataccacagccgaagacccttgggttaggatttctgactgcatcaaaaacttatttagccccatcatgagtgagaaccatggccacatgcctctacagcccaatgccagcctgaatgaagaagaagggacacagggccacccagatgggaccccaccaaagctggacaccgccaatggcactcccaaagtttacaagtcagcagacagcagcactgtgaagaaaggtcctcctgtggctcccaagccagcctggtttcgccaaagcttgaaaggtttgaggaatcgtgcttcagacccaagagggctccctgatcctgccttgtccacccagccagcacctgcttccagggagcacctaggatcacacatccgggcctcctcctcctcctcctccatcaggcagagaatcagctcctttgaaacctttggctcctctcaactgcctgacaaaggagcccagagactgagcctccagccctcctctggggaggcagcaaaacctcttgggaagcatgaggaaggacggttttctggactcttggggcgaggggctgcacccactcttgtgccccagcagcctgagcaagtactgtcctcggggtcccctgcagcctccgaggccagagacccaggtgtgtctgagtcccctcccccagggcggcagcccaatcagaaaactctcccccctggcccggacccgctcctaaggctgctgtcaacacaggctgaggaatctcaaggcccagtgctcaagatgcctagccagcgagcacggagcttccccctgaccaggtcccagtcctgtgagacgaagctacttgacgaaaagaccagcaaactctattctatcagcagccaagtgtcatcggctgtcatgaaatccttgctgtgccttccatcttctatctcctgtgcccagactccctgcatccccaaggaaggggcatctccaacatcatcatccaacgaagactcagctgcaaatggttctgctgaaacatctgccttggacacagggttctcgctcaacctttcagagctgagagaatatacagagggtctcacggaagccaaggaagacgatgatggggaccacagttcccttcagtctggtcagtccgttatctccctgctgagctcagaagaattaaaaaaactcatcgaggaggtgaaggttctggatgaagcaacattaaagcaattagacggcatccatgtcaccatcttacacaaggaggaaggtgctggtcttgggttcagcttggcaggaggagcagatctagaaaacaaggtgattacggttcacagagtgtttccaaatgggctggcctcccaggaagggactattcagaagggcaatgaggttctttccatcaacggcaagtctctcaaggggaccacgcaccatgatgccttggccatcctccgccaagctcgagagcccaggcaagctgtgattgtcacaaggaagctgactccagaggccatgcccgacctcaactcctccactgactctgcagcctcagcctctgcagccagtgatgtttctgtagaatctacagaggccacagtctgcacggtgacactggagaagatgtcggcagggctgggcttcagcctggaaggagggaagggctccctacacggagacaagcctctcaccattaacaggattttcaaaggagcagcctcagaacaaagtgagacagtccagcctggagatgaaatcttacagctgggtggcactgccatgcagggcctcacacggtttgaagcctggaacatcatcaaggcactgcctgatggacctgtcacgattgtcatcaggagaaaaagcctccagtccaaggaaaccacagctgctggagactcctaggcaggacatgctgaagccaaagccaataacacacagctaacacacagctcccataaccgctgattctcagggtctctgctgccgccccacccagatgggggaaagcacaggtgggcttcccagtggctgctgcccaggcccagaccttctaggacgccacccagcaaaaggttgttcctaaaataagggcagagtcacacgggggcagctgatacaaattgcagactgtgtaaaaagagagcttaatgataatattgtggtgccacaaataaaatggatttattagaatttcatatg

SEQ ID NO: 67848 - DNA, 6131 bp, Artificial Sequence
  derived and/or modified sequence
atgtggctgcctgtaaaagagctaacaattcatgaatgtcaacagatgtcaacttacagagctcccaaccaggaagcgagagagctgctgccactgctgctaccacaggaagacacagcagggagaagccctagtgcctctgccggctgcccaggacctggtatcggcccacagaccaagtcctccacagagggcgagccagggtggagaagagccagcccagtgacccaaacatccccgataaaacacccactgcttaagaggcaggctcggatggactatagctttgataccacagccgaagacccttgggttaggatttctgactgcatcaaaaacttatttagccccatcatgagtgagaaccatggccacatgcctctacagcccaatgccagcctgaatgaagaagaagggacacagggccacccagatgggaccccaccaaagctggacaccgccaatggcactcccaaagtttacaagtcagcagacagcagcactgtgaagaaaggtcctcctgtggctcccaagccagcctggtttcgccaaagcttgaaaggtttgaggaatcgtgcttcagacccaagagggctccctgatcctgccttgtccacccagccagcacctgcttccagggagcacctaggatcacacatccgggcctcctcctcctcctcctccatcaggcagagaatcagctcctttgaaacctttggctcctctcaactgcctgacaaaggagcccagagactgagcctccagccctcctctggggaggcagcaaaacctcttgggaagcatgaggaaggacggttttctggactcttggggcgaggggctgcacccactcttgtgccccagcagcctgagcaagtactgtcctcggggtcccctgcagcctccgaggccagagacccaggtgtgtctgagtcccctcccccagggcggcagcccaatcagaaaactctcccccctggcccggacccgctcctaaggctgctgtcaacacaggctgaggaatctcaaggcccagtgctcaagatgcctagccagcgagcacggagcttccccctgaccaggtcccagtcctgtgagacgaagctacttgacgaaaagaccagcaaactctattctatcagcagccaagtgtcatcggctgtcatgaaatccttgctgtgccttccatcttctatctcctgtgcccagactccctgcatccccaaggaaggggcatctccaacatcatcatccaacgaagactcagctgcaaatggttctgctgaaacatctgccttggacacagggttctcgctcaacctttcagagctgagagaatatacagagggtctcacggaagccaaggaagacgatgatggggaccacagttcccttcagtctggtcagtccgttatctccctgctgagctcagaagaattaaaaaaactcatcgaggaggtgaaggttctggatgaagcaacattaaagcaattagacggcatccatgtcaccatcttacacaaggaggaaggtgctggtcttgggttcagcttggcaggaggagcagatctagaaaacaaggtgattacggttcacagagtgtttccaaatgggctggcctcccaggaagggactattcagaagggcaatgaggttctttccatcaacggcaagtctctcaaggggaccacgcaccatgatgccttggccatcctccgccaagctcgagagcccaggcaagctgtgattgtcacaaggaagctgactccagaggccatgcccgacctcaactcctccactgactctgcagcctcagcctctgcagccagtgatgtttctgtagaatctacagaggccacagtctgcacggtgacactggagaagatgtcggcagggctgggcttcagcctggaaggagggaagggctccctacacggagacaagcctctcaccattaacaggattttcaaaggagcagcctcagaacaaagtgagacagtccagcctggagatgaaatcttacagctgggtggcactgccatgcagggcctcacacggtttgaagcctggaacatcatcaaggcactgcctgatggacctgtcacgattgtcatcaggagaaaaagcctccagtccaaggaaaccacagctgctggagactcctaggcaggacatgctgaagccaaagccaataacacacagctaacacacagctcccataaccgctgattctcagggtctctgctgccgccccacccagatgggggaaagcacaggtgggcttcccagtggctgctgcccaggcccagaccttctaggacgccacccagcaaaaggttgttcctaaaataagggcagagtcacacgggggcagctgatacaaattgcagactgtgtaaaaagagagcttaatgataatattgtggtgccacaaataaaatggatttattagaatttcatatgacattcatgcctggcttcgcaaaatgtttcaagtactgtaactgtgtcatgattcacccccaaacagtgacatttatttttctcatgaatctgcaatgtgggcagagattggaatgggcagctcatctctgtcccacttggcatcagctggcgtcatgcaaagtcatgcaaaggctgggaccacgtgagatcattcactcatacatctggccgttgatgttggctgggaactcacctggggctgctggcctgaatgcttataggtggcctctccttgtggcctgggcctcctcacaacatggtgtctggattcccaggatgagcatcccaggatcgcaagagccatgtagaagctgcatcttgtttatacctttgccttggaagttgcatggcatcacctccaccatactccatcagttagagctgacacaaacctgcctgggtttaaggggagaggaaatattgctggggtcatttatgaaaaatacagtttgtcacatgaaacatttgcaaaattgtttttggttggattggagaagtaatcctagggaagggtggtggagccagtaaacagaggagtacaggtgaagcaccaagctcaaagcgtggacaggtgtgccgacagaaggaaccagcgtgtatatgagggtatcaaataaaattgctactacttacctaccacatgccaagcactgtgctcagggctaaacgggcattgcctttagtgatcacagcagcttctacggtgtatggttctgtgccaatgtattgataagagggcacacactgtgtacagtaaatggcttatccagctggtgagtgatgcggcagattgagttttcttctgtgattcggtggagactatcagcccaagatgctttaagtgcacaacattacagggaatgcctgagtgcctggccaaagggatatttggtttggccatctctggatgcctgattgccaagctcaggaccaggcaatgtgactttgcatcagcaacaaccagcatcccttgaccaggcctgggccagagtattggtctcctctcagcccctgatcctgtgaagtaaggatgtgggggaagacctggcaaggacacagatgaaacacaaacaatagtaattctcaggccatcatcagtggagccatgttaatgtaatctgatggcttctccagggtccacaggaagtgaagaatctgtttcccagcagtggactcaaaacccatctgggctcctaaccttcctgtaaacccctttagtggcttcattagagcaggcgttcagctcactgttctattcatctcaaggaataatgggcttagagcagtttctgtcctgctggttaacttgtttggcctattccattctggattttgtcaagcagtagacaagcaattagacaagaacttggaggcaccatttgtatccactttttagacttaatagaaacattgaagatgaacataatctaccaacgaaagacgtgattcaattcaacactcccttcccatgacccaggctgggcaaggaggccacgtgatgtggagggcacattccttgcctgcacaaactcaccatctgtgcacgcagtggccttccctaaaatcagggaattgttttaagtcttatcaagcagccaagggatgaaagagaaggtgggttttcatcaagactggaaggtggggacagggatgagcatggagctggccgtgggcctggggtaccaagagactccttgagagaccaggcaaagcaagtgattgggacagaggttatctgtcccaggttatctgggcatagatgcaggtgagcccatggccctcccagtacctcctgtctctggcctgttttagaaggttctctcctccccaaggagacacaacaactcctagggccactgaagatataactattgcccaggtttctggtctctaggctggggaagtcctctgggtaggaatcagcaagaagatcctaaaacaaaagctcatccatttgcgttccatgatgctgggatttacacttgaggcttagctttgctctgccaacttcttcagagctgacacaggatgaaggcaatgccatcctcaaacactgcaggcatcacagctaacaattgtgaagtcgtcttaactcaccataaaaaggaatccactcccaggcagccctacttctttgctttgcccagcattttactgattcatacattatctcacttgtgccaacactcaagaagcaggctacactgacactggtattcctgcctccatattttctttaaaagacaaatcaaagcagatatattaagtgactgttcaagagcacacttggcccaagtggcagagcttggactggatgcatgttttccagctcctcatccagggctctgaccagtttaacctgatgcagtcacgtggaggagcagtgcaggcacagtatgtcccataggcccagtgagatgcattcttggttggctggccttccacttggctacacagggatgtacaaggcgatcccatcttgataagaccaccacctcagagtatggagctcagagagggcaggcatgaagtttccttggctggtgcacctagaattggctgaactcatgagaagttgatatagaacagtgcttgccacagagcggggactcggtaagcacttaatgaatgaatgaattctaagtcaatccaagagtctgatgatttcttgaaaagggtgttagctaaaggatcttaggcatgactgtagaatttgtagttgcaatagaacagagaaagaggaagctttctgtctccttaacactgagctgtcatgttttaaagcttgctcacatcttggcacatttaagagacagtcaccccaggactcaaaaatagggaagtaacagtaacgcaggggaaacgttttctgtttggaggagcaaaggctgagaacactgtgaaaacattttgcgcgcacaatagtaacctgggtaaatgcagcgtgaagggattttagtcacacgtggtctttcttacaaggaaggtggtgggggtgcagatgaggttgctagagaatgttagaggatccctctctggattggagatagggaaagaaagttgcacggctgctgaggccccttctaggtggcaaggctgtgctccctggttctgatgatgtgcctgggtggacatggcccctgtgagtttgtacagtcttgcagcaggatctagaggggggatttccagccagggctgctagacggaggcctactcttccatctttcctgatggcaggatggcctggccagggcctggaagacagagacctcctgcctccgcctcagtaagacgacaaggaaaggcaaatgcccaagggaaagaaaaggaaggctcttctccccagagttccccatgcagacatgagtgcgtgctcagttcagaatcacttctgagaactcatccctaatgctgcagatttgggctggaacagattcacactgtctggtttcaccgaggacatgaaactccaccttgcggggataaagagagaaaaacaaattcatcaaatggaagacacattgaaagtgtttttccttaatgcttatcctgtttttaaaccattatttccaagttgacaccttttttaaggaaaaataaatattttgcggcattaaagccatata

SEQ ID NO: 67849 - protein, 525 aa, Artificial Sequence
  derived and/or modified sequence
LGGRSSCEDPGCPRDEERAPRMGCMKSKFLQVGGNTFSKTETSASPHCPVYVPDPTSTIKPGPNSHNSNTPGIREGSEDIIVVALYDYEAIHHEDLSFQKGDQMVVLEESGEWWKARSLATRKEGYIPSNYVARVDSLETEEWFFKGISRKDAERQLLAPGNMLGSFMIRDSETTKGSYSLSVRDYDPRQGDTVKHYKIRTLDNGGFYISPRSTFSTLQELVDHYKKGNDGLCQKLSVPCMSSKPQKPWEKDAWEIPRESLKLEKKLGAGQFGEVWMATYNKHTKVAVKTMKPGSMSVEAFLAEANVMKTLQHDKLVKLHAVVTKEPIYIITEFMAKGSLLDFLKSDEGSKQPLPKLIDFSAQIAEGMAFIEQRNYIHRDLRAANILVSASLVCKIADFGLARVIEDNEYTAREGAKFPIKWTAPEAINFGSFTIKSDVWSFGILLMEIVTYGRIPYPGMSNPEVIRALERGYRMPRPENCPEELYNIMMRCWKNRPEERPTFEYIQSVLDDFYTATESQYQQQP

SEQ ID NO: 67850 - DNA, 1578 bp, Artificial Sequence
  derived and/or modified sequence
ctgggcggcagaagcagctgcgaggaccccggctgccccagagacgaggagagagcccccagaatgggctgcatgaagagcaagttcctgcaggtgggcggcaacaccttcagcaagaccgagaccagcgccagcccccactgccccgtgtacgtgcccgaccccaccagcaccatcaagcccggccccaacagccacaacagcaacacccccggcatcagagagggcagcgaggacatcatcgtggtggccctgtacgactacgaggccatccaccacgaggacctgagcttccagaagggcgaccagatggtggtgctggaggagagcggcgagtggtggaaggccagaagcctggccaccagaaaggagggctacatccccagcaactacgtggccagagtggacagcctggagaccgaggagtggttcttcaagggcatcagcagaaaggacgccgagagacagctgctggcccccggcaacatgctgggcagcttcatgatcagagacagcgagaccaccaagggcagctacagcctgagcgtgagagactacgaccccagacagggcgacaccgtgaagcactacaagatcagaaccctggacaacggcggcttctacatcagccccagaagcaccttcagcaccctgcaggagctggtggaccactacaagaagggcaacgacggcctgtgccagaagctgagcgtgccctgcatgagcagcaagccccagaagccctgggagaaggacgcctgggagatccccagagagagcctgaagctggagaagaagctgggcgccggccagttcggcgaggtgtggatggccacctacaacaagcacaccaaggtggccgtgaagaccatgaagcccggcagcatgagcgtggaggccttcctggccgaggccaacgtgatgaagaccctgcagcacgacaagctggtgaagctgcacgccgtggtgaccaaggagcccatctacatcatcaccgagttcatggccaagggcagcctgctggacttcctgaagagcgacgagggcagcaagcagcccctgcccaagctgatcgacttcagcgcccagatcgccgagggcatggccttcatcgagcagagaaactacatccacagagacctgagagccgccaacatcctggtgagcgccagcctggtgtgcaagatcgccgacttcggcctggccagagtgatcgaggacaacgagtacaccgccagagagggcgccaagttccccatcaagtggaccgcccccgaggccatcaacttcggcagcttcaccatcaagagcgacgtgtggagcttcggcatcctgctgatggagatcgtgacctacggcagaatcccctaccccggcatgagcaaccccgaggtgatcagagccctggagagaggctacagaatgcccagacccgagaactgccccgaggagctgtacaacatcatgatgagatgctggaagaacagacccgaggagagacccaccttcgagtacatccagagcgtgctggacgacttctacaccgccaccgagagccagtaccagcagcagccctag

SEQ ID NO: 67851 - DNA, 1578 bp, Artificial Sequence
  derived and/or modified sequence
ctcggcggacgatcttcctgcgaagatccaggatgccccagggacgaagaaagagctcctcgaatgggctgcatgaaatcaaagttcctacaggttggggggaatactttcagcaaaaccgaaacctccgcctccccacattgccccgtgtatgtacctgaccctacttcgaccataaaacctgggcctaacagtcacaactcaaacacacctggaataagggaaggaagcgaggatattattgtggtcgccttgtatgattatgaggccatccatcatgaagacctcagtttccaaaaaggggaccagatggtggttctcgaagaatccggagagtggtggaaggcccggtctctcgctactcgtaaggagggctacatcccttctaattacgtagcccgggtggatagcctggagacagaagagtggttcttcaagggcataagcagaaaggacgccgagagacagctcctcgcaccaggcaatatgctgggcagtttcatgattagagactccgagaccaccaaagggtcctactctctgtcagtaagagactatgacccacgccagggagatactgttaaacactacaaaatccgcaccctggataatggcggcttttatattagccccaggtccacgttctccacgctacaggaactggtagaccattacaagaagggcaacgacggactgtgtcagaagctgagcgtcccctgcatgagcagcaaacctcagaagccctgggagaaggacgcctgggagattcctagagagtctcttaaattggaaaaaaaactgggtgctggacagttcggggaagtttggatggccacttataacaaacacactaaagtggctgtgaagaccatgaagcctgggagtatgagtgttgaagcctttttggccgaggccaacgtcatgaagacactacagcacgataagctggtgaaactccatgcggtggtgacgaaagaacccatctacatcattacagagttcatggccaaggggagtctcctggactttctgaaaagcgacgagggcagtaagcagcctctgccaaaattgattgatttcagcgctcagattgcagagggaatggctttcatcgagcagaggaattacattcatcgcgacctgcgcgccgctaatatcttagttagcgccagcctggtgtgcaagatcgccgattttggcttggccagggtgatcgaggacaacgaatacaccgccagagagggcgccaagttccccattaagtggaccgcacccgaggctataaacttcgggtcctttactataaagtcagacgtctggagtttcggcatactgctgatggaaatagtcacatatggaagaattccttatcccggcatgtctaatccagaagttatccgggccttggaacgtggctacagaatgcctagacccgagaattgccctgaggagctatacaatatcatgatgaggtgctggaaaaaccgcccagaggagaggccgactttcgagtacatccagagcgtgctggacgacttctataccgccacggaaagtcagtaccagcagcagccttag

SEQ ID NO: 67852 - DNA, 1806 bp, Artificial Sequence
  derived and/or modified sequence
ctcgctcagggcgcggctaaggcgcccagatggcctgcgggcgccaccacgtccctggtcccagctcgggagcacatcagaggcttagaggcgagtgggaagggactcagacagtgcaggacgagaaacgcccgcggcaccaaagcccctcagagcgtcgcccccgcctctagttctagaaagtcagtttcccggcactggcaccccggaacctcaggggctgccgagctgggggggcgctcaagctgcgaggatccgggctgcccgcgagacgaggagcgggcgcccaggatggggtgcatgaagtccaagttcctccaggtcggaggcaatacattctcaaaaactgaaaccagcgccagcccacactgtcctgtgtacgtgccggatcccacatccaccatcaagccggggcctaatagccacaacagcaacacaccaggaatcagggagggctctgaggacatcatcgtggttgccctgtatgattacgaggccattcaccacgaagacctcagcttccagaagggggaccagatggtggtcctagaggaatccggggagtggtggaaggctcgatccctggccacccggaaggagggctacatcccaagcaactatgtcgcccgcgttgactctctggagacagaggagtggtttttcaagggcatcagccggaaggacgcagagcgccaactgctggctcccggcaacatgctgggctccttcatgatccgggatagcgagaccactaaaggaagctactctttgtccgtgcgagactacgaccctcggcagggagataccgtgaaacattacaagatccggaccctggacaacgggggcttctacatatccccccgaagcaccttcagcactctgcaggagctggtggaccactacaagaaggggaacgacgggctctgccagaaactgtcggtgccctgcatgtcttccaagccccagaagccttgggagaaagatgcctgggagatccctcgggaatccctcaagctggagaagaaacttggagctgggcagtttggggaagtctggatggccacctacaacaagcacaccaaggtggcagtgaagacgatgaagccagggagcatgtcggtggaggccttcctggcagaggccaacgtgatgaaaactctgcagcatgacaagctggtcaaacttcatgcggtggtcaccaaggagcccatctacatcatcacggagttcatggccaaaggaagcttgctggactttctgaaaagtgatgagggcagcaagcagccattgccaaaactcattgacttctcagcccagattgcagaaggcatggccttcatcgagcagaggaactacatccaccgagacctccgagctgccaacatcttggtctctgcatccctggtgtgtaagattgctgactttggcctggcccgggtcattgaggacaacgagtacacggctcgggaaggggccaagttccccatcaagtggacagctcctgaagccatcaactttggctccttcaccatcaagtcagacgtctggtcctttggtatcctgctgatggagatcgtcacctacggccggatcccttacccagggatgtcaaaccctgaagtgatccgagctctggagcgtggataccggatgcctcgcccagagaactgcccagaggagctctacaacatcatgatgcgctgctggaaaaaccgtccggaggagcggccgaccttcgaatacatccagagtgtgctggatgacttctacacggccacagagagccagtaccaacagcagccatga

SEQ ID NO: 67853 - DNA, 1742 bp, Artificial Sequence
  derived and/or modified sequence
ctcgggagcacatcagaggcttagaggcgagtgggaagggactcagacagtgcaggacgagaaacgcccgcggcaccaaagcccctcagagcgtcgcccccgcctctagttctagaaagtcagtttcccggcactggcaccccggaacctcaggggctgccgagctgggggggcgctcaagctgcgaggatccgggctgcccgcgagacgaggagcgggcgcccaggatggggtgcatgaagtccaagttcctccaggtcggaggcaatacattctcaaaaactgaaaccagcgccagcccacactgtcctgtgtacgtgccggatcccacatccaccatcaagccggggcctaatagccacaacagcaacacaccaggaatcagggagggctctgaggacatcatcgtggttgccctgtatgattacgaggccattcaccacgaagacctcagcttccagaagggggaccagatggtggtcctagaggaatccggggagtggtggaaggctcgatccctggccacccggaaggagggctacatcccaagcaactatgtcgcccgcgttgactctctggagacagaggagtggtttttcaagggcatcagccggaaggacgcagagcgccaactgctggctcccggcaacatgctgggctccttcatgatccgggatagcgagaccactaaaggaagctactctttgtccgtgcgagactacgaccctcggcagggagataccgtgaaacattacaagatccggaccctggacaacgggggcttctacatatccccccgaagcaccttcagcactctgcaggagctggtggaccactacaagaaggggaacgacgggctctgccagaaactgtcggtgccctgcatgtcttccaagccccagaagccttgggagaaagatgcctgggagatccctcgggaatccctcaagctggagaagaaacttggagctgggcagtttggggaagtctggatggccacctacaacaagcacaccaaggtggcagtgaagacgatgaagccagggagcatgtcggtggaggccttcctggcagaggccaacgtgatgaaaactctgcagcatgacaagctggtcaaacttcatgcggtggtcaccaaggagcccatctacatcatcacggagttcatggccaaaggaagcttgctggactttctgaaaagtgatgagggcagcaagcagccattgccaaaactcattgacttctcagcccagattgcagaaggcatggccttcatcgagcagaggaactacatccaccgagacctccgagctgccaacatcttggtctctgcatccctggtgtgtaagattgctgactttggcctggcccgggtcattgaggacaacgagtacacggctcgggaaggggccaagttccccatcaagtggacagctcctgaagccatcaactttggctccttcaccatcaagtcagacgtctggtcctttggtatcctgctgatggagatcgtcacctacggccggatcccttacccagggatgtcaaaccctgaagtgatccgagctctggagcgtggataccggatgcctcgcccagagaactgcccagaggagctctacaacatcatgatgcgctgctggaaaaaccgtccggaggagcggccgaccttcgaatacatccagagtgtgctggatgacttctacacggccacagagagccagtaccaacagcagccatga

SEQ ID NO: 67854 - DNA, 1578 bp, Artificial Sequence
  derived and/or modified sequence
ctgggcggccgcagcagctgtgaggaccccggctgccccagagatgaggagcgggcccccaggatgggctgcatgaagagcaagttcctgcaggtgggcggcaacaccttcagcaagacagagaccagcgccagcccccactgccctgtgtatgtgcctgaccccaccagcaccatcaagccaggccccaacagccacaacagcaacaccccaggcatccgggagggcagcgaggacatcatcgtggtggccctgtatgactatgaggccatccaccacgaggacctgtccttccagaagggggaccagatggtggtgctggaggagagcggggagtggtggaaggcccggagcctggccaccaggaaggagggctacatccccagcaactacgtggcccgggtggacagcctggagacagaggagtggttcttcaagggcatcagcaggaaggatgctgagcggcagctgctggcccctggcaacatgctgggcagcttcatgatccgggacagcgagaccaccaagggcagctacagcctgtctgtgcgggactatgacccccggcagggcgacacagtgaagcactacaagatccgcaccctggacaatggaggcttctacatcagccccaggagcaccttcagcaccctgcaggagctggtggaccactacaagaagggaaatgatggcctgtgccagaagctgtctgtgccctgcatgagcagcaagccccagaagccctgggagaaggatgcctgggagatcccccgggagagcctgaagctggagaagaagctgggcgccggccagtttggagaggtgtggatggccacctacaacaagcacaccaaggtggccgtgaagaccatgaagccaggctccatgtctgtggaggccttcctggccgaggccaacgtgatgaagaccctgcagcacgacaagctggtgaagctgcatgctgtggtgaccaaggagcccatctacatcatcacagagttcatggccaagggcagcctgctggacttcctgaagagtgatgagggcagcaagcagcccctgcccaagctgattgacttcagcgcccagattgctgagggcatggccttcatcgagcagaggaactacatccaccgggacctgcgggccgccaacatcctggtgtctgccagcctggtgtgcaagattgctgactttggcctggcccgggtgattgaggacaatgagtacacagcccgggagggcgccaagttccccatcaagtggacagcccctgaggccatcaactttggcagcttcaccatcaagagtgatgtgtggagctttggcatcctgctgatggagatcgtgacctacggccgcatcccctacccaggcatgagcaaccctgaggtgatccgggccctggagcggggctacaggatgcccaggcctgagaactgcccagaggagctgtacaacatcatgatgcgctgctggaagaacagacctgaggagcggcccacctttgagtacatccagagcgtgctggatgacttctacacagccacagagagccagtaccagcagcagccctag

SEQ ID NO: 67855 - DNA, 1578 bp, Artificial Sequence
  derived and/or modified sequence
ctgggcggccggagcagctgcgaggaccccggctgcccccgggacgaggagcgtgcccctcgtatgggatgtatgaaatctaagtttcttcaggtcggggggaatactttcagtaaaacagagacaagtgccagccctcactgtcctgtgtatgtgcctgacccaacaagtaccatcaagccgggaccgaatagtcataattccaatacccccggcatccgcgagggctccgaagacatcatagtcgtggccctgtacgactatgaggccattcaccacgaagatctcagtttccagaagggcgaccagatggtagttctggaggagagcggcgagtggtggaaagcaaggtccctggcaacacggaaggagggctatattcccagtaattacgtggcccgggttgattccctggagacagaagagtggttctttaagggaatctctagaaaggatgccgaaaggcagcttctagcgcccggaaacatgcttggttctttcatgatcagagattctgaaaccaccaaggggtcttactctttgtccgtccgagactacgatcccaggcaaggagacacagtgaaacactacaaaatccgtactctagacaatggcggattttacatttcccccagatctactttctcaactctgcaggagctggtggatcattacaagaaaggcaacgacggcctgtgtcagaaactctccgttccttgcatgtccagcaaacctcaaaagccatgggaaaaggatgcctgggagattccgcgtgagtccctgaagcttgagaagaaactgggcgccgggcagtttggggaagtctggatggcaacatacaacaaacatactaaagtcgccgtgaaaaccatgaaacctggctctatgtctgtcgaggctttcctggcagaggccaatgtaatgaagaccctccagcatgataagttagttaaattgcacgctgtagttaccaaggagccgatctatattatcaccgaattcatggcaaaagggagtcttttggacttcctgaagtccgatgagggttcaaaacaaccattacccaagttgattgacttcagtgctcagattgcggaaggtatggcctttatcgaacagagaaactatatccaccgggacctgcgggctgcaaatattctggtgtccgcctcgctagtctgcaaaatagcagactttggcctggcccgcgtaattgaagacaatgaatacacggccagggaaggcgctaagttccccatcaaatggacagcccccgaagccattaattttggttcattcaccattaaatcagatgtctggagcttcgggattcttctgatggaaatcgttacatacggcagaataccgtaccccggaatgtccaacccggaggtgatccgcgcattagagcggggttaccgtatgcctcgccccgagaattgtccagaggaactttacaatatcatgatgcgctgctggaagaaccgcccagaagaaaggcccacattcgaatacattcagtctgtgctggatgacttttacaccgccactgaatcacagtatcagcagcagccgtag

SEQ ID NO: 67856 - DNA, 1578 bp, Artificial Sequence
  derived and/or modified sequence
cttgggggacggtctagttgcgaagaccccggatgtcctcgggatgaagagcgggctcccagaatggggtgcatgaagtcgaagtttctacaggtgggcggaaacaccttctccaaaactgagacctcagccagtccgcactgccctgtgtacgtgccagatcccacctcaacaattaagcccggtcctaactcacacaactccaacacacctggcatccgcgaggggtcagaggatattatcgtcgtagccttgtacgactatgaggctattcatcacgaggacctgagcttccagaagggcgatcagatggtggtcctggaagagagcggagagtggtggaaagcaaggagtctggccactaggaaagaagggtacatcccatcgaactacgtcgccagggttgattccctggaaaccgaagagtggttctttaaaggaattagcaggaaggatgctgagaggcaactcctcgcccctggaaatatgttaggctcattcatgatacgggactccgaaacaacaaagggctcatactcactatcagttcgggattacgacccgcgtcagggcgacactgtcaagcattataaaattaggacgctggacaatggaggcttttatatctcccctcgaagcactttctctacactgcaggagttagtcgaccattataagaaaggcaacgatggtttgtgtcaaaaattgtccgttccatgtatgagtagcaagcctcagaaaccatgggaaaaggatgcctgggagattccacgggaatcactcaaactggagaagaaactcggtgcaggccagtttggagaggtttggatggccacttacaacaagcatactaaagtggccgttaaaaccatgaagcctgggtctatgtctgtcgaagccttccttgctgaagcgaacgtcatgaaaaccctccaacacgataaattggtcaaattgcacgctgtggttaccaaggaacccatttatatcatcactgaattcatggccaagggcagcctgttggactttttaaagagcgatgaggggtccaaacagcctctgcccaagttgatcgacttttcagcacagatcgcggagggcatggcctttatagagcagaggaactacatccatcgtgatctccgagctgcaaacatcttagtgtcggcaagcctcgtgtgcaaaattgccgatttcggcctggcacgagtgatcgaagacaacgagtacaccgccagagagggtgcgaagtttcctattaaatggacggcccctgaggccatcaacttcggctcttttaccataaaaagtgacgtgtggtccttcggtattctcctcatggaaatagtcacatatgggaggataccctaccctgggatgtctaaccctgaggtgatccgcgcactggagcgagggtatcggatgccgaggccagagaactgtccggaagagctttacaacatcatgatgaggtgttggaaaaatcggcctgaagaacgccctacttttgagtatattcaatccgtactggatgacttttacacggcaacggaatcgcaataccaacagcagccatag

SEQ ID NO: 67857 - protein, 504 aa, Artificial Sequence
  derived and/or modified sequence
MGCMKSKFLQVGGNTFSKTETSASPHCPVYVPDPTSTIKPGPNSHNSNTPGIREGSEDIIVVALYDYEAIHHEDLSFQKGDQMVVLEESGEWWKARSLATRKEGYIPSNYVARVDSLETEEWFFKGISRKDAERQLLAPGNMLGSFMIRDSETTKGSYSLSVRDYDPRQGDTVKHYKIRTLDNGGFYISPRSTFSTLQELVDHYKKGNDGLCQKLSVPCMSSKPQKPWEKDAWEIPRESLKLEKKLGAGQFGEVWMATYNKHTKVAVKTMKPGSMSVEAFLAEANVMKTLQHDKLVKLHAVVTKEPIYIITEFMAKGSLLDFLKSDEGSKQPLPKLIDFSAQIAEGMAFIEQRNYIHRDLRAANILVSASLVCKIADFGLARVIEDNEYTAREGAKFPIKWTAPEAINFGSFTIKSDVWSFGILLMEIVTYGRIPYPGMSNPEVIRALERGYRMPRPENCPEELYNIMMRCWKNRPEERPTFEYIQSVLDDFYTATESQYQQQP

SEQ ID NO: 67858 - DNA, 1515 bp, Artificial Sequence
  derived and/or modified sequence
atgggctgcatgaagagcaagttcctgcaggtgggcggcaacaccttcagcaagaccgagaccagcgccagcccccactgccccgtgtacgtgcccgaccccaccagcaccatcaagcccggccccaacagccacaacagcaacacccccggcatcagagagggcagcgaggacatcatcgtggtggccctgtacgactacgaggccatccaccacgaggacctgagcttccagaagggcgaccagatggtggtgctggaggagagcggcgagtggtggaaggccagaagcctggccaccagaaaggagggctacatccccagcaactacgtggccagagtggacagcctggagaccgaggagtggttcttcaagggcatcagcagaaaggacgccgagagacagctgctggcccccggcaacatgctgggcagcttcatgatcagagacagcgagaccaccaagggcagctacagcctgagcgtgagagactacgaccccagacagggcgacaccgtgaagcactacaagatcagaaccctggacaacggcggcttctacatcagccccagaagcaccttcagcaccctgcaggagctggtggaccactacaagaagggcaacgacggcctgtgccagaagctgagcgtgccctgcatgagcagcaagccccagaagccctgggagaaggacgcctgggagatccccagagagagcctgaagctggagaagaagctgggcgccggccagttcggcgaggtgtggatggccacctacaacaagcacaccaaggtggccgtgaagaccatgaagcccggcagcatgagcgtggaggccttcctggccgaggccaacgtgatgaagaccctgcagcacgacaagctggtgaagctgcacgccgtggtgaccaaggagcccatctacatcatcaccgagttcatggccaagggcagcctgctggacttcctgaagagcgacgagggcagcaagcagcccctgcccaagctgatcgacttcagcgcccagatcgccgagggcatggccttcatcgagcagagaaactacatccacagagacctgagagccgccaacatcctggtgagcgccagcctggtgtgcaagatcgccgacttcggcctggccagagtgatcgaggacaacgagtacaccgccagagagggcgccaagttccccatcaagtggaccgcccccgaggccatcaacttcggcagcttcaccatcaagagcgacgtgtggagcttcggcatcctgctgatggagatcgtgacctacggcagaatcccctaccccggcatgagcaaccccgaggtgatcagagccctggagagaggctacagaatgcccagacccgagaactgccccgaggagctgtacaacatcatgatgagatgctggaagaacagacccgaggagagacccaccttcgagtacatccagagcgtgctggacgacttctacaccgccaccgagagccagtaccagcagcagccctag

SEQ ID NO: 67859 - DNA, 1515 bp, Artificial Sequence
  derived and/or modified sequence
atggggtgcatgaagagcaaattcctgcaggtgggcggcaacaccttttctaagactgaaaccagcgcttctccccactgccctgtatacgttcctgatcccacaagcacaatcaagccaggccccaatagccacaatagtaacacccccgggatccgggagggcagcgaagacataatcgtcgttgctttatacgactacgaggccatccaccatgaggatttgagctttcaaaaaggcgaccagatggttgtcctagaggagagcggggagtggtggaaagctcggagccttgccacacggaaggaagggtacataccttctaactatgtggcacgggtagactctctggagacggaagagtggtttttcaaaggcatcagccggaaggacgccgaacgccagctcttggccccaggcaatatgctgggctctttcatgataagagattccgaaacgactaagggctcttattctctttcagtgagagattatgacccaagacagggtgataccgtgaagcattataaaatcagaaccctggataatggtgggttttacatttcccctcgcagcaccttctctaccctccaggagctggtcgaccactacaaaaaaggtaacgacgggctctgccaaaagctgagtgttccatgtatgtcctccaagcctcagaagccgtgggagaaagatgcatgggagataccccgcgaatcgctgaaactcgaaaaaaagctgggcgcaggccagttcggggaagtgtggatggctacctataacaagcataccaaggtcgctgtcaaaacaatgaaaccagggtcgatgtctgtggaagcatttcttgcggaggccaacgtcatgaaaacactgcaacacgacaaacttgtcaaactgcatgccgtggtgaccaaagagccaatctatatcattactgagtttatggccaaaggatcccttctggactttctaaaaagcgacgaaggaagcaagcagcccttgcccaagctcattgattttagtgcccagatcgcggaaggtatggcctttatagaacagagaaattatatacatcgcgatctgcgagctgcgaacatcctagtttctgcctccctggtctgtaaaattgcggactttggcctggcacgtgtcatcgaggataacgagtacactgcacgagagggagccaagttccccatcaagtggacggctccagaggccattaactttggatcatttaccattaaaagcgacgtatggtcctttggcatactcttaatggagattgtaacctacggccgcattccataccccggtatgtccaaccccgaggtcatcagggctctggagaggggctacaggatgcctcgtccagaaaattgccctgaggagctgtacaatatcatgatgcgctgttggaaaaacaggcctgaggagaggccgaccttcgagtacatccaaagcgtcctcgatgacttctacacggctaccgaaagccaatatcagcagcagccatag

SEQ ID NO: 67860 - DNA, 1515 bp, Artificial Sequence
  derived and/or modified sequence
atgggctgcatgaagagcaagttcctgcaggtgggcggcaacaccttcagcaagacagagaccagcgccagcccccactgccctgtgtatgtgcctgaccccaccagcaccatcaagccaggccccaacagccacaacagcaacaccccaggcatccgggagggcagcgaggacatcatcgtggtggccctgtatgactatgaggccatccaccacgaggacctgtccttccagaagggggaccagatggtggtgctggaggagagcggggagtggtggaaggcccggagcctggccaccaggaaggagggctacatccccagcaactacgtggcccgggtggacagcctggagacagaggagtggttcttcaagggcatcagcaggaaggatgctgagcggcagctgctggcccctggcaacatgctgggcagcttcatgatccgggacagcgagaccaccaagggcagctacagcctgtctgtgcgggactatgacccccggcagggcgacacagtgaagcactacaagatccgcaccctggacaatggaggcttctacatcagccccaggagcaccttcagcaccctgcaggagctggtggaccactacaagaagggaaatgatggcctgtgccagaagctgtctgtgccctgcatgagcagcaagccccagaagccctgggagaaggatgcctgggagatcccccgggagagcctgaagctggagaagaagctgggcgccggccagtttggagaggtgtggatggccacctacaacaagcacaccaaggtggccgtgaagaccatgaagccaggctccatgtctgtggaggccttcctggccgaggccaacgtgatgaagaccctgcagcacgacaagctggtgaagctgcatgctgtggtgaccaaggagcccatctacatcatcacagagttcatggccaagggcagcctgctggacttcctgaagagtgatgagggcagcaagcagcccctgcccaagctgattgacttcagcgcccagattgctgagggcatggccttcatcgagcagaggaactacatccaccgggacctgcgggccgccaacatcctggtgtctgccagcctggtgtgcaagattgctgactttggcctggcccgggtgattgaagataatgagtacacagcccgggagggcgccaagttccccatcaagtggacagcccctgaggccatcaactttggcagcttcaccatcaagagtgatgtgtggagctttggcatcctgctgatggagatcgtgacctacggccgcatcccctacccaggcatgagcaaccctgaggtgatccgggccctggagcggggctacaggatgcccaggcctgagaactgcccagaggagctgtacaacatcatgatgcgctgctggaagaacagacctgaggagcggcccacctttgagtacatccagagcgtgctggatgacttctacacagccacagagagccagtaccagcagcagccctag

SEQ ID NO: 67861 - DNA, 1515 bp, Artificial Sequence
  derived and/or modified sequence
atgggctgcatgaagagcaagttcctgcaggtgggcggcaacaccttttccaagactgagacttccgcaagcccgcactgtcctgtttacgtgccagatcccacaagcactattaagcccggaccaaatagtcacaactcaaatactccagggatcagagaaggctccgaagatatcatcgtggtggccctctacgactatgaagcgatccaccatgaagatctgagttttcagaagggcgatcagatggttgtgctggaggagtctggagagtggtggaaggcaaggtccctggccactaggaaagagggatatataccaagtaattatgtcgcccgtgttgactctctcgaaacagaggagtggttcttcaaaggcatcagcagaaaggacgcagagagacaattactggctccagggaatatgctcggtagcttcatgatccgggactcagaaacgactaaggggagttactctttgagcgtgagggactatgatccgcggcagggcgacaccgtcaagcattacaagatccgcaccctcgacaacggggggttctatattagcccaaggagcactttctctactttgcaggagttagtcgatcattacaagaagggcaatgacggtctctgtcagaagctgtccgtgccttgcatgtctagtaaaccgcagaaaccttgggagaaagacgcatgggagatccccagggagtccttgaaactcgagaagaagctgggagctggccagttcggtgaggtgtggatggccacatataacaagcatactaaagttgctgtgaaaacaatgaagcctggatctatgtcggttgaagcattcctggccgaggccaatgtgatgaaaaccctgcagcacgacaagcttgtgaagttgcacgcagtagtcactaaagaaccaatttacattataacagagtttatggcgaaagggtctcttttagactttctgaagagcgatgaaggaagtaaacagcctctcccaaaacttatcgacttttcggcacaaattgctgaaggaatggcgttcattgaacagcggaattacatccaccgcgatctgcgtgctgctaatattctcgtttccgccagtcttgtgtgcaaaatagctgactttgggctggcacgagtaatcgaagacaacgagtatacagcaagagagggcgctaaatttcccatcaaatggacggctcccgaggccatcaacttcgggagctttacaatcaagagcgatgtgtggagcttcggaatcctgcttatggagattgtgacatacggaagaatcccgtatcctggtatgagcaatcccgaagtaatccgtgctctggagagaggatacaggatgccccgaccggagaactgtccagaagagctttacaacataatgatgcggtgctggaaaaataggcctgaggaacgccctaccttcgagtacatccaatcagtgctcgatgatttctacaccgctacggaatcccaatatcagcagcagccctag

SEQ ID NO: 67862 - DNA, 1515 bp, Artificial Sequence
  derived and/or modified sequence
atgggctgcatgaaaagcaagtttctccaggtgggcggtaacaccttctctaaaaccgagaccagtgcctctcctcattgcccagtatatgtgcctgacccgacctctactatcaaaccgggtcctaatagccacaactccaacacccccggaattcgggaagggtccgaagatattattgtggtggctttatacgactacgaggccattcatcacgaggacctgtccttccagaagggggatcaaatggtcgttctcgaggagagtggggaatggtggaaggcaagaagcctggcaaccaggaaggagggttacataccatctaattacgtggctcgggtggattctctggaaaccgaggagtggttctttaaggggatatctcgaaaggatgcggagcgtcagctgctggcccctggtaacatgctgggatcgttcatgatccgcgacagcgaaacgaccaaggggagctactcattgtccgtgcgggactacgatccacggcagggagatacagtgaagcattataagatccgaacccttgacaacggcggattctacatctcacccagatcaacattttccacgcttcaggagctggtggatcattacaaaaaaggcaatgatggattgtgccagaagctgtccgtgccctgtatgtcctctaagcctcaaaagccgtgggagaaggatgcatgggagattccaagggagagcctaaagcttgagaagaaactgggcgcaggacagttcggagaggtgtggatggctacctacaataaacacaccaaagtggcggtcaaaaccatgaaaccaggctccatgagtgtggaagccttcctagctgaggctaacgtgatgaagaccctgcagcatgataagctcgtgaagctccacgctgtcgtgaccaaggaaccaatctatatcattaccgagttcatggccaaaggctctctccttgacttcctcaagtccgacgaaggctccaagcaaccgctgccaaaactgatcgattttagcgcccaaattgccgagggaatggctttcatcgaacagagaaattatatccatcgagatctgcgcgctgctaacatactggtttccgcaagtcttgtgtgcaagatcgctgactttgggctggccagagtcatcgaagacaacgagtacacggctagagagggggcaaagttccccattaaatggaccgcacccgaagctatcaacttcggatcattcactatcaagagcgatgtttggtccttcggaatcctgttgatggaaatagttacctatggccgtatcccctatccgggaatgtccaaccccgaggtcattcgggcactggaacgcggttaccggatgccaaggccagagaattgcccggaggaactctacaacatcatgatgcgatgctggaaaaacaggcccgaggaacgccctacctttgagtacatccagtcagtgctggacgatttctataccgcgacggaatcgcagtaccagcaacagccatag

SEQ ID NO: 67863 - protein, 505 aa, Artificial Sequence
  derived and/or modified sequence
MGCMKSKFLQVGGNTFSKTETSASPHCPVYVPDPTSTIKPGPNSHNSNTPGIREAGSEDIIVVALYDYEAIHHEDLSFQKGDQMVVLEESGEWWKARSLATRKEGYIPSNYVARVDSLETEEWFFKGISRKDAERQLLAPGNMLGSFMIRDSETTKGSYSLSVRDYDPRQGDTVKHYKIRTLDNGGFYISPRSTFSTLQELVDHYKKGNDGLCQKLSVPCMSSKPQKPWEKDAWEIPRESLKLEKKLGAGQFGEVWMATYNKHTKVAVKTMKPGSMSVEAFLAEANVMKTLQHDKLVKLHAVVTKEPIYIITEFMAKGSLLDFLKSDEGSKQPLPKLIDFSAQIAEGMAFIEQRNYIHRDLRAANILVSASLVCKIADFGLARVIEDNEYTAREGAKFPIKWTAPEAINFGSFTIKSDVWSFGILLMEIVTYGRIPYPGMSNPEVIRALERGYRMPRPENCPEELYNIMMRCWKNRPEERPTFEYIQSVLDDFYTATESQYQQQP

SEQ ID NO: 67864 - protein, 506 aa, Artificial Sequence
  derived and/or modified sequence
MMGCMKSKFLQVGGNTFSKTETSASPHCPVYVPDPTSTIKPGPNSHNSNTPGIREAGSEDIIVVALYDYEAIHHEDLSFQKGDQMVVLEESGEWWKARSLATRKEGYIPSNYVARVDSLETEEWFFKGISRKDAERQLLAPGNMLGSFMIRDSETTKGSYSLSVRDYDPRQGDTVKHYKIRTLDNGGFYISPRSTFSTLQELVDHYKKGNDGLCQKLSVPCMSSKPQKPWEKDAWEIPRESLKLEKKLGAGQFGEVWMATYNKHTKVAVKTMKPGSMSVEAFLAEANVMKTLQHDKLVKLHAVVTKEPIYIITEFMAKGSLLDFLKSDEGSKQPLPKLIDFSAQIAEGMAFIEQRNYIHRDLRAANILVSASLVCKIADFGLARVIEDNEYTAREGAKFPIKWTAPEAINFGSFTIKSDVWSFGILLMEIVTYGRIPYPGMSNPEVIRALERGYRMPRPENCPEELYNIMMRCWKNRPEERPTFEYIQSVLDDFYTATESQYQQQP

SEQ ID NO: 67865 - DNA, 1521 bp, Artificial Sequence
  derived and/or modified sequence
atgatgggctgcatgaagagcaagttcctgcaggtgggcggcaacaccttcagcaagaccgagaccagcgccagcccccactgccccgtgtacgtgcccgaccccaccagcaccatcaagcccggccccaacagccacaacagcaacacccccggcatcagagaggccggcagcgaggacatcatcgtggtggccctgtacgactacgaggccatccaccacgaggacctgagcttccagaagggcgaccagatggtggtgctggaggagagcggcgagtggtggaaggccagaagcctggccaccagaaaggagggctacatccccagcaactacgtggccagagtggacagcctggagaccgaggagtggttcttcaagggcatcagcagaaaggacgccgagagacagctgctggcccccggcaacatgctgggcagcttcatgatcagagacagcgagaccaccaagggcagctacagcctgagcgtgagagactacgaccccagacagggcgacaccgtgaagcactacaagatcagaaccctggacaacggcggcttctacatcagccccagaagcaccttcagcaccctgcaggagctggtggaccactacaagaagggcaacgacggcctgtgccagaagctgagcgtgccctgcatgagcagcaagccccagaagccctgggagaaggacgcctgggagatccccagagagagcctgaagctggagaagaagctgggcgccggccagttcggcgaggtgtggatggccacctacaacaagcacaccaaggtggccgtgaagaccatgaagcccggcagcatgagcgtggaggccttcctggccgaggccaacgtgatgaagaccctgcagcacgacaagctggtgaagctgcacgccgtggtgaccaaggagcccatctacatcatcaccgagttcatggccaagggcagcctgctggacttcctgaagagcgacgagggcagcaagcagcccctgcccaagctgatcgacttcagcgcccagatcgccgagggcatggccttcatcgagcagagaaactacatccacagagacctgagagccgccaacatcctggtgagcgccagcctggtgtgcaagatcgccgacttcggcctggccagagtgatcgaggacaacgagtacaccgccagagagggcgccaagttccccatcaagtggaccgcccccgaggccatcaacttcggcagcttcaccatcaagagcgacgtgtggagcttcggcatcctgctgatggagatcgtgacctacggcagaatcccctaccccggcatgagcaaccccgaggtgatcagagccctggagagaggctacagaatgcccagacccgagaactgccccgaggagctgtacaacatcatgatgagatgctggaagaacagacccgaggagagacccaccttcgagtacatccagagcgtgctggacgacttctacaccgccaccgagagccagtaccagcagcagccctag

SEQ ID NO: 67866 - DNA, 1521 bp, Artificial Sequence
  derived and/or modified sequence
atgatgggatgtatgaagtctaagtttctccaggtcggggggaatacgtttagcaaaacagagacctctgcatcgccacactgtcccgtgtatgtccccgatcccacttctactattaagcctggccctaattcgcacaatagtaatacacctgggataagggaggccggaagcgaagacattattgttgtcgcattatacgactacgaggcaattcatcacgaagatcttagctttcagaaaggcgatcagatggtggtcctcgaggaatcaggagaatggtggaaagcacgctcgctggctaccagaaaagaagggtacatcccgtccaactacgttgccagagttgattccctggagactgaagaatggtttttcaaaggtatctctcggaaagatgccgagagacagctgcttgcccctggaaacatgctggggtctttcatgattcgagactctgaaacaactaagggaagctactccctgtctgtgcgagactacgatccacggcagggggacacggtgaagcactataaaatcagaactctggataatggtggcttctacatctctcctagatctacattcagcaccctccaggagctggttgatcactacaagaagggtaatgacggattgtgccagaaactgtcagtcccctgtatgtcatccaaacctcaaaagccatgggagaaggatgcatgggagatacccagggaatccctgaagttagaaaagaagctaggtgctggtcaatttggcgaggtgtggatggctacttacaacaagcacaccaaagtcgcagttaagactatgaagccgggcagtatgagtgtggaggccttccttgccgaggccaacgtgatgaaaaccctgcagcatgataagttggtaaaactgcatgctgtggtgacaaaagaacctatctacatcatcactgaattcatggccaagggctcactgctcgattttctgaagtccgatgaaggatctaaacagccactccctaagctaatcgacttctccgcccaaatcgctgaaggtatggccttcatcgagcaacggaactatatacatagggatctgcgcgctgctaacattctagtgtcggcatccttggtgtgtaagatcgccgattttggacttgctagggtcattgaagacaatgaatatactgcgagggagggagccaaattcccaatcaagtggaccgcgcccgaggcgattaattttggctcctttacgattaagtcggacgtttggtccttcgggatactgctgatggagattgtaacctatggtaggattccttacccaggcatgagcaaccctgaggtcatccgagccctggagaggggatatcgcatgcctaggcctgagaattgccctgaggagctttataatatcatgatgcgttgctggaaaaacagacccgaagaacggccaacattcgaatatatacagagcgtacttgatgacttctacaccgccacagaaagtcaatatcagcagcagccatag

SEQ ID NO: 67867 - DNA, 1521 bp, Artificial Sequence
  derived and/or modified sequence
atgatgggctgcatgaagagcaagttcctgcaggtgggcggcaacaccttcagcaagacagagaccagcgccagcccccactgccctgtgtatgtgcctgaccccaccagcaccatcaagccaggccccaacagccacaacagcaacaccccaggcatccgggaggccggcagcgaggacatcatcgtggtggccctgtatgactatgaggccatccaccacgaggacctgtccttccagaagggggaccagatggtggtgctggaggagagcggggagtggtggaaggcccggagcctggccaccaggaaggagggctacatccccagcaactacgtggcccgggtggacagcctggagacagaggagtggttcttcaagggcatcagcaggaaggatgctgagcggcagctgctggcccctggcaacatgctgggcagcttcatgatccgggacagcgagaccaccaagggcagctacagcctgtctgtgcgggactatgacccccggcagggcgacacagtgaagcactacaagatccgcaccctggacaatggaggcttctacatcagccccaggagcaccttcagcaccctgcaggagctggtggaccactacaagaagggaaatgatggcctgtgccagaagctgtctgtgccctgcatgagcagcaagccccagaagccctgggagaaggatgcctgggagatcccccgggagagcctgaagctggagaagaagctgggcgccggccagtttggagaggtgtggatggccacctacaacaagcacaccaaggtggccgtgaagaccatgaagccaggctccatgtctgtggaggccttcctggccgaggccaacgtgatgaagaccctgcagcacgacaagctggtgaagctgcatgctgtggtgaccaaggagcccatctacatcatcacagagttcatggccaagggcagcctgctggacttcctgaagagtgatgagggcagcaagcagcccctgcccaagctgattgacttcagcgcccagattgctgagggcatggccttcatcgagcagaggaactacatccaccgggacctgcgggccgccaacatcctggtgtctgccagcctggtgtgcaagattgctgactttggcctggcccgggtgattgaagataatgagtacacagcccgggagggcgccaagttccccatcaagtggacagcccctgaggccatcaactttggcagcttcaccatcaagagtgatgtgtggagctttggcatcctgctgatggagatcgtgacctacggccgcatcccctacccaggcatgagcaaccctgaggtgatccgggccctggagcggggctacaggatgcccaggcctgagaactgcccagaggagctgtacaacatcatgatgcgctgctggaagaacagacctgaggagcggcccacctttgagtacatccagagcgtgctggatgacttctacacagccacagagagccagtaccagcagcagccctag

SEQ ID NO: 67868 - DNA, 1521 bp, Artificial Sequence
  derived and/or modified sequence
atgatgggctgcatgaagagcaagttcctgcaggtgggcggcaacaccttttcgaagactgaaacctcggcctctccacactgtcccgtgtacgtacctgacccaacaagcaccattaagccaggacccaactctcacaattccaatacccccggaatcagggaggcaggctctgaagatatcattgttgtagcactttatgattatgaagccatccaccatgaagatctgtcttttcagaagggtgaccaaatggtggtcctagaagagtctggcgagtggtggaaggctaggtctctggccactaggaaggagggctacatcccctcaaactacgtggcccgggttgactctttagagacagaggaatggttttttaagggcatctcgagaaaagacgccgagcgtcagttacttgcacccggaaacatgctgggatcgttcatgattagggacagtgagaccaccaagggttcttactctctctctgttcgcgactatgacccgaggcagggggacacagtcaaacactacaagatcaggaccttggacaacggggggttctatatctcaccaaggtcgacttttagcaccctccaggagttagtggatcactataagaagggcaatgacgggttatgccagaagctgagcgtcccctgtatgtctagtaagccccagaagccctgggagaaagacgcttgggagataccccgtgagtccctcaaactagaaaagaagctgggcgcgggccagtttggagaggtttggatggcaacttacaacaagcatactaaagtggccgtgaaaacgatgaagcctggatctatgtccgtggaagcttttctggcggaggccaatgttatgaaaactctgcagcatgacaagctcgtaaaactgcacgccgtggtgaccaaagagccgatctatatcatcaccgagttcatggccaaaggctccctactcgacttcctaaaatctgatgagggctcgaaacagccattacccaagcttattgacttttccgcccaaattgccgaaggtatggccttcattgaacagagaaattacatccacagagatcttagagctgcaaatattctcgtgagcgcatcattggtgtgcaagattgctgatttcggcctggcaagggtgatcgaagataatgagtatactgcccgtgaaggggccaaattcccaatcaagtggaccgcaccagaagccattaatttcggttcatttacaatcaaaagcgacgtttggagctttgggatcttgctgatggagatcgtcacttacggacgtatcccttatcctggcatgagcaaccccgaggtgatccgagctctggagagagggtatcgtatgcccaggccagaaaactgtcctgaggagctctacaatattatgatgaggtgttggaagaaccgacccgaggaacggcccacttttgaatatattcagagcgttctggatgatttctatacagcaacagaaagtcagtaccagcagcagccctag

SEQ ID NO: 67869 - DNA, 1521 bp, Artificial Sequence
  derived and/or modified sequence
atgatgggatgtatgaagagcaagtttttacaggttggcggtaacactttctcaaaaacggagaccagtgcgtcacctcactgtcctgtctatgtgcccgatcctacctcaaccattaagccaggcccaaactctcataactctaacacccccggtatccgggaggctggcagcgaggacattatcgtcgtcgccctatacgattatgaggcgattcaccatgaagacctgtcctttcaaaagggcgatcagatggtcgttctggaagaatctggagaatggtggaaagcccgttccctcgcaacgcggaaggaaggttacatccctagtaactatgtggctagggtggacagcctggagacagaagaatggttttttaagggcatctcgagaaaggacgccgaacgtcagctgctggccccaggaaatatgctgggcagcttcatgattagggactcagaaacaactaaaggcagttatagcctgagcgtcagagactatgatcctcggcagggagacaccgtgaagcattacaagatcaggactctagacaacggtggcttttacatttcaccacgcagtactttttccactcttcaagagctagtggatcattataaaaaggggaacgatggcttatgccagaagttgagcgttccttgtatgtcgtccaagccacaaaagccatgggagaaggatgcctgggagattcccagggagagtttaaaactggaaaaaaaactgggagccggtcagtttggagaagtttggatggccacgtacaacaagcatacaaaggtggccgtgaaaaccatgaagccgggatccatgagtgtggaggcattcttggccgaggccaatgtgatgaagacactgcagcacgacaagcttgtgaaactgcacgcggtcgtgactaaagagccaatttacattattacagagtttatggctaagggatcgctgctcgattttctgaaatcagatgaaggaagtaagcagcccctccctaaacttattgacttctcggctcaaattgccgaggggatggctttcatcgaacagcgcaattacatccatcgagacctgcgcgctgccaacatactggtaagcgccagccttgtgtgtaaaattgccgatttcgggcttgcacgcgttatcgaggataacgaatatactgcaagagagggggcaaagttccctataaaatggaccgcgccagaagccattaacttcggtagctttacaatcaagtccgacgtatggagctttggcattcttctaatggaaattgtcacctatggtagaatcccgtaccccggaatgagtaatcccgaggtgatcagggccctggagcggggatacagaatgcccagacctgagaattgtccagaggaactgtacaatattatgatgagatgctggaaaaatcgccctgaggaaagacctaccttcgagtacatccagagcgtgctggatgatttctacaccgcaacagagagtcaatatcagcagcagccatag

SEQ ID NO: 67870 - DNA, 1518 bp, Artificial Sequence
  derived and/or modified sequence
atgggctgcatgaagagcaagttcctgcaggtgggcggcaacaccttcagcaagaccgagaccagcgccagcccccactgccccgtgtacgtgcccgaccccaccagcaccatcaagcccggccccaacagccacaacagcaacacccccggcatcagagaggccggcagcgaggacatcatcgtggtggccctgtacgactacgaggccatccaccacgaggacctgagcttccagaagggcgaccagatggtggtgctggaggagagcggcgagtggtggaaggccagaagcctggccaccagaaaggagggctacatccccagcaactacgtggccagagtggacagcctggagaccgaggagtggttcttcaagggcatcagcagaaaggacgccgagagacagctgctggcccccggcaacatgctgggcagcttcatgatcagagacagcgagaccaccaagggcagctacagcctgagcgtgagagactacgaccccagacagggcgacaccgtgaagcactacaagatcagaaccctggacaacggcggcttctacatcagccccagaagcaccttcagcaccctgcaggagctggtggaccactacaagaagggcaacgacggcctgtgccagaagctgagcgtgccctgcatgagcagcaagccccagaagccctgggagaaggacgcctgggagatccccagagagagcctgaagctggagaagaagctgggcgccggccagttcggcgaggtgtggatggccacctacaacaagcacaccaaggtggccgtgaagaccatgaagcccggcagcatgagcgtggaggccttcctggccgaggccaacgtgatgaagaccctgcagcacgacaagctggtgaagctgcacgccgtggtgaccaaggagcccatctacatcatcaccgagttcatggccaagggcagcctgctggacttcctgaagagcgacgagggcagcaagcagcccctgcccaagctgatcgacttcagcgcccagatcgccgagggcatggccttcatcgagcagagaaactacatccacagagacctgagagccgccaacatcctggtgagcgccagcctggtgtgcaagatcgccgacttcggcctggccagagtgatcgaggacaacgagtacaccgccagagagggcgccaagttccccatcaagtggaccgcccccgaggccatcaacttcggcagcttcaccatcaagagcgacgtgtggagcttcggcatcctgctgatggagatcgtgacctacggcagaatcccctaccccggcatgagcaaccccgaggtgatcagagccctggagagaggctacagaatgcccagacccgagaactgccccgaggagctgtacaacatcatgatgagatgctggaagaacagacccgaggagagacccaccttcgagtacatccagagcgtgctggacgacttctacaccgccaccgagagccagtaccagcagcagccctag

SEQ ID NO: 67871 - DNA, 1518 bp, Artificial Sequence
  derived and/or modified sequence
atgggctgcatgaagtctaagttcctgcaggtcggcggcaatactttcagcaagaccgagacctctgcttctcctcactgcccagtgtacgtgccagatcctacgtcaacaatcaaacccggtccaaattctcacaactccaacaccccaggtattcgcgaagctggctctgaagacattattgtggtggcactgtacgattatgaagctatccaccacgaggacctgtcctttcaaaaaggggaccagatggtagtgttggaggagtctggcgagtggtggaaggcgcgaagcctggctacaaggaaggagggctacataccatccaattacgtggcgagagtggactccctggaaaccgaggaatggttttttaaaggcatttccaggaaggacgccgagcggcagctccttgcccccggaaatatgctgggcagcttcatgatccgtgactcagaaactaccaaggggtcttattcactcagcgtacgggattatgaccctcggcaaggcgataccgtaaagcattacaaaatccgaacactcgacaatggcggtttctatatctctcctcgaagcaccttttcaacactgcaggagcttgtggaccactacaagaaggggaacgatggcttatgccagaagctgagcgtcccgtgcatgtcttccaaaccccagaaaccatgggaaaaggatgcctgggagatccccagagaatccctgaagcttgagaaaaaactcggcgccggccagtttggggaagtgtggatggcaacttataataagcatacaaaggtcgcggtcaagacaatgaagcccggatctatgtcagtagaggcgtttctggccgaggctaatgtcatgaagacactccagcacgataagctcgtgaagctccacgctgtcgtaacaaaggagcccatatacattatcactgagtttatggccaagggtagtctgctggacttcctgaaaagtgacgaagggtcaaaacaacctcttcccaagctcattgacttttctgcacaaattgccgagggcatggcttttattgagcaacggaattacattcatcgcgacctccgcgccgctaacatcctggtaagtgcaagcctcgtctgcaaaatagcggactttgggcttgccagggtcatcgaggataatgagtacaccgcccgcgaaggtgcaaagtttcctataaaatggacagcccctgaagcgattaacttcggctcttttactattaagagcgacgtgtggagtttcggcatcctcctaatggagattgttacatatggaagaatcccatatccagggatgagtaaccccgaggtgatcagggccttagagcgaggatatagaatgcccaggcctgagaactgccccgaagagctctacaatattatgatgcgctgttggaagaacagaccagaggagcgcccaacatttgagtacatccagtccgtgctcgacgatttctatacagcaactgagagccaatatcagcagcagccatag

SEQ ID NO: 67872 - DNA, 1518 bp, Artificial Sequence
  derived and/or modified sequence
atgggctgtatgaaaagtaaatttctgcaagtgggaggtaacacttttagcaagacggaaacatctgccagcccccactgccctgtgtatgtacctgatcccacttctactatcaagccgggccccaatagccataatagcaatactcctggcattcgagaagccggaagcgaagatataattgtcgttgctctgtatgattacgaagccatacaccatgaagacctgtcttttcagaaaggagatcaaatggtcgttctcgaggagtcaggtgaatggtggaaggcccgctccctagccacgagaaaggagggctacattccaagcaactatgttgcacgtgttgatagtcttgaaactgaggaatggttcttcaagggcatttccagaaaagatgccgaaagacaactgctagcgccggggaatatgctcgggtccttcatgattcgggactctgagaccacgaaaggctcctattcactgagtgtccgcgactacgatccacgacaaggagacacagtcaagcactacaagatccgaaccctggacaatggtgggttttatatctctcccagatcaacattctcaaccctgcaggagctggtcgaccactataagaaaggcaatgacggactgtgtcaaaaacttagcgtcccctgtatgagcagtaaaccccagaagccttgggagaaggatgcctgggaaattccacgcgaatctctgaagctggaaaagaagcttggcgcagggcaattcggggaggtctggatggcaacttataacaagcatacgaaagtggccgttaaaacaatgaagcccgggtccatgtcggtggaagcctttctggctgaagccaatgtgatgaagacccttcagcacgataaattagttaaactgcatgctgtggtcacgaaagagcccatctatattattaccgaatttatggcaaaagggtctctgctggattttctcaagtccgacgagggttctaagcagccgctcccgaagttgattgacttctctgctcagattgcagagggaatggcgtttattgagcagagaaactacattcaccgggatttgagggccgcaaatatcctcgtgtcagcctccctcgtctgtaagatcgctgacttcggcctggcacgggtgatcgaggacaacgaatacaccgccagagaaggagccaagttcccaatcaaatggacagcacccgaggcgattaactttggcagttttaccattaagagcgacgtttggagtttcggtatccttctgatggagattgtgacttacgggcgaattccatatcctgggatgtctaaccccgaggtgattagggctctggagcgagggtatcggatgcctagacccgagaactgccccgaggaactttacaacattatgatgaggtgttggaaaaaccgacccgaagaacgcccaacattcgaatacatccagagtgtgctggacgacttctacacagccacagaatctcagtaccagcaacaaccctag

SEQ ID NO: 67873 - DNA, 1518 bp, Artificial Sequence
  derived and/or modified sequence
atgggctgcatgaagagcaagttcctgcaggtgggcggcaacaccttcagcaagacagagaccagcgccagcccccactgccctgtgtatgtgcctgaccccaccagcaccatcaagccaggccccaacagccacaacagcaacaccccaggcatccgggaggccggcagcgaggacatcatcgtggtggccctgtatgactatgaggccatccaccacgaggacctgtccttccagaagggggaccagatggtggtgctggaggagagcggggagtggtggaaggcccggagcctggccaccaggaaggagggctacatccccagcaactacgtggcccgggtggacagcctggagacagaggagtggttcttcaagggcatcagcaggaaggatgctgagcggcagctgctggcccctggcaacatgctgggcagcttcatgatccgggacagcgagaccaccaagggcagctacagcctgtctgtgcgggactatgacccccggcagggcgacacagtgaagcactacaagatccgcaccctggacaatggaggcttctacatcagccccaggagcaccttcagcaccctgcaggagctggtggaccactacaagaagggaaatgatggcctgtgccagaagctgtctgtgccctgcatgagcagcaagccccagaagccctgggagaaggatgcctgggagatcccccgggagagcctgaagctggagaagaagctgggcgccggccagtttggagaggtgtggatggccacctacaacaagcacaccaaggtggccgtgaagaccatgaagccaggctccatgtctgtggaggccttcctggccgaggccaacgtgatgaagaccctgcagcacgacaagctggtgaagctgcatgctgtggtgaccaaggagcccatctacatcatcacagagttcatggccaagggcagcctgctggacttcctgaagagtgatgagggcagcaagcagcccctgcccaagctgattgacttcagcgcccagattgctgagggcatggccttcatcgagcagaggaactacatccaccgggacctgcgggccgccaacatcctggtgtctgccagcctggtgtgcaagattgctgactttggcctggcccgggtgattgaggacaatgagtacacagcccgggagggcgccaagttccccatcaagtggacagcccctgaggccatcaactttggcagcttcaccatcaagagtgatgtgtggagctttggcatcctgctgatggagatcgtgacctacggccgcatcccctacccaggcatgagcaaccctgaggtgatccgggccctggagcggggctacaggatgcccaggcctgagaactgcccagaggagctgtacaacatcatgatgcgctgctggaagaacagacctgaggagcggcccacctttgagtacatccagagcgtgctggatgacttctacacagccacagagagccagtaccagcagcagccctag

SEQ ID NO: 67874 - DNA, 1518 bp, Artificial Sequence
  derived and/or modified sequence
atgggctgcatgaagagcaagttcctgcaggtgggcggcaacaccttctccaaaaccgaaaccagtgctagcccacattgccctgtctatgtgccggatcccacctctactatcaagccagggcccaattcacacaacagcaacacacccggcatccgggaagcaggcagtgaagatatcatcgtggtggccctctatgactatgaggcgatacaccatgaggacctttcctttcagaagggcgaccagatggtggtgctcgaggaaagcggggaatggtggaaggcacgttccctcgcaacacggaaggagggatacattccttccaattatgtggcaagggtggactctctggaaacagaagagtggtttttcaagggcattagtagaaaagatgcagaacggcagttgctcgctcccggcaacatgttaggtagcttcatgatcagggattccgagacaaccaaagggtcttattcattgagcgttcgagactacgatccccgtcagggagacacggtgaaacactataagataaggacgctggacaacggtggcttttacatctcgccgcggtctaccttttcgaccctgcaggaattggtcgaccactataagaagggtaacgacgggctgtgtcagaagctgtctgttccttgcatgtcctcgaagccgcagaaaccctgggaaaaagacgcatgggagatccctcgcgagtccttaaagttagagaaaaaattaggagccggccagttcggtgaggtatggatggctacatacaataaacacactaaggttgcagtcaagactatgaaaccaggctctatgagtgtcgaggcatttttagcggaagccaacgtgatgaagaccttacagcacgataagcttgtcaaattgcacgcagtagtcacaaaggaacccatctacattatcacagaattcatggccaagggtagtttgctggactttttgaagtcagacgagggcagtaagcagccccttccaaagctgatcgatttctcggcccaaattgcagagggtatggcgtttattgaacagcgtaactacattcatagggatttacgggcggccaacatcctggtgagcgcctctctcgtatgcaagatcgccgacttcgggctcgcccgcgtgattgaagataacgagtatacagcccgggagggtgccaagttccctatcaaatggacggcgcccgaagccatcaatttcggcagcttcaccattaagagcgatgtctggagcttcggtatcttgctgatggaaattgtgacatatggcaggatcccctatccgggcatgagcaacccagaagtgattcgcgccctggagcgcgggtatcgaatgccgcgcccagaaaactgtcctgaagagctttacaacatcatgatgagatgctggaaaaaccgaccagaggagaggcccaccttcgagtacatacagtcagtcctggacgatttttacacagccaccgagagtcagtaccagcagcagccctag

SEQ ID NO: 67875 - DNA, 1518 bp, Artificial Sequence
  derived and/or modified sequence
atgggctgcatgaagagcaagttcctgcaggtgggcggcaacaccttctcaaaaacggaaacgagcgctagtccccactgccctgtatacgtgccggaccccactagcaccattaagccaggccccaactcccacaattccaacacacctgggatccgggaagctggaagtgaggacatcatcgtcgtggccctgtatgattatgaagccatacaccacgaagacctgtcattccagaagggtgaccagatggtggtcctagaagagtccggagagtggtggaaggcacgttctctggccaccagaaaggaaggatacatccctagcaactatgttgccagagtggactccttagaaactgaggagtggttcttcaaaggcatcagtcggaaagacgcagaaaggcaacttctggccccaggcaatatgctgggcagtttcatgatccgggacagcgaaacaaccaagggctcatatagcttaagcgtgagggattacgacccaaggcagggagacaccgtgaagcattataagattaggacactggacaatggcgggttttacatctcaccacgttctacgttctcaacactgcaggaactcgtagatcactacaagaagggcaacgatggcctgtgccagaaactcagtgtgccgtgtatgagctcaaaaccacagaagccctgggaaaaagatgcctgggaaatcccccgggagagtctcaagctcgaaaagaaactgggcgccggtcagttcggtgaagtgtggatggcaacatacaataagcacacaaaggttgcagttaaaaccatgaaacccggaagtatgagtgtggaggcgttcttggccgaggctaatgtcatgaagaccctgcagcatgacaaattggtcaagttgcatgccgtagtcaccaaagagccaatctatatcattacagaattcatggcgaaagggtctctgctcgactttctgaaatctgatgagggtagcaagcagccacttcccaagttaatcgacttctctgcccagattgctgaaggaatggccttcatagagcagcggaactatattcatcgcgatttgcgcgccgccaatattctggtgagtgccagtctcgtctgcaaaattgctgatttcggattggctcgcgtgatcgaggataacgagtatactgccagggagggggccaagtttcctatcaagtggactgcccctgaggctatcaacttcggcagtttcactatcaagtccgatgtgtggtcatttggaatattgcttatggaaattgtaacatacggccgaataccgtacccaggcatgagcaaccctgaagtcattagggctctggaaagaggctataggatgccacgccctgaaaattgtcctgaggaactgtacaatataatgatgagatgctggaaaaaccgaccagaggaacgcccaaccttcgagtacattcagagcgtgctcgatgatttttacaccgccaccgaaagtcagtaccaacagcagccctag

SEQ ID NO: 67876 - DNA, 1518 bp, Artificial Sequence
  derived and/or modified sequence
atgggttgtatgaagagtaagtttctgcaagtgggtgggaacacattttcaaagaccgagaccagcgcctcccctcattgcccagtgtatgtgcccgatcctaccagcactatcaaaccgggtcccaacagccataacagcaacacacccggtattagggaggctggtagcgaggatatcatagtcgtggctctgtacgattacgaggcaattcaccacgaggacttgagtttccaaaaaggagaccagatggtggttctggaggagagcggtgaatggtggaaagctagatccttggccactaggaaggaagggtacatccccagcaactatgtagctagagtggattcgttggagaccgaagagtggttttttaaaggaataagcagaaaggatgctgagaggcagcttctggcgcctggaaatatgttgggcagcttcatgattcgcgattccgaaaccaccaaggggtcctacagtttaagcgtaagggactatgacccgaggcagggcgacaccgtgaaacattacaaaatcaggactcttgacaacgggggattctatatcagccccagatctaccttctcaacgctccaggaactcgtggatcattacaagaagggcaatgatggactatgtcagaaactctcagtgccatgtatgtcctctaagcctcagaagccctgggagaaagacgcgtgggaaattccaagggagtctcttaaactggagaaaaagctcggcgctgggcagttcggtgaggtgtggatggccacttacaataagcacaccaaagtggccgtcaaaactatgaagccaggcagcatgtctgtcgaagcttttctggcagaagctaatgttatgaaaacgctgcagcacgacaaactcgtgaagctccacgctgtggtgaccaaagaacctatctacataattaccgaattcatggctaagggctcgctgttggactttctgaaaagcgacgaggggtctaagcagccccttcctaaactgatagatttctccgcacagatcgccgaaggcatggcgttcatcgagcaaagaaattacattcaccgagaccttcgggctgctaatatcctcgtttctgcaagtttggtttgtaagatcgccgactttggcctggcaagagtgatcgaggacaacgaatacacagctagggaaggggcaaagtttcctattaagtggaccgcccctgaagcaatcaatttcgggagttttactattaagagcgatgtgtggagtttcgggatcctactgatggaaatcgtgacctatggacggattccttaccccggaatgagcaatccagaggtgatccgggctctggagcgcggttacagaatgccacgcccagaaaactgccctgaagaattgtataacatcatgatgaggtgttggaaaaaccggccagaagaacgccctacgttcgagtatattcaatccgtgcttgatgacttctacactgccacggagagtcagtaccagcagcagccctag

SEQ ID NO: 67877 - DNA, 1518 bp, Artificial Sequence
  derived and/or modified sequence
atgggatgcatgaaatcaaaatttctacaggtcggcggaaatacattctccaagaccgagacctctgcctccccccactgtcctgtctatgtacctgaccccaccagcactatcaaacctggacctaatagccacaattcaaacacacccggaatccgggaagctggttccgaggacattattgttgtggctctgtacgattacgaagccatccaccacgaggacctgtctttccagaagggcgaccaaatggtggtactggaagagtccggtgagtggtggaaggcacgctcccttgcgactaggaaagaaggttacatcccttccaattacgtggctcgtgtggattctctcgagacagaagagtggttctttaaaggaatcagtcggaaggatgcagaacgccaactcctcgcaccaggcaatatgcttgggtctttcatgattcgcgactcagaaacaaccaagggctcatatagtctcagtgtacgcgattacgatcctaggcagggcgatactgtgaagcattacaaaatacgcactctggacaatggtggtttctacatctcgcctcggtcgacattcagcacacttcaggagttggtggatcattataagaaaggcaacgatggcctctgtcagaagctgtccgtaccctgtatgagctctaagccacagaagccttgggagaaggatgcatgggaaatacccagggagtctctcaaactggagaagaaacttggcgctggccagtttggggaggtctggatggctacatataataaacataccaaggtagccgtgaagactatgaaaccgggttccatgtccgttgaggcgttcttagccgaggccaatgtaatgaagacactacaacacgacaagctcgtgaaattgcacgcggtggtgaccaaggaacctatctacattattacagaattcatggcaaaggggtcactgttagactttcttaagagtgacgagggaagcaagcagccgctccctaaactcattgatttcagtgctcagatagcagagggcatggcatttatcgagcagcgcaattatattcatagagacctccgagctgcaaacatacttgtctctgcatctctggtatgtaaaatcgctgatttcggcctggcgagagtcatcgaggataatgagtatactgcacgagagggggcaaagttcccaatcaagtggactgcgccagaggccattaacttcgggtctttcacaatcaagtcagatgtctggtcctttgggattttgctgatggaaatcgtaacatatgggagaattccttaccctggtatgtccaaccccgaagtgatcagagcattagagcgtggctaccgtatgccccgtcccgagaattgtccagaagaactgtataatattatgatgaggtgctggaaaaaccgtcccgaggagaggcccaccttcgaatatattcagtccgtcctcgacgatttctataccgctaccgagtcacaataccagcaacaaccctag

SEQ ID NO: 67878 - protein, 268 aa, Artificial Sequence
  derived and/or modified sequence
MLGDHCSLPEDQARPGQSLQSGLCCKMVLQAVSKVLRKSKAKPNGKKPAAEERKAYLEPEHTKARITDFQFKELVVLPREIDLNEWLASNTTTFFHHINLQYSTISEFCTGETCQTMAVCNTQYYWYDERGKKVKCTAPQYVDFVMSSVQKLVTDEDVFPTKYGREFPSSFESLVRKICRHLFHVLAHIYWAHFKETLALELHGHLNTLYVHFILFAREFNLLDPKETAIMDDLTEVLCSGAGGVHSGGSGDGAGSGGPGAQNHVKER

SEQ ID NO: 67879 - DNA, 807 bp, Artificial Sequence
  derived and/or modified sequence
atgctgggcgaccactgcagcctgcccgaggaccaggccagacccggccagagcctgcagagcggcctgtgctgcaagatggtgctgcaggccgtgagcaaggtgctgagaaagagcaaggccaagcccaacggcaagaagcccgccgccgaggagagaaaggcctacctggagcccgagcacaccaaggccagaatcaccgacttccagttcaaggagctggtggtgctgcccagagagatcgacctgaacgagtggctggccagcaacaccaccaccttcttccaccacatcaacctgcagtacagcaccatcagcgagttctgcaccggcgagacctgccagaccatggccgtgtgcaacacccagtactactggtacgacgagagaggcaagaaggtgaagtgcaccgccccccagtacgtggacttcgtgatgagcagcgtgcagaagctggtgaccgacgaggacgtgttccccaccaagtacggcagagagttccccagcagcttcgagagcctggtgagaaagatctgcagacacctgttccacgtgctggcccacatctactgggcccacttcaaggagaccctggccctggagctgcacggccacctgaacaccctgtacgtgcacttcatcctgttcgccagagagttcaacctgctggaccccaaggagaccgccatcatggacgacctgaccgaggtgctgtgcagcggcgccggcggcgtgcacagcggcggcagcggcgacggcgccggcagcggcggccccggcgcccagaaccacgtgaaggagagatag

SEQ ID NO: 67880 - DNA, 807 bp, Artificial Sequence
  derived and/or modified sequence
atgcttggcgatcactgcagcctccccgaggatcaagctcgacctggtcaatccctgcagtccggactgtgttgtaaaatggtcctgcaggcagtttcaaaggttttgcgtaaatcaaaggccaagccaaatggcaagaagccagcagctgaagagagaaaggcctacttagaacctgaacacacaaaagccaggatcacggatttccagttcaaggagctggtggtgctcccaagggaaatcgatctcaatgaatggctggcttctaatactactaccttctttcaccacatcaatttgcagtattctaccatcagtgaattttgtacaggagaaacttgccaaactatggccgtgtgcaatactcagtactactggtatgacgagcgaggtaagaaggttaaatgtacagctcctcagtacgttgactttgttatgagttcagtccaaaagctcgttaccgatgaagacgtattccctacgaagtacgggcgcgagttccccagctcattcgagtccctcgtaagaaagatctgcagacacttgttccacgtgctggctcacatttactgggcgcatttcaaagaaacactggcgctcgaattgcatgggcatcttaacaccctgtatgtccactttatactgtttgctcgagaatttaacttgcttgatcctaaagagaccgcaataatggatgaccttactgaggtgctatgctctggcgcagggggcgtgcactcgggcgggagcggagacggagccggtagcggcggcccgggagctcaaaaccatgttaaagaaagatag

SEQ ID NO: 67881 - DNA, 807 bp, Artificial Sequence
  derived and/or modified sequence
atgctgggggaccactgcagcctgcctgaggaccaggcccggcccggccagagcctgcagagcggcctgtgctgcaagatggtgctgcaggccgtgtccaaggtgctgaggaagagcaaggccaagcccaacgggaagaagccagctgctgaggagaggaaggcctacctggagcctgagcacaccaaggcccgcatcacagacttccagttcaaggagctggtggtgctgccccgggagattgacctgaatgagtggctggccagcaacaccaccaccttcttccaccacatcaacctgcagtacagcaccatcagcgagttctgcaccggggagacctgccagaccatggctgtgtgcaacacccagtactactggtatgatgagcggggcaagaaggtgaagtgcacagccccccagtatgtggactttgtgatgagctctgtgcagaagctggtgacagatgaagatgtgttccccaccaagtatggccgggagttccccagcagctttgagagcctggtgaggaagatctgccgccacctgttccacgtgctggcccacatctactgggcccacttcaaggagaccctggccctggagctgcacggccacctgaacaccctgtatgtgcacttcatcctgtttgcccgggagttcaacctgctggaccccaaggagacagccatcatggatgacctgacagaggtgctgtgcagcggggccggcggcgtgcacagcggcggcagcggagatggagctggcagcggcggccctggggcccagaaccacgtgaaggagaggtag

SEQ ID NO: 67882 - DNA, 807 bp, Artificial Sequence
  derived and/or modified sequence
atgctgggcgaccactgcagcctgcccgaggaccaggcccggcccgggcagtctctccagagtgggttgtgctgtaagatggtccttcaggccgtctctaaagtgctgagaaagagcaaggctaagccaaacgggaagaaaccagctgccgaagagcggaaagcgtacctcgagcccgaacatacaaaggcaagaattacagattttcagtttaaggagctagtcgtgctgcctcgggagatcgacctgaacgagtggttagctagtaataccaccacctttttccatcacatcaatctgcagtacagcactatctccgaattctgcaccggggagacatgtcagaccatggccgtttgcaacacgcaatactactggtatgacgaaagggggaaaaaagtgaagtgcaccgcgccccagtatgttgatttcgtgatgtcgagtgtccagaagctcgtgactgacgaggacgtgttcccgaccaaatatgggcgagaatttccatcgtctttcgaatccctggtcaggaagatttgccggcatttgttccacgtccttgcgcacatctactgggcacattttaaagagactttggcattggagctgcacgggcatttaaacaccttatacgtacactttatcctgtttgcccgggagtttaatttgctggatcccaaagagactgccattatggacgatctcaccgaagtgctctgtagcggagccggcggagtgcacagcgggggctcaggcgacggtgcagggagcggcggacctggtgcacagaaccatgtcaaggagcgttag

SEQ ID NO: 67883 - DNA, 1207 bp, Artificial Sequence
  derived and/or modified sequence
aattcagacgctccctcgtttcaccagccttggccagcccttgcctctggaaagggggcagctgtttgtctctgccaggcgtcccattggccagggagtgaggctggagggcccggcagcaggcatttgcgagtgctggccagccggcaccccgccccgcttctcctccccaccttcccgtcgcccactcatgctgggagaccactgcagtctccctgaagaccaagcccggcccggccagtccctgcaaagtggactctgctgcaaaatggtgcttcaggctgtcagcaaagtgctcaggaagtccaaagccaagcctaatggcaagaagcccgctgcggaggagaggaaggcctacctggagcctgagcacaccaaggccaggatcaccgacttccagttcaaggagctggtggtgctgccccgcgagattgaccttaacgagtggctggccagcaacaccacgacgtttttccaccacatcaacctgcagtatagcaccatctccgagttctgcacaggagagacgtgtcagacgatggccgtgtgcaacacacagtactactggtatgacgagcgggggaagaaggtcaagtgcacggccccacagtacgttgacttcgtcatgagctccgtgcagaagctggtgacggatgaggacgtgttccccacaaaatacggcagagaattccccagctcctttgagtccctggtgaggaagatctgcagacacctgttccacgtgctggcacacatctactgggcccacttcaaggagacgctggccctggagctgcacggacacttgaacacgctctacgtccacttcatcctctttgctcgggagttcaacctgctggaccccaaagagaccgccatcatggacgacctcaccgaggtgctatgcagcggggccggcggggtccacagtgggggcagtggggatggggccggcagcgggggcccgggagcacagaaccacgtgaaggagagatgagccccccgggccggacaggggcacacgtgtgcaaagagacggtggtgtgtgttctctcctgcatctgcgtgtgcacacatgtgctgggcacgcgtgtggtgaggtctgagagggccccgggctgcactggtgtgggctgcacaggcacagacgcagacggccccggccgtgtcctgtggccccctgtcggatggatgcgtgccgtttgta

SEQ ID NO: 67884 - DNA, 807 bp, Artificial Sequence
  derived and/or modified sequence
atgctgggcgatcattgtagccttccagaagaccaggcacggccaggacaaagcctgcaaagtggcttatgttgcaagatggtcctgcaggccgtgtcgaaagttttgagaaagagtaaggccaaaccaaacgggaagaagcctgcagctgaagagcggaaggcctatctcgaacccgaacacactaaagccagaattacggactttcaattcaaggagctggtagtcctcccacgcgagattgaccttaatgagtggctggcatcaaatactacaaccttctttcatcatattaatctgcagtactcgacaatctcagaattttgcactggagaaacgtgccagacaatggccgtgtgcaacacccagtattactggtatgacgaaaggggaaagaaagtgaaatgcactgctccccagtatgtcgacttcgttatgtcttcagtgcagaaactggtgactgatgaagatgtgtttccaactaagtacggtcgcgagtttccctccagctttgaaagcctggtgcgcaagatctgccggcacctgttccacgtcttggctcacatctattgggcccacttcaaggaaaccctggctctggagctccacgggcatttgaatactttgtatgtgcattttatactcttcgcacgcgagttcaacctattggaccctaaggaaacggcgataatggatgatctgaccgaggttctgtgctctggcgctggcggagttcactccggtgggagtggggacggtgccggaagtggtggacccggagcccagaaccacgtcaaggagagatag

SEQ ID NO: 67885 - protein, 447 aa, Artificial Sequence
  derived and/or modified sequence
MPGDSSPGTLPLWDASLSPPLGPDPGGFSRASHAGDKSRPPAPELGSPGAVRPRVGSCAPGPMELRVSNTSCENGSLLHLYCSSQEVLCQIVNDLSPEVPSNATFHSWQERIRQNYGFYIGLGLAFLSSFLIGSSVILKKKGLLRLVATGATRAVAAGEVANFGAYAFAPATVVTPLGALSVLISAILSSYFLRESLNLLGKLGCVICVAGSTVMVIHAPEEEKVTTIMEMASKMKDTGFIVFAVLLLVSCLILIFVIAPRYGQRNILIYIIICSVIGAFSVAAVKGLGITIKNFFQGLPVVRHPLPYILSLILALSLSTQVNFLNRALDIFNTSLVFPIYYVFFTTVVVTSSIILFKEWYSMSAVDIAGTLSGFVTIILGVFMLHAFKDLDISCASLPHMHKNPPPSPAPEPTVIRLEDKNVLVDNIELASTSSPEEKPKVFIIHS

SEQ ID NO: 67886 - DNA, 1344 bp, Artificial Sequence
  derived and/or modified sequence
atgccaggggacagcagtccgggtacactacctctgtgggacgccagtctgtccccacctttggggccagaccccgggggtttcagcagagcatctcatgcaggggataagagccgccccccggcccccgaactcgggtccccaggagctgtgcgcccgagagtgggaagttgtgcgcccggaccaatggaattgcgagtctccaatacatcttgtgagaatggatccctgttgcacttatattgctccagccaggaagtcctgtgccaaatcgtcaatgatctcagccctgaagtgcccagcaatgcaactttccattcctggcaggaaagaattcggcagaactacggcttttacattgggcttgggctcgcttttttgagtagcttcctcattggatcgtctgttatcctcaagaagaagggactgctacgactcgttgccactggcgcgacccgagccgtcgccgcaggggaggttgctaattttggtgcatatgcctttgcgcctgccactgtagtaactccactgggcgcactatcagtgctcatctcagctatcctctccagctactttcttcgggagagcttgaacctgctaggaaaactgggctgcgtgatctgtgtagccggttccacagtcatggtgatacacgcaccagaagaggagaaggtgaccacgattatggaaatggcctctaaaatgaaggataccggtttcattgttttcgccgtgctgctgctggtcagttgcttgattctcattttcgtgatagcaccaagatacggacagaggaacatattaatttacattattatctgctccgttatcggagctttctccgtcgctgccgttaagggcctcggcattaccatcaaaaatttttttcagggcctgcccgtcgtgcggcacccccttccctacatactgagtcttatacttgcactgagcctgagtacccaggtgaactttcttaatagggcactggacatctttaacacgtctttggtgttcccaatctactatgtattcttcaccactgtggttgtgacttccagtattattctgttcaaagaatggtactctatgagcgctgtcgatattgccggaaccctgagtggatttgtgacaattattctgggggtatttatgttacacgctttcaaggacttggatatttcttgtgcgagtctccctcacatgcataaaaaccccccgccttctcccgctcccgagcccacagtgataagactagaggacaagaacgtgttggtggacaacatagagcttgccagtacctcatcacctgaggagaagcctaaggtctttataatccacagctag

SEQ ID NO: 67887 - DNA, 1344 bp, Artificial Sequence
  derived and/or modified sequence
atgcctggggacagcagccctggcaccctgcccctgtgggatgccagcctgagcccccccctgggccctgaccccggcggcttcagccgggccagccacgccggggacaagagccggcccccagcccctgagctgggcagccctggagctgtgcggccccgggtgggcagctgtgcccctggccccatggagctgcgggtgagcaacaccagctgtgaaaatggcagcctgctgcacctgtactgcagcagccaggaggtgctgtgccagatcgtgaatgacctgagccctgaggtgcccagcaatgccaccttccacagctggcaggagcgcatccggcagaactacggcttctacatcggcctgggcctggccttcctgagcagcttcctgattggcagcagcgtcatcctgaagaagaagggcctgctgcggctggtggccactggagccaccagggctgtggccgccggggaggtggccaactttggagcctatgcctttgccccagccaccgtggtgacccccctgggcgccctgtctgtgctgatcagcgccatcctgagcagctacttcctgcgggagagcctgaacctgctgggcaagctgggctgtgtgatctgtgtggccggcagcacagtgatggtgatccacgcccctgaggaggagaaggtgaccaccatcatggagatggccagcaagatgaaggacaccggcttcatcgtgtttgctgtgctgctgctggtgtcctgcctgatcctgatcttcgtcatcgcccccaggtatggccagaggaacatcctgatctacatcatcatctgcagcgtgattggagccttctctgtggccgctgtgaagggcctgggcatcaccatcaagaacttcttccagggcctgcctgtggtgcgccaccccctgccctacatcctgagcctcatcctggccctgagcctgagcacccaggtgaacttcctgaacagagccctggacatcttcaacaccagcctggtgttccccatctactacgtgttcttcaccaccgtggtggtgaccagcagcatcatcctcttcaaggagtggtacagcatgtctgctgtggacattgctggcaccctgagcggctttgtgaccatcatcctgggcgtcttcatgctgcacgccttcaaggacctggacatcagctgtgccagcctgccccacatgcacaagaaccccccacccagccctgcccctgagcccaccgtcatccggctggaggacaagaatgtgctggtggacaacatcgagctggccagcaccagcagccctgaggagaagcccaaggtgttcatcatccacagctag

SEQ ID NO: 67888 - DNA, 1344 bp, Artificial Sequence
  derived and/or modified sequence
atgcccggcgacagcagccccggcaccctgcccctgtgggacgccagtctgtccccacctctgggaccagacccgggcgggttcagcagggcaagccacgccggtgacaagtccaggccaccggcacccgaactggggagtccaggcgccgtcagaccgcgtgtcggttcatgtgcgccaggccctatggagctgcgtgtgagcaacaccagttgcgaaaacgggagcctgctccatttatactgctccagccaggaggtgttgtgccagatcgtcaatgatctttcccctgaggtgcctagcaacgccacctttcactcctggcaagagaggatcaggcagaactacggattctacatagggttgggattggcatttttgtccagcttcctgatcgggtccagtgtaatcttgaaaaaaaagggcctgctgagactggtcgccaccggagcaactcgcgcagtggctgctggtgaggtcgcaaatttcggtgcctatgccttcgcccccgcaaccgtggtgactccactaggcgctctgagcgtccttatcagcgccattctgtcttcatattttttaagggagtcgttgaacctcctgggcaagcttggttgcgtgatttgtgtcgccgggtcgacagttatggtgatccacgctccagaggaagagaaggttactacaattatggagatggcttccaagatgaaggacactggatttattgtctttgccgttctcctacttgtcagttgcttgatactcattttcgtcattgcccctagatacggtcagcggaatatcctgatctatatcattatttgctctgtgatcggcgcctttagcgtggcagcggtaaagggtctcggcattaccataaaaaatttttttcaggggcttcctgtcgttcgacaccccctcccctacatactatccttaatattggctttgagcctgagcacccaggttaacttcctcaaccgcgccctcgacattttcaatacctccctcgtgtttcctatatactacgtattcttcacaacagtggtggtaacctcttccattatcctgttcaaggaatggtactcgatgagtgccgtggacattgccggcacattgtctggcttcgtaacgattatcctgggtgtatttatgctacacgcattcaaggacctggacattagctgcgcttcgttgccccatatgcataaaaaccctccaccaagcccagcccccgagcctaccgtgatcaggctcgaggataaaaacgtcctggttgataacatcgagctggcatctacgtcaagcccagaggagaagcctaaagtcttcatcatccattcatag

SEQ ID NO: 67889 - DNA, 1600 bp, Artificial Sequence
  derived and/or modified sequence
agcacggggcggtgactccagagctgggagcctggcagcgtcctcaccccaggaaggcatgcgcccctctgcgggcggccccagccctgggccccctgcccccggaattgcccaagatgccgggtgactcctccccggggactctcccactctgggacgcgtcactctccccacccctgggtccggaccccggcggcttctcgcgcgcgagccacgcgggggacaagtcgcggccacctgctccggagctggggagcccgggcgccgtccgcccgcgcgtcggttcgtgtgccccgggccccatggagctgcgggtcagcaacaccagctgcgagaacggttccctgctccacctctactgctcctcccaagaagtcctgtgccagattgtcaatgacctcagccctgaggtgcccagcaatgccacctttcacagctggcaggaaagaatcaggcagaactatggcttctacatcggcctgggcctggcattcctgtctagcttcctcatcggcagcagcgtcatcctcaagaagaaaggcctcttgcgactcgtggccacgggagccactcgagctgtggctgctggagaagttgccaactttggagcctacgcatttgcacctgcaacagtcgtcacgcctctgggagcgctgagtgtcctcataagtgccatcctctcctcatatttcctgagggagagtctgaacctgctggggaagctgggctgtgtgatctgtgtggccggaagcacagtgatggtgatacatgctcctgaggaagagaaggtcactaccatcatggagatggcttccaagatgaaagacacagggttcatcgtgtttgctgtgcttctgctggtgtcatgcctcatcctcatctttgtcattgccccacgttacgggcaaaggaatatcctcatctacatcatcatctgctctgtgatcggggccttctctgtggctgctgtcaaggggctgggcatcaccatcaagaacttcttccaggggctgccagttgtccggcacccgctcccctacatcctgtccctcatcctggcactgtccctcagcactcaggtcaacttcctcaacagagcactggacattttcaacacttccctggtgttccccatctactacgtgttcttcaccacggtggtcgttacctcgtccatcatcctcttcaaggagtggtacagcatgtctgctgtggacattgcaggcaccctctcgggctttgtcaccatcatcttgggcgtgttcatgctgcatgctttcaaagacctggacatcagctgcgccagcttgccccacatgcacaaaaacccacccccttctcccgccccggaacccactgttattagactggaagacaagaacgtccttgtggacaatatagaacttgccagcacctcatcaccagaagagaaacccaaagtatttataatccattcctgaagcttggaatatgtgagtgagaggatgagtccgatggtacagcctgccctcccaatttcaaaaccacctggttattttccagtgcaactgttaccaatgggctctcttttcttgagaagttcatttatacctcatcactg

SEQ ID NO: 67890 - DNA, 1344 bp, Artificial Sequence
  derived and/or modified sequence
atgcccggagacagttctcctggaactctcccactctgggacgcaagtttatctcccccacttggtcccgatccaggcggattctcacgcgctagccacgcaggcgacaagtcccggcctccagccccagagctggggtccccgggtgcagtcaggcccagggtcggcagctgtgcaccgggtccgatggagctccgggtgagcaacacctcatgtgaaaatggctccctgctgcatctttactgttcctcccaggaggtgctttgccagattgttaatgatttatcaccagaagtaccaagcaacgccaccttccatagttggcaagagcgtatccgccagaactacggcttctatatcgggctgggcctggcatttttaagctccttcctgataggcagttccgtgattcttaagaagaaaggcctgcttagacttgtggccaccggcgcaacccgggcagtggcagcaggggaagtcgcgaactttggcgcttacgccttcgcccctgccaccgtggtgaccccgcttggcgcattgtcagtcttgatttcagcaattcttagctcctattttttgcgagagtcactgaatctattggggaagttgggctgtgttatttgcgtagcagggagcaccgtgatggtaatccatgctcctgaggaggagaaggtgacaacaatcatggaaatggccagcaaaatgaaggacactggatttattgttttcgccgtcctgctactcgtaagctgccttatcctcatatttgtgatcgcaccccgatatgggcagcggaatatcttaatttacattatcatctgctcagtcataggcgctttcagtgttgccgctgtgaaagggcttggcattacaataaagaatttctttcagggcctccctgtggtcaggcaccccctgccctacatcctgagtttaatcctggctctatctctgtccactcaagtcaatttccttaatcgggcattggacatttttaatacttcccttgtcttcccaatttactacgtctttttcaccactgtggtggtgaccagctcaattatcctgtttaaagagtggtattccatgtctgctgttgatattgccggaactctaagcggtttcgttacgatcattctcggtgtgttcatgctgcacgcattcaaagatctcgatatctcctgtgcatcactccctcatatgcataagaacccaccaccttcccccgctccagagcccacggtgatccgccttgaggacaagaatgtgctcgttgacaatattgaactcgcctccacttctagccctgaagaaaaacccaaggtgtttataattcactcctag

SEQ ID NO: 67891 - DNA, 1344 bp, Artificial Sequence
  derived and/or modified sequence
atgcccggcgacagcagccccggcaccctgcccctgtgggacgccagcctgagcccccccctgggccccgaccccggcggcttcagcagagccagccacgccggcgacaagagcagaccccccgcccccgagctgggcagccccggcgccgtgagacccagagtgggcagctgcgcccccggccccatggagctgagagtgagcaacaccagctgcgagaacggcagcctgctgcacctgtactgcagcagccaggaggtgctgtgccagatcgtgaacgacctgagccccgaggtgcccagcaacgccaccttccacagctggcaggagagaatcagacagaactacggcttctacatcggcctgggcctggccttcctgagcagcttcctgatcggcagcagcgtgatcctgaagaagaagggcctgctgagactggtggccaccggcgccaccagagccgtggccgccggcgaggtggccaacttcggcgcctacgccttcgcccccgccaccgtggtgacccccctgggcgccctgagcgtgctgatcagcgccatcctgagcagctacttcctgagagagagcctgaacctgctgggcaagctgggctgcgtgatctgcgtggccggcagcaccgtgatggtgatccacgcccccgaggaggagaaggtgaccaccatcatggagatggccagcaagatgaaggacaccggcttcatcgtgttcgccgtgctgctgctggtgagctgcctgatcctgatcttcgtgatcgcccccagatacggccagagaaacatcctgatctacatcatcatctgcagcgtgatcggcgccttcagcgtggccgccgtgaagggcctgggcatcaccatcaagaacttcttccagggcctgcccgtggtgagacaccccctgccctacatcctgagcctgatcctggccctgagcctgagcacccaggtgaacttcctgaacagagccctggacatcttcaacaccagcctggtgttccccatctactacgtgttcttcaccaccgtggtggtgaccagcagcatcatcctgttcaaggagtggtacagcatgagcgccgtggacatcgccggcaccctgagcggcttcgtgaccatcatcctgggcgtgttcatgctgcacgccttcaaggacctggacatcagctgcgccagcctgccccacatgcacaagaaccccccccccagccccgcccccgagcccaccgtgatcagactggaggacaagaacgtgctggtggacaacatcgagctggccagcaccagcagccccgaggagaagcccaaggtgttcatcatccacagctag

SEQ ID NO: 67892 - protein, 879 aa, Artificial Sequence
  derived and/or modified sequence
MDPTAGSKKEPGGGAATEEGVNRIAVPKPPSIEEFSIVKPISRGAFGKVYLGQKGGKLYAVKVVKKADMINKNMTHQVQAERDALALSKSPFIVHLYYSLQSANNVYLVMEYLIGGDVKSLLHIYGYFDEEMAVKYISEVALALDYLHRHGIIHRDLKPDNMLISNEGHIKLTDFGLSKVTLNRDINMMDILTTPSMAKPRQDYSRTPGQVLSLISSLGFNTPIAEKNQDPANILSACLSETSQLSQGLVCPMSVDQKDTTPYSSKLLKSCLETVASNPGMPVKCLTSNLLQSRKRLATSSASSQSHTFISSVESECHSSPKWEKDCQESDEALGPTMMSWNAVEKLCAKSANAIETKGFNKKDLELALSPIHNSSALPTTGRSCVNLAKKCFSGEVSWEAVELDVNNINMDTDTSQLGFHQSNQWAVDSGGISEEHLGKRSLKRNFELVDSSPCKKIIQNKKTCVEYKHNEMTNCYTNQNTGLTVEVQDLKLSVHKSQQNDCANKENIVNSFTDKQQTPEKLPIPMIAKNLMCELDEDCEKNSKRDYLSSSFLCSDDDRASKNISMNSDSSFPGISIMESPLESQPLDSDRSIKESSFEESNIEDPLIVTPDCQEKTSPKGVENPAVQESNQKMLGPPLEVLKTLASKRNAVAFRSFNSHINASNNSEPSRMNMTSLDAMDISCAYSGSYPMAITPTQKRRSCMPHQQTPNQIKSGTPYRTPKSVRRGVAPVDDGRILGTPDYLAPELLLGRAHGPAVDWWALGVCLFEFLTGIPPFNDETPQQVFQNILKRDIPWPEGEEKLSDNAQSAVEILLTIDDTKRAGMKELKRHPLFSDVDWENLQHQTMPFIPQPDDETDTSYFEARNTAQHLTVSGFSL

SEQ ID NO: 67893 - DNA, 2640 bp, Artificial Sequence
  derived and/or modified sequence
atggatccaaccgccggttcgaagaaagaacccggcggaggagccgcaaccgaagaaggggtaaaccgcattgcggtacctaagccccccagcattgaggagttcagcatcgttaagccaatctccagaggggcattcggtaaggtctatctgggacagaaggggggaaaactgtatgctgtcaaggttgtcaaaaaagcggacatgatcaacaagaatatgacccaccaagtgcaagccgagcgggacgcactagcactatccaagagcccattcatcgtccacctgtattacagtctacagtctgctaacaatgtttatctcgtcatggagtatctgattggcggcgacgttaagtctttgcttcatatctatggctattttgacgaggagatggcagtaaaatatatctcagaggtggcgttggctctcgattaccttcacaggcatggtattattcatagagacctcaaacccgacaacatgttgatcagcaacgaaggtcacatcaaacttactgatttcggcctgtcgaaagtgacacttaacagagatattaacatgatggatatccttactaccccatctatggccaagccacgacaggattactctagaaccccaggacaggtgctctctctgataagctcactgggtttcaacacccctatcgctgaaaagaatcaagatcctgccaacatcctctccgcctgtctgtctgaaacttcacagttaagccagggtctcgtgtgtcctatgtcagtggatcaaaaagacaccacaccgtattctagcaaacttctgaagtcatgcctggagacagtggctagtaacccaggtatgccagtaaagtgcctcacatcaaatctcttacagagtcggaagcgtctggcgacaagctcagccagtagtcagtcccacacattcataagttccgtggaaagtgagtgccactcaagtccaaagtgggagaaggattgtcaagaaagtgatgaagccttggggcccactatgatgtcttggaacgctgtcgaaaaactttgcgcaaagtctgccaatgccattgaaacaaaagggttcaataagaaagacctcgagttggctctgtcaccgattcataacagctccgccctccctaccactgggcgcagttgcgtcaacctggccaaaaaatgcttttccggggaagtatcttgggaggctgtggagttggatgtaaacaatattaacatggacactgacacgagtcagttgggatttcatcaatcaaaccagtgggctgtcgacagcggcggcatcagcgaagagcacctaggaaagagatccttgaaacggaattttgaattggtcgactcaagcccctgtaaaaagattatacagaacaagaagacgtgcgtggaatataaacataacgagatgactaattgctacactaaccagaatacaggccttaccgtagaggtccaggatttgaagctgagcgtacataaaagccagcaaaacgattgtgctaataaggagaacattgtcaattcgtttacggacaaacagcagacacctgagaaactgcctattcctatgatcgccaagaaccttatgtgcgagctggatgaggactgcgagaagaacagtaaacgagactacctctccagctccttcctctgttctgacgatgatcgggcaagtaagaacatttccatgaacagtgacagttctttccctgggatctccatcatggaatcacccttggaaagccagccactggactcagatcgatccatcaaagagagtagctttgaggagtcgaacatcgaagacccactgatcgtcacccccgactgccaggagaaaacttctcccaaaggtgtggagaatcctgccgtgcaagagagcaaccaaaagatgctcggtccaccacttgaagtgctcaagacgctcgctagcaagcgcaacgccgtggccttcaggtcttttaattcacatattaatgccagcaacaactccgagccttcacgtatgaatatgactagcctggacgcaatggacatttcttgtgcttacagtgggtcatatcccatggcaatcacccctacacaaaagcggagaagctgcatgcctcaccaacagacccccaatcagataaagagcggaactccatatagaacccccaaatccgttaggagaggtgtggcacctgtcgatgacgggcgtattttggggactcctgactacctggcccctgaactcttgcttggaagggcacacgggcccgccgtggactggtgggcgctgggtgtatgcctgtttgagttcctgacaggtattccccctttcaatgacgaaacaccccagcaagtgtttcaaaacatcttaaaaagggacatcccctggcccgagggcgaggaaaagctgtctgacaacgctcagtccgctgtggagatactgctcacaattgacgataccaaacgtgcggggatgaaagaactcaagagacacccgctgttttcagatgtagactgggaaaatctgcagcaccagaccatgccctttattccccaaccagatgatgaaacggatactagttacttcgaagcccgtaacacagcacaacatctaacagtttctgggtttagtttgtag

SEQ ID NO: 67894 - DNA, 2640 bp, Artificial Sequence
  derived and/or modified sequence
atggaccccacagctggcagcaagaaggagcccggcggcggggccgccacagaggagggcgtgaacagaattgctgtgcccaagcccccatccattgaggagttcagcatcgtgaagcccatcagcagaggagccttcggcaaggtgtacctgggccagaagggcggcaagctgtatgctgtgaaggtggtgaagaaggctgacatgatcaacaagaacatgacccaccaggtgcaggccgagagagatgccctggccctgagcaagagccccttcatcgtgcacctgtactacagcctgcagagcgccaacaacgtgtacctggtgatggagtacctgattggaggagatgtgaagagcctgctgcacatctacggctactttgatgaggagatggctgtgaagtacatcagcgaggtggccctggccctggactacctgcaccgccacggcatcatccaccgggacctgaagccagacaacatgctgatcagcaatgaaggccacatcaagctgacagactttggcctgagcaaggtgaccctgaacagagacatcaacatgatggacatcctgaccacccccagcatggccaagccccggcaggactacagcaggaccccaggccaggtgctgagcctcatcagcagcctgggcttcaacacccccatcgccgagaagaaccaggaccctgccaacatcctgagcgcctgcctgtctgagaccagccagctgagccagggcctggtgtgccccatgtctgtggaccagaaggacaccaccccctacagcagcaagctgctgaagagctgcctggagaccgtggccagcaaccctggcatgcctgtgaagtgcctgaccagcaacctgctgcagagcaggaagaggctggccaccagcagcgccagcagccagagccacaccttcatcagctctgtggagagcgagtgccacagcagccccaagtgggagaaggactgccaggagagtgatgaggccctgggccccaccatgatgtcctggaatgctgtggagaagctgtgtgccaagagcgccaatgccatcgagaccaagggcttcaacaagaaggacctggagctggccctgagccccatccacaacagcagcgccctgcccaccaccggccgcagctgtgtgaacctggccaagaagtgcttcagcggggaggtgtcctgggaggccgtggagctggatgtgaacaacatcaacatggacacagacaccagccagctgggcttccaccagagcaaccagtgggccgtggacagcggcggcatcagcgaggagcacctgggcaagaggagcctgaagaggaactttgagctggtggacagcagcccctgcaagaagatcatccagaacaagaagacctgtgtggagtacaagcacaatgagatgaccaactgctacaccaaccagaacacaggcctgactgtggaggtgcaggacctgaagctgtctgtgcacaagagccagcagaatgactgtgccaacaaggaaaatattgtgaacagcttcacagacaagcagcagaccccagagaagctgcccatccccatgattgccaagaacctgatgtgtgagctggatgaggactgtgagaagaacagcaagagggactacctgagcagcagcttcctgtgcagtgatgatgaccgggccagcaagaacatctccatgaacagcgacagcagcttccctggcatcagcatcatggagagccccctggagagccagcccctggacagcgacaggagcatcaaggagagcagctttgaggagagcaacatcgaggaccccctgattgtgaccccagactgccaggagaagaccagccccaagggcgtggagaacccagctgtgcaggagagcaaccagaagatgctgggcccccccctggaggtgctgaagaccctggccagcaagagaaatgctgtggccttccgctccttcaacagccacatcaatgccagcaacaacagcgagcccagcaggatgaacatgaccagcctggatgccatggacatcagctgtgcctacagcggcagctaccccatggccatcacccccacccagaagagaagaagctgcatgccccaccagcagacccccaaccagatcaagagcggcaccccctaccgcacccccaagtctgtgagaagaggagtggcccctgtggatgatggccgcatcctgggcaccccagactacctggcccctgagctgctgctgggccgggcccacggccctgctgtggactggtgggccctgggcgtgtgcctgtttgagttcctgaccggcatcccccccttcaatgatgagaccccccagcaggtgttccagaacatcctgaagagggacatcccctggccagagggggaggagaagctgagtgacaatgcccagagcgctgtggagatcctgctgaccattgatgacaccaagagagctggcatgaaggagctgaagaggcaccccctcttcagtgatgtggactgggagaacctgcagcaccagaccatgcccttcatcccccagccagatgatgaaacagacaccagctactttgaggccaggaacacagcccagcacctgactgtgtctggcttcagcctgtag

SEQ ID NO: 67895 - DNA, 3080 bp, Artificial Sequence
  derived and/or modified sequence
gggagtggctgctcgcggaggggcagtgtctgcggggccgctgtatgctgtccagcgatggatcccaccgcgggaagcaagaaggagcctggaggaggcgcggcgactgaggagggcgtgaataggatcgcagtgccaaaaccgccctccattgaggaattcagcatagtgaagcccattagccggggcgccttcgggaaagtgtatctggggcagaaaggcggcaaattgtatgcagtaaaggttgttaaaaaagcagacatgatcaacaaaaatatgactcatcaggtccaagctgagagagatgcactggcactaagcaaaagcccattcattgtccatttgtattattcactgcagtctgcaaacaatgtctacttggtaatggaatatcttattgggggagatgtcaagtctctcctacatatatatggttattttgatgaagagatggctgtgaaatatatttctgaagtagcactggctctagactaccttcacagacatggaatcatccacagggacttgaaaccggacaatatgcttatttctaatgagggtcatattaaactgacggattttggcctttcaaaagttactttgaatagagatattaatatgatggatatccttacaacaccatcaatggcaaaacctagacaagattattcaagaaccccaggacaagtgttatcgcttatcagctcgttgggatttaacacaccaattgcagaaaaaaatcaagaccctgcaaacatcctttcagcctgtctgtctgaaacatcacagctttctcaaggactcgtatgccctatgtctgtagatcaaaaggacactacgccttattctagcaaattactaaaatcatgtcttgaaacagttgcctccaacccaggaatgcctgtgaagtgtctaacttctaatttactccagtctaggaaaaggctggccacatccagtgccagtagtcaatcccacaccttcatatccagtgtggaatcagaatgccacagcagtcccaaatgggaaaaagattgccaggaaagtgatgaagcattgggcccaacaatgatgagttggaatgcagttgaaaagttatgcgcaaaatctgcaaatgccattgagacgaaaggtttcaataaaaaggatctggagttagctctttctcccattcataacagcagtgcccttcccaccactggacgctcttgtgtaaaccttgctaaaaaatgcttctctggggaagtttcttgggaagcagtagaactggatgtaaataatataaatatggacactgacacaagtcagttaggtttccatcagtcaaatcagtgggctgtggattctggtgggatatctgaagagcaccttgggaaaagaagtttaaaaagaaattttgagttggttgactccagtccttgtaaaaaaattatacagaataaaaaaacttgtgtagagtataagcataacgaaatgacaaattgttatacaaatcaaaatacaggcttaacagttgaagtgcaggaccttaagctatcagtgcacaaaagtcaacaaaatgactgtgctaataaggagaacattgtcaattcttttactgataaacaacaaacaccagaaaaattacctataccaatgatagcaaaaaaccttatgtgtgaactcgatgaagactgtgaaaagaatagtaagagggactacttaagttctagttttctatgttctgatgatgatagagcttctaaaaatatttctatgaactctgattcatcttttcctggaatttctataatggaaagtccattagaaagtcagcccttagattcagatagaagcatcaaagaatcctcttttgaagaatcaaatattgaagatccacttattgtaacaccagattgccaagaaaagacctcaccaaaaggtgtcgagaaccctgctgtacaagagagtaaccaaaaaatgttaggtcctcctttggaggtgctgaaaacgttagcctctaaaagaaatgctgttgcttttcgaagttttaacagtcatattaatgcatccaataactcagaaccatccagaatgaacatgacttctttagatgcaatggatatttcgtgtgcctacagtggttcatatcccatggctataacccctactcaaaaaagaagatcctgtatgccacatcagcagaccccaaatcagatcaagtcgggaactccataccgaactccgaagagtgtgagaagaggggtggcccccgttgatgatgggcgaattctaggaaccccagactaccttgcacctgagctgttactaggcagggcccatggtcctgcggtagactggtgggcacttggagtttgcttgtttgaatttctaacaggaattccccctttcaatgatgaaacaccacaacaagtattccagaatattctgaaaagagatatcccttggccagaaggtgaagaaaagttatctgataatgctcaaagtgcagtagaaatacttttaaccattgatgatacaaagagagctggaatgaaagagctaaaacgtcatcctctcttcagtgatgtggactgggaaaatctgcagcatcagactatgcctttcatcccccagccagatgatgaaacagatacctcctattttgaagccaggaatactgctcagcacctgactgtatctggatttagtctgtagcacaaaaattttccttttagtctagccttgtgttatagaatgaacttgcataattatatactccttaatactagattgatctaagggggaaagatcattatttaacctagttcaatgtgcttttaatgtacgttacagctttcacagagttaaaaggctgaaaggaatatagtcagtaatttatcttaacctcaaaactgtatataaatcttcaaagcttttttcatttatttattttgtttattgcactttatgaaaactgaagcatcaataaaattagaggacactattgagagtgagccactagcttgattttctttctcctctgatttcagttcactgttcagtttagcattaaaataataaaataatcatacagttcc

SEQ ID NO: 67896 - DNA, 2640 bp, Artificial Sequence
  derived and/or modified sequence
atggaccccaccgccggcagcaagaaggagcccggcggcggcgccgcaaccgaggaaggcgtgaacagaatcgccgtccccaaacccccctccatagaagagtttagcattgttaaaccaatctcaaggggcgccttcggcaaggtgtatcttggtcaaaaaggggggaaattatatgcggtaaaagtggtcaagaaagccgacatgattaataaaaatatgactcaccaggtacaggctgagagggatgctctggcgctgtctaagtctccttttatcgtgcatttatattatagcctccagagtgcgaataatgtttaccttgtgatggaatatctgattgggggggacgtcaagtccctcttacacatctatggatactttgatgaggagatggccgtgaaatacattagtgaagtcgctttggctctcgattacctacaccgacacggaatcattcatagggatctcaaaccagacaacatgttgataagcaacgaggggcacataaagcttacagactttggactgtccaaggtgacactcaacagagatataaatatgatggacattttgacaacgccaagcatggccaagcccaggcaggactacagcagaacaccgggccaggtgttaagcctgatctcttcgctcgggtttaatacccccatagccgagaagaaccaggatcctgctaacatcctaagcgcttgtctgtcggagacctcacagttatcccaagggctcgtttgtcctatgtctgtggaccagaaggacaccacaccctatagcagcaaactgctgaagtcatgtctggaaacagtggcgtcgaaccccggcatgcccgtgaagtgtcttactagtaaccttttacagagcagaaagcgccttgctacgtcttcagcttcttctcagagccatacgtttataagcagtgtggagtcggaatgccattctagcccaaagtgggagaaggattgccaggaaagcgatgaagctctcggccctacgatgatgtcctggaatgcggtcgaaaaactgtgtgccaagtccgcgaacgctattgagacgaaggggtttaataagaaggacttggagttagctttgagtcctattcacaattcttcagctctgcccaccactgggcgctcctgtgtgaatttagcaaaaaagtgcttttccggagaggtgagctgggaggcggtggagttggacgtcaataatattaatatggacactgacacctcacagttaggctttcaccagtcgaatcagtgggccgtggactccggaggcataagcgaggagcatctcgggaagaggtccctcaagaggaattttgagttggtggacagctcaccatgtaagaagatcatccagaacaagaaaacctgcgtggaatacaaacataacgaaatgaccaactgctatacaaaccagaacacgggtctgactgttgaagtccaggatttaaagttatctgtgcacaaaagccagcagaatgattgcgctaacaaggagaacatcgtaaactctttcaccgataagcagcagacccccgagaagctgcccatccccatgatagcaaaaaatctcatgtgtgaacttgacgaggattgtgaaaagaactcaaagcgagactacctgagctcgagctttctgtgtagtgacgatgatagagctagtaagaacatcagcatgaacagcgacagctcttttcctggcatttctattatggaatctccactggagtctcagcccctggattcggatagaagcattaaagagagctcttttgaggaaagtaatatagaagatcccctaattgtgacaccggactgtcaagaaaagacttcccccaaaggcgtcgaaaatccagctgttcaggaatctaaccagaagatgctgggccctcccctggaagtcctgaagactctggcttccaagagaaatgccgttgctttccgatctttcaattcccacataaacgcatccaataattcagaaccctccaggatgaatatgacgtcattggacgccatggacatatcatgtgcttattcaggaagctacccaatggccattactcccacgcagaaacggcgctcgtgtatgccgcatcaacagacacccaaccaaatcaagagcggcacaccctaccgaactccaaaaagcgtcaggcgtggtgtggctcccgtggacgacggccgtatccttggaacgccagattatctggcgcctgagcttttgctgggccgcgcacacggaccagcagtggattggtgggctttgggtgtgtgcctgttcgagtttctgacaggcatcccccctttcaacgacgagaccccccagcaagtcttccaaaatattcttaaaagagatatcccgtggcccgagggagaagaaaagctttcagataatgcacaaagcgcggtggagatcctcctgaccatcgatgataccaagagggcaggcatgaaggagcttaagcgtcaccctctcttctctgatgttgactgggagaacttgcaacatcaaactatgcctttcattccacagcctgatgacgagaccgatacatcctatttcgaggcaaggaataccgcacagcacctgacagtctcaggatttagcctgtag

SEQ ID NO: 67897 - DNA, 2640 bp, Artificial Sequence
  derived and/or modified sequence
atggatccaacagccggatccaaaaaagagccaggtggtggagccgctacagaggaaggagttaatcgcatcgcagttcctaagcctccctccattgaggagttcagcatcgtgaagccaatcagcagaggagcctttggtaaggtttacctcgggcagaaaggagggaagctgtatgctgtgaaagttgtgaaaaaagccgacatgataaataaaaatatgacgcaccaggtgcaagcagagcgggacgcgttggccctgtccaagtcaccattcattgtgcatctctactattccttgcagtccgccaacaacgtctatctggtgatggagtatcttattgggggagacgttaagtccttgcttcatatatacggctatttcgacgaagaaatggcggtaaagtatatttcagaggtcgcccttgctttggattacctgcatagacacggtatcatccacagagacctgaagcccgataatatgctgatcagtaatgaaggacacatcaaactgaccgatttcggcctgagcaaggttacactgaaccgggacatcaacatgatggacattctcactacacccagtatggcgaagcctcgccaagattattctcggacccccggacaggtgctgagtctgatctcaagcctaggatttaacactccaattgccgagaagaatcaagacccagctaatatcctatctgcttgcctctctgagaccagccaactttcccaggggcttgtttgcccaatgagcgtggaccagaaagacaccaccccatactcaagcaaacttttaaaatcttgcctggagaccgtggctagcaatcctggcatgcctgtgaagtgtctgacctccaacttgctgcaatcccgaaagcggctcgctacttctagcgcctcatcccagtctcatacgttcattagctctgtggagagcgagtgccactccagccctaaatgggagaaggactgccaggaaagtgacgaggcgctgggcccaacgatgatgagctggaacgcagtggagaaactgtgtgccaagtcagcaaacgctatcgaaactaagggattcaacaagaaagacttagagctggccctttccccaattcataattcttccgctctacccacaacaggccgtagttgtgttaatttggccaaaaagtgtttcagtggtgaagtaagctgggaagccgttgagcttgacgtgaataatatcaatatggacactgatacatcccagctcggcttccatcagtccaaccagtgggcagtcgacagcggaggaattagcgaggaacatctgggcaagcgaagccttaaaagaaacttcgaactggtagactctagcccctgcaaaaaaattattcagaataagaagacttgcgtcgaatacaaacacaacgagatgaccaactgctacactaaccaaaataccggcctcacagtggaggtccaggatctgaagctctctgtacacaaatcccagcagaatgattgtgccaataaggaaaacatcgtgaatagctttacagacaaacagcagacaccggaaaagctacctattccgatgattgcgaagaacttgatgtgcgagctggatgaggattgcgaaaagaacagtaaacgcgactacttatcaagctcattcctttgcagtgatgacgacagggcctcaaagaacatcagtatgaattccgatagcagctttccaggcattagcatcatggaaagcccactcgagagtcagcccctggactctgacagatctatcaaagaaagcagcttcgaagagtcaaacatcgaggaccccctgattgtcaccccagattgtcaggaaaagaccagtccaaaaggcgtcgagaatccggctgttcaggaatccaatcagaagatgcttgggcctcctctcgaggtattaaagacactagcctcaaaaaggaacgctgtcgccttccggtctttcaactcccatatcaacgcaagtaacaacagcgagccaagccgaatgaatatgacctcgctggatgccatggatatttcctgcgcgtactcaggtagttatccaatggccataacaccaactcaaaagcgcaggtcttgtatgcctcaccagcagactcctaatcagattaagagtggaaccccctatcggactccaaagagcgtgcgcagaggagtcgcgcctgtcgacgatgggaggatcttagggacacctgattacctggcaccagagctgctgctgggaagggcccacggacccgcagtcgattggtgggccttgggcgtttgtttatttgaattcctcacgggcatcccacccttcaacgacgagacacctcagcaggtgtttcagaacatcctcaaacgcgacatcccctggccagaaggagaagagaagctgtccgacaacgcgcaatctgccgtcgaaattttgctgactatcgatgataccaagcgcgctgggatgaaggaattgaaacgacacccactcttttcggacgtcgactgggagaatttgcagcaccaaactatgccattcattccccaaccagatgacgagactgacacttcttacttcgaagctcgcaatacggctcaacacctaacagtcagcggcttttccctctag

SEQ ID NO: 67898 - DNA, 2640 bp, Artificial Sequence
  derived and/or modified sequence
atggaccccaccgccggcagcaagaaggagcccggcggcggcgccgccaccgaggagggcgtgaacagaatcgccgtgcccaagccccccagcatcgaggagttcagcatcgtgaagcccatcagcagaggcgccttcggcaaggtgtacctgggccagaagggcggcaagctgtacgccgtgaaggtggtgaagaaggccgacatgatcaacaagaacatgacccaccaggtgcaggccgagagagacgccctggccctgagcaagagccccttcatcgtgcacctgtactacagcctgcagagcgccaacaacgtgtacctggtgatggagtacctgatcggcggcgacgtgaagagcctgctgcacatctacggctacttcgacgaggagatggccgtgaagtacatcagcgaggtggccctggccctggactacctgcacagacacggcatcatccacagagacctgaagcccgacaacatgctgatcagcaacgagggccacatcaagctgaccgacttcggcctgagcaaggtgaccctgaacagagacatcaacatgatggacatcctgaccacccccagcatggccaagcccagacaggactacagcagaacccccggccaggtgctgagcctgatcagcagcctgggcttcaacacccccatcgccgagaagaaccaggaccccgccaacatcctgagcgcctgcctgagcgagaccagccagctgagccagggcctggtgtgccccatgagcgtggaccagaaggacaccaccccctacagcagcaagctgctgaagagctgcctggagaccgtggccagcaaccccggcatgcccgtgaagtgcctgaccagcaacctgctgcagagcagaaagagactggccaccagcagcgccagcagccagagccacaccttcatcagcagcgtggagagcgagtgccacagcagccccaagtgggagaaggactgccaggagagcgacgaggccctgggccccaccatgatgagctggaacgccgtggagaagctgtgcgccaagagcgccaacgccatcgagaccaagggcttcaacaagaaggacctggagctggccctgagccccatccacaacagcagcgccctgcccaccaccggcagaagctgcgtgaacctggccaagaagtgcttcagcggcgaggtgagctgggaggccgtggagctggacgtgaacaacatcaacatggacaccgacaccagccagctgggcttccaccagagcaaccagtgggccgtggacagcggcggcatcagcgaggagcacctgggcaagagaagcctgaagagaaacttcgagctggtggacagcagcccctgcaagaagatcatccagaacaagaagacctgcgtggagtacaagcacaacgagatgaccaactgctacaccaaccagaacaccggcctgaccgtggaggtgcaggacctgaagctgagcgtgcacaagagccagcagaacgactgcgccaacaaggagaacatcgtgaacagcttcaccgacaagcagcagacccccgagaagctgcccatccccatgatcgccaagaacctgatgtgcgagctggacgaggactgcgagaagaacagcaagagagactacctgagcagcagcttcctgtgcagcgacgacgacagagccagcaagaacatcagcatgaacagcgacagcagcttccccggcatcagcatcatggagagccccctggagagccagcccctggacagcgacagaagcatcaaggagagcagcttcgaggagagcaacatcgaggaccccctgatcgtgacccccgactgccaggagaagaccagccccaagggcgtggagaaccccgccgtgcaggagagcaaccagaagatgctgggcccccccctggaggtgctgaagaccctggccagcaagagaaacgccgtggccttcagaagcttcaacagccacatcaacgccagcaacaacagcgagcccagcagaatgaacatgaccagcctggacgccatggacatcagctgcgcctacagcggcagctaccccatggccatcacccccacccagaagagaagaagctgcatgccccaccagcagacccccaaccagatcaagagcggcaccccctacagaacccccaagagcgtgagaagaggcgtggcccccgtggacgacggcagaatcctgggcacccccgactacctggcccccgagctgctgctgggcagagcccacggccccgccgtggactggtgggccctgggcgtgtgcctgttcgagttcctgaccggcatcccccccttcaacgacgagaccccccagcaggtgttccagaacatcctgaagagagacatcccctggcccgagggcgaggagaagctgagcgacaacgcccagagcgccgtggagatcctgctgaccatcgacgacaccaagagagccggcatgaaggagctgaagagacaccccctgttcagcgacgtggactgggagaacctgcagcaccagaccatgcccttcatcccccagcccgacgacgagaccgacaccagctacttcgaggccagaaacaccgcccagcacctgaccgtgagcggcttcagcctgtag

SEQ ID NO: 67899 - protein, 840 aa, Artificial Sequence
  derived and/or modified sequence
MDPTAGSKKEPGGGAATEEGVNRIAVPKPPSIEEFSIVKPISRGAFGKVYLGQKGGKLYAVKVVKKADMINKNMTHQVQAERDALALSKSPFIVHLYYSLQSANNVYLVMEYLIGGDVKSLLHIYGYFDEEMAVKYISEVALALDYLHRHGIIHRDLKPDNMLISNEGHIKLTDFGLSKVTLNRDINMMDILTTPSMAKPRQDYSRTPGQVLSLISSLGFNTPIAEKNQDPANILSACLSETSQLSQGLVCPMSVDQKDTTPYSSKLLKSCLETVASNPGMPVKCLTSNLLQSRKRLATSSASSQSHTFISSVESECHSSPKWEKDCQESDEALGPTMMSWNAVEKLCAKSANAIETKGFNKKDLELALSPIHNSSALPTTGRSCVNLAKKCFSGEVSWEAVELDVNNINMDTDTSQLGFHQSNQWAVDSGGISEEHLGKRSLKRNFELVDSSPCKKIIQNKKTCVEYKHNEMTNCYTNQNTGLTVEVQDLKLSVHKSQQNDCANKENIVNSFTDKQQTPEKLPIPMIAKNLMCELDEDCEKNSKRDYLSSSFLCSDDDRASKNISMNSDSSFPGISIMESPLESQPLDSDRSIKESSFEESNIEDPLIVTPDCQEKTSPKGVENPAVQESNQKMLGPPLEVLKTLASKRNAVAFRSFNSHINASNNSEPSRMNMTSLDAMDISCAYSGSYPMAITPTQKRRSCMPHQTPNQIKSGTPYRTPKSVRRGVAPVDDGRILGTPDYLAPELLLGRAHDIPWPEGEEKLSDNAQSAVEILLTIDDTKRAGMKELKRHPLFSDVDWENLQHQTMPFIPQPDDETDTSYFEARNTAQHLTVSGFSL

SEQ ID NO: 67900 - DNA, 2523 bp, Artificial Sequence
  derived and/or modified sequence
atggatccgacagccggttcaaaaaaggagcccggcggtggcgccgcaacagaggaaggtgtcaaccgcatcgccgtgcctaagcctccctccatcgaagagttctcaatcgttaaacccattagtagaggagccttcggcaaggtgtacctggggcagaaaggcggcaagctctatgctgtcaaggtcgttaagaaagccgatatgatcaataagaacatgacacaccaggtacaggccgaacgggatgcactcgcgctgtccaagagccctttcatagttcacctgtattactccctccagtccgctaataacgtttacttggtcatggagtatctcattggcggagatgtcaagtcccttctgcatatctatggctactttgacgaggagatggcagttaaatatatttccgaagtggctttggctctggactaccttcacagacacggaattattcacagagatctgaaaccagacaacatgcttatctccaacgagggtcacataaaactgacagactttggcctcagtaaggtgactctgaatcgcgacatcaatatgatggacatacttaccactcccagtatggccaaacctcgccaagattattcaagaacacccggccaagtgcttagcttaatttcttctctgggtttcaataccccaatagcagagaagaatcaggatcccgcgaacatcctgtcagcctgcctttctgaaacctctcagctttcccaggggctcgtgtgtcctatgtctgtggaccaaaaggacactacgccatacagctcaaagcttcttaaaagttgtctagaaactgtggccagcaaccccgggatgccagtgaaatgcctgacatctaatctcctgcaaagccgaaaaagactggctacatcatcagccagcagccagtctcacactttcatttcttccgtggaatcagagtgtcactccagcccgaaatgggagaaggactgccaggagtcggacgaggcacttggccccacaatgatgtcatggaacgcagtcgagaagctgtgtgctaaaagcgccaacgcaatcgaaacaaaggggttcaataaaaaggacttagaattggccctttcacccattcacaatagttccgcactaccgaccacggggcgttcttgtgtgaacctcgcaaaaaagtgtttttctggagaggtatcgtgggaggctgtcgagctggatgtcaacaatatcaacatggacacggacacctcccagctggggttccaccagtccaaccaatgggcagtggacagcgggggaatcagcgaggagcacctcggtaagcgatcacttaaaagaaactttgaacttgtggactcatcaccgtgcaagaaaattatacagaacaagaagacgtgtgttgaatacaagcacaacgaaatgactaactgttataccaaccaaaacactgggctgacggtggaggtccaagatctgaagctttcagttcataagtcccagcagaacgactgcgcaaacaaggaaaacatcgtgaactcctttaccgacaagcagcagacccctgagaagctccccatccccatgatagctaaaaacctcatgtgtgaactcgatgaagattgtgaaaagaacagtaagcgcgattatctgtcgagcagtttcctctgttcagacgatgatcgcgcgagtaaaaacatcagtatgaatagtgactccagctttccgggcatttccatcatggagagtccactcgagagccagcctctagatagcgacagaagcatcaaggagtcaagctttgaggaaagcaacatcgaggacccactgattgtgacccctgactgtcaggaaaagactagcccaaaaggcgtggaaaatcctgctgttcaggagagcaatcagaagatgctgggaccgcctctggaagttcttaaaacactggcttcaaaacgtaatgccgtagccttcagaagctttaatagtcacatcaatgcctccaacaattctgaaccgtcccgcatgaacatgacatccctggatgcgatggacatctcctgtgcatatagtgggagctatccgatggccatcacacctactcagaaacgacgatcctgtatgccacaccaaactccaaaccaaattaagagtggtaccccttatcgcactcctaagagtgtccgacgtggggtagctcctgtcgatgacggcagaattcttggtacacccgactatctcgccccggagttgctactgggtcgggcccacgatatcccatggcccgagggtgaggaaaaactgtccgacaatgcccaaagcgccgtggaaattctccttactattgatgacaccaaacgcgccggaatgaaagagctcaaacgccaccctctgttctctgacgtggattgggagaacctgcaacatcagacaatgccatttattcctcagcccgacgacgagaccgacacttcctatttcgaggcccgtaacactgcccagcacctgacagtgagcggattcagcttgtag

SEQ ID NO: 67901 - DNA, 2523 bp, Artificial Sequence
  derived and/or modified sequence
atggaccccacagctggcagcaagaaggagcccggcggcggggccgccacagaggagggcgtgaacagaattgctgtgcccaagcccccatccattgaggagttcagcatcgtgaagcccatcagcagaggagccttcggcaaggtgtacctgggccagaagggcggcaagctgtatgctgtgaaggtggtgaagaaggctgacatgatcaacaagaacatgacccaccaggtgcaggccgagagagatgccctggccctgagcaagagccccttcatcgtgcacctgtactacagcctgcagagcgccaacaacgtgtacctggtgatggagtacctgattggaggagatgtgaagagcctgctgcacatctacggctactttgatgaggagatggctgtgaagtacatcagcgaggtggccctggccctggactacctgcaccgccacggcatcatccaccgggacctgaagccagacaacatgctgatcagcaatgaaggccacatcaagctgacagactttggcctgagcaaggtgaccctgaacagagacatcaacatgatggacatcctgaccacccccagcatggccaagccccggcaggactacagcaggaccccaggccaggtgctgagcctcatcagcagcctgggcttcaacacccccatcgccgagaagaaccaggaccctgccaacatcctgagcgcctgcctgtctgagaccagccagctgagccagggcctggtgtgccccatgtctgtggaccagaaggacaccaccccctacagcagcaagctgctgaagagctgcctggagaccgtggccagcaaccctggcatgcctgtgaagtgcctgaccagcaacctgctgcagagcaggaagaggctggccaccagcagcgccagcagccagagccacaccttcatcagctctgtggagagcgagtgccacagcagccccaagtgggagaaggactgccaggagagtgatgaggccctgggccccaccatgatgtcctggaatgctgtggagaagctgtgtgccaagagcgccaatgccatcgagaccaagggcttcaacaagaaggacctggagctggccctgagccccatccacaacagcagcgccctgcccaccaccggccgcagctgtgtgaacctggccaagaagtgcttcagcggggaggtgtcctgggaggccgtggagctggatgtgaacaacatcaacatggacacagacaccagccagctgggcttccaccagagcaaccagtgggccgtggacagcggcggcatcagcgaggagcacctgggcaagaggagcctgaagaggaactttgagctggtggacagcagcccctgcaagaagatcatccagaacaagaagacctgtgtggagtacaagcacaatgagatgaccaactgctacaccaaccagaacacaggcctgactgtggaggtgcaggacctgaagctgtctgtgcacaagagccagcagaatgactgtgccaacaaggaaaatattgtgaacagcttcacagacaagcagcagaccccagagaagctgcccatccccatgattgccaagaacctgatgtgtgagctggatgaggactgtgagaagaacagcaagagggactacctgagcagcagcttcctgtgcagtgatgatgaccgggccagcaagaacatctccatgaacagcgacagcagcttccctggcatcagcatcatggagagccccctggagagccagcccctggacagcgacaggagcatcaaggagagcagctttgaggagagcaacatcgaggaccccctgattgtgaccccagactgccaggagaagaccagccccaagggcgtggagaacccagctgtgcaggagagcaaccagaagatgctgggcccccccctggaggtgctgaagaccctggccagcaagagaaatgctgtggccttccgctccttcaacagccacatcaatgccagcaacaacagcgagcccagcaggatgaacatgaccagcctggatgccatggacatcagctgtgcctacagcggcagctaccccatggccatcacccccacccagaagagaagaagctgcatgccccaccagacccccaaccagatcaagagcggcaccccctaccgcacccccaagtctgtgcggcggggcgtggcccctgtggatgatggccgcatcctgggcaccccagactacctggcccctgagctgctgctgggccgggcccatgacatcccctggccagagggggaggagaagctgagtgacaatgcccagagcgctgtggagatcctgctgaccattgatgacaccaagagagctggcatgaaggagctgaagaggcaccccctcttcagtgatgtggactgggagaacctgcagcaccagaccatgcccttcatcccccagccagatgatgaaacagacaccagctactttgaggccaggaacacagcccagcacctgactgtgtctggcttcagcctgtag

SEQ ID NO: 67902 - DNA, 2963 bp, Artificial Sequence
  derived and/or modified sequence
gggagtggctgctcgcggaggggcagtgtctgcggggccgctgtatgctgtccagcgatggatcccaccgcgggaagcaagaaggagcctggaggaggcgcggcgactgaggagggcgtgaataggatcgcagtgccaaaaccgccctccattgaggaattcagcatagtgaagcccattagccggggcgccttcgggaaagtgtatctggggcagaaaggcggcaaattgtatgcagtaaaggttgttaaaaaagcagacatgatcaacaaaaatatgactcatcaggtccaagctgagagagatgcactggcactaagcaaaagcccattcattgtccatttgtattattcactgcagtctgcaaacaatgtctacttggtaatggaatatcttattgggggagatgtcaagtctctcctacatatatatggttattttgatgaagagatggctgtgaaatatatttctgaagtagcactggctctagactaccttcacagacatggaatcatccacagggacttgaaaccggacaatatgcttatttctaatgagggtcatattaaactgacggattttggcctttcaaaagttactttgaatagagatattaatatgatggatatccttacaacaccatcaatggcaaaacctagacaagattattcaagaaccccaggacaagtgttatcgcttatcagctcgttgggatttaacacaccaattgcagaaaaaaatcaagaccctgcaaacatcctttcagcctgtctgtctgaaacatcacagctttctcaaggactcgtatgccctatgtctgtagatcaaaaggacactacgccttattctagcaaattactaaaatcatgtcttgaaacagttgcctccaacccaggaatgcctgtgaagtgtctaacttctaatttactccagtctaggaaaaggctggccacatccagtgccagtagtcaatcccacaccttcatatccagtgtggaatcagaatgccacagcagtcccaaatgggaaaaagattgccaggaaagtgatgaagcattgggcccaacaatgatgagttggaatgcagttgaaaagttatgcgcaaaatctgcaaatgccattgagacgaaaggtttcaataaaaaggatctggagttagctctttctcccattcataacagcagtgcccttcccaccactggacgctcttgtgtaaaccttgctaaaaaatgcttctctggggaagtttcttgggaagcagtagaactggatgtaaataatataaatatggacactgacacaagtcagttaggtttccatcagtcaaatcagtgggctgtggattctggtgggatatctgaagagcaccttgggaaaagaagtttaaaaagaaattttgagttggttgactccagtccttgtaaaaaaattatacagaataaaaaaacttgtgtagagtataagcataacgaaatgacaaattgttatacaaatcaaaatacaggcttaacagttgaagtgcaggaccttaagctatcagtgcacaaaagtcaacaaaatgactgtgctaataaggagaacattgtcaattcttttactgataaacaacaaacaccagaaaaattacctataccaatgatagcaaaaaaccttatgtgtgaactcgatgaagactgtgaaaagaatagtaagagggactacttaagttctagttttctatgttctgatgatgatagagcttctaaaaatatttctatgaactctgattcatcttttcctggaatttctataatggaaagtccattagaaagtcagcccttagattcagatagaagcatcaaagaatcctcttttgaagaatcaaatattgaagatccacttattgtaacaccagattgccaagaaaagacctcaccaaaaggtgtcgagaaccctgctgtacaagagagtaaccaaaaaatgttaggtcctcctttggaggtgctgaaaacgttagcctctaaaagaaatgctgttgcttttcgaagttttaacagtcatattaatgcatccaataactcagaaccatccagaatgaacatgacttctttagatgcaatggatatttcgtgtgcctacagtggttcatatcccatggctataacccctactcaaaaaagaagatcctgtatgccacatcagaccccaaatcagatcaagtcgggaactccataccgaactccgaagagtgtgagaagaggggtggcccccgttgatgatgggcgaattctaggaaccccagactaccttgcacctgagctgttactaggcagggcccatgatatcccttggccagaaggtgaagaaaagttatctgataatgctcaaagtgcagtagaaatacttttaaccattgatgatacaaagagagctggaatgaaagagctaaaacgtcatcctctcttcagtgatgtggactgggaaaatctgcagcatcagactatgcctttcatcccccagccagatgatgaaacagatacctcctattttgaagccaggaatactgctcagcacctgactgtatctggatttagtctgtagcacaaaaattttccttttagtctagccttgtgttatagaatgaacttgcataattatatactccttaatactagattgatctaagggggaaagatcattatttaacctagttcaatgtgcttttaatgtacgttacagctttcacagagttaaaaggctgaaaggaatatagtcagtaatttatcttaacctcaaaactgtatataaatcttcaaagcttttttcatttatttattttgtttattgcactttatgaaaactgaagcatcaataaaattagaggacactattgagagtgagccactagcttgattttctttctcctctgatttcagttcactgttcagtttagcattaaaataataaaataatcatacagttcc

SEQ ID NO: 67903 - DNA, 2523 bp, Artificial Sequence
  derived and/or modified sequence
atggaccccaccgccggcagcaagaaggagcccggcggcggcgccgctaccgaggaaggagtcaataggatcgccgttcccaagccacctagtattgaagaattctctatagttaagcccatctctcggggcgcctttggaaaggtctatctgggacaaaagggcggaaagctctacgctgtgaaggtggtgaagaaggcagatatgatcaacaaaaacatgacccaccaggtgcaggccgagcgagatgcacttgcactatccaagagtccattcattgtgcacctttactacagcttgcagtcggctaataacgtctaccttgtgatggaatacctgataggtggcgatgtgaaatctttgctccacatatacggatacttcgatgaagaaatggccgttaagtatatttccgaggttgccctcgccctggactatctgcaccgacacggtatcatccatcgagatttgaaaccagataacatgttaattagcaacgaggggcatatcaagttaacggacttcggcctgagcaaagtgacccttaatcgagatatcaatatgatggacatcctcacaacacccagtatggctaaacccagacaagactatagtcggactcctggccaggttctgagcctgatttccagcttgggtttcaatacccccatagccgagaagaaccaggatcccgctaatatcctatccgcctgcttgagcgagaccagccagctgtcccaggggctcgtctgtccaatgtcggtcgaccagaaggacaccacaccttacagctctaaattgctcaaaagctgtctggaaaccgttgccagcaatccaggcatgcctgtgaaatgcctcacctctaaccttctgcaaagccggaagcgattggcgacctcctccgctagtagccaatcccacacattcatatcatccgtggaatctgagtgtcattccagccctaagtgggagaaggactgccaggaaagcgatgaagcactcggccccactatgatgagctggaatgccgtagaaaagctttgtgctaaatctgcaaacgccattgagaccaagggctttaacaaaaaggatttagagcttgctctttccccaatacacaactctagtgcacttccaacaacaggccggagttgcgtaaatttggccaaaaagtgtttttctggcgaggtgtcatgggaggccgttgagctggatgtcaataatattaatatggacaccgacactagtcagctgggctttcaccaatccaatcaatgggccgtcgattccgggggcatctcagaggaacatctggggaagcggtcactgaagagaaacttcgagttggtggacagtagcccgtgcaagaagattatccagaataagaaaacctgtgtagagtacaagcataatgagatgactaattgctataccaatcagaatacaggattaactgtggaggtgcaggacctgaagctcagtgtgcacaagagccagcagaacgactgcgctaacaaggaaaatatcgtgaactcttttaccgataagcagcagacaccggagaagctgccaattcctatgatcgccaagaaccttatgtgtgaactggacgaagactgtgaaaagaacagtaaacgagactatctctcctcctccttcctgtgctccgatgacgaccgagcctctaagaacatctctatgaactctgactcctcgtttccaggcatctcaatcatggagagtcctctggagtcacagccactggactcggaccgctcaattaaggaaagttcattcgaagagtcaaatatcgaagatcccctgatcgttacaccggactgccaggaaaagacctccccaaagggggtggaaaaccccgcagtacaggagagcaatcaaaagatgcttggccccccattggaagtcctaaagaccctcgcgagcaagcgaaatgctgtggcttttcgcagcttcaatagccacatcaacgcctcaaacaattccgaaccaagccgcatgaatatgactagcctggacgccatggatatctcctgtgcctactccggcagctacccgatggccattactccaacgcagaaacgacggtcttgcatgccccaccagacccccaatcagattaaaagtggcaccccttacaggactccaaaatccgtgagacggggcgtggctccagtcgacgacgggaggattctcggtactcctgactacctcgcacccgaactgctgctgggtagggcccatgatatcccttggcccgaaggcgaagaaaaactatctgacaatgcacagagcgcagtggagattctgctgacgatcgacgatactaaaagagccggcatgaaggagttaaagaggcatccactctttagcgacgtggactgggagaatcttcaacaccagacaatgccatttatacctcaacctgatgatgaaaccgacaccagttattttgaggcgcggaatacggcccaacacttgaccgtcagtggattctctctgtag

SEQ ID NO: 67904 - DNA, 2523 bp, Artificial Sequence
  derived and/or modified sequence
atggatccaaccgccggaagcaagaaagagcccggaggaggtgccgctaccgaggaaggggtcaaccggatcgccgtccctaaaccaccatcaatcgaggaattcagcatcgtgaagccgatttcacgaggagccttcggaaaagtctacctgggccagaaaggtgggaaactttatgcagtcaaagtcgtcaagaaagccgacatgatcaataagaacatgactcaccaggttcaggctgaaagggacgctctggccctatccaagtctcctttcattgtccacctctattactcgctgcagagcgctaataacgtctatctagtcatggaatacctcatcggaggagatgtcaaaagcttgctccatatctacgggtattttgatgaagaaatggccgtgaagtatattagcgaagtggcccttgcactggattacctgcacagacatgggataatccacagggacctgaagcccgacaatatgctcatcagtaatgaggggcatatcaaactgacagactttggcctttctaaggtcacgcttaatcgtgacattaacatgatggacattctgaccaccccgagcatggctaaaccgagacaggactattctcgcaccccaggccaagtgctgagtctcatttcctcactgggcttcaataccccaatagcagaaaagaatcaggaccccgctaatatcttgagtgcatgcttatccgaaactagtcaattatcacaagggttagtgtgccccatgagcgtggatcagaaagatacgaccccttatagcagtaaactgctcaaaagctgcctcgagacagtggctagcaacccaggaatgcctgtgaagtgcctgacttccaacttactgcagagcagaaaaaggctggccactagcagcgccagctcacaatcgcacaccttcattagctctgttgagtccgagtgtcacagctcaccaaagtgggagaaggactgccaggaaagcgatgaggccctcggtcccaccatgatgtcctggaacgccgttgagaaactctgcgcaaagagcgctaacgctatcgagactaaaggcttcaataagaaggatctagagctggcactgagcccgatacataactcatccgccttacccacgaccggacgcagttgcgtgaacctggctaaaaaatgcttttctggtgaagtgagctgggaggcggtcgagctggatgtgaataatattaacatggacacagacacaagccagctcggcttccaccagagtaaccagtgggccgttgacagcgggggtatcagcgaagagcacttggggaaacgcagcttgaaaagaaacttcgaactagtagattccagtccatgtaaaaagatcattcagaataaaaagacgtgcgtcgagtacaaacataatgaaatgacaaactgctacaccaatcaaaataccgggctcaccgtggaggtgcaggatctgaagttatccgtccacaagtcccagcagaatgactgtgccaataaagaaaacatcgtgaactcattcacagacaagcagcagacaccggaaaagttgcctattcctatgatcgcaaagaatctcatgtgcgaattggatgaggactgtgagaagaatagtaagagagactatctaagcagttcattcctgtgctccgatgatgaccgtgcctctaagaatatttccatgaacagtgattcctcattcccagggattagtatcatggagtcaccgctcgaatcgcagccattggatagcgaccggagcattaaggagagcagcttcgaagagtcaaatatagaggatcccctgattgtgacaccagactgccaggaaaaaacttcccccaaaggggttgagaacccagcggtgcaggaatctaaccagaaaatgctcggccctccactggaagttcttaagacactggcctctaagagaaacgcagtggcattccggtcgtttaactcccatataaatgcctctaacaattctgagcccagccgcatgaacatgacatctctggatgccatggatatcagttgcgcatactccggaagctaccctatggctatcacccccacccagaagcgtaggagttgtatgccacatcagacccctaaccaaataaagtctggcaccccctaccgcacaccaaagtcagtacgcaggggggtggccccagtggacgacgggagaatcctggggacccctgattatctcgctccggaactgctgttaggccgagcgcacgacatcccgtggccagagggggaggagaaactgagcgataatgcccagtctgccgtggaaattcttctgaccatcgacgatacaaaaagagctgggatgaaggaactgaaaaggcatccactgttctcagatgtggactgggagaatctacagcaccagaccatgccattcattcctcagccggatgacgagaccgatacaagctacttcgaagccaggaatacggcgcaacacctaacagtgtccggctttagtttgtag

SEQ ID NO: 67905 - DNA, 2523 bp, Artificial Sequence
  derived and/or modified sequence
atggaccccaccgccggcagcaagaaggagcccggcggcggcgccgccaccgaggagggcgtgaacagaatcgccgtgcccaagccccccagcatcgaggagttcagcatcgtgaagcccatcagcagaggcgccttcggcaaggtgtacctgggccagaagggcggcaagctgtacgccgtgaaggtggtgaagaaggccgacatgatcaacaagaacatgacccaccaggtgcaggccgagagagacgccctggccctgagcaagagccccttcatcgtgcacctgtactacagcctgcagagcgccaacaacgtgtacctggtgatggagtacctgatcggcggcgacgtgaagagcctgctgcacatctacggctacttcgacgaggagatggccgtgaagtacatcagcgaggtggccctggccctggactacctgcacagacacggcatcatccacagagacctgaagcccgacaacatgctgatcagcaacgagggccacatcaagctgaccgacttcggcctgagcaaggtgaccctgaacagagacatcaacatgatggacatcctgaccacccccagcatggccaagcccagacaggactacagcagaacccccggccaggtgctgagcctgatcagcagcctgggcttcaacacccccatcgccgagaagaaccaggaccccgccaacatcctgagcgcctgcctgagcgagaccagccagctgagccagggcctggtgtgccccatgagcgtggaccagaaggacaccaccccctacagcagcaagctgctgaagagctgcctggagaccgtggccagcaaccccggcatgcccgtgaagtgcctgaccagcaacctgctgcagagcagaaagagactggccaccagcagcgccagcagccagagccacaccttcatcagcagcgtggagagcgagtgccacagcagccccaagtgggagaaggactgccaggagagcgacgaggccctgggccccaccatgatgagctggaacgccgtggagaagctgtgcgccaagagcgccaacgccatcgagaccaagggcttcaacaagaaggacctggagctggccctgagccccatccacaacagcagcgccctgcccaccaccggcagaagctgcgtgaacctggccaagaagtgcttcagcggcgaggtgagctgggaggccgtggagctggacgtgaacaacatcaacatggacaccgacaccagccagctgggcttccaccagagcaaccagtgggccgtggacagcggcggcatcagcgaggagcacctgggcaagagaagcctgaagagaaacttcgagctggtggacagcagcccctgcaagaagatcatccagaacaagaagacctgcgtggagtacaagcacaacgagatgaccaactgctacaccaaccagaacaccggcctgaccgtggaggtgcaggacctgaagctgagcgtgcacaagagccagcagaacgactgcgccaacaaggagaacatcgtgaacagcttcaccgacaagcagcagacccccgagaagctgcccatccccatgatcgccaagaacctgatgtgcgagctggacgaggactgcgagaagaacagcaagagagactacctgagcagcagcttcctgtgcagcgacgacgacagagccagcaagaacatcagcatgaacagcgacagcagcttccccggcatcagcatcatggagagccccctggagagccagcccctggacagcgacagaagcatcaaggagagcagcttcgaggagagcaacatcgaggaccccctgatcgtgacccccgactgccaggagaagaccagccccaagggcgtggagaaccccgccgtgcaggagagcaaccagaagatgctgggcccccccctggaggtgctgaagaccctggccagcaagagaaacgccgtggccttcagaagcttcaacagccacatcaacgccagcaacaacagcgagcccagcagaatgaacatgaccagcctggacgccatggacatcagctgcgcctacagcggcagctaccccatggccatcacccccacccagaagagaagaagctgcatgccccaccagacccccaaccagatcaagagcggcaccccctacagaacccccaagagcgtgagaagaggcgtggcccccgtggacgacggcagaatcctgggcacccccgactacctggcccccgagctgctgctgggcagagcccacgacatcccctggcccgagggcgaggagaagctgagcgacaacgcccagagcgccgtggagatcctgctgaccatcgacgacaccaagagagccggcatgaaggagctgaagagacaccccctgttcagcgacgtggactgggagaacctgcagcaccagaccatgcccttcatcccccagcccgacgacgagaccgacaccagctacttcgaggccagaaacaccgcccagcacctgaccgtgagcggcttcagcctgtag

SEQ ID NO: 67906 - protein, 191 aa, Artificial Sequence
  derived and/or modified sequence
MDVGSKEVLMESPPDYSAAPRGRFGIPCCPVHLKRLLIVVVVVVLIVVVIVGALLMGLHMSQKHTEMVLEMSIGAPEAQQRLALSEHLVTTATFSIGSTGLVVYDYQQLLIAYKPAPGTCCYIMKIAPESIPSLEALTRKVHNFQAKPAVPTSKLGQAEGRDAGSAPSGGDPAFLGMAVSTLCGEVPLYYI

SEQ ID NO: 67907 - DNA, 576 bp, Artificial Sequence
  derived and/or modified sequence
atggacgtgggcagcaaggaggtgctgatggagagcccccccgactacagcgccgcccccagaggcagattcggcatcccctgctgccccgtgcacctgaagagactgctgatcgtggtggtggtggtggtgctgatcgtggtggtgatcgtgggcgccctgctgatgggcctgcacatgagccagaagcacaccgagatggtgctggagatgagcatcggcgcccccgaggcccagcagagactggccctgagcgagcacctggtgaccaccgccaccttcagcatcggcagcaccggcctggtggtgtacgactaccagcagctgctgatcgcctacaagcccgcccccggcacctgctgctacatcatgaagatcgcccccgagagcatccccagcctggaggccctgaccagaaaggtgcacaacttccaggccaagcccgccgtgcccaccagcaagctgggccaggccgagggcagagacgccggcagcgcccccagcggcggcgaccccgccttcctgggcatggccgtgagcaccctgtgcggcgaggtgcccctgtactacatctag

SEQ ID NO: 67908 - DNA, 576 bp, Artificial Sequence
  derived and/or modified sequence
atggatgttggctctaaggaagtgctgatggagtcccccccagactattctgctgcccctagggggcggttcggaattccttgctgtccggtgcacctgaagcgattgctcattgtggttgtggtcgtagtcttgatcgttgtggtgatagtgggcgctctgttgatgggacttcatatgagccagaagcacactgaaatggttttagaaatgtccattggggcccccgaagcacagcagaggctcgcgcttagcgagcaccttgtaacaacagccaccttctcaataggctctactggactggtggtctatgactatcagcagctgctgatagcgtataagccggcaccagggacttgctgttacatcatgaaaatcgctcctgaatctattccatctctggaggctttgacgaggaaggttcacaatttccaagcaaagccagctgtacccacgtccaagctgggccaggctgagggacgcgacgcgggaagtgcaccctccggaggggaccccgcctttctaggtatggccgtcagtacgctctgcggcgaagttcccctttactatatttag

SEQ ID NO: 67909 - DNA, 576 bp, Artificial Sequence
  derived and/or modified sequence
atggatgtgggcagcaaggaggtgctgatggagagccccccagactacagcgctgccccccggggccgcttcggcatcccctgctgccctgtgcacctgaagaggctgctgattgtggtggtggtggtggtgctgattgtggtggtgattgtgggcgccctgctgatgggcctgcacatgagccagaagcacacagagatggtgctggagatgagcattggagcccctgaggcccagcagaggctggccctgtctgagcacctggtgaccacagccaccttcagcatcggcagcacaggcctggtggtgtatgactaccagcagctgctgattgcctacaagccagcccctggcacctgctgctacatcatgaagatcgcccctgagagcatccccagcctggaggccctgaccaggaaggtgcacaacttccaggccaagccagctgtgcccaccagcaagctgggccaggccgagggcagagatgctggcagcgcccccagcggcggggaccctgccttcctgggcatggctgtgtccaccctgtgtggggaggtgcccctgtactacatctag

SEQ ID NO: 67910 - DNA, 576 bp, Artificial Sequence
  derived and/or modified sequence
atggacgtgggcagcaaggaggtgctgatggagagcccccccgactatagcgctgctcctagagggagattcggaatcccgtgttgccctgtgcatctcaaacgtctcctcatcgtggtcgtggttgtggtccttatagtcgtcgtgattgttggggccctgctaatgggtctgcatatgagccagaaacataccgaaatggtactggagatgagtatcggagcgcccgaagcccagcagcgactggccttgagcgagcacctcgttactacagctaccttttccatcgggtccacaggactcgtcgtttacgattatcagcagttgctgatagcttacaaaccagcaccagggacatgctgttatattatgaagatcgcgccagaatctattcccagtcttgaggcactaaccaggaaggtgcacaacttccaggcaaagccggcagtgcctaccagcaaactgggtcaagcggaaggacgcgatgctggaagcgctcccagtggaggagaccctgcctttctgggcatggctgtaagcacactctgcggggaagtgccattatactatatatag

SEQ ID NO: 67911 - DNA, 576 bp, Artificial Sequence
  derived and/or modified sequence
atggatgtgggcagcaaagaagtattaatggagtccccgcctgactactctgctgcaccccgaggtcgctttggaataccatgttgtccagtccatctgaaacggttgctgattgttgtggtggtggttgtgcttattgttgtcgtgattgtgggggctcttctcatggggctacatatgtcccagaaacataccgaaatggtacttgaaatgagtatcggcgctcccgaggcccagcagaggcttgccctctctgagcacttagtcactacagcaaccttcagcataggcagcaccggcctggttgtgtatgattaccaacagctccttattgcttacaaaccagctccaggcacatgttgctacattatgaagatcgcccctgaaagtattccttctcttgaagctcttactagaaaagtacacaacttccaggctaaacccgcagtcccaactagcaaactggggcaggccgaaggccgtgacgctggatccgccccaagtggtggagatccggcatttctgggcatggctgtatcaactctatgcggcgaggtgccattgtactatatctag

SEQ ID NO: 67912 - DNA, 1046 bp, Artificial Sequence
  derived and/or modified sequence
ggaggagaggagagcatagcacctgcagcaagatggatgtgggcagcaaagaggtcctgatggagagcccgccggactactccgcagctccccggggccgatttggcattccctgctgcccagtgcacctgaaacgccttcttatcgtggtggtggtggtggtcctcatcgtcgtggtgattgtgggagccctgctcatgggtctccacatgagccagaaacacacggagatggttctggagatgagcattggggcgccggaagcccagcaacgcctggccctgagtgagcacctggttaccactgccaccttctccatcggctccactggcctcgtggtgtatgactaccagcagctgctgatcgcctacaagccagcccctggcacctgctgctacatcatgaagatagctccagagagcatccccagtcttgaggctctcactagaaaagtccacaacttccaggccaagcccgcagtgcctacgtctaagctgggccaggcagaggggcgagatgcaggctcagcaccctccggaggggacccggccttcctgggcatggccgtgagcaccctgtgtggcgaggtgccgctctactacatctaggacgcctccggtgagcaggtgtgatcccagggcccctgatcagcagcggaggagcgctcgggccacctgcccgggctgtggaggagcgctcgcgctgaccaggcgctggggcgtccactgaagcggggtcatccaggcaactcgggggaggggaagctcacagaccggtacttcccactcccctgattctctctgtccatcctcaacattcctttgcttcacagggtcagtggaagccccaacgggaaaggaaacgccccgggcaaagggtcttttgcagcttttgcagacgggcaagaagctgcttctgcccacaccgcagggacaagccctggagaaatgggagcttggggagaggatgggagtgggcagaggtggcgcccaggggcccgggaactcctgccacaacagaataaagcagcctgattgaaaagcaaa

SEQ ID NO: 67913 - protein, 197 aa, Artificial Sequence [sequence omitted]

SEQ ID NO: 67914 - DNA, 594 bp, Artificial Sequence
  derived and/or modified sequence
atggacgtgggcagcaaggaggtgctgatggagagcccccccgactacagcgccgcccccagaggcagattcggcatcccctgctgccccgtgcacctgaagagactgctgatcgtggtggtggtggtggtgctgatcgtggtggtgatcgtgggcgccctgctgatgggcctgcacatgagccagaagcacaccgagatggtgctggagatgagcatcggcgcccccgaggcccagcagagactggccctgagcgagcacctggtgaccaccgccaccttcagcatcggcagcaccggcctggtggtgtacgactaccagcagctgctgatcgcctacaagcccgcccccggcacctgctgctacatcatgaagatcgcccccgagagcatccccagcctggaggccctgaccagaaaggtgcacaacttccagatggagtgcagcctgcaggccaagcccgccgtgcccaccagcaagctgggccaggccgagggcagagacgccggcagcgcccccagcggcggcgaccccgccttcctgggcatggccgtgagcaccctgtgcggcgaggtgcccctgtactacatctag

SEQ ID NO: 67915 - DNA, 594 bp, Artificial Sequence
  derived and/or modified sequence
atggacgtgggctccaaggaggtcctcatggaatcgcctcccgactactctgctgcccctagggggaggttcggaattccatgctgccctgtacaccttaagagactactcatcgtcgtagtggtcgtcgtgttgattgtggttgtgatcgtcggggccctcttgatgggcttgcatatgtcacagaagcatacagagatggtccttgagatgagcattggcgcacccgaggcccaacagcggttggcactgtcagagcatttagtgactaccgcaacctttagcatcggtagcacaggactagtcgtatacgattatcaacaattgctgattgcatataagccagcaccaggaacctgttgctacatcatgaagatagcaccagagagtattcctagtctggaagctttgactcggaaggtacacaacttccaaatggaatgttcactgcaggcgaaacctgcagttcccacatctaagctgggccaggccgaaggcagagatgcaggcagcgcaccctctggaggggaccctgctttcctgggaatggccgtgtcgacattgtgcggcgaagtgccgctgtattatatttag

SEQ ID NO: 67916 - DNA, 594 bp, Artificial Sequence
  derived and/or modified sequence
atggatgtgggcagcaaggaggtgctgatggagagccccccagactacagcgctgccccccggggccgcttcggcatcccctgctgccctgtgcacctgaagaggctgctgattgtggtggtggtggtggtgctgattgtggtggtgattgtgggcgccctgctgatgggcctgcacatgagccagaagcacacagagatggtgctggagatgagcattggagcccctgaggcccagcagaggctggccctgtctgagcacctggtgaccacagccaccttcagcatcggcagcacaggcctggtggtgtatgactaccagcagctgctgattgcctacaagccagcccctggcacctgctgctacatcatgaagatcgcccctgagagcatccccagcctggaggccctgaccaggaaggtgcacaacttccagatggagtgcagcctgcaggccaagccagctgtgcccaccagcaagctgggccaggccgagggcagagatgctggcagcgcccccagcggcggggaccctgccttcctgggcatggctgtgtccaccctgtgtggggaggtgcccctgtactacatctag

SEQ ID NO: 67917 - DNA, 594 bp, Artificial Sequence
  derived and/or modified sequence
atggacgtgggcagcaaggaggtgctgatggagagcccccccgactactctgccgccccgcgcggccgatttgggatcccttgttgtccagttcacctgaaacgcctgctaatagttgtagtcgtagtcgtgttgattgtggtggttattgtgggagcactgttgatgggcctgcatatgagccagaagcataccgaaatggtgctcgagatgagcataggagccccagaggcacagcagaggttggcacttagcgaacatctggtcactaccgctaccttttccattggctccacgggcttagtcgtgtacgactaccagcagctactcattgcctacaagccggcgcctgggacctgttgctacatcatgaagatcgctccagagagcattccaagcctcgaagctctgacccgtaaagtccacaattttcaaatggagtgctctttgcaggctaagccagctgtgccaacaagtaagctcggccaggccgaagggcgcgatgccgggagtgcccctagcgggggtgatccagcttttctcggcatggctgtaagtacgctgtgcggcgaggtgcccctatactatatttag

SEQ ID NO: 67918 - DNA, 594 bp, Artificial Sequence
  derived and/or modified sequence
atggatgtcggctctaaagaagtgctcatggaaagtccgccagactactctgccgctccacgcggaaggttcggtatcccctgttgtccagtacaccttaaacggcttctaatagtggtggtggtggtggtgttgattgttgtagtcatagtgggcgcactcttaatgggattgcacatgtctcagaagcatactgagatggtcctggagatgtcaattggagcgccagaagctcagcagcgtcttgcgctgtcagagcatctggtgactactgccactttctcaatcggcagtacggggctggtggtgtacgactaccaacagcttcttatcgcatataagcccgctcctgggacatgctgctatataatgaagattgccccagaatctatcccatctttagaggccctgactagaaaggtccacaatttccagatggaatgttcattgcaggccaagcccgctgtgcccacaagtaaacttggacaagccgagggtcgggatgccggttctgccccatctggaggagacccagcttttttgggaatggcagtcagtactctgtgtggggaggttcctctatattacatctag

SEQ ID NO: 67919 - DNA, 997 bp, Artificial Sequence
  derived and/or modified sequence
cttatctgggcttcggttctggagggccaggaacaaacaggcttcaaagccaagggcttggctggcacacagggggcttggtccttcacctctgtcccctctccctacggacacatataagaccctggtcacacctgggagaggaggagaggagagcatagcacctgcagcaagatggatgtgggcagcaaagaggtcctgatggagagcccgccggactactccgcagctccccggggccgatttggcattccctgctgcccagtgcacctgaaacgccttcttatcgtggtggtggtggtggtcctcatcgtcgtggtgattgtgggagccctgctcatgggtctccacatgagccagaaacacacggagatggttctggagatgagcattggggcgccggaagcccagcaacgcctggccctgagtgagcacctggttaccactgccaccttctccatcggctccactggcctcgtggtgtatgactaccagcagctgctgatcgcctacaagccagcccctggcacctgctgctacatcatgaagatagctccagagagcatccccagtcttgaggctctcactagaaaagtccacaacttccagatggaatgctctctgcaggccaagcccgcagtgcctacgtctaagctgggccaggcagaggggcgagatgcaggctcagcaccctccggaggggacccggccttcctgggcatggccgtgagcaccctgtgtggcgaggtgccgctctactacatctaggacgcctccggtgagcagggtcagtggaagccccaacgggaaaggaaacgccccgggcaaagggtcttttgcagcttttgcagacgggcaagaagctgcttctgcccacaccgcagggacaagccctggagaaatgggagcttggggagaggatgggagtgggcagaggtggcgcccaggggcccgggaactcctgccacaacagaataaagcagcctgattgaaaagc

SEQ ID NO: 67920 - DNA, 591 bp, Artificial Sequence
  derived and/or modified sequence
atgaacaggagtcaggaggtgacccgcgatgaagaatcaaccagatccgaggaagttactcgcgaggagatggcagctgctggactgaccgtgaccgtcactcattctaatgagaaacacgatctgcacgttacatcccagcaaggttccagtgaacccgtggtgcaagatctggcacaggtggtcgaggaagtcatcggagtaccccagtcctttcagaagctcatctttaagggaaagtcactcaaggagatggaaacgccactatctgccctggggatccaggatggctgccgggttatgttaatcggaaaaaaaaattccccgcaggaggaagtcgagctcaagaagctcaagcatctggagaagtcagtcgagaagattgccgaccagctggaagaattgaacaaggaattgaccggaatacagcagggcttcctgcccaaggacctacaggccgaagccttgtgtaaactcgatagaagggtcaaggcgacgatagaacagttcatgaagatactggaggaaattgacaccttgatcctccccgaaaatttcccgactctgaccctggtcttaaatgaaaaatag

SEQ ID NO: 67921 - DNA, 693 bp, Artificial Sequence
  derived and/or modified sequence
atgaatcgatcacaggaagtcacgcgcgatgaggagtcaacaagatccgaagaagtcacacgcgaggagatggccgctgctggactgaccgtcacagtaacccacagcaacgagaagcatgatctccacgtaacctctcaacaggggtccagcgaacctgtggtgcaagatctggcgcaggtggtcgaggaggtgatcggagtgccacaatcttttcagaaactgatttttaagggcaagtcactgaaagagatggagacgccgctgtccgctctcggcattcaagacggctgtagagtgatgctcataggaaagaagaatagtccccaggaagaagtggagctgaagaagctcaagcatctggaaaagagcgtggaaaaaatcgccgatcagctggaggaactcaacaaggagctaaccggaatccagcaggggttcctgcctaaagatctccaggccgaggctctatgcaaactggataggcgggtgaaggctactatagaacagtttatgaagatcctcgaagaaatagataccctcattctcccagagaacttcaaggactctcgtctgaaaagaaagggtctggtgaaaaaggtccaggctttcttggctgagtgtgacacagtggagcagaacatttgccaggaaacggaaaggctgcagtctaccaactttgccttagccgaatag

SEQ ID NO: 67922 - DNA, 591 bp, Artificial Sequence
  derived and/or modified sequence
atgaacagaagccaggaggtgaccagagatgaggagagcaccaggtctgaggaggtgacccgggaggagatggctgctgctggcctgactgtgacagtgacccacagcaatgagaagcatgacctgcacgtgaccagccagcagggcagcagcgagcctgtggtgcaggacctggcccaggtggtggaggaggtgattggagtgccccagagcttccagaagctgatcttcaagggcaagagcctgaaggagatggagacccccctgagcgccctgggcatccaggacggctgccgggtgatgctgattggcaagaagaacagcccccaggaggaggtggagctgaagaagctgaagcacctggagaagtctgtggagaagattgctgaccagctggaggagctgaacaaggagctgaccggcatccagcagggcttcctgcccaaggacctgcaggccgaggccctgtgcaagctggacagaagagtgaaggccaccatcgagcagttcatgaagatcctggaggagattgacaccctcatcctgcctgagaacttccccaccctgaccctggtgctgaatgagaagtag

SEQ ID NO: 67923 - DNA, 693 bp, Artificial Sequence
  derived and/or modified sequence
atgaacagaagccaggaggtgaccagagatgaggagagcaccaggtctgaggaggtgacccgggaggagatggctgctgctggcctgactgtgacagtgacccacagcaatgagaagcatgacctgcacgtgaccagccagcagggcagcagcgagcctgtggtgcaggacctggcccaggtggtggaggaggtgattggagtgccccagagcttccagaagctgatcttcaagggcaagagcctgaaggagatggagacccccctgagcgccctgggcatccaggacggctgccgggtgatgctgattggcaagaagaacagcccccaggaggaggtggagctgaagaagctgaagcacctggagaagtctgtggagaagattgctgaccagctggaggagctgaacaaggagctgaccggcatccagcagggcttcctgcccaaggacctgcaggccgaggccctgtgcaagctggacagaagagtgaaggccaccatcgagcagttcatgaagatcctggaggagattgacaccctcatcctgcctgagaacttcaaggacagccggctgaagaggaagggcctggtgaagaaggtgcaggccttcctggccgagtgtgacacagtggagcagaacatctgccaggagacagagcggctgcagagcaccaactttgccctggccgagtag

SEQ ID NO: 67924 - DNA, 591 bp, Artificial Sequence
  derived and/or modified sequence
atgaaccggagccaggaggtgacccgggacgaggagagcacccggtccgaagaggtcactcgcgaggagatggccgctgccgggttaactgttactgtgacccactcaaacgagaaacacgatctacatgttacctcgcagcagggttcctccgagcccgtggtacaggaccttgctcaggtggttgaggaggtgatcggcgttcctcagagttttcaaaagcttatttttaagggtaagtcactgaaggagatggaaacacctctcagcgcactaggaatccaggatggatgtcgcgtgatgcttattggcaagaaaaatagtcctcaagaagaggtggagcttaagaagttaaagcacctagagaagtctgtggaaaaaattgccgatcagctggaggaacttaacaaagaactgaccggaattcaacaaggctttcttcccaaagatcttcaagccgaagccctttgtaagttggatcggagagtaaaggcgacgatcgagcagttcatgaagatacttgaggagattgatacactcatcctgcccgagaactttccaactctcaccttggtgctgaatgagaagtag

SEQ ID NO: 67925 - DNA, 693 bp, Artificial Sequence
  derived and/or modified sequence
atgaaccggagccaggaggtgacccgggacgaggagagcacccggagcgaggaagtcactcgggaagaaatggccgccgccggtcttactgtgacggtaacgcatagcaacgagaaacacgatctacacgtgacttcccagcaaggaagctccgaacccgttgttcaggatttagcccaggtcgttgaagaagtcattggagttccacagtcgttccaaaaactcatcttcaaaggaaagagtttgaaagagatggagacaccactgtctgcactgggtatacaggatggctgtcgcgtgatgctgatcggaaaaaagaactccccccaggaagaagtggagctcaagaagctcaagcaccttgagaagtcagtggagaagatcgccgatcagctggaagaactgaataaggagctgacagggattcaacaggggttcctgcccaaggacctccaggctgaagcgctttgtaaattagaccggagagtgaaggcaacaatcgagcagttcatgaaaatcctcgaggagattgatacgctgattcttcctgaaaattttaaggatagcaggctcaaaaggaagggactggttaagaaagtgcaggcctttctggccgaatgtgataccgttgagcagaacatttgtcaggagaccgaacgcctgcagagtaccaacttcgcactggccgaatag

SEQ ID NO: 67926 - DNA, 591 bp, Artificial Sequence
  derived and/or modified sequence
atgaacaggtcgcaagaggtgacacgcgacgaagagtccactcggtcagaggaagtgacgcgggaagaaatggcagctgcgggtctgaccgtaaccgttacccattcgaacgaaaagcatgacctgcacgtcacctctcagcagggatccagtgaacctgtggtgcaggacctggcccaagttgtcgaggaggtcatcggggtccctcagagtttccaaaaactcatattcaagggtaaatctctgaaggagatggagaccccactgtcagcacttggaatacaggacggctgtagagtcatgctaattggcaaaaagaatagcccacaggaggaggtagaattgaagaagctgaagcacctggaaaagtctgtggaaaagatagctgaccagcttgaggagcttaacaaggagctgacaggaatccagcaaggctttctgccgaaagatcttcaggcagaggcattatgtaagctcgacagacgggtgaaggctacaatcgaacagtttatgaaaatcttagaagagatagatactctcattttgccagagaacttccctaccctcacgctggtgctgaacgaaaagtag

SEQ ID NO: 67927 - DNA, 693 bp, Artificial Sequence
  derived and/or modified sequence
atgaatagatcccaagaggtgacgcgggacgaagaaagtacacgcagcgaagaagtcactcgagaggagatggctgccgctggcctaaccgtgactgtcactcacagtaacgagaaacatgatctccacgtgactagccagcaggggagttccgagccagtcgtgcaggatttggcacaggttgtcgaggaggtgattggtgtcccacagagctttcaaaaattgattttcaaaggcaaatccctgaaggaaatggaaaccccactctctgccctggggatccaggatggatgtcgcgttatgcttataggcaagaagaacagtccccaggaagaggtggaactcaagaagctgaagcacttggaaaagagcgtcgaaaaaattgctgatcagttggaggaattgaacaaggaactcaccgggatccagcaggggttcctgcctaaggatctgcaagcagaggcactctgcaagcttgacagaagagtcaaagccacaatcgaacagtttatgaaaatcctcgaggagatcgacactctgatcctgcccgagaacttcaaagactcaagactgaagcgcaagggactggttaaaaaggttcaggctttccttgcggagtgtgacaccgtcgaacaaaacatctgccaggagacggaaagactgcagtccactaatttcgccctggccgagtag

SEQ ID NO: 67928 - DNA, 591 bp, Artificial Sequence
  derived and/or modified sequence
atgaacagaagccaggaggtgaccagagacgaggagagcaccagaagcgaggaggtgaccagagaggagatggccgccgccggcctgaccgtgaccgtgacccacagcaacgagaagcacgacctgcacgtgaccagccagcagggcagcagcgagcccgtggtgcaggacctggcccaggtggtggaggaggtgatcggcgtgccccagagcttccagaagctgatcttcaagggcaagagcctgaaggagatggagacccccctgagcgccctgggcatccaggacggctgcagagtgatgctgatcggcaagaagaacagcccccaggaggaggtggagctgaagaagctgaagcacctggagaagagcgtggagaagatcgccgaccagctggaggagctgaacaaggagctgaccggcatccagcagggcttcctgcccaaggacctgcaggccgaggccctgtgcaagctggacagaagagtgaaggccaccatcgagcagttcatgaagatcctggaggagatcgacaccctgatcctgcccgagaacttccccaccctgaccctggtgctgaacgagaagtag

SEQ ID NO: 67929 - DNA, 693 bp, Artificial Sequence
  derived and/or modified sequence
atgaacagaagccaggaggtgaccagagacgaggagagcaccagaagcgaggaggtgaccagagaggagatggccgccgccggcctgaccgtgaccgtgacccacagcaacgagaagcacgacctgcacgtgaccagccagcagggcagcagcgagcccgtggtgcaggacctggcccaggtggtggaggaggtgatcggcgtgccccagagcttccagaagctgatcttcaagggcaagagcctgaaggagatggagacccccctgagcgccctgggcatccaggacggctgcagagtgatgctgatcggcaagaagaacagcccccaggaggaggtggagctgaagaagctgaagcacctggagaagagcgtggagaagatcgccgaccagctggaggagctgaacaaggagctgaccggcatccagcagggcttcctgcccaaggacctgcaggccgaggccctgtgcaagctggacagaagagtgaaggccaccatcgagcagttcatgaagatcctggaggagatcgacaccctgatcctgcccgagaacttcaaggacagcagactgaagagaaagggcctggtgaagaaggtgcaggccttcctggccgagtgcgacaccgtggagcagaacatctgccaggagaccgagagactgcagagcaccaacttcgccctggccgagtag

SEQ ID NO: 67930 - protein, 94 aa, Artificial Sequence
  derived and/or modified sequence
MDSSNCKVIAPLLSQRYRRMVTKDGHSTLQMDGAQRGLAYLRDAWGILMDMRWRWMMLVFSASFVVHWLVFAVLWCFCGEDCPAKKSSFFNSLY

SEQ ID NO: 67931 - DNA, 285 bp, Artificial Sequence
  derived and/or modified sequence
atggacagcagcaactgtaaggtgatagcaccgttactgtctcagcgttaccgccggatggtaacgaaagatggtcactcaactctacaaatggatggcgcgcaacggggcctcgcttacctgcgtgatgcgtggggaatcctgatggacatgcggtggcggtggatgatgctggttttcagcgccagctttgtggtccattggctggtgtttgctgtcctatggtgtttttgtggggaggattgtccagcgaaaaagtcgagcttttttaacagtctttactag

SEQ ID NO: 67932 - DNA, 285 bp, Artificial Sequence
  derived and/or modified sequence
atggacagcagcaactgcaaggtgattgcccccctgctgagccagcgctacagaaggatggtgaccaaggatggccacagcaccctgcagatggatggagcccagaggggcctggcctacctgagagatgcctggggcatcctgatggacatgcgctggcgctggatgatgctggtgttttctgccagctttgtggtgcactggctggtgtttgctgtgctgtggtgcttctgtggggaggactgcccagccaagaagagcagcttcttcaacagcctgtactag

SEQ ID NO: 67933 - DNA, 285 bp, Artificial Sequence
  derived and/or modified sequence
atggacagcagcaactgcaaggtgatcgcccccctgctgagccagcggtacagacggatggtgactaaagatggtcacagcaccctgcagatggacggggcccagcgaggcttagcctacctccgggatgcctgggggattctcatggacatgagatggagatggatgatgctcgttttctccgctagttttgtagtacactggctcgtgtttgcagtcctctggtgcttttgcggtgaggattgcccagccaagaagagctcgttctttaattccttgtactag

SEQ ID NO: 67934 - DNA, 285 bp, Artificial Sequence
  derived and/or modified sequence
atggatagcagtaactgcaaagttattgcgcctctactctcgcagagatatcgacgtatggtgacgaaagatggccactccacccttcagatggatggcgcacagcggggtcttgcctacttgcgcgacgcatgggggatccttatggatatgaggtggcggtggatgatgttggtattttctgccagctttgtggtccattggctcgtgttcgcggtgctgtggtgtttctgtggggaagattgccctgccaagaaaagttcttttttcaacagtctgtactag

SEQ ID NO: 67935 - DNA, 285 bp, Artificial Sequence
  derived and/or modified sequence
atggacagcagcaactgcaaggtgatcgcccccctgctgagccagagatacagaagaatggtgaccaaggacggccacagcaccctgcagatggacggcgcccagagaggcctggcctacctgagagacgcctggggcatcctgatggacatgagatggagatggatgatgctggtgttcagcgccagcttcgtggtgcactggctggtgttcgccgtgctgtggtgcttctgcggcgaggactgccccgccaagaagagcagcttcttcaacagcctgtactag

SEQ ID NO: 67936 - DNA, 1099 bp, Artificial Sequence
  derived and/or modified sequence
agtccaagaagagaacctacaaactagacttgtagattaaaattatctgatcaaaaaggcagactctgtaaatttccttaagacctaccttggcataaaggctgacccagcaaaagaactgagaaatacagcctgagatggacagcagtaattgcaaagttattgctcctctcctaagtcaaagataccggaggatggtcaccaaggatggccacagcacacttcaaatggatggcgctcaaagaggtcttgcatatcttcgagatgcttggggaatcctaatggacatgcgctggcgttggatgatgttggtcttttctgcttcttttgttgtccactggcttgtctttgcagtgctctggtgcttttgtggcgaagattgcccggccaaaaaatcgagctttttcaattcgctttactgacacagcagtagtagctcacatggatggcaaacctaatcttatcttccaagtggccaacacccgacctagccctctaaccagtgtccgggtctcagctgtactctatcaggaaagagaaaatggcaaactctaccagaccagtgtggatttccaccttgatggcatcagttctgacgaatgtccattcttcatctttccactaacgtactatcactccattacaccatcaagtcctctggctactctgctccagcatgaaaatccttctcactttgaattagttgtattcctttcagcaatgcaggagggcactggagaaatatgccaaaggaggacatcctacctaccgtctgaaatcatgttacatcactgttttgcatctctgttgacccgaggttccaaaggtgaatatcaaatcaagatggagaattttgacaagactgtccctgaatttccaactcctctggtttctaaaagcccaaacaggactgacctggatatccacatcaatggacaaagcattgacaattttcagatctctgaaacaggactgacagaataagacttatccattttttaatgtattaaatacacccagccagttatgcagctactttttctttactgtatctcatgttttcttttttcaatgctaattatagctctctacatcacgg

SEQ ID NO: 67937 - protein, 582 aa, Artificial Sequence
  derived and/or modified sequence
MCRALLYGGMRESQPEAEIPLQDTTAEAFTMLLKYIYTGRATLTDEKEEVLLDFLSLAHKYGFPELEDSTSEYLCTILNIQNVCMTFDVASLYSLPKLTCMCCMFMDRNAQEVLSSEGFLSLSKTALLNIVLRDSFAAPEKDIFLALLNWCKHNSKENHAEIMQAVRLPLMSLTELLNVVRPSGLLSPDAILDAIKVRSESRDMDLNYRGMLIPEENIATMKYGAQVVKGELKSALLDGDTQNYDLDHGFSRHPIDDDCRSGIEIKLGQPSIINHIRILLWDRDSRSYSYFIEVSMDELDWVRVIDHSQYLCRSWQKLYFPARVCSGDGVSLWCPLWSRTPELKQSSLLGLPKCRYIRIVGTHNTVNKIFHIVAFECMFTNKTFTLEKGLIVPMENVATIADCASVIEGVSRSRNALLNGDTKNYDWDSGYTCHQLGSGAIVVQLAQPYMIGSIRLLLWDCDDRSYSYYVEVSTNQQQWTMVADRTKVSCKSWQSVTFERQPASFIRIVGTHNTANEVFHCVHFECPEQQSSQKEENSEESGTGDTSLAGQQLDSHALRAPSGSSLPSSPGSNSRSPNRQHQ

SEQ ID NO: 67938 - DNA, 1749 bp, Artificial Sequence
  derived and/or modified sequence
atgtgcagagctctcctgtatgggggcatgcgtgaatcccaaccagaagcagaaattccgctccaggacaccactgccgaagcattcaccatgttgctgaagtatatctatactggaagagctacgcttacagatgagaaggaggaagtgctgcttgatttcctcagtctcgcacacaaatatggctttcccgagctggaagactccaccagtgagtatttatgcactattctgaacatccagaatgtttgcatgaccttcgatgtagcctctttgtattcactgcctaagctgacttgtatgtgctgtatgtttatggaccggaatgcacaggaagtcttgtcttccgaaggattcctgtcactgtcaaaaaccgcactgctgaacattgtactgcgtgattcttttgcggctcctgaaaaggacatttttcttgccctgctgaactggtgcaaacacaactcaaaagagaatcacgccgagatcatgcaggcagtgagactgccactgatgagccttacagagcttctcaacgtcgtccggcctagcggtctgctgagcccagatgctattctcgacgccattaaggtgaggtcagagagccgcgatatggatcttaactacagaggcatgcttatcccggaggagaatattgcaaccatgaaatatggcgcccaggtggtcaagggcgaactgaagtctgccctgctcgacggcgatactcaaaactacgatctggaccacgggttttcaagacacccaatagacgatgattgccgcagtggcatcgaaatcaagctgggccagccctcaattataaaccatattcgaatattgctgtgggacagggactcccggtcctacagttattttattgaggtcagtatggacgaactcgactgggttcgagttattgaccactctcagtacctgtgccgctcctggcaaaaactgtattttccagctcgtgtgtgtagtggggatggtgtgagtctgtggtgcccgctatggtctcgaaccccggaattgaaacaaagcagcctgttaggcttgcccaagtgccggtacatccgaattgtggggacacacaacacagtgaacaagatttttcatatcgtagcctttgagtgcatgttcacaaacaagacgtttacccttgaaaagggactgatcgtccccatggagaacgtcgccactattgccgattgcgcgtccgtgatcgagggggtaagccgttccagaaacgccctgcttaatggtgacacaaaaaattatgactgggattccggctatacttgccatcagctgggctcgggcgctatagtggtgcagctggcccagccttacatgatcggttctatcaggcttctgctttgggattgtgacgaccggtcctacagctactacgtggaagtgagtactaaccagcaacagtggacaatggtggcggaccgcaccaaagtgtcatgcaagtcttggcagtccgttaccttcgaaagacagcccgcctcgttcatacgtatagtggggacccacaataccgcaaacgaggttttccattgtgtacactttgagtgccccgaacagcagagttctcagaaggaagagaacagtgaagagtccgggaccggcgacaccagtcttgcaggccagcagctggattcccacgcccttcgcgctccctcagggtctagtctcccttcctcccctggttccaatagcagatcacccaacaggcagcaccagtag

SEQ ID NO: 67939 - DNA, 1749 bp, Artificial Sequence
  derived and/or modified sequence
atgtgccgggccctgctgtatggaggcatgagggagagccagcctgaggccgagatccccctgcaggacaccacagctgaggccttcaccatgctgctgaagtacatctacacaggccgggccaccctgacagatgagaaggaggaggtgctgctggacttcctgagcctggcccacaagtatggcttccctgagctggaggacagcaccagcgagtacctgtgcaccatcctgaacatccagaatgtgtgcatgacctttgatgtggccagcctgtacagcctgcccaagctgacctgcatgtgctgcatgttcatggacagaaatgcccaggaggtgctgagcagcgagggcttcctgagcctgagcaagacagccctgctgaacatcgtgctgcgggacagctttgctgcccctgagaaggacatcttcctggccctgctgaactggtgcaagcacaacagcaaagaaaatcatgctgagatcatgcaggccgtgcggctgcccctgatgagcctgacagagctgctgaatgtggtgcggcccagcggcctgctgagcccagatgccatcctggatgccatcaaggtgcgctctgagagccgggacatggacctgaactaccggggcatgctgatccctgaggagaacatcgccaccatgaagtatggagcccaggtggtgaagggggagctgaagagcgccctgctggatggagacacccagaactatgacctggaccacggcttcagccgccaccccattgatgatgactgccgctctggaattgagatcaagctgggccagcccagcatcatcaaccacatccgcatcctgctgtgggaccgggacagccgcagctacagctacttcatcgaggtgtccatggatgagctggactgggtgcgggtgattgaccacagccagtacctgtgccgctcctggcagaagctgtacttccctgcccgggtgtgcagcggagatggagtgtccctgtggtgccccctgtggagcaggaccccagagctgaagcagagcagcctgctgggcctgcccaagtgccgctacatcagaattgtgggcacccacaacacagtgaacaagatcttccacatcgtggcctttgagtgcatgttcaccaacaagaccttcaccctggagaagggcctgattgtgcccatggagaatgtggccaccatcgctgactgtgcctctgtgattgaaggagtgagccgcagcagaaatgccctgctgaatggagacaccaagaactatgactgggacagcggctacacctgccaccagctgggcagcggggccatcgtggtgcagctggcccagccctacatgattggcagcatccggctgctgctgtgggactgtgatgacaggagctacagctactacgtggaggtgtccaccaaccagcagcagtggaccatggtggccgacaggaccaaggtgtcctgcaagtcctggcagagcgtgacctttgagcggcagcctgccagcttcatccgcatcgtgggcacccacaacacagccaatgaggtgttccactgtgtgcactttgaatgtcctgagcagcagagcagccagaaggaggagaacagcgaggagagcggcactggagacaccagcctggccggccagcagctggacagccacgccctgcgggcccccagcggcagcagcctgcccagcagccctggcagcaacagccgcagccccaaccggcagcaccagtag

SEQ ID NO: 67940 - DNA, 1749 bp, Artificial Sequence
  derived and/or modified sequence
atgtgccgggccctgctgtacggcggcatgcgggagagccagcccgaggccgagatccccctgcaggacaccactgccgaagccttcactatgctccttaaatacatttacaccgggcgcgccacgctgaccgatgagaaggaggaagttctcctggattttctcagtctcgcgcacaagtacggattccctgagctggaggatagcacttccgaatacctgtgcacgattttaaacatacagaatgtatgtatgacattcgatgtggcctcgctgtattccttgccgaaacttacctgcatgtgttgtatgttcatggacagaaatgcacaggaggttctctcaagcgaagggttcttgagtctgagcaaaacagccctcctaaacattgtcctgcgcgacagtttcgccgcaccagagaaagacatattcctggcgttgctgaactggtgcaagcacaattccaaggagaaccacgcagaaatcatgcaggcagtgcgtctgccgctgatgtctttgacagagctgctgaacgtggtgcggccctccgggttgctgtcaccagacgcgatacttgatgctattaaagtgcggagtgagtccagagacatggatttgaactacaggggtatgctgatccctgaggagaacatcgctaccatgaaatatggggcccaggtcgtgaaaggggaacttaaaagcgccttgctcgacggtgacacacagaattacgacctggaccacggcttctcaagacacccaatcgacgatgattgtcgaagtggtattgaaatcaaattaggtcagcccagcatcatcaaccacattagaatcctcctgtgggatagagattcccggagctatagttatttcatagaagtaagtatggatgagcttgactgggttcgggttattgatcacagtcagtacttatgcaggtcttggcaaaagctgtattttcctgcacgtgtgtgcagcggcgatggcgtttctctgtggtgcccactgtggagtcggactcctgagttgaagcagtccagcttgctgggattaccaaaatgcaggtatataaggatcgtcggaacacataatactgtgaacaagattttccatatcgtggccttcgagtgcatgttcaccaacaagacgttcactctagaaaaggggctaattgttcctatggagaatgtggccacgatagccgactgcgcatcagtcatcgagggcgtgtctcgctcaagaaacgccttattgaacggggacacgaaaaactacgactgggactcagggtacacctgccatcaactcggctcgggcgcaattgtagtccaactggcccaaccctatatgattggaagtattaggctcctgctgtgggactgcgacgataggtcatattcttactatgttgaagtctcaaccaatcagcaacagtggacaatggtcgcagatcgtactaaagtgtcatgtaagtcatggcaaagtgtcacgtttgaacgccaacccgccagtttcataagaattgttggcactcataatactgcgaacgaagtattccactgcgtccactttgaatgccctgagcagcagtcatcccagaaagaggagaatagcgaggaatctggtacaggtgataccagtctcgctggacagcagcttgatagtcacgcattgcgagctcctagtggatcatctctgccaagttcccctggttctaatagcaggagccctaacagacaacatcagtag

SEQ ID NO: 67941 - DNA, 1749 bp, Artificial Sequence
  derived and/or modified sequence
atgtgccgagctctactttacggtgggatgagggagagccaaccagaggctgaaataccactccaggacaccaccgccgaagcattcaccatgttgttgaagtacatttatacgggtagagccaccttaacggatgagaaggaagaagtcctcttagactttctttctctggcacacaaatacggctttcccgagctcgaggatagcactagcgaatatctttgtaccattctcaacatccagaacgtgtgtatgacgttcgatgttgccagcctgtattccttaccaaagctcacatgtatgtgctgcatgttcatggatcggaatgcccaggaggtgctgtccagtgaggggtttctgtccctgtccaaaacagccctgcttaacatcgtactccgcgatagcttcgccgctcccgagaaagacatctttctagccctactgaactggtgtaagcataactcaaaggagaaccatgctgaaattatgcaggccgtcagattgccactgatgtctctcaccgaactcctgaatgttgttaggccatcagggcttctcagccctgatgcaatcctggacgctatcaaagtcaggtccgagagtcgcgacatggatctgaactaccggggaatgctgattcctgaagaaaatattgccactatgaagtacggtgctcaggttgtaaagggcgagctgaagtcagccttactggatggcgacacccagaattatgaccttgaccacggcttttcccggcatccaatagatgacgactgtaggagcggcattgagatcaagctgggccagccctcaattatcaatcacattcgcatcctgctatgggaccgagatagtcgtagctattcttattttattgaggtgtccatggatgaactcgactgggtgagggtgatcgatcactcacagtacctctgtcgctcttggcagaaattgtattttccagcgagggtgtgctctggcgacggggtgagcctttggtgtccgctctggtcgcggacacccgagcttaagcaatcctccctgttaggtttgcctaaatgtaggtatattcgaattgtgggcacacataacaccgttaataagatttttcatattgtggcatttgagtgcatgttcaccaacaagacgtttactctcgagaagggtctgatcgtgcccatggagaatgtcgcaaccatagctgactgtgcctcggtcattgaaggcgtgtctcgctctcgcaatgccctgctgaatggagacaccaaaaactacgactgggactccggatacacatgccatcaactggggagcggagctatcgtggtccagctcgcccagccttatatgatcggaagcattaggctgctgttgtgggattgcgatgaccgatcatactcatactatgttgaggtgtcaactaaccagcagcagtggacgatggtcgctgataggactaaggtgagttgcaagagttggcagagcgtgaccttcgagcggcagcctgcatcgtttatcagaatagtggggactcacaatacagccaacgaagtgtttcactgcgtccattttgagtgtccggagcagcagagtagccagaaagaggaaaactctgaggagtccgggacaggggacactagcctggccggacagcagctcgactctcatgcgttgcgggcaccttctggctcatctctgccttccagtcccggaagcaactctagatcaccaaacagacagcatcaatag

SEQ ID NO: 67942 - DNA, 2034 bp, Artificial Sequence
  derived and/or modified sequence
catgtttattgttccaagggagcctcatcaaaaccacttttaaagcattgagaatccaaataaataccatggatcatacaggattggggataagtcttgaggtctccccgagaaggagaagttctttaatttggtaattttagggtaatggttggatgctctctggattaatggaaaccttcaggggtacttttaggcagagtataacccagtgaagagcaaatcctatttgagggtttcttcatgtgtttcttccctgatgtgcagagcattattatatggtggaatgcgagagtctcagcctgaagcagaaattcctctccaagacaccactgcagaagcattcacaatgctactcaaatatatctacactgggcgggcaacgctgacagatgagaaggaggaggtgctgctggactttttgagcctggctcataaatatggatttccagagctagaggattctacctctgagtatctctgcaccatacttaacattcagaatgtctgcatgacttttgatgttgccagtctctactcacttcccaagttaacttgtatgtgctgcatgtttatggataggaatgctcaggaagtcctctcaagtgaaggtttcctctccctttctaagacagcacttttaaacatcgtgttaagagactcatttgcagctcccgaaaaagatattttcctagccttattaaactggtgtaagcacaattcaaaggagaatcatgctgaaatcatgcaggctgtgcgtttacctctcatgagcctcacagagcttctgaatgttgtgaggccttcaggactgctgtctcctgatgccatcctggatgccattaaagtgcgatctgagagccgggatatggacctcaattatagaggcatgctcataccagaagaaaacattgcaactatgaagtatggagcccaagttgtaaagggggagctgaaatcagccttattagatggtgatactcaaaattatgatttggatcatggattttcaaggcacccaattgatgatgactgccgttccggcatcgagattaagctaggtcagccatccattatcaatcacatacggatactcttgtgggaccgagatagccggtcttactcatacttcattgaagtgtcaatggatgaacttgattgggtcagagtgatagatcattcacaatatctgtgtcgttcttggcagaaattatattttccagcccgtgtctgcagtggagatggagtctcactatggtgcccactctggtctcgaactcctgagctcaagcaatcctccctccttggccttccaaagtgcaggtatattcgaattgttgggactcacaacacagtgaacaagatttttcacattgtggcttttgaatgtatgtttacaaacaaaaccttcactcttgagaaggggctgatagttcccatggagaatgttgcaacaattgctgattgtgccagtgtgattgaaggagtcagtcggagccgaaatgccttgctgaatggggacactaagaattatgactgggattctggctacacatgtcaccagctaggaagtggtgcgattgtggttcagttggcacaaccgtacatgattgggtcaatacggttactactttgggattgtgatgatcgaagctatagctactacgttgaggtttctaccaaccagcaacagtggaccatggttgctgacagaactaaagtctcctgcaagtcctggcagtcagtaacttttgaaaggcagcctgcctccttcatccgtatcgttgggacacacaacacagcaaatgaggtgttccactgtgtccactttgagtgtccagagcagcagagcagccagaaggaggaaaatagtgaggaatcggggacaggggacaccagcctggccggtcagcagctcgactcccatgcgctgcgggcgcctagtggcagctcactaccctccagcccaggctccaactcacgctcccccaaccggcagcaccaataaaggaggcagcgggcctggtgtgactt

SEQ ID NO: 67943 - DNA, 1749 bp, Artificial Sequence
  derived and/or modified sequence
atgtgcagagccctgctgtacggcggcatgagagagagccagcccgaggccgagatccccctgcaggacaccaccgccgaggccttcaccatgctgctgaagtacatctacaccggcagagccaccctgaccgacgagaaggaggaggtgctgctggacttcctgagcctggcccacaagtacggcttccccgagctggaggacagcaccagcgagtacctgtgcaccatcctgaacatccagaacgtgtgcatgaccttcgacgtggccagcctgtacagcctgcccaagctgacctgcatgtgctgcatgttcatggacagaaacgcccaggaggtgctgagcagcgagggcttcctgagcctgagcaagaccgccctgctgaacatcgtgctgagagacagcttcgccgcccccgagaaggacatcttcctggccctgctgaactggtgcaagcacaacagcaaggagaaccacgccgagatcatgcaggccgtgagactgcccctgatgagcctgaccgagctgctgaacgtggtgagacccagcggcctgctgagccccgacgccatcctggacgccatcaaggtgagaagcgagagcagagacatggacctgaactacagaggcatgctgatccccgaggagaacatcgccaccatgaagtacggcgcccaggtggtgaagggcgagctgaagagcgccctgctggacggcgacacccagaactacgacctggaccacggcttcagcagacaccccatcgacgacgactgcagaagcggcatcgagatcaagctgggccagcccagcatcatcaaccacatcagaatcctgctgtgggacagagacagcagaagctacagctacttcatcgaggtgagcatggacgagctggactgggtgagagtgatcgaccacagccagtacctgtgcagaagctggcagaagctgtacttccccgccagagtgtgcagcggcgacggcgtgagcctgtggtgccccctgtggagcagaacccccgagctgaagcagagcagcctgctgggcctgcccaagtgcagatacatcagaatcgtgggcacccacaacaccgtgaacaagatcttccacatcgtggccttcgagtgcatgttcaccaacaagaccttcaccctggagaagggcctgatcgtgcccatggagaacgtggccaccatcgccgactgcgccagcgtgatcgagggcgtgagcagaagcagaaacgccctgctgaacggcgacaccaagaactacgactgggacagcggctacacctgccaccagctgggcagcggcgccatcgtggtgcagctggcccagccctacatgatcggcagcatcagactgctgctgtgggactgcgacgacagaagctacagctactacgtggaggtgagcaccaaccagcagcagtggaccatggtggccgacagaaccaaggtgagctgcaagagctggcagagcgtgaccttcgagagacagcccgccagcttcatcagaatcgtgggcacccacaacaccgccaacgaggtgttccactgcgtgcacttcgagtgccccgagcagcagagcagccagaaggaggagaacagcgaggagagcggcaccggcgacaccagcctggccggccagcagctggacagccacgccctgagagcccccagcggcagcagcctgcccagcagccccggcagcaacagcagaagccccaacagacagcaccagtag

SEQ ID NO: 67944 - protein, 550 aa, Artificial Sequence
  derived and/or modified sequence
MSWPVLKFDAYFQEDVPMSTEEQYRIRQVNIYYYLEDDSMSVIEPVVENSGILQGKLIKRQRLAKNDRGDHYHWKDLNRGINITIYGKTFRVVDCDQFTQVFLESQGIELNPPEKMALDPYTELRKQPLRKYVTPSDFDQLKQFLTFDKQVLRFYAIWDDTDSMYGECRTYIIHYYLMDDTVEIREVHERNDGRDPFPLLMNRQRVPKVLVENAKNFPQCVLEISDQEVLEWYTAKDFIVGKSLTILGRTFFIYDCDPFTRRYYKEKFGITDLPRIDVSKREPPPVKQELPPYNGFGLVEDSAQNCFALIPKAPKKDVIKMLVNDNKVLRYLAVLESPIPEDKDRRFVFSYFLATDMISIFEPPVRNSGIIGGKYLGRTKVVKPYSTVDNPVYYGPSDFFIGAVIEVFGHRFIILDTDEYVLKYMESNAAQYSPEALASIQNHVRKREAPAPEAESKQTEKDPGVQELEALIDTIQKQLKDHSCKDNIREAFQIYDKEASGYVDRDMFFKICESLNVPVDDSLVKEVTCKRLLLPAFTFPSPVWIPLCGL

SEQ ID NO: 67945 - protein, 621 aa, Artificial Sequence
  derived and/or modified sequence
MLKTAFHRSQTLSYRNGYAIVRRPTVGIGGDRLQFNQLSQAELDELASKAPVLTYGQPKQAPPADFIPAHVAFDKKVLKFDAYFQEDVPMSTEEQYRIRQVNIYYYLEDDSMSVIEPVVENSGILQGKLIKRQRLAKNDRGDHYHWKDLNRGINITIYGKTFRVVDCDQFTQVFLESQGIELNPPEKMALDPYTELRKQPLRKYVTPSDFDQLKQFLTFDKQVLRFYAIWDDTDSMYGECRTYIIHYYLMDDTVEIREVHERNDGRDPFPLLMNRQRVPKVLVENAKNFPQCVLEISDQEVLEWYTAKDFIVGKSLTILGRTFFIYDCDPFTRRYYKEKFGITDLPRIDVSKREPPPVKQELPPYNGFGLVEDSAQNCFALIPKAPKKDVIKMLVNDNKVLRYLAVLESPIPEDKDRRFVFSYFLATDMISIFEPPVRNSGIIGGKYLGRTKVVKPYSTVDNPVYYGPSDFFIGAVIEVFGHRFIILDTDEYVLKYMESNAAQYSPEALASIQNHVRKREAPAPEAESKQTEKDPGVQELEALIDTIQKQLKDHSCKDNIREAFQIYDKEASGYVDRDMFFKICESLNVPVDDSLVKELIRMCSHGEGKINYYNFVRAFSN

SEQ ID NO: 67946 - DNA, 116 bp, Artificial Sequence
  derived and/or modified sequence
ggaacaaaatgaaatcgaacggtaggaatcgtacagaacggaaagaaatggaacggaatggaatgcactcaaatggaaaggagtccaatggaatcgaaaggaatagaatggaatgg

SEQ ID NO: 67947 - DNA, 1653 bp, Artificial Sequence
  derived and/or modified sequence
atgtcctggcctgtactaaaatttgacgcttatttccaagaggatgtgccaatgagtaccgaggaacagtatcgaattaggcaggtgaacatatactactatctggaggatgattccatgagcgttatcgagcccgtcgtggagaattcgggcatattgcaggggaagcttattaagcgccaaagactggcaaagaacgataggggggaccattatcactggaaggacctcaatagggggattaatattaccatttatgggaagacgtttcgagttgttgactgcgaccagttcactcaggtctttctcgagtcacaaggtatcgagctcaaccctccagaaaaaatggctctcgatccatacacagagctgagaaagcaacccttgagaaagtatgtcacaccctcagacttcgaccaactcaaacagtttcttacattcgacaaacaggtcttgcgattttatgccatttgggatgacaccgacagtatgtacggggagtgtagaacctatatcatccactattaccttatggacgataccgtcgaaatccgagaagtgcacgagaggaacgacggccgagaccccttcccgctgctcatgaatcgccaaagggtccccaaggttctggttgagaatgctaagaactttccacagtgcgtcctagaaatcagcgaccaggaggtgttggagtggtatacagcaaaagacttcatcgtgggaaaaagtttaacaattcttgggcgcactttcttcatctacgattgtgaccctttcaccagaagatactataaagaaaagttcggtatcacagatctcccaaggatcgacgtctccaagcgagagcctccacccgtgaagcaagagctccccccatacaacggttttggtcttgtggaagactcagctcagaactgcttcgctctcattcctaaggccccaaagaaggatgttataaagatgcttgtgaatgacaacaaagtgctccgatacctcgccgtcctggagagtcctataccagaggacaaggacagacgctttgttttcagttattttctggcaacagatatgataagcatcttcgagccacctgtacggaattcgggaatcatcggcggcaagtatctgggaaggaccaaagtggtcaaaccctacagcacagtggataatcctgtttactatggcccaagtgacttcttcataggcgcagtgattgaggtcttcggccacagattcataattctcgacacggatgaatacgtccttaaatatatggagagtaatgctgcgcagtatagcccagaagccctggcaagtatacagaatcatgtgaggaagcgcgaggcacctgcacccgaggctgaatccaaacaaactgagaaggatcctggcgtgcaggagctcgaggcattgatcgacacgatacaaaaacagctaaaggatcatagttgtaaagacaacatcagggaggcctttcagatttatgacaaggaagccagcggttacgtggaccgggacatgttcttcaaaatttgtgaatccctcaatgtgccagtcgacgattccctggtgaaggaagtcacctgcaaacgactgctcctccctgccttcaccttcccttcacccgtttggatccccttgtgtggcctatag

SEQ ID NO: 67948 - DNA, 1866 bp, Artificial Sequence
  derived and/or modified sequence
atgctgaaaacagctttccatcggtcacagaccttatcttacagaaacggttatgccatcgttcggcgccccaccgtgggtataggaggcgaccggctgcagttcaaccaactgagccaggctgaacttgacgaactggcaagcaaggcacctgtattgacctacgggcagccaaaacaggctcccccagccgatttcatccccgcccacgttgcctttgacaagaaagtgttgaagttcgatgcttacttccaggaggatgtgcctatgagcactgaagaacagtatagaatccgacaagtcaacatttactattacctggaggacgactcaatgtcggtgattgagcctgtggtagagaattccggcatcctgcaaggcaagttgatcaaaagacagagactagctaagaatgaccgaggcgaccactatcactggaaagatttgaatagagggatcaatattaccatttacggcaaaaccttccgcgtcgtggattgcgaccagttcacacaggtgtttctggagagccagggtattgaattgaatcctccagaaaagatggcccttgacccatacacagagctgaggaaacagcccttgagaaagtatgtgaccccatcagacttcgaccagctgaaacagtttttgacctttgataaacaggtgttacgattttacgcgatttgggacgatacagattccatgtatggggagtgcaggacttacatcattcattattaccttatggacgacactgtagaaatcagggaagttcacgagagaaatgacggtcgggaccctttcccgctactcatgaacagacagagggtaccaaaagtgcttgtggaaaacgctaaaaacttcccccagtgcgtcctcgagatcagcgaccaggaggtcttggaatggtatactgctaaagattttatcgtcgggaagtccttgacaattctcggcagaaccttcttcatttatgactgtgacccattcactagaagatattacaaggagaagtttggaatcaccgatttaccacgtattgatgtatctaagagggagccccctcctgtgaagcaagaattgccaccatacaacggctttgggcttgttgaagactccgctcagaattgttttgccttgatacctaaggcccccaaaaaagatgtcattaaaatgttagtgaatgacaacaaagttttacgatacctagccgtcttagaaagtcccattcctgaagacaaagatcgcagattcgtgttttcctactttctcgccacagacatgattagcattttcgaaccgcctgttcgaaactccggtataatagggggaaaatatctcgggaggacaaaagttgtcaagccctattctactgtcgataacccagtctactatggcccatcggacttttttatcggcgctgtgatcgaagtgtttggtcaccgctttatcatcttagacacagacgaatacgtgctgaagtacatggagtccaatgctgcacaatacagtcctgaggccctggctagtattcagaatcacgtgaggaaaagagaagctcccgccccagaggccgaatcaaagcagacggagaaggaccctggtgttcaggagttagaggcgctgatcgacacgattcaaaagcagctgaaggatcacagctgcaaggacaatattagagaggcctttcagatttacgataaagaggcctctggatacgtagatcgggatatgttttttaaaatctgtgaatccctgaacgtaccggtcgatgattccttagtgaaggagcttatccgaatgtgtagtcacggcgaaggcaaaattaattactataattttgtgcgcgccttctccaactag

SEQ ID NO: 67949 - DNA, 1653 bp, Artificial Sequence
  derived and/or modified sequence
atgtcctggcctgtgctgaagtttgatgcctacttccaggaggatgtgcccatgagcacagaggagcagtaccgcatccggcaggtgaacatctactactacctggaggatgacagcatgtctgtgattgagcctgtggtggagaacagcggcatcctgcagggcaagctgatcaagaggcagaggctggccaagaatgacagaggagaccactaccactggaaggacctgaacagaggcatcaacatcaccatctacggcaagaccttccgggtggtggactgtgaccagttcacccaggtgttcctggagagccagggcatcgagctgaaccccccagagaagatggccctggacccctacacagagctgaggaagcagcccctgaggaaatatgtgacccccagcgactttgaccagctgaagcagttcctgacctttgacaagcaggtgctgcgcttctacgccatctgggatgacacagacagcatgtatggagaatgtaggacctacatcatccactactacctgatggatgacacagtggagatccgggaggtgcatgaaagaaatgatggccgggaccccttccccctgctgatgaaccggcagagggtgcccaaggtgctggtggagaatgccaagaacttcccccagtgtgtgctggagatcagtgaccaggaggtgctggagtggtacacagccaaggacttcatcgtgggcaagagcctgaccatcctgggccgcaccttcttcatctatgactgtgaccccttcacccggcgctactacaaggagaagtttggcatcacagacctgcccagaattgatgtgtccaagcgggagcccccacctgtgaagcaggagctgcccccctacaacggcttcggcctggtggaggacagcgcccagaactgctttgccctgatccccaaggcccccaagaaggatgtgatcaagatgctggtgaatgacaacaaggtgctgcgctacctggccgtgctggagagccccatccctgaggacaaggacagaagatttgtgttctcctacttcctggccacagacatgatcagcatctttgagccccctgtgaggaacagcggcatcattggaggcaagtacctgggccgcaccaaggtggtgaagccctacagcacagtggacaaccctgtgtactacggccccagcgacttcttcatcggggctgtgattgaggtgtttggccaccgcttcatcatcctggacacagatgaatatgtgctgaagtacatggagagcaatgctgcccagtacagccctgaggccctggccagcatccagaaccacgtgaggaagcgggaggccccagcccctgaggccgagagcaagcagacagagaaggaccccggggtgcaggagctggaggccctgattgacaccatccagaagcagctgaaggaccacagctgcaaggacaacatccgggaggccttccagatctatgacaaggaggccagcggctacgtggaccgggacatgttcttcaagatctgtgagagcctgaatgtgcctgtggatgacagcctggtgaaggaggtgacctgcaagaggctgctgctgcctgccttcaccttccccagccctgtgtggatccccctgtgtggcctgtag

SEQ ID NO: 67950 - DNA, 1866 bp, Artificial Sequence
  derived and/or modified sequence
atgctgaagacagccttccacaggagccagaccctgagctacagaaatggctacgccatcgtgcggcggcccaccgtgggcatcggcggggaccggctgcagttcaaccagctgagccaggccgagctggatgagctggccagcaaggcccctgtgctgacctacggccagcccaagcaggcccccccagctgacttcatcccagcccacgtggcctttgacaagaaggtgctgaagtttgatgcctacttccaggaggatgtgcccatgagcacagaggagcagtaccgcatccggcaggtgaacatctactactacctggaggatgacagcatgtctgtgattgagcctgtggtggagaacagcggcatcctgcagggcaagctgatcaagaggcagaggctggccaagaatgacagaggagaccactaccactggaaggacctgaacagaggcatcaacatcaccatctacggcaagaccttccgggtggtggactgtgaccagttcacccaggtgttcctggagagccagggcatcgagctgaaccccccagagaagatggccctggacccctacacagagctgaggaagcagcccctgaggaaatatgtgacccccagcgactttgaccagctgaagcagttcctgacctttgacaagcaggtgctgcgcttctacgccatctgggatgacacagacagcatgtatggagaatgtaggacctacatcatccactactacctgatggatgacacagtggagatccgggaggtgcatgaaagaaatgatggccgggaccccttccccctgctgatgaaccggcagagggtgcccaaggtgctggtggagaatgccaagaacttcccccagtgtgtgctggagatcagtgaccaggaggtgctggagtggtacacagccaaggacttcatcgtgggcaagagcctgaccatcctgggccgcaccttcttcatctatgactgtgaccccttcacccggcgctactacaaggagaagtttggcatcacagacctgcccagaattgatgtgtccaagcgggagcccccacctgtgaagcaggagctgcccccctacaacggcttcggcctggtggaggacagcgcccagaactgctttgccctgatccccaaggcccccaagaaggatgtgatcaagatgctggtgaatgacaacaaggtgctgcgctacctggccgtgctggagagccccatccctgaggacaaggacagaagatttgtgttctcctacttcctggccacagacatgatcagcatctttgagccccctgtgaggaacagcggcatcattggaggcaagtacctgggccgcaccaaggtggtgaagccctacagcacagtggacaaccctgtgtactacggccccagcgacttcttcatcggggctgtgattgaggtgtttggccaccgcttcatcatcctggacacagatgaatatgtgctgaagtacatggagagcaatgctgcccagtacagccctgaggccctggccagcatccagaaccacgtgaggaagcgggaggccccagcccctgaggccgagagcaagcagacagagaaggaccccggggtgcaggagctggaggccctgattgacaccatccagaagcagctgaaggaccacagctgcaaggacaacatccgggaggccttccagatctatgacaaggaggccagcggctacgtggaccgggacatgttcttcaagatctgtgagagcctgaatgtgcctgtggatgacagcctggtgaaggagctgatccgcatgtgcagccatggagagggcaagatcaactactacaactttgtgcgggccttcagcaactag

SEQ ID NO: 67951 - DNA, 1653 bp, Artificial Sequence
  derived and/or modified sequence
atgagctggcccgtgctgaagttcgacgcctacttccaggaggacgtcccaatgtcaaccgaagaacaatacagaataagacaggtgaacatttactattacctggaagacgactccatgagcgttatagaacctgtcgtggaaaactcaggtattctgcagggaaaactcattaagcgtcagcggcttgccaagaatgacaggggggaccactaccactggaaagatctgaaccgaggaatcaacattacaatttacgggaagacattccgagtcgtggactgtgaccagttcacacaggtgttcctggagagccagggaatcgagctgaatccacccgagaaaatggccctagatccgtacactgaattgagaaagcaaccactgagaaagtatgttaccccgtcggatttcgatcagttaaaacagtttctcacatttgacaagcaggtactccgcttttacgctatctgggatgatacagattctatgtacggtgaatgtcggacctatataatccactactatctgatggatgatacagtcgagattagggaggtccacgagagaaatgacgggagagatccattccccctgttaatgaaccgacagagggtcccaaaagtcctggttgagaatgctaagaacttccctcagtgcgtgctcgaaattagcgatcaagaggtgctcgagtggtacaccgcgaaagattttattgtagggaagtccctgaccatcctgggccggacgttcttcatatatgactgcgatcctttcactcggcgttactataaggaaaaattcggtatcacagatctgccccgtattgatgtgagcaaacgggaacctccgccggtcaagcaagaactcccaccctacaatggattcggacttgtggaagatagcgcccagaactgctttgcccttattcctaaggctcctaagaaggacgtgatcaagatgctagtcaacgataacaaggtgctgagatatctcgctgtgttagagtctcctatcccagaagacaaggataggcggtttgtcttcagttattttctcgccaccgacatgataagtattttcgaaccccccgtgagaaacagtggcatcataggggggaagtacctgggccgcacgaaagtcgtgaagccttattccaccgtggataatcccgtctactacgggccatccgactttttcattggcgcagttattgaagtgtttggtcatcgattcatcatcttagacactgacgaatacgtgctaaagtatatggagagtaacgccgcccaatattctccagaagccctggcatccatccagaatcatgtgaggaagagagaagcccctgctccagaagccgaatccaagcagacggaaaaagatccaggtgtgcaggagttggaagcactgatcgacaccatccagaaacagctgaaagaccatagctgtaaggataacatccgagaagcattccaaatctatgataaagaagcatcgggctacgtcgaccgagacatgttcttcaagatttgcgaatccctgaatgttcccgttgatgattctctcgttaaggaagtcacttgcaagaggttactgcttccagccttcaccttcccctcacccgtctggatcccactgtgcgggctgtag

SEQ ID NO: 67952 - DNA, 1866 bp, Artificial Sequence
  derived and/or modified sequence
atgctgaagaccgccttccaccggagccagaccctgagctaccggaacgggtatgcaatcgtgcgcagacctacagtgggcatcggcggcgatcgcctgcagttcaaccaattgtcccaagcagaacttgacgagcttgccagtaaagcaccagtcctgacttacgggcagcctaaacaggccccaccggcagatttcattccggcgcacgtggcatttgacaaaaaggtgcttaagtttgacgcctactttcaggaggacgttccaatgagcaccgaggagcagtacagaatcaggcaagttaacatctactactatttggaggacgactccatgtcggtgatcgagccggtggtcgagaattccggcatcctgcagggcaaactaattaagcggcaacgcctggccaagaacgatagaggagaccactaccattggaaggacctaaatcgggggatcaacatcactatctatggcaagacattcagagttgtggactgtgatcagtttacacaggtcttcctcgaatcccagggtatcgagctcaacccccccgagaagatggcgttggacccatacaccgagcttcgaaaacagccactgcgtaagtacgtcacacctagcgacttcgaccagctgaaacaattccttaccttcgacaaacaagtcttgcgcttctatgccatctgggacgacaccgatagcatgtacggcgaatgtaggacgtatatcatacactactatctcatggatgacaccgtggaaatccgcgaggtgcatgaaagaaacgatggccgcgacccatttcccctgttaatgaataggcagcgggtgcccaaggtgctggtggagaacgctaagaattttcctcagtgcgtgctggagatatctgatcaggaagtcttagagtggtacaccgcaaaagacttcatcgtgggaaaaagcctgacaatactgggacgaaccttttttatttatgactgcgaccctttcacccgccgttattacaaggaaaaattcggaattactgacctgcctaggatcgacgtctcaaagcgcgaacccccacccgttaaacaagaactgcccccctacaacggctttggactggtggaggatagcgcacaaaactgctttgccttaattcccaaggcgccaaaaaaagacgtgattaagatgttagtgaacgacaataaagttctgcggtatctggccgtactcgagtctcccattcccgaggacaaggatagaagatttgtattcagttatttcctagcaacagacatgatctctatctttgagccgccagtgagaaactccggaattatcggtggcaaatatctggggagaacaaaggtcgttaagccttactctactgttgacaacccagtgtattatggcccttccgactttttcatcggtgcagtgattgaggtgttcggccatcgcttcatcattctcgataccgatgagtatgtcctgaagtatatggaatctaacgcagcgcagtactctcctgaagccctggccagcattcaaaaccatgtgcgaaagagggaggctcccgcgccagaggccgaaagtaaacagaccgagaaagatcctggtgtgcaggagctggaggctctgattgataccatccagaaacagctgaaggatcacagttgtaaggataacatccgcgaggctttccaaatctatgataaggaggccagcgggtatgtggatagagatatgttctttaagatatgtgagtccctgaacgttccggtcgacgactcgttggttaaagaactcatccggatgtgttcccacggggagggtaaaattaactattataactttgtccgagctttcagtaattag

SEQ ID NO: 67953 - DNA, 1653 bp, Artificial Sequence
  derived and/or modified sequence
atgtcctggcctgtcctcaagttcgacgcatacttccaggaggacgtgccaatgtccactgaggagcaatatcggatccgacaggtgaatatctattattacctcgaagacgattccatgagtgtcattgagcccgtggtggagaactcagggatcctgcagggaaaactgattaagcgccagcgtctcgctaaaaatgataggggggaccactaccattggaaggaccttaatcgaggtatcaacattaccatttatggcaagaccttccgcgttgtcgactgtgatcagtttacacaagtgtttctggaatcacagggtatcgagctgaatccccctgagaaaatggctttagacccatacactgagctgcggaagcagccgctccgaaagtacgtgacaccttcggatttcgaccagctgaagcagttcctgactttcgacaagcaagttctgcgcttctacgctatttgggacgataccgacagtatgtatggagaatgtagaacttatattatccactactatctgatggacgataccgtggagataagagaagtccacgagaggaacgacggacgggaccctttcccattattaatgaaccggcagcgggtcccaaaggttcttgtggagaatgctaagaactttcctcaatgcgtactggaaatttctgaccaggaggttcttgagtggtataccgcaaaggatttcattgtcggtaagtctctgacaatcctgggaagaactttttttatatacgactgcgacccttttacacggcgatactacaaagagaagttcgggatcaccgatttacctcgaattgatgtgtccaaaagggagccaccccctgttaaacaggaactccccccatacaatggctttggactcgttgaagattcagcacaaaattgctttgctcttataccaaaagcccctaagaaagacgtgattaagatgctggtgaatgataataaagtcctacgatacctggccgtgctagagtcccctatacctgaagacaaggatcgcagattcgttttttcgtactttcttgccaccgacatgatcagcatcttcgaaccaccggttcgcaatagtgggattattgggggaaaatatctaggcagaaccaaggtggttaagccctattccaccgttgataaccccgtgtactacggacccagtgattttttcattggggcagtaatagaggtctttggccacaggtttataatcctcgatacggacgagtacgtactgaaatacatggagtcaaacgctgcgcaatactctcccgaagccctcgctagcatccagaaccatgtcaggaaacgcgaagcgccagctcctgaagcagaatcaaagcaaactgagaaagatccgggtgtacaggagttagaagctttaattgatactattcaaaagcagttaaaggaccactcgtgtaaggacaatattcgcgaagcctttcagatttatgacaaggaagcatctggttacgtggaccgagacatgtttttcaaaatctgtgagagcctaaatgtccctgtggatgactcgctggttaaggaggtgacttgcaagaggctcctgctgcccgcattcacttttccaagtccagtttggattcccctgtgcggtctgtag

SEQ ID NO: 67954 - DNA, 1866 bp, Artificial Sequence
  derived and/or modified sequence
atgttgaaaactgcatttcataggtcacagacactctcttaccggaacggctatgctattgtgagaagacctaccgtgggcatcgggggtgatcgcctgcagtttaatcagctctcccaggcggagctggacgagctcgcctctaaggccccagtgttaacctacggccagcctaagcaggcgcctcccgctgatttcatccctgcccacgtggccttcgacaagaaagtgctgaagttcgatgcttactttcaggaagatgtgccaatgtctactgaagagcagtacagaatcagacaagtgaatatatactactatctggaagacgactccatgtccgttattgagccggtggttgaaaatagcggtattctgcagggtaagcttatcaaaagacagcgtttagcaaagaacgatcggggagatcactaccactggaaagatctgaaccggggaattaacattactatttacggaaagaccttcagggtggttgactgcgaccagtttacacaagtctttctggagtcccagggaatcgagctgaatcctcctgagaagatggccctggacccctacactgaactgaggaagcagcctctccgtaaatatgttaccccctctgactttgatcagctgaaacaatttctgacgttcgacaaacaggtgctacggttttatgcaatttgggacgacaccgactccatgtacggcgagtgccgcacatacataattcactattacctgatggacgacaccgtggaaataagagaggtgcacgagcgcaatgatggtcgcgatccattccctctattgatgaacagacaaagagtcccaaaagtgctcgttgaaaacgctaagaactttcctcagtgtgtgttggaaatcagtgatcaggaagtcctggaatggtacactgccaaagactttatcgtggggaaaagcctgaccatcctagggcgtacctttttcatatacgactgcgaccccttcacacgcaggtactataaggagaaatttgggatcacagacttgccgaggatcgatgtctcgaagagggagccaccccctgtgaagcaggagctgcctccctacaacggatttggcctggttgaagactctgctcaaaactgttttgccttgatcccgaaggcccctaagaaagatgtgattaaaatgcttgtcaacgacaataaggtgctgcgctacttagccgtcctggaatcccccattccagaagataaggacaggcgcttcgtgtttagttattttctcgccaccgatatgatatccatctttgagcctccagtgcgcaattctgggattattggaggcaagtacctcggacgtaccaaggtggtgaagccttactctaccgtggacaaccccgtgtattacggaccttcagatttctttataggggcagtaattgaggtttttggacatcgattcatcatcctcgatacagacgagtacgtcttaaaatatatggagtcaaacgccgctcagtactccccagaggcgctggcctctattcagaaccatgttaggaagagagaggctcccgctcccgaggcagaatcaaaacagacggagaaggatccgggagttcaggagctggaggctctgatcgataccattcaaaagcaactcaaagatcattcctgcaaggataatatacgcgaagccttccaaatctacgacaaggaagcatcaggctatgtggacagggacatgttttttaagatctgtgagagcctgaatgttccagtggacgattcgctcgtgaaagaactgatccgtatgtgttcacatggcgaggggaagatcaactactataatttcgttcgtgctttttccaactag

SEQ ID NO: 67955 - DNA, 1653 bp, Artificial Sequence
  derived and/or modified sequence
atgagctggcccgtgctgaagttcgacgcctacttccaggaggacgtgcccatgagcaccgaggagcagtacagaatcagacaggtgaacatctactactacctggaggacgacagcatgagcgtgatcgagcccgtggtggagaacagcggcatcctgcagggcaagctgatcaagagacagagactggccaagaacgacagaggcgaccactaccactggaaggacctgaacagaggcatcaacatcaccatctacggcaagaccttcagagtggtggactgcgaccagttcacccaggtgttcctggagagccagggcatcgagctgaacccccccgagaagatggccctggacccctacaccgagctgagaaagcagcccctgagaaagtacgtgacccccagcgacttcgaccagctgaagcagttcctgaccttcgacaagcaggtgctgagattctacgccatctgggacgacaccgacagcatgtacggcgagtgcagaacctacatcatccactactacctgatggacgacaccgtggagatcagagaggtgcacgagagaaacgacggcagagaccccttccccctgctgatgaacagacagagagtgcccaaggtgctggtggagaacgccaagaacttcccccagtgcgtgctggagatcagcgaccaggaggtgctggagtggtacaccgccaaggacttcatcgtgggcaagagcctgaccatcctgggcagaaccttcttcatctacgactgcgaccccttcaccagaagatactacaaggagaagttcggcatcaccgacctgcccagaatcgacgtgagcaagagagagcccccccccgtgaagcaggagctgcccccctacaacggcttcggcctggtggaggacagcgcccagaactgcttcgccctgatccccaaggcccccaagaaggacgtgatcaagatgctggtgaacgacaacaaggtgctgagatacctggccgtgctggagagccccatccccgaggacaaggacagaagattcgtgttcagctacttcctggccaccgacatgatcagcatcttcgagccccccgtgagaaacagcggcatcatcggcggcaagtacctgggcagaaccaaggtggtgaagccctacagcaccgtggacaaccccgtgtactacggccccagcgacttcttcatcggcgccgtgatcgaggtgttcggccacagattcatcatcctggacaccgacgagtacgtgctgaagtacatggagagcaacgccgcccagtacagccccgaggccctggccagcatccagaaccacgtgagaaagagagaggcccccgcccccgaggccgagagcaagcagaccgagaaggaccccggcgtgcaggagctggaggccctgatcgacaccatccagaagcagctgaaggaccacagctgcaaggacaacatcagagaggccttccagatctacgacaaggaggccagcggctacgtggacagagacatgttcttcaagatctgcgagagcctgaacgtgcccgtggacgacagcctggtgaaggaggtgacctgcaagagactgctgctgcccgccttcaccttccccagccccgtgtggatccccctgtgcggcctgtag

SEQ ID NO: 67956 - DNA, 1866 bp, Artificial Sequence
  derived and/or modified sequence
atgctgaagaccgccttccacagaagccagaccctgagctacagaaacggctacgccatcgtgagaagacccaccgtgggcatcggcggcgacagactgcagttcaaccagctgagccaggccgagctggacgagctggccagcaaggcccccgtgctgacctacggccagcccaagcaggccccccccgccgacttcatccccgcccacgtggccttcgacaagaaggtgctgaagttcgacgcctacttccaggaggacgtgcccatgagcaccgaggagcagtacagaatcagacaggtgaacatctactactacctggaggacgacagcatgagcgtgatcgagcccgtggtggagaacagcggcatcctgcagggcaagctgatcaagagacagagactggccaagaacgacagaggcgaccactaccactggaaggacctgaacagaggcatcaacatcaccatctacggcaagaccttcagagtggtggactgcgaccagttcacccaggtgttcctggagagccagggcatcgagctgaacccccccgagaagatggccctggacccctacaccgagctgagaaagcagcccctgagaaagtacgtgacccccagcgacttcgaccagctgaagcagttcctgaccttcgacaagcaggtgctgagattctacgccatctgggacgacaccgacagcatgtacggcgagtgcagaacctacatcatccactactacctgatggacgacaccgtggagatcagagaggtgcacgagagaaacgacggcagagaccccttccccctgctgatgaacagacagagagtgcccaaggtgctggtggagaacgccaagaacttcccccagtgcgtgctggagatcagcgaccaggaggtgctggagtggtacaccgccaaggacttcatcgtgggcaagagcctgaccatcctgggcagaaccttcttcatctacgactgcgaccccttcaccagaagatactacaaggagaagttcggcatcaccgacctgcccagaatcgacgtgagcaagagagagcccccccccgtgaagcaggagctgcccccctacaacggcttcggcctggtggaggacagcgcccagaactgcttcgccctgatccccaaggcccccaagaaggacgtgatcaagatgctggtgaacgacaacaaggtgctgagatacctggccgtgctggagagccccatccccgaggacaaggacagaagattcgtgttcagctacttcctggccaccgacatgatcagcatcttcgagccccccgtgagaaacagcggcatcatcggcggcaagtacctgggcagaaccaaggtggtgaagccctacagcaccgtggacaaccccgtgtactacggccccagcgacttcttcatcggcgccgtgatcgaggtgttcggccacagattcatcatcctggacaccgacgagtacgtgctgaagtacatggagagcaacgccgcccagtacagccccgaggccctggccagcatccagaaccacgtgagaaagagagaggcccccgcccccgaggccgagagcaagcagaccgagaaggaccccggcgtgcaggagctggaggccctgatcgacaccatccagaagcagctgaaggaccacagctgcaaggacaacatcagagaggccttccagatctacgacaaggaggccagcggctacgtggacagagacatgttcttcaagatctgcgagagcctgaacgtgcccgtggacgacagcctggtgaaggagctgatcagaatgtgcagccacggcgagggcaagatcaactactacaacttcgtgagagccttcagcaactag

SEQ ID NO: 67957 - DNA, 2020 bp, Artificial Sequence
  derived and/or modified sequence
gaggacgaagcaggacctaggtggcggcggtggtaccggctgcaatggtgtccaatcccgtgcatggcttgccctttcttccgggcacgtcctttaaggactctacgaaaacagccttccacagaagtcagacgctgagctacaggaacggctatgcaattgttcgacgtccaacagttgggataggcggagaccggctccagttcaaccagctgtcccaggctgagctggatgagttggccagtactgaaatttgatgcctatttccaagaagatgttcctatgtcaactgaggaacagtataggatccgtcaggtgaacatttactattatctagaagatgacagcatgtctgtcatagagcctgttgtagaaaattctggaatccttcaaggcaagttaataaaacgccagcggctagccaagaatgaccggggtgaccattaccattggaaagacctaaatcgaggaataaacatcacaatttatggcaaaactttccgcgttgttgactgtgaccaattcacacaggtatttttagaaagccaaggaattgagttaaatccaccagagaagatggctcttgatccttacactgaactccgaaaacagcctcttcgtaagtatgtcaccccatcagactttgatcaactcaagcaatttctcacctttgacaaacaggtccttcgattctatgcaatctgggatgatacagacagcatgtatggtgaatgtcggacctacatcattcattactatcttatggatgatacggtggaaattcgagaggtccacgaacggaatgatgggagagatcctttcccactcctaatgaaccgccagcgtgtgcccaaagttttggtggaaaatgcaaagaacttccctcagtgtgtgctagaaatctctgaccaagaagtgttggaatggtatactgctaaagacttcattgttgggaagtcactcactatccttgggagaactttcttcatttatgattgtgatccatttactcgacggtattacaaagagaagtttggaatcactgatttaccacgtattgatgtgagcaagcgggaaccacctccagtaaaacaggagttgcctccttataacggttttggactagtggaagattctgctcagaattgttttgctctcattccaaaagctccaaaaaaagacgttattaaaatgctggtgaatgataacaaggtgcttcgttatttggctgtactggaatcccccatcccagaagacaaagaccgcagatttgtcttctcttactttctagctaccgacatgatcagtatctttgagcctcctgttcgcaattctggtatcattgggggcaagtaccttggcaggactaaagttgttaaaccatactctacagtggacaaccctgtctactatggccccagtgacttcttcattggtgctgtgattgaagtgtttggtcaccggttcatcatccttgatacagacgagtatgttttgaaatacatggagagcaacgctgcccagtattcaccagaagcactcgcgtcaattcagaaccatgtccgaaagcgagaagcgcctgctccagaagcagaaagcaagcaaactgaaaaggatccaggcgtgcaggaattggaagcattaatagacacaattcagaagcaactgaaagatcactcatgcaaagacaacattcgtgaggcatttcaaatttatgacaaggaagcttcaggatatgtggacagagacatgttctttaaaatctgtgaatcgcttaacgtcccagtggatgactccttggttaaggaggtcacctgcaagcggcttctcctgcctgcctttacatttcccagtcctgtctggatcccactgtgcggtctctgacctcctctgcacaacctgagctggtgtccacttcttactgacatcccatctgcttctgagaactcatgtgagccagggcaggcatctgccctagaagcttcttcttttgtctgaaagctagttgtttaaagagcat

SEQ ID NO: 67958 - DNA, 5445 bp, Artificial Sequence
  derived and/or modified sequence
tttttttttttttagtttttgtagagacagcatcttgttgcccaggctggtctcgaactctggggctgaagtgattctccctcttcagcctcccagagttctgggattataggcacgagccaccatgcccagccttaatgttgaaaacagccttccacagaagtcagacgctgagctacaggaacggctatgcaattgttcgacgtccaacagttgggataggcggagaccggctccagttcaaccagctgtcccaggctgagctggatgagttggccagtaaggcaccagtcttaacttatggccaacctaaacaagccccacctgcggattttattcctgcgcatgtggcctttgacaaaaaggtactgaaatttgatgcctatttccaagaagatgttcctatgtcaactgaggaacagtataggatccgtcaggtgaacatttactattatctagaagatgacagcatgtctgtcatagagcctgttgtagaaaattctggaatccttcaaggcaagttaataaaacgccagcggctagccaagaatgaccggggtgaccattaccattggaaagacctaaatcgaggaataaacatcacaatttatggcaaaactttccgcgttgttgactgtgaccaattcacacaggtatttttagaaagccaaggaattgagttaaatccaccagagaagatggctcttgatccttacactgaactccgaaaacagcctcttcgtaagtatgtcaccccatcagactttgatcaactcaagcaatttctcacctttgacaaacaggtccttcgattctatgcaatctgggatgatacagacagcatgtatggtgaatgtcggacctacatcattcattactatcttatggatgatacggtggaaattcgagaggtccacgaacggaatgatgggagagatcctttcccactcctaatgaaccgccagcgtgtgcccaaagttttggtggaaaatgcaaagaacttccctcagtgtgtgctagaaatctctgaccaagaagtgttggaatggtatactgctaaagacttcattgttgggaagtcactcactatccttgggagaactttcttcatttatgattgtgatccatttactcgacggtattacaaagagaagtttggaatcactgatttaccacgtattgatgtgagcaagcgggaaccacctccagtaaaacaggagttgcctccttataacggttttggactagtggaagattctgctcagaattgttttgctctcattccaaaagctccaaaaaaagacgttattaaaatgctggtgaatgataacaaggtgcttcgttatttggctgtactggaatcccccatcccagaagacaaagaccgcagatttgtcttctcttactttctagctaccgacatgatcagtatctttgagcctcctgttcgcaattctggtatcattgggggcaagtaccttggcaggactaaagttgttaaaccatactctacagtggacaaccctgtctactatggccccagtgacttcttcattggtgctgtgattgaagtgtttggtcaccggttcatcatccttgatacagacgagtatgttttgaaatacatggagagcaacgctgcccagtattcaccagaagcactcgcgtcaattcagaaccatgtccgaaagcgagaagcgcctgctccagaagcagaaagcaagcaaactgaaaaggatccaggcgtgcaggaattggaagcattaatagacacaattcagaagcaactgaaagatcactcatgcaaagacaacattcgtgaggcatttcaaatttatgacaaggaagcttcaggatatgtggacagagacatgttctttaaaatctgtgaatcgcttaacgtcccagtggatgactccttggttaaggagttaatcaggatgtgctctcatggagaaggcaaaattaactactataactttgttcgtgctttctcaaactgacctgctgatgagaaaatgcaagacaatttttgatactggaactatgctttgaaatacaccttacactcttcatagaggcatttacagggttcctgaagttttatttctgttttggttcttctttcactcctactgaagtcgaaactaaattggatctaataggatctaagattggtgccttatttagggtgataggggtatagcaatgtctaattttgtgtgtcaaattgacttggccacagggggcccaaatatttcctttctttctttttaaaaaaataaatttttttagagatgggatctcactctgtcatacaggctggagtgtggtggcactatcctagttctatgaagcctcagactcctgggctcaagtgatcctcccacttcaacctccccagtagctgggacaacaggctcaagccaccatgcccagctaatttttaaaattattttgtagagacaaggtcttgctaggttgcctgaacttgtctcaaactcatgagctccagaaattctcccacctcagcctccaaaagtgctgggattataggcatgagccactgtgcccagcctcagatatttcattattctgggggtttctctgaaggtatttttcgatgagataaacatttgaatcagaagactaagtaaaacagatagtcctccctaatgtgggtgggcctcctccaatcatttgaagacatgagtagaataaaaaggctgacctttccccaggtaagagaattcctcctgcctgactggcttcaaattggaacatcagccttttcttgccttcagacacaaatggaaacatcagctgttggtctggagcctgctgaccttcagactggacctaaaccatcagctctcctaagtcataggcctttggattcagactggaattatacctttagctctcctgggtctccagcttgccaatttaccctgcagatcttgggacttgtaagccttcataattgtgtgagcaatttcttataactctctctttctctctctctacatatatatatatatatatattttatatgtacacattcatacacacacacgcttatatgtatacatatagtatgtatatgtgtatatatattatgtatatacatatatgtgcacacatctctactaaaaatagaaaaattagccaggtgtggtggcgtgtgcctgtagtcccagccactcgggaggcttaaatgggagaatcacttgaaccctggaggcagaggttgcagtgagccaagaccacgccactgcactccatccagcctgggtgacagagcaagactccatctcaaaaaaaaaaaggttagaaaaatgctgcttttagagagcctggccttgagagaggaaggaaagactagttgcagttactattctctggtgagctctgactggctttttacaaacagggcttctctttggttgaagtcagccactaagttcatctttaaacatgctatctcaaattccccgaagccacccaaaatgtggtatgaatgaggatagagttacacagaattcagactgctttgccctctcagaacttctagggaacttcccttggtgtttccttccctaacgagctcagccacttgtaaccagcttattgaaagggctgtgaatgtattatgttgattccttttctgttccaggttattatcttgggaataacccatgttttgttttgttttaccctcagtcgctcataactatttaaaacagtatctctttcaagtacagatgctcctctacttatggggctatgtctcaataaactcacgtaagtaaaaaatatcacaagttgaaaacacatttaataaccctgataagcccattgtaaagtaggcaaataagttggaccattgaaagttggggactatctgtattttagaagttttttcagcttaaaaattaccaagctctatcctacttggcccagctcagtccttcccccaggcttagaagcctgtggtaaagagtgtgtgtatactggggtgatgatagtggtttcttcttactcccttctttctgtcttctgctccctttgttcctattcagccatgctgctgtttctagcccatgtaggctctgggaaaggttaagcgggtagaaaccagagaaaaagggcaaagtcttatttctgtggctagtaatgtcgtaatgtggggccaggtctgagtgacatgtgccgaaaggctgactctttctcccagagcaccttttctctctttttggattcagggggtacatgtgcaggtttgttacatgagtatattgcacccaggtagtgagcatagtgcccagtaagtagtttttccacacataccccctccttcccttcccactctggtagtccccagtgtctattgttcccatcattatgtctatgtgtattcaatgtttagctcccacttagaagtaagaacatgcaatatttggtttcctattcctgcatcaattcactttaggataatggcctccagctgcatccatgttgctgcagaatacatgatttcattttttatggctgcgtagtattccatggtgtagatatacttcatttaaaaaatctaatccaccattgattggcacctaggttgattccatgtcctttgctcagagccccgttttggtgagttcttagaactctttccaaccggaaactgcccagtgcaccactctcagatggacgggacccagtctgtacctgatcaccccggctctaatggtatggtctccaaggctccttctgatcttcccaggaggccctttcaggctgacacaccttccagggtgtgcactctcgccatgttctcacccagatggctctcttggctgtgtaattaggcagctcaatccctttcctttagactgtttcaggggagaaccaggtaccccaaatcttatgctctccaaactccaggggacagacacatgtcaaaccctgagtcttttaaagtataccctcacttagcttgcagacccaaggcactccagcccctttcaagaagcttgcactttctgatattttctccatcactcttgcctcctgtggtagaggagctttgggctactccttaacaaatcattcatggatcggcagcaaatctgcaacatatggatatatttgccaatttttgtcctcagctttgggtctcagccaaaatggagatttaggaaagtctcatttagcatcctctagcctgcttttggctgttttgttttgtttttgtgtttgttttttagagacagggtcttactctgttgccagactggaatgcggtggtgtgaccatagctcactgcagcctcaaactcctgggctcatgcaatcctcctgcctcagccttctgagtagctaggcctgtagtctcagagggaactgtcttcaataaagttggcactgtccacatacactcctt

SEQ ID NO: 67959 - protein, 332 aa, Artificial Sequence
  derived and/or modified sequence
MWPLWLCWALWVLPLAGPGAALTEEQLLGSLLRQLQLSEVPVLDRADMEKLVIPAHVRAQYVVLLRRSHGDRSRGKRFSQSFREVAGRFLASEAALHRHGRLSPRSAQARVTVEWLRVRDDGSNRTSLIDSRLVSVHESGWKAFDVTEAVNFWQQLSRPRQPLLLQVSVQREHLGPLASGAHKLVRFASQGAPAGLGEPQLELHTLDLRDYGAQGDCDPEAPMTEGTRCCRQEMYIDLQGMKWAKNWVLEPPGFLAYECVGTCQQPPEALAFNWPFLGPRQCIASETASLPMIVSIKEGGRTRPQVVSLPNMRVQKCSCASDGALVPRRLQP

SEQ ID NO: 67960 - DNA, 387 bp, Artificial Sequence
  derived and/or modified sequence
atgaagcacaagtacaacaccctgagctggtacaagaaggagcggtcgacacaactgagaagatttatcgttcatcagcccgaggtcgggcttttctttttcctccgggacgtcgtgtacaattatatcactgagaagactacctgccggtgtccacttacccaggaacgtccatgtgatacaggtggaaaattcgggcgcatatggatttgccagcccgaagagctcggcaaaatgcagatctggatctgccaaccggaggagttggggaaaatgcagattgacaagaataggactatggttcagcagatgtggtacatctggtacggcggactggatactagcaccaatagccttctgccaatactggtgcgtgggatggcatag

SEQ ID NO: 67961 - DNA, 999 bp, Artificial Sequence
  derived and/or modified sequence
atgtggccattatggctatgttgggccttatgggtgttgcccctcgccggtcctggtgctgccttaaccgaagagcagttgttgggctcattactacgacagctgcagctgtccgaagttcctgtgctggatcgtgcagatatggaaaaactggtaatccctgcccacgttcgcgcccaatatgttgtgcttctccggaggtcccatggcgatcggtcaaggggaaagaggttctcgcagtcatttcgcgaggtcgcaggccgctttctggctagcgaggctgcgttgcaccggcatggacggctcagtcctcggtccgctcaagctcgtgtcacggtcgagtggctccgcgttcgcgatgacggaagtaaccgcacaagtctaattgactcaaggcttgtgtcagtccacgagtccggctggaaggctttcgacgtgaccgaagctgtgaacttttggcagcagctgagcagacctagacaaccactgctgttgcaggtcagcgtgcagcgggaacatttggggcccctggcctcaggcgctcacaagctggtgaggttcgctagccagggtgcccccgcagggctgggggaacctcagctcgaactccacaccctggacctccgggattatggggctcagggagactgcgaccccgaggcacccatgactgaaggcacccggtgctgccgccaagagatgtatattgatctgcaagggatgaaatgggcaaaaaactgggttctggaacctccagggttcttagcatatgaatgcgtagggacctgccagcagccccccgaggccctggcttttaactggccatttctgggaccccgccagtgtattgcgtctgaaactgcaagtctacccatgatcgtgtccatcaaagaggggggaaggacgaggccccaagtggtcagcctgcctaatatgagggtgcagaaatgctcatgcgctagtgatggagccctcgtcccccggcggttacagccttag

SEQ ID NO: 67962 - DNA, 999 bp, Artificial Sequence
  derived and/or modified sequence
atgtggcccctgtggctgtgctgggccctgtgggtgctgcccctggccggccctggggccgccctgacagaggagcagctgctgggcagcctgctgcggcagctgcagctgtctgaggtgcctgtgctggacagagctgacatggagaagctggtgatcccagcccacgtgcgggcccagtatgtggtgctgctgcggcgcagccatggagacaggagccggggcaagcgcttcagccagagcttccgggaggtggccggccgcttcctggccagcgaggccgccctgcacagacatggccgcctgagccccaggtctgcccaggcccgggtgacagtggagtggctgcgggtgagagatgatggcagcaacagaaccagcctgattgacagccggctggtgtctgtgcatgaaagtggctggaaggcctttgatgtgacagaagctgtgaacttctggcagcagctgagccggccccggcagcccctgctgctgcaggtgtctgtgcagcgggagcacctgggccccctggccagcggggcccacaagctggtgcgctttgccagccagggcgccccagctggcctgggggagccccagctggagctgcacaccctggacctgcgggactatggagcccagggcgactgtgaccctgaggcccccatgacagagggcacccgctgctgccggcaggagatgtacatcgacctgcagggcatgaagtgggccaagaactgggtgctggagcccccaggcttcctggcctatgaatgtgtgggcacctgccagcagcccccagaggccctggccttcaactggcccttcctgggcccccggcagtgcatcgccagcgagacagccagcctgcccatgattgtgtccatcaaggagggcggccgcacccggccccaggtggtgtccctgcccaacatgagggtgcagaagtgcagctgtgccagtgatggagccctggtgccccggcggctgcagccctag

SEQ ID NO: 67963 - DNA, 2085 bp, Artificial Sequence
  derived and/or modified sequence
gtcctttctagacagccccctcctccaggctcagggacctgtctggctgtgagctcccaggaggtcccaggggtgtgacctccctccctccctccctccctcttcccttcaccccaggccagcccagggccagctataaagctggcccagcctggctctcagcacacccagctgcctgagaccctccttcaacctccctagaggacagccccactctgcctcctgctcccccagggcagcaccatgtggcccctgtggctctgctgggcactctgggtgctgcccctggctggccccggggcggccctgaccgaggagcagctcctgggcagcctgctgcggcagctgcagctcagcgaggtgcccgtactggacagggccgacatggagaagctggtcatccccgcccacgtgagggcccagtatgtagtcctgctgcggcgcagccacggggaccgctcccgcggaaagaggttcagccagagcttccgagaggtggccggcaggttcctggcgtcggaggccgcgctgcacaggcacgggcggctgtccccgcgcagcgcccaggcccgggtgaccgtcgagtggctgcgcgtccgcgacgacggctccaaccgcacctccctcatcgactccaggctggtgtccgtccacgagagcggctggaaggccttcgacgtgaccgaggccgtgaacttctggcagcagctgagccggccccggcagccgctgctgctacaggtgtcggtgcagagggagcatctgggcccgctggcgtccggcgcccacaagctggtccgctttgcctcgcagggggcgccagccgggcttggggagccccagctggagctgcacaccctggacctcagggactatggagctcagggcgactgtgaccctgaagcaccaatgaccgagggcacccgctgctgccgccaggagatgtacattgacctgcaggggatgaagtgggccaagaactgggtgctggagcccccgggcttcctggcttacgagtgtgtgggcacctgccagcagcccccggaggccctggccttcaattggccatttctggggccgcgacagtgtatcgcctcggagactgcctcgctgcccatgatcgtcagcatcaaggagggaggcaggaccaggccccaggtggtcagcctgcccaacatgagggtgcagaagtgcagctgtgcctcggatggggcgctcgtgccaaggaggctccagccataggcgcctggtgtatccattgagccctctaactgaacgtgtgcatagaggtggtcttaatgtaggtcttaactttatacttagcaagttactccatcccaatttagtgctcctgtgtgaccttcgccctgtgtccttccatttcctgtctttcccgtccatcacccatcctaagcacttacgtgagtaaataatgcagctcagatgctgagctctagtaggaaatgctggcatgctgattacaagatacagctgagcaatgcacacattttcagctgggagtttctgttctctggcaaattcttcactgagtctggaacaataataccctatgattagaactggggaaacagaactgaattgctgtgttatatgaggaattaaaaccttcaaatctctatttcccccaaatactgacccattctggacttttgtaaacatacctaggcccctgttcccctgagagggtgctaagaggaaggatgaagggcttcaggctgggggcagtggacagggaattgggatacctggattctggttctgacagggccacaagctaggatctctaacaaacgcagaaggctttggctcgtcatttcctcttaaaaaggaggagctgggcttcagctctaagaacttcattgccctggggatcagacagcccctacctacccctgcccactcctctggagactgagccttgcccgtgcatatttaggtcatttcccacactgtcttagagaacttgtcaccagaaaccacatgtatttgcatgttttttgttaatttagctaaagcaattgaatgtagatactcagaagaaataaaaaatgatgtttcactctg

SEQ ID NO: 67964 - DNA, 999 bp, Artificial Sequence
  derived and/or modified sequence
atgtggcccctgtggctgtgctgggccctgtgggtgctgcccctggcaggcccaggtgccgcactcacggaagagcagctgttgggtagccttctgcgtcagctgcagttatcagaagtacccgtgctcgatcgtgccgatatggaaaaactggtgatccctgcccacgtgagagcccaatacgtcgtactgctgcgcagatctcatggggaccgcagccgtggcaaacggttttcccagagtttcagagaggtcgcgggacgttttctggcctctgaagcagcactgcacagacatggcaggttgtcacctcgctccgcacaggctcgcgtaactgttgagtggctgagagtgcgtgacgacggctccaaccgcacaagcctgatcgactcacgtctggtttccgtacacgaatcagggtggaaggccttcgatgtgaccgaggctgtgaatttttggcagcaactgtcccgccctagacagccgctgctgctccaggtgtctgtgcagcgtgagcaccttggccccctagcatctggggcccacaagttagtccgattcgcaagccagggggccccagcaggcctcggagagccccagctcgaactccatacactagatttaagagactatggcgcccaaggtgattgcgacccagaggctccaatgacagagggcaccagatgttgtagacaagaaatgtatatcgacctgcagggcatgaaatgggccaagaactgggtcctcgaaccccccggtttcctcgcctacgaatgcgtcggtacttgtcagcagccacctgaagccttagccttcaactggccattcctaggccccagacaatgcatcgcatccgagactgcctctctccctatgatcgtttctatcaaagagggaggcagaacccgcccacaggtcgtgtcgcttcccaatatgcgcgtacaaaaatgctcgtgcgctagtgatggggcattagtgcctcgacgcctccaaccttag

SEQ ID NO: 67965 - DNA, 999 bp, Artificial Sequence
  derived and/or modified sequence
atgtggcctctgtggctgtgctgggcactctgggtattacccctcgccggtcctggcgctgctttaacagaagagcagctcctgggcagccttctgagacaactacagttgtctgaggtcccggttctcgaccgagcagacatggagaaacttgtcataccagcccatgtccgggctcaatacgtggtgctgctgagacgaagccacggcgacaggtcgagggggaagcggttttctcagtcatttagggaggtcgccggacggtttttagcgagcgaggccgcactgcacaggcacggcagattgtcccctcgctctgcacaagcccgagtgaccgtcgagtggctgcgggtcagggatgacggatccaatcgaacatctctaattgactcaagattggtttctgtgcatgaatctggctggaaggctttcgacgtcactgaggctgtcaacttttggcaacagctctccagaccaagacagcctcttctgttgcaggtgtctgtgcagcgagagcatctgggacctctcgcatccggagctcataaactggtgcggttcgcgtcccagggagccccagctggattgggcgagcctcagctcgagctccataccctagatctgcgtgactatggagcgcagggggattgcgaccccgaggcacctatgacagagggaacccggtgctgtcgacaggagatgtacatcgacctccaagggatgaagtgggctaaaaactgggtacttgaacccccaggcttcctggcatatgaatgcgttggaacatgtcagcagccacccgaagctcttgcatttaattggccatttctgggaccacggcagtgtattgccagcgaaacagcctccctgcctatgatcgtgtccatcaaggaaggcggaaggacaagaccccaagtggtttccctgccaaacatgagagttcaaaagtgttcatgtgcgtctgatggggcactggtgcctaggcggctgcagccttag

SEQ ID NO: 67966 - DNA, 999 bp, Artificial Sequence
  derived and/or modified sequence
atgtggcccctgtggctgtgctgggccctgtgggtgctgcccctggccggccccggcgccgccctgaccgaggagcagctgctgggcagcctgctgagacagctgcagctgagcgaggtgcccgtgctggacagagccgacatggagaagctggtgatccccgcccacgtgagagcccagtacgtggtgctgctgagaagaagccacggcgacagaagcagaggcaagagattcagccagagcttcagagaggtggccggcagattcctggccagcgaggccgccctgcacagacacggcagactgagccccagaagcgcccaggccagagtgaccgtggagtggctgagagtgagagacgacggcagcaacagaaccagcctgatcgacagcagactggtgagcgtgcacgagagcggctggaaggccttcgacgtgaccgaggccgtgaacttctggcagcagctgagcagacccagacagcccctgctgctgcaggtgagcgtgcagagagagcacctgggccccctggccagcggcgcccacaagctggtgagattcgccagccagggcgcccccgccggcctgggcgagccccagctggagctgcacaccctggacctgagagactacggcgcccagggcgactgcgaccccgaggcccccatgaccgagggcaccagatgctgcagacaggagatgtacatcgacctgcagggcatgaagtgggccaagaactgggtgctggagccccccggcttcctggcctacgagtgcgtgggcacctgccagcagccccccgaggccctggccttcaactggcccttcctgggccccagacagtgcatcgccagcgagaccgccagcctgcccatgatcgtgagcatcaaggagggcggcagaaccagaccccaggtggtgagcctgcccaacatgagagtgcagaagtgcagctgcgccagcgacggcgccctggtgcccagaagactgcagccctag

SEQ ID NO: 67967 - protein, 166 aa, Artificial Sequence
  derived and/or modified sequence
MAASGVEKSSKKKTEKKLAAREEAKLLAGFMGVMNNMRKQKTLCDVILMVQERKIPAHRVVLAAASHFFNLMFTTNMLESKSFEVELKDAEPDIIEQLVEFAYTARISVNSNNVQSLLDAANQYQIEPVKKMCVDFLKEQVDASNCLGEAEKVDQSLPECGMLFTV

SEQ ID NO: 67968 - DNA, 501 bp, Artificial Sequence
  derived and/or modified sequence
atggctgcgtccggagtggagaagtctagtaaaaaaaagaccgaaaagaagctcgcagcaagagaagaggccaagctactggccggtttcatgggcgtgatgaacaacatgcggaagcagaaaacactctgcgatgttatcctcatggttcaggagcggaagatccccgctcatcgcgtcgttctggccgcagcttcccatttctttaatcttatgtttacaaccaacatgttagaaagcaaaagctttgaggtggagctcaaggacgctgaacctgacattatcgaacagctagtggagttcgcatacaccgcaagaatatctgttaattccaacaacgtgcagtccttgctcgatgctgccaatcagtatcagattgaacccgtgaagaaaatgtgtgtggatttcttaaaggagcaggtagacgccagtaactgtctgggtgaagctgagaaggtggatcagtcactgcctgagtgcgggatgctgttcactgtttag

SEQ ID NO: 67969 - DNA, 969 bp, Artificial Sequence
  derived and/or modified sequence
gggttctgcccggggacgcagcccagttggtagcgtcgctccctgagcgtttctaagggggccgcccggccttgtctttcggcagtggccgagccaccgccgcctgccgcgcgttccagagctgggcgctgcagctgcactgccgatcgccgtgtttggtcgatagaatccccagtgtgcccagagagtgcgacccctcgcccggcccggcgagccccgggcgtgaaccgagctgagggaggatggcagcctctggggtggagaagagcagcaagaagaagaccgagaagaaacttgctgctcgggaagaagctaaattgttggcgggtttcatgggcgtcatgaataacatgcggaaacagaaaacgttgtgtgacgtgatcctcatggtccaggaaagaaagatacctgctcatcgtgttgttcttgctgcagccagtcatttttttaacttaatgttcacaactaacatgcttgaatcaaagtcctttgaagtagaactcaaagatgctgaacctgatattattgaacaactggtggaatttgcttatactgctagaatttccgtgaatagcaacaatgttcagtctttgctggatgcagcaaaccaatatcagattgaacctgtgaagaaaatgtgtgttgattttttgaaagaacaagttgatgcttcaaattgtcttggagaagcagaaaaagttgatcagagccttccagagtgtggtatgcttttcactgtgtgatgatccttagtggcacatgaatgaacgtccagatgtttgtgcagtagcccacccttatctgcaggatacgttccaagacccccagtgaatgcctgaaactgcagatagtactgaatcctatatatactgtgttttttatgatacatacatgcctatgatgaagtttaatttctaaattagacagtaaaagattaacaacaataataataaaatagaacaactttaa

SEQ ID NO: 67970 - DNA, 501 bp, Artificial Sequence
  derived and/or modified sequence
atggccgccagcggcgtggagaagagcagcaagaagaagacagagaagaagctggccgcccgggaggaggccaagctgctggccggcttcatgggcgtgatgaacaacatgaggaagcagaagaccctgtgtgatgtgatcctgatggtgcaggagaggaagatcccagcccaccgggtggtgctggccgccgccagccacttcttcaacctgatgttcaccaccaacatgctggagagcaagagctttgaggtggagctgaaggatgctgagccagacatcatcgagcagctggtggagtttgcctacacagcccgcatctctgtgaacagcaacaacgtgcagagcctgctggatgctgccaaccagtaccagatcgagcctgtgaagaagatgtgtgtggacttcctgaaggagcaggtggatgccagcaactgcctgggggaggccgagaaggtggaccagagcctgcctgaatgtggcatgctgttcaccgtgtag

SEQ ID NO: 67971 - DNA, 501 bp, Artificial Sequence
  derived and/or modified sequence
atggccgccagcggcgtggagaagagcagcaagaagaagaccgagaagaaactggctgcccgagaggaggccaagctcctcgcggggtttatgggggtgatgaacaatatgcgcaaacagaaaaccctgtgtgacgtgatcctgatggtgcaggagcgtaaaatccctgctcacagggtggtgttagccgctgccagtcactttttcaaccttatgtttacaaccaatatgctcgagagcaaatcatttgaagtggaactgaaggacgcggaacccgacatcattgaacagcttgtggagttcgcctacacagctcgtatatctgtgaactcaaataatgtgcagagcctcctggacgccgcaaatcagtaccaaatagagcccgtcaaaaaaatgtgtgttgacttcctcaaagagcaagtagacgccagtaattgcctgggagaagccgagaaggtggatcagtccctgcccgagtgtggaatgctgtttacagtgtag

SEQ ID NO: 67972 - DNA, 501 bp, Artificial Sequence
  derived and/or modified sequence
atggccgcatctggagtggagaagagctccaaaaagaagaccgagaagaagctcgccgctcgtgaggaggccaaactcctcgccggattcatgggtgttatgaacaatatgcgaaagcagaagaccctgtgtgatgttattctgatggttcaggagaggaagatccctgcgcatcgtgtggtcctggccgctgcatctcactttttcaatctgatgttcacaacaaacatgttggagtccaaatcattcgaggtcgagctgaaggacgcagaacctgatataatagaacagttggttgagtttgcatataccgctagaatctcagtaaattctaataacgttcagagcttgctggatgctgccaaccagtatcagattgaacctgtcaagaagatgtgtgtggacttcttgaaagaacaggtagacgcctccaattgcctcggtgaggccgaaaaggtggatcagtctctgcctgaatgcggtatgctgtttacggtgtag

SEQ ID NO: 67973 - DNA, 501 bp, Artificial Sequence
  derived and/or modified sequence
atggccgccagcggcgtggagaagagcagcaagaagaagaccgagaagaagctggccgccagagaggaggccaagctgctggccggcttcatgggcgtgatgaacaacatgagaaagcagaagaccctgtgcgacgtgatcctgatggtgcaggagagaaagatccccgcccacagagtggtgctggccgccgccagccacttcttcaacctgatgttcaccaccaacatgctggagagcaagagcttcgaggtggagctgaaggacgccgagcccgacatcatcgagcagctggtggagttcgcctacaccgccagaatcagcgtgaacagcaacaacgtgcagagcctgctggacgccgccaaccagtaccagatcgagcccgtgaagaagatgtgcgtggacttcctgaaggagcaggtggacgccagcaactgcctgggcgaggccgagaaggtggaccagagcctgcccgagtgcggcatgctgttcaccgtgtag

SEQ ID NO: 67974 - protein, 374 aa, Artificial Sequence
  derived and/or modified sequence
MTLDVGPEDELPDWAAAKEFYQKYDPKDVIGRGVSSVVRRCVHRATGHEFAVKIMEVTAERLSPEQLEEVREATRRETHILRQVAGHPHIITLIDSYESSSFMFLVFDLMRKGELFDYLTEKVALSEKETRSIMRSLLEAVSFLHANNIVHRDLKPENILLDDNMQIRLSDFGFSCHLEPGEKLRELCGTPGYLAPEILKCSMDETHPGYGKEVDLWACGVILFTLLAGSPPFWHRRQILMLRMIMEGQYQFSSPEWDDRSSTVKDLISRLLQVDPEARLTAEQALQHPFFERCEGSQPWNLTPRQRFRVAVWTVLAAGRVALSTHRVRPLTKNALLRDPYALRSVRHLIDNCAFRLYGHWIRKQWIGKLMACV

SEQ ID NO: 67975 - DNA, 1125 bp, Artificial Sequence
  derived and/or modified sequence
atgaccctggacgtgggccccgaggacgagctgcccgactgggccgccgccaaggagttctaccagaagtacgaccccaaggacgtgatcggcagaggcgtgagcagcgtggtgagaagatgcgtgcacagagccaccggccacgagttcgccgtgaagatcatggaggtgaccgccgagagactgagccccgagcagctggaggaggtgagagaggccaccagaagagagacccacatcctgagacaggtggccggccacccccacatcatcaccctgatcgacagctacgagagcagcagcttcatgttcctggtgttcgacctgatgagaaagggcgagctgttcgactacctgaccgagaaggtggccctgagcgagaaggagaccagaagcatcatgagaagcctgctggaggccgtgagcttcctgcacgccaacaacatcgtgcacagagacctgaagcccgagaacatcctgctggacgacaacatgcagatcagactgagcgacttcggcttcagctgccacctggagcccggcgagaagctgagagagctgtgcggcacccccggctacctggcccccgagatcctgaagtgcagcatggacgagacccaccccggctacggcaaggaggtggacctgtgggcctgcggcgtgatcctgttcaccctgctggccggcagcccccccttctggcacagaagacagatcctgatgctgagaatgatcatggagggccagtaccagttcagcagccccgagtgggacgacagaagcagcaccgtgaaggacctgatcagcagactgctgcaggtggaccccgaggccagactgaccgccgagcaggccctgcagcaccccttcttcgagagatgcgagggcagccagccctggaacctgacccccagacagagattcagagtggccgtgtggaccgtgctggccgccggcagagtggccctgagcacccacagagtgagacccctgaccaagaacgccctgctgagagacccctacgccctgagaagcgtgagacacctgatcgacaactgcgccttcagactgtacggccactggatcagaaagcagtggatcggcaagctgatggcctgcgtgtag

SEQ ID NO: 67976 - DNA, 1125 bp, Artificial Sequence
  derived and/or modified sequence
atgacactggatgtgggccccgaggacgagctgcctgattgggccgcagcaaaggagttttaccagaaatatgatcctaaagacgtgatcggtcggggcgtgtcatcggtcgtaagacgttgcgtccatcgtgccaccggccacgagttcgccgtgaaaataatggaggtgacagccgagagactgtcaccggagcagctggaagaggttcgcgaggccacgcggagggaaacccatatcctcaggcaggtggcaggacacccgcacatcattaccctgattgactcttatgaatcctccagttttatgttcctggtctttgatcttatgaggaagggcgagctatttgactatctgactgagaaagtagctttgtccgaaaaggagactagaagcatcatgagatcactcctagaggcggtgtcctttctgcatgcaaataatattgttcatagggacttgaaacctgaaaatatcctactggatgacaatatgcagatcaggttatccgactttgggttctcttgtcacctggagcctggcgagaaattgcgcgaactgtgcggcactcccggttacctcgcaccggagatcctgaagtgtagcatggacgaaacgcatcctggatatggtaaagaggtggacctctgggcctgcggggtgatcttattcactctcctggcaggaagtccacctttttggcatagacggcagatcctgatgctgcggatgatcatggaaggccaataccagttttcttcgcccgaatgggacgatcggtctagcacggtcaaggacctaatcagcagacttttgcaggtggatcctgaggccagactcaccgctgagcaagcattacagcaccccttctttgagaggtgcgagggatcccagccatggaacctgaccccccggcagaggttcagagttgcagtctggaccgtgctggcagctggcagggtcgcactgtcgacccatagagtaaggccccttacaaagaatgctctcctgcgggatccctatgctctcaggagtgtgcgacaccttatcgataattgtgccttcaggctgtatggacactggatccgcaagcagtggatcgggaagttaatggcctgcgtgtag

SEQ ID NO: 67977 - DNA, 1125 bp, Artificial Sequence
  derived and/or modified sequence
atgaccctggatgtgggcccagaagatgagctgcctgactgggccgccgccaaggagttctaccagaagtatgaccccaaggatgtgattggccggggcgtgtcctctgtggtgagaagatgtgtgcaccgggccaccggccacgagtttgctgtgaagatcatggaggtgacagctgagcggctgagccctgagcagctggaggaggtgcgggaggccacccggcgggagacccacatcctgcggcaggtggccggccacccccacatcatcaccctgattgacagctatgagagcagcagcttcatgttcctggtgtttgacctgatgaggaagggggagctgtttgactacctgacagagaaggtggccctgtctgagaaggagaccaggagcatcatgaggagcctgctggaggccgtgtccttcctgcacgccaacaacatcgtgcaccgggacctgaagccagagaacatcctgctggatgacaacatgcagatccggctgagtgactttggcttcagctgccacctggagcccggggagaagctgcgggagctgtgtggcaccccaggctacctggcccctgagatcctgaagtgcagcatggatgagacccaccctggctacggcaaggaggtggacctgtgggcctgtggggtcatcctcttcaccctgctggccggcagcccccccttctggcaccggcggcagatcctgatgctgaggatgatcatggagggccagtaccagttcagcagccctgagtgggatgacaggagcagcacagtgaaggacctgatcagccggctgctgcaggtggaccctgaggcccggctgacagctgagcaggccctgcagcaccccttctttgagcgctgtgagggcagccagccctggaacctgaccccccggcagcgcttccgggtggccgtgtggacagtgctggccgccggccgggtggccctgagcacccaccgggtgcggcccctgaccaagaatgccctgctgcgggacccctatgccctgcggtctgtgcgccacctgattgacaactgtgccttccggctgtatggccactggatcaggaagcagtggattggcaagctgatggcctgtgtgtag

SEQ ID NO: 67978 - DNA, 1125 bp, Artificial Sequence
  derived and/or modified sequence
atgaccctggacgtgggccccgaggacgagctgcccgactgggccgctgcaaaggagttctatcaaaaatacgatcccaaggatgtgatcggcaggggggttagctcagtggtaaggcgctgcgtccatagggctactggccacgagtttgccgtgaagataatggaggtgactgctgagagattgtcgcccgaacagttggaagaggtgcgtgaggccacaaggagagagacccacatcttgagacaagttgctggacatccccatatcataacactcatcgattcttacgaatcttcgtcattcatgttcctagtctttgatttgatgaggaaaggagaactgtttgactatctcacagagaaggtggccctcagcgagaaggaaacccgcagcatcatgcggtcactccttgaggccgttagctttctccatgcaaacaatattgtacatcgggacctgaagcctgaaaacatcctactggacgataacatgcagattaggctgtcagacttcggtttttcctgtcatctggaaccaggagaaaagctacgggaactttgtggcacccctggctatctcgctcccgagatcctgaagtgctctatggacgagacccacccaggctacggaaaagaagtagatttatgggcctgcggggtgatcctgtttactctcctggcgggttcccctcctttctggcaccgcagacagatcctgatgcttcgaatgattatggaggggcagtaccagttttcatctccagagtgggatgacagaagctccactgttaaagacctgatcagccgtctgctccaggtggatcctgaggcccgcctgaccgccgagcaggctctgcagcatccattctttgagagatgcgaggggtcccaaccctggaacctgacccccagacagcggttccgagtagctgtctggaccgtgcttgctgccgggcgggtagcccttagcactcaccgagtcaggcctctgactaagaacgccctcttgcgggacccctatgccctgcgtagtgtacggcacttaattgacaactgtgcattccgactctatggtcattggatcaggaagcagtggatcggcaagctgatggcttgcgtatag

SEQ ID NO: 67979 - DNA, 1125 bp, Artificial Sequence
  derived and/or modified sequence
atgacactcgacgtaggtcccgaggatgaattgccagactgggcggcagccaaggaattctatcaaaagtacgaccccaaggatgtcattggaaggggggtttcttctgtggtgcgtcgatgtgtgcaccgggctactggccacgagttcgccgtgaagatcatggaggtaaccgccgagaggctctccccggagcagctggaggaggtgagagaggccacccgacgtgagacccacatcctgagacaggtcgcagggcatcctcacattattacattgatcgattcctatgagagttcctccttcatgtttcttgtgtttgacttaatgagaaaaggcgagctttttgactatctaaccgaaaaggtggccctgtccgagaaagagacacgttccattatgcggtctcttctagaggccgtatcgtttctccacgctaataatattgtacatagggacctgaaaccagaaaatattctcctggatgacaatatgcagattaggttgtcagactttggtttctcctgtcatttagagccaggggagaagctcagagagctatgtgggacaccaggataccttgcgcctgagatccttaagtgctccatggacgaaacacaccccggttatggtaaggaggtggatctgtgggcctgcggcgtgatcctcttcacactgttggctggcagcccaccattttggcataggcggcagatacttatgctgcgaatgatcatggagggacaataccagtttagctccccagaatgggatgatcgctcctccaccgtgaaggatttaatttcgagactgctgcaggttgatcccgaagctcgcttaactgccgaacaggccttacagcaccccttctttgagaggtgcgagggctcccagccatggaacctgacacctcgtcaacgtttccgcgttgccgtgtggacggtacttgccgctggacgggtggcactgtcgacacatcgggtgcgccctctaaccaagaacgctctgctgcgtgacccttacgcgctaaggagtgtcagacacctgatcgacaattgcgcatttaggctgtatgggcactggataaggaagcagtggatcggcaagctgatggcctgtgtctag

SEQ ID NO: 67980 - DNA, 2349 bp, Artificial Sequence
  derived and/or modified sequence
aattgggcggccggtttccaattggaagggcttctgagcctcagtcttcgggcggcgctgaccattggcgggcaggatggaggcggagccttgggttgtcgcccgccgccgggggttaaggtgagcgactgcaggcaaacccggcgacagcgcagctcgcgtcgaccctggctcctctgcctgccccctcaggcccccgcctccttcaggatgacgctggacgtggggccggaggatgagctgcccgactgggccgccgccaaagagttttaccagaagtacgaccctaaggacgtcatcggcagaggagtgagctctgtggtccgccgttgtgttcatcgagctactggccacgagtttgcggtgaagattatggaagtgacagctgagcggctgagtcctgagcagctggaggaggtgcgggaagccacacggcgagagacacacatccttcgccaggtcgccggccacccccacatcatcaccctcatcgattcctacgagtcttctagcttcatgttcctggtgtttgacctgatgcggaagggagagctgtttgactatctcacagagaaggtggccctctctgaaaaggaaaccaggtccatcatgcggtctctgctggaagcagtgagctttctccatgccaacaacattgtgcatcgagatctgaagcccgagaatattctcctagatgacaatatgcagatccgactttcagatttcgggttctcctgccacttggaacctggcgagaagcttcgagagttgtgtgggaccccagggtatctagcgccagagatccttaaatgctccatggatgaaacccacccaggctatggcaaggaggtcgacctctgggcctgtggggtgatcttgttcacactcctggctggctcgccacccttctggcaccggcggcagatcctgatgttacgcatgatcatggagggccagtaccagttcagttcccccgagtgggatgaccgttccagcactgtcaaagacctgatctccaggctgctgcaggtggatcctgaggcacgcctgacagctgagcaggccctacagcaccccttctttgagcgttgtgaaggcagccaaccctggaacctcaccccccgccagcggttccgggtggcagtgtggacagtgctggctgctggacgagtggccctaagcacccatcgtgtacggccactgaccaagaatgcactgttgagggacccttatgcgctgcggtcagtgcggcacctcatcgacaactgtgccttccggctctacgggcactggataaggaagcagtggattggaaagctgatggcttgtgtatgatgatgctactaataatgacatattccaggcagaaatcccctgcttctgcttcccatggtcacttgtgccaggcccggttcctcttctccctggggctcaaacctggtagctgccccctctcaccaatacaagccttgtgaagatcctggagcagggcacaagccgctgacgtctgctccagtgagaagccctgctggcggcagaaaatgagcgcgtggcagaagaggtccagggtgatggcgtccctcaggctctgctcaggacaccctagctccagcagctcagccagcacccttgggagggagagaggagtgagtgacaactgggcctcctttcatcaccctacacccaccacatgctttggagtcagccattcctcatgttttcccaacctgacccctcagcctttgccaagagctcttcccacgcccccctcagtccctactccctcatctcagcattggtggtcttctccagctggtgcatggaatggacgtccaggtacttcctgttatagtaaaagaaaaagagtattggtggccgttacctatcatgacaaggctgtgacagctagtgcgtgagactgggagttggccaccggcgtgaagctgggctcttttgccagcttgctgtgtgactatgcaaatcgttaactctctgggcctaaatgaactcttatgagcctctccatttctaaagcctagggttaggaatcttgaattcttttttctgctctgccactaccttgtatgaccttggtcaagtactccctgtggccctcagtgtccccctctgtacaatactccttagcggccatgagactccatttacattctgtctttggctctttttttctcacactgcctcctctttggactggagaggctggaaagccaacttccagtcacctggagtaattgcatctccaggcctcagtctcatctgtaaaatggggatgccctggccacagacaggactgttggggagacaataaagaacgcaaatattcagtgt

SEQ ID NO: 67981 - protein, 988 aa, Artificial Sequence
  derived and/or modified sequence
MAADSEPESEVFEITDFTTASEWERFISKVEEVLNDWKLIGNSLGKPLEKGIFTSGTWEEKSDEISFADFKFSVTHHYLVQESTDKEGKDELLEDVVPQSMQDLLGMNNDFPPRAHCLVRWYGLREFVVIAPAAHSDAVLSESKCNLLLSSVSIALGNTGCQVPLFVQIHHKWRRMYVGECQGPGVRTDFEMVHLRKVPNQYTHLSGLLDIFKSKIGCPLTPLPPVSIAIRFTYVLQDWQQYFWPQQPPDIDALVGGEVGGLEFGKLPFGACEDPISELHLATTWPHLTEGIIVDNDVYSDLDPIQAPHWSVRVRKAENPQCLLGDFVTEFFKICRRKESTDEILGRSAFEEEGKETADITHALSKLTEPASVPIHKLSVSNMVHTAKKKIRKHRGVEESPLNNDVLNTILLFLFPDAVSEKPLDGTTSTDNNNPPSESEDYNLYNQFKSAPSDSLTYKLALCLCMINFYHGGLKGVAHLWQEFVLEMRFRWENNFLIPGLASGPPDLRCCLLHQKLQMLNCCIERKKARDEGKKTSASDVTNIYPGDAGKAGDQLVPDNLKETDKEKGEVGKSWDSWSDSEEEFFECLSDTEELKGNGQESGKKGGPKEMANLRPEGRLYQHGKLTLLHNGEPLYIPVTQEPAPMTEDLLEEQSEVLAKLGTSAEGAHLRARMQSACLLSDMESFKAANPGCSLEDFVRWYSPRDYIEEEVIDEKGNVVLKGELSARMKIPSNMWVEAWETAKPIPARRQRRLFDDTREAEKVLHYLAIQKPADLARHLLPCVIHAAVLKVKEEESLENISSVKKIIKQIISHSSKVLHFPNPEDKKLEEIIHQITNVEALIARARSLKAKFGTEKCEQEEEKEDLERFVSCLLEQPEVLVTGAGRGHAGRIIHKLFVNAQRLTESSDEAAAMTPPEEELKRMGSPEERRQNSVSDFPPPAGREFILRTTVPRPAPYSKALPQRMYSVLTKEDFRLAGAFSSDTSFF

SEQ ID NO: 67982 - DNA, 2967 bp, Artificial Sequence
  derived and/or modified sequence
atggcagccgactctgaacctgagtcggaagtgttcgaaatcaccgattttactacagcctccgaatgggagcgctttatatctaaagtagaggaggtgctgaatgattggaaacttatcggaaacagcctcgggaagccgttggagaaagggatttttacaagcggtacttgggaggagaaaagtgacgaaatctcattcgcagacttcaaattcagcgtcacacaccattatttggttcaggagagtaccgataaggagggcaaggatgagcttctggaggatgtagtacctcaaagtatgcaagatctgcttggcatgaacaatgattttcctccgagggcgcattgtttggtgcggtggtacggtctgagagagttcgtcgtcattgctcctgccgcacactccgacgcggtgctgtctgagagtaagtgtaatctgctgttaagctccgtgagcattgcgctcggtaacacaggttgtcaggtccctctgttcgtgcagatccaccacaagtggaggcggatgtatgtcggcgaatgccagggaccaggagttcgtactgattttgaaatggtgcacctgagaaaggttccgaatcagtatactcatctctcgggcctgcttgacatctttaaaagtaaaattggatgtcccctcacccctctgccgcccgttagcattgccatccgttttacttacgttcttcaagactggcagcagtacttttggccacagcagccccctgatattgatgctttggttggcggagaggtaggcggtctggagttcggaaagctgcccttcggagcatgtgaagatccaatcagcgagctccacctggctacaacatggccccacctaacagagggtatcatcgtggataacgatgtgtactccgatctcgacccaatccaggcgccacattggtcagtccgggtgaggaaagccgaaaaccctcaatgcctgcttggcgacttcgtgaccgaattcttcaagatatgcaggagaaaagagagcacagacgagattctggggagaagtgcattcgaagaggagggaaaagaaacggctgacataactcatgctctttcaaaactgaccgaacccgcttcggttcctattcacaagctgtccgtatccaatatggttcatactgctaagaaaaaaatccgcaaacacagaggtgtagaggagtcccctcttaataatgacgttctgaatacgatactcctgtttctgtttcccgacgctgttagcgagaaacccctggatggcacgacctcgacagacaataacaatcctcccagcgagagcgaagactacaacttatataaccagtttaaatccgcgcctagtgattcactgacttataagctggctctgtgtctgtgcatgatcaatttctatcacgggggtttaaagggcgttgcccacctatggcaggagttcgtgctggagatgcgatttaggtgggagaataacttcctgatccctggactcgcttctgggccacctgacctcaggtgctgcctgcttcatcagaaactgcagatgctgaattgttgcatagaacgtaaaaaggctagagacgagggcaagaaaacgtccgccagtgacgtcacaaacatttatccaggcgacgcgggcaaagctggcgaccagctggttcccgataacctgaaggaaaccgacaaagaaaagggggaagtgggcaagtcttgggattcctggtccgattccgaggaggagttcttcgagtgcctaagcgataccgaggagctcaaagggaacggccaggagtctgggaagaagggcggccctaaggagatggccaacttgagaccagaaggtagactttatcagcatggcaaactcactctgctgcataatggtgaaccactctatattcccgtcacccaggaacctgcaccaatgacagaggacttgctggaagaacagagtgaggtactcgccaaactaggaacgagtgccgaaggagctcatctgcgggcaaggatgcagagcgcttgtctcctttccgacatggaatcatttaaggctgctaatcccggctgctcgttagaagattttgtgagatggtatagtcctcgggactatatcgaagaagaagtgattgacgagaaaggtaatgtggtgcttaagggcgagctgagtgctcgtatgaaaatcccttcaaacatgtgggtggaagcgtgggaaacggcaaagccaatccctgctaggcgccagagaaggctgttcgacgatactcgggaagcagagaaggttctccattacctggccattcaaaaacctgcggaccttgcaaggcatttattgccttgcgtgatccatgcagctgtattgaaagtgaaggaggaggaatctctggagaatatctcatctgtcaaaaaaatcataaaacagataattagccattcctccaaggtccttcactttcctaatcccgaggacaagaaactcgaggagatcatccatcaaattacaaacgtggaggccctgattgctcgcgcgcgcagccttaaggccaaattcggcacggaaaaatgcgagcaggaggaggagaaggaagacttggaacgatttgtttcctgtctgctggagcagccggaagttctggtgaccggcgcagggcgaggccacgcaggccgcatcattcataaattgttcgtgaatgctcagcgtctgacggagagtagtgacgaggcggccgcaatgactcctccagaggaagagctgaaacggatgggatcccctgaggagcgtcgccaaaacagcgtgtcagactttcctcccccagcagggcgcgagttcatattgagaactactgtgccgcgtccagccccatattctaaagccctccctcagcgaatgtatagcgtgctgaccaaagaggacttccggttggcaggtgccttttccagcgacacctcatttttttag

SEQ ID NO: 67983 - DNA, 2967 bp, Artificial Sequence
  derived and/or modified sequence
atggctgctgacagcgagcctgagagcgaggtgtttgagatcacagacttcaccacagccagcgagtgggagcgcttcatcagcaaggtggaggaggtgctgaatgactggaagctgattggcaacagcctgggcaagcccctggagaagggcatcttcaccagcggcacctgggaggagaagagtgatgagatcagctttgctgacttcaagttctctgtgacccaccactacctggtgcaggagagcacagacaaggagggcaaggatgagctgctggaggatgtggtgccccagagcatgcaggacctgctgggcatgaacaatgacttccccccccgggcccactgcctggtgcgctggtacggcctgcgggagtttgtggtgattgccccagctgcccacagtgatgctgtgctgtctgagagcaagtgcaacctgctgctgagctctgtgtccatcgccctgggcaacacaggctgccaggtgcccctgtttgtgcagatccaccacaagtggaggaggatgtatgtgggggagtgccagggccctggggtgaggacagactttgagatggtgcacctgaggaaggtgcccaaccagtacacccacctgagcggcctgctggacatcttcaagagcaagattggctgccccctgacccccctgccccctgtgtccatcgccatccgcttcacctacgtgctgcaggactggcagcagtacttctggccccagcagcccccagacattgatgccctggtgggcggggaggtgggcggcctggagtttgggaagctgccctttggagcctgtgaggaccccatcagcgagctgcacctggccaccacctggccccacctgacagagggcatcatcgtggacaatgatgtgtacagcgacctggaccccatccaggccccccactggagcgtgcgggtgaggaaggccgagaacccccagtgcctgctgggggactttgtgacagagttcttcaagatctgcaggaggaaggagagcacagatgagatcctgggccgcagcgcctttgaggaggagggcaaggagacagctgacatcacccacgccctgagcaagctgacagagcccgcctctgtgcccatccacaagctgtctgtgagcaacatggtgcacacagccaagaagaagatcaggaagcaccggggcgtggaggagagccccctgaacaatgatgtgctgaacaccatcctgctcttcctgttcccagatgctgtgtctgagaagcccctggatggcaccaccagcacagacaacaacaaccccccatctgagagcgaggactacaacctgtacaaccagttcaagagcgcccccagcgacagcctgacctacaagctggccctgtgcctgtgcatgatcaacttctaccatggaggcctgaagggcgtggcccacctgtggcaggagtttgtgctggagatgaggttccgctgggagaacaacttcctgatccctggcctggccagcggccccccagacctgcgctgctgcctgctgcaccagaagctgcagatgctgaactgctgcatcgagaggaagaaggccagagatgagggcaagaagaccagcgccagtgatgtgaccaacatctacccaggagatgctgggaaggccggggaccagctggtgcctgacaacctgaaggagacagacaaggagaagggggaggtgggcaagtcctgggacagctggagcgacagcgaggaggagttctttgaatgtctgagtgacacagaggagctgaagggaaatggccaggagagcggcaagaagggcggccccaaggagatggccaacctgcggcctgagggccgcctgtaccagcacggcaagctgaccctgctgcacaatggagagcccctgtacatccctgtgacccaggagcccgcccccatgacagaggacctgctggaggagcagagcgaggtgctggccaagctgggcaccagcgctgagggcgcccacctgcgggccaggatgcagagcgcctgcctgctgagtgacatggagagcttcaaggccgccaaccctggctgcagcctggaggactttgtgcgctggtacagcccccgggactacatcgaggaggaggtgattgatgagaagggaaatgtggtgctgaagggggagctgagcgccaggatgaagatccccagcaacatgtgggtggaggcctgggagacagccaagcccatcccagcccggcggcagaggcggctgtttgatgacacccgggaggccgagaaggtgctgcactacctggccatccagaagccagctgacctggcccggcacctgctgccctgtgtgattcatgctgctgtgctgaaggtgaaggaggaggagagcctggagaacatcagctctgtgaagaagatcatcaagcagatcatcagccacagcagcaaggtgctgcacttccccaaccctgaggacaagaagctggaggagatcatccaccagatcaccaacgtggaggccctgattgcccgggcccggagcctgaaggccaagtttggaacagagaagtgtgagcaggaggaggagaaggaggacctggagagatttgtgtcctgcctgctggagcagcctgaggtgctggtgactggagctggccggggccacgccggccgcatcatccacaagctgtttgtgaatgcccagaggctgacagagagcagtgatgaagctgctgccatgaccccacctgaggaggagctgaagaggatgggcagccctgaggagcggcggcagaacagcgtgtctgacttccccccacctgctggccgggagttcatcctgcggaccaccgtgcccaggcctgccccctacagcaaggccctgccccagaggatgtacagcgtgctgaccaaggaggacttccggctggccggggccttcagcagtgacaccagcttcttctag

SEQ ID NO: 67984 - DNA, 2967 bp, Artificial Sequence
  derived and/or modified sequence
atggccgccgacagcgagcccgagagcgaggtgttcgagatcaccgactttactaccgcctctgaatgggagagatttatctcaaaagttgaggaggtgctaaacgattggaaattgataggaaacagcttgggcaaacctctggaaaaggggatattcactagtggtacgtgggaggagaagtccgatgagattagttttgccgacttcaagttcagcgtaacccaccattatctagttcaagaaagtaccgataaggagggaaaggacgaactgctcgaggatgttgtcccccagtccatgcaggacctcctgggcatgaataatgacttccccccccgggcgcactgcctcgtaaggtggtatggccttcgggaatttgtcgtgatagcaccagctgctcatagcgacgccgtcctatccgaaagtaagtgcaatctccttttgtcctcagtttccattgcactgggaaataccggatgtcaagtgccactttttgtgcaaatccatcacaaatggcgacgtatgtatgtgggagagtgtcaagggccaggggtaagaactgatttcgaaatggtgcatttacgaaaagtgcctaaccaatacacacatttgtccggtctcttggatattttcaaaagcaagatcggttgccccctgacccccctcccccctgtgagtattgccattaggtttacttatgttctccaggactggcagcagtatttttggcctcagcagcctcccgacatcgatgctctcgtaggaggcgaggtaggaggactagaattcggaaagttaccttttggcgcctgtgaagatcctatctcggaacttcatcttgcaaccacatggccacatttgaccgagggcatcatcgtggataatgatgtctatagcgaccttgaccccatccaggccccccactggagtgttcgtgtgcggaaggccgaaaaccctcagtgcctgctgggtgacttcgtgacagagttttttaaaatctgccggaggaaggaaagtacagatgagatcctcggtaggtcagccttcgaagaggagggaaaagagactgcggacatcactcacgcgcttagcaaactcaccgagccggcctcggtccccatacataagctgtctgtgtctaatatggtccataccgcaaagaaaaaaattagaaagcatagaggggttgaagagtctcctctgaataatgacgtgctgaacacgatcttgcttttcctcttccctgatgccgtcagtgagaaaccgctggatggaaccacgagtaccgacaacaataaccccccctcagaatctgaagactacaacctgtacaaccagtttaagtctgctccaagtgattctctgacctacaaactggccctgtgcctgtgtatgatcaacttctaccatggcggattgaaaggtgtggcccacctatggcaggaattcgtcttggaaatgaggttccggtgggagaacaacttccttattcccgggctggcttccggccctcctgacttacgttgttgtttactccatcaaaaactgcaaatgctcaactgctgtatcgagaggaaaaaggcaagggacgagggcaagaaaacctccgcaagcgatgtaacgaacatttaccccggtgacgccggcaaggcaggggatcaactggtgccagacaacctaaaggaaactgataaagagaagggagaagtgggaaaatcatgggactcctggtctgactctgaggaggagtttttcgagtgcctgtctgataccgaggaattgaaagggaatggtcaggaatccggaaagaaggggggaccaaaggaaatggctaatctccgacctgaggggcgactgtatcaacacggcaagctcaccctactccacaatggtgagccactgtacatccctgtaacccaggagcctgccccaatgacagaagaccttctggaagaacagtccgaggtgctcgccaagttgggaacttctgctgagggggcccacctcagggcacggatgcaaagcgcgtgcctgctgtccgatatggagtcttttaaggccgccaacccaggatgcagcctggaagattttgtgcggtggtattcaccacgggactatatagaagaggaggtgatcgacgagaaaggaaatgttgttctgaaaggggagctgagcgcgcgaatgaaaatacccagtaacatgtgggtagaggcgtgggagacggccaaaccgataccagcgcggcgacagcggaggttgtttgacgatacccgggaggccgaaaaggtgctgcactatctagctattcaaaaacctgctgatctcgcacgtcacctgttgccctgtgtcattcacgcagccgtcctcaaagttaaagaggaggagagcttagaaaatattagctctgtcaaaaagatcataaaacagatcattagccactcatccaaggtcctgcattttccaaaccccgaggacaagaagcttgaggaaatcatccaccagataaccaacgtcgaggccttaatagctagggcacgcagcctgaaagctaagtttggaacggagaaatgcgaacaggaagaggaaaaagaagatttggagcggttcgtgagctgcctcttggaacagcctgaggtgctggtgaccggcgccggcagaggacatgccggtcgcatcatacacaagctattcgtcaacgctcagaggctaaccgagagctccgacgaagccgcggcgatgactcctccagaagaagaactaaagcgcatgggtagccctgaggaacgccgacagaactccgtgagcgactttccacctcccgccggtagggagttcatcctccggaccaccgtccccagacctgcgccttattcaaaagcactccctcagaggatgtatagcgtacttaccaaagaggacttcaggctggcaggagcattctcctctgacacgtcattcttttag

SEQ ID NO: 67985 - DNA, 2967 bp, Artificial Sequence
  derived and/or modified sequence
atggctgccgactcggagccagagagtgaggtctttgagataacagattttacgacagcatcagagtgggaaagattcatctctaaagtggaggaggtgttaaacgactggaaactcattggtaactcacttggcaagcctctcgaaaagggaatcttcactagtgggacctgggaggaaaaatcggacgagatctcgtttgctgacttcaagttttcagtgacccatcattacctagtccaggagtcgaccgacaaagagggaaaggatgagttactggaagacgttgtgccacagtctatgcaggatctcctggggatgaacaacgatttccctcccagagcccattgtttggtgaggtggtatggtttaagagaattcgtggtgatagcacctgcggctcattctgatgcagtactgagtgaaagtaagtgcaatctgttgctgagctctgtctccattgcgttaggaaacactggatgtcaggtccccctctttgttcaaatacatcataagtggagacgtatgtatgtgggcgagtgtcagggtcctggggtgagaaccgactttgagatggtgcaccttcgtaaagtgccgaaccagtatacacatctcagcgggctgttagatattttcaaatctaaaatcgggtgtccactgacaccgctgcctccagtctccattgctatccgcttcacctatgttctacaggactggcagcagtacttctggccacaacagcctccagacattgacgcactcgtggggggtgaggtaggaggcctggagttcggaaaacttccatttggtgcctgcgaggacccaataagcgagctgcatctcgcaacaacctggccccacctcacagaggggattatcgttgataatgatgtctactctgacctcgatccgatccaggccccacactggagcgtccgcgttcgcaaggctgaaaatccccagtgccttctcggcgattttgttaccgagttttttaaaatttgccgacggaaagaaagcactgatgaaatcctaggcagatctgctttcgaggaggaggggaaagaaaccgctgatataacacacgccctgtcaaagcttactgaaccagcttctgttccgatacataaactctccgttagtaacatggtgcacacggcaaagaaaaagattcgcaagcatcgtggggtcgaggagtcacctctgaataatgacgtgctgaacacaatcctgctgtttctctttcctgatgccgtatctgaaaaaccactcgatgggaccacgtcaacagacaacaataatcctcctagcgaatccgaagactataacttgtataatcagttcaagtcagccccttccgacagcctgacctacaagctggctctgtgtctgtgcatgataaatttttatcacggcggactcaagggcgttgcccatctatggcaggaatttgtactggaaatgcggtttcgttgggagaacaacttcctgattccaggtctcgccagtggccctccagacctcaggtgctgcctcttacatcagaagcttcagatgttgaattgttgcattgagcgcaaaaaagctagggatgaggggaaaaagacatcggcctctgacgtaaccaacatctacccaggagatgccggtaaggcaggcgatcagcttgtccctgataatctcaaagaaaccgacaaagaaaagggcgaagtagggaagtcatgggacagttggtctgatagcgaagaggagttcttcgagtgcttgtccgatactgaggaactgaagggcaatgggcaggaatcagggaagaagggcggtcctaaggagatggctaacttaaggccagaaggtcgcctttatcagcacggaaaactgaccctcttgcataacggcgagcctctatacatccctgtaacgcaggagccagcaccaatgaccgaggacctcttagaagaacagagcgaagtcctggcaaaattaggaacgagtgcggagggagcgcacttgagagcgagaatgcagtcagcttgcctgttgagtgacatggaaagcttcaaggccgcaaacccagggtgctccctggaggatttcgttagatggtactctccacgggattatatcgaggaagaggttatcgatgaaaagggaaatgtggtgcttaaaggcgagctgagtgcacgcatgaaaattccaagcaatatgtgggtggaagcctgggaaaccgctaaacctatccctgctagacgtcaaaggagactctttgacgatacgagggaggctgaaaaagttttgcattacctcgcgattcaaaaacctgccgatctggccagacatctcttgccttgcgtgatccacgctgccgtgttgaaagtaaaggaagaggaaagtctggagaatatcagcagtgtcaagaaaatcatcaaacagattatttcacactccagcaaagtcctccatttccctaacccagaagacaagaaactggaagagataatccaccagatcaccaacgtggaggcacttattgcacgcgctagaagcctgaaggcaaagttcggtacagaaaaatgcgagcaggaagaagaaaaggaggatttggagaggtttgtctcatgcctcctagaacagcctgaggtcctggtgaccggggctggacgtggacacgctggtcggattatccataagctgttcgtgaacgcccagcgcttaacggaatccagcgacgaggctgccgctatgactcctccagaggaggaactaaagaggatgggttcgcctgaagaaagacgccaaaactcggtgtctgactttccgccacccgctgggcgagagttcattctgcgaactaccgttccacgccctgccccatacagcaaagcgcttcctcaacggatgtacagcgtgttgacgaaggaagattttaggctggcaggcgcatttagctctgacacaagtttcttttag

SEQ ID NO: 67986 - DNA, 4185 bp, Artificial Sequence
  derived and/or modified sequence
gctcctcaagatggctgccgacagtgagcccgaatccgaggtatttgagatcacggacttcaccactgcctcggaatgggaaaggtttatttccaaagttgaagaagtcttgaatgactggaaactgattggaaactctttgggaaagccactcgaaaagggtatatttacttctggcacatgggaagagaaatcagatgaaatttcctttgctgacttcaagttctcagtcactcatcattatcttgtacaagagtccactgataaagaaggaaaggatgagttattagaggatgttgttccacaatctatgcaagatttgctgggtatgaataatgactttcctccaagagcacattgcctggtaagatggtatgggctacgtgagttcgtggtgattgcccctgctgcacacagtgacgctgttctcagcgaatctaagtgcaaccttcttctgagttctgtttctattgccttgggaaacactggctgtcaggtgccactctttgtgcaaattcaccacaaatggcgaagaatgtatgtaggagaatgtcaaggtcctggtgtacgaactgatttcgaaatggttcatcttagaaaagtgccaaatcagtacactcacttatcaggtctgctggatatcttcaaatcaaagattggatgtcctttaactccattgcctccagttagtattgctattcgatttacctatgtacttcaagattggcagcagtatttttggcctcagcaacctccagacatagatgcccttgtaggaggagaagttggaggcttggagtttggcaagttaccatttggtgcctgcgaagatcctattagtgaactccatttagctactacatggcctcatctgaccgaagggatcattgtggataatgatgtttattctgatttggatcctattcaagctccacattggtctgttagagttcgaaaagctgagaatcctcagtgtttgctaggtgattttgtcactgaattttttaaaatttgccgtcgaaaggagtcaactgatgagattcttggacgatctgcatttgaggaagaaggcaaagaaactgctgatataactcatgctttgtcaaaattgacagagccggcatcagttccaattcataaattatcagtttcaaatatggtacacactgcaaagaagaaaatccgaaaacacagaggtgtagaggagtcaccgctaaataatgatgttcttaatactattctcctgttcttattccctgatgctgtttctgagaaaccattagatggaactacttcaacagataataataatcctccatcagagagtgaagactataatctctacaatcagttcaagtctgcaccatctgacagtttaacatacaaactggctttgtgtctctgtatgatcaatttttaccatggagggttgaaaggagtggcacacctctggcaggaatttgttcttgaaatgcgtttccgatgggaaaacaactttctgattccaggattagcaagtggacccccagatctgaggtgttgtttactgcatcagaaactacagatgttaaattgttgtattgaaagaaagaaggcacgtgatgaggggaaaaagacaagtgcttcagatgtcactaatatatatccaggggatgctggaaaagcaggagaccagttggtgccagataatctaaaagaaacagataaggaaaagggagaggtaggaaaatcttgggattcctggagtgacagcgaagaagaattttttgaatgcctaagtgatactgaagaacttaaaggaaatggacaagagagtggcaagaaaggaggacctaaggagatggcaaatttaaggccggaaggacggctctatcagcatgggaaacttacactgctgcataatggagaacctctctacattccagtaacccaggaaccagcacctatgacagaagatctgctagaagagcagtctgaagttttagctaaattaggtacatcggcagagggggctcaccttcgagcacgcatgcagagtgcctgtctgctctcagatatggagtcttttaaggcagctaatccaggttgctccctggaagattttgtgaggtggtattcaccccgggattatattgaagaggaggtgattgatgaaaagggcaatgtggtgctgaaaggagaactgagtgcccggatgaagattccaagcaatatgtgggtagaagcctgggaaacagctaagccaattcctgctagaaggcaaaggagactctttgatgatacacgggaagcagaaaaggtgctgcactatctggcaatccagaaacctgcagaccttgctcggcacctgttaccttgtgtgattcatgcagctgtactcaaggtaaaggaagaagaaagtctcgaaaacatttcttcagttaagaagatcataaagcagataatatcccattccagtaaagttttgcacttccccaatccagaagacaagaaattggaagaaatcattcaccagattactaatgtggaagctctcattgccagagctcggtcactaaaagccaagtttggaactgagaaatgtgaacaggaggaggaaaaggaagatcttgaaaggtttgtgagttgcctgctggagcagcctgaagtgttagtcaccggtgcaggaagaggacatgctggcaggatcattcacaagctgtttgtgaatgcccagaggctgactgaatcttctgatgaggctgcagctatgactccaccagaggaggaattgaagagaatgggctccccagaggaaagaaggcagaactccgtgtcagacttcccaccccctgctggccgggaattcattttgcgcaccactgtgccgcgccctgctccctactccaaagctctgcctcagcggatgtacagtgttctcaccaaagaggactttagacttgcaggtgccttttcatcagatacttccttcttctgattcttctagcattactcgttggtggcttcagagacagtgctgcctcctcctgagggagggaaggtaccagggagaacctgggaggtcctggagagggccctgtccagttgggtgatcaggaatcaaaccagcatcggaaagacttcccagcaccaagcttgagctgtgtcgtttcgtggagggggcagcgaggatgggcttgagctgttgagagatttctgccctagagatggcctttgtatatgggggggtggtggggggacacaaacacatcagacactccgtcctcacactggcaggacggtgttcatcgcattctcttctgtgaccagcctctaggctagcggctgcattcgtggtctgtgcaaacacttcgtggttctatatatcagcagcaagtgtgcaaaataaaggacctgttaactcagatttctggatattttggtggtagcttctagtcccagaatctgtgtttttaaaatactacatgacattctgtctattcaatcacctggtggtcatctttcttgtactaattaactgttgatgagcattttggatattctaggagaaagcctataatttcacatagtttctctttttcatgtaactgtaacctaaatgtattacttctgataaaactatatatcaaatgtcactgcaaattagttttatatctgtcatgtgagatttgtcttacttatttttcttttggttgccatggaagttatggccctgaaaatcgtctccctccccttctcttgctgtacagcatgcgttctctttttgtggttgctggctgggtactgtatttaatgaagtagagaatagcacttgcaaaaatacagtcttggtacctagagactgtcatgcagatagtataatttggtatatgtgctaatgcattgagtagaggattattttaacacactattttgcttttgtattttagttaaaataatcgatggggatgtgtagcccccccgtgtgaggatgacatcaccacatttctagtttcatggagctcaagatgtcttgtgtctgtgtggctagatggcctctgcttggtaatcttatttttaggcctaaaattcccacttaaatccaaagtaaaaatggttatactgaagcataaaccttgcctgtgtaattttaaaaaattaatagagctgtgcaaaccctgttatttttgtaaaaaaaaaaaaaaa

SEQ ID NO: 67987 - DNA, 2967 bp, Artificial Sequence
  derived and/or modified sequence
atggccgccgacagcgagcccgagagcgaggtgttcgagatcaccgacttcaccaccgccagcgagtgggagagattcatcagcaaggtggaggaggtgctgaacgactggaagctgatcggcaacagcctgggcaagcccctggagaagggcatcttcaccagcggcacctgggaggagaagagcgacgagatcagcttcgccgacttcaagttcagcgtgacccaccactacctggtgcaggagagcaccgacaaggagggcaaggacgagctgctggaggacgtggtgccccagagcatgcaggacctgctgggcatgaacaacgacttcccccccagagcccactgcctggtgagatggtacggcctgagagagttcgtggtgatcgcccccgccgcccacagcgacgccgtgctgagcgagagcaagtgcaacctgctgctgagcagcgtgagcatcgccctgggcaacaccggctgccaggtgcccctgttcgtgcagatccaccacaagtggagaagaatgtacgtgggcgagtgccagggccccggcgtgagaaccgacttcgagatggtgcacctgagaaaggtgcccaaccagtacacccacctgagcggcctgctggacatcttcaagagcaagatcggctgccccctgacccccctgccccccgtgagcatcgccatcagattcacctacgtgctgcaggactggcagcagtacttctggccccagcagccccccgacatcgacgccctggtgggcggcgaggtgggcggcctggagttcggcaagctgcccttcggcgcctgcgaggaccccatcagcgagctgcacctggccaccacctggccccacctgaccgagggcatcatcgtggacaacgacgtgtacagcgacctggaccccatccaggccccccactggagcgtgagagtgagaaaggccgagaacccccagtgcctgctgggcgacttcgtgaccgagttcttcaagatctgcagaagaaaggagagcaccgacgagatcctgggcagaagcgccttcgaggaggagggcaaggagaccgccgacatcacccacgccctgagcaagctgaccgagcccgccagcgtgcccatccacaagctgagcgtgagcaacatggtgcacaccgccaagaagaagatcagaaagcacagaggcgtggaggagagccccctgaacaacgacgtgctgaacaccatcctgctgttcctgttccccgacgccgtgagcgagaagcccctggacggcaccaccagcaccgacaacaacaacccccccagcgagagcgaggactacaacctgtacaaccagttcaagagcgcccccagcgacagcctgacctacaagctggccctgtgcctgtgcatgatcaacttctaccacggcggcctgaagggcgtggcccacctgtggcaggagttcgtgctggagatgagattcagatgggagaacaacttcctgatccccggcctggccagcggcccccccgacctgagatgctgcctgctgcaccagaagctgcagatgctgaactgctgcatcgagagaaagaaggccagagacgagggcaagaagaccagcgccagcgacgtgaccaacatctaccccggcgacgccggcaaggccggcgaccagctggtgcccgacaacctgaaggagaccgacaaggagaagggcgaggtgggcaagagctgggacagctggagcgacagcgaggaggagttcttcgagtgcctgagcgacaccgaggagctgaagggcaacggccaggagagcggcaagaagggcggccccaaggagatggccaacctgagacccgagggcagactgtaccagcacggcaagctgaccctgctgcacaacggcgagcccctgtacatccccgtgacccaggagcccgcccccatgaccgaggacctgctggaggagcagagcgaggtgctggccaagctgggcaccagcgccgagggcgcccacctgagagccagaatgcagagcgcctgcctgctgagcgacatggagagcttcaaggccgccaaccccggctgcagcctggaggacttcgtgagatggtacagccccagagactacatcgaggaggaggtgatcgacgagaagggcaacgtggtgctgaagggcgagctgagcgccagaatgaagatccccagcaacatgtgggtggaggcctgggagaccgccaagcccatccccgccagaagacagagaagactgttcgacgacaccagagaggccgagaaggtgctgcactacctggccatccagaagcccgccgacctggccagacacctgctgccctgcgtgatccacgccgccgtgctgaaggtgaaggaggaggagagcctggagaacatcagcagcgtgaagaagatcatcaagcagatcatcagccacagcagcaaggtgctgcacttccccaaccccgaggacaagaagctggaggagatcatccaccagatcaccaacgtggaggccctgatcgccagagccagaagcctgaaggccaagttcggcaccgagaagtgcgagcaggaggaggagaaggaggacctggagagattcgtgagctgcctgctggagcagcccgaggtgctggtgaccggcgccggcagaggccacgccggcagaatcatccacaagctgttcgtgaacgcccagagactgaccgagagcagcgacgaggccgccgccatgaccccccccgaggaggagctgaagagaatgggcagccccgaggagagaagacagaacagcgtgagcgacttccccccccccgccggcagagagttcatcctgagaaccaccgtgcccagacccgccccctacagcaaggccctgccccagagaatgtacagcgtgctgaccaaggaggacttcagactggccggcgccttcagcagcgacaccagcttcttctag

SEQ ID NO: 67988 - protein, 1151 aa, Artificial Sequence
  derived and/or modified sequence
MRSRSNSGVRLDGYARLVQQTILCHQNPVTGLLPASYDQKDAWVRDNVYSILAVWGLGLAYRKNADRDEDKAKAYELEQSVVKLMRGLLHCMIRQVDKVESFKYSQSTKDSLHAKYNTKTCATVVGDDQWGHLQLDATSVYLLFLAQMTASGLHIIHSLDEVNFIQNLVFYIEAAYKTADFGIWERGDKTNQGISELNASSVGMAKAALEALDELDLFGVKGGPQSVIHVLADEVQHCQSILNSLLPRASTSKEVDASLLSVVSFPAFAVEDSQLVELTKQEIITKLQGRYGCCRFLRDGYKTPKEDPNRLYYEPAELKLFENIECEWPLFWTYFILDGVFSGNAEQVQEYKEALEAVLIKGKNGVPLLPELYSVPPDRVDEEYQNPHTVDRVPMGKLPHMWGQSLYILGSLMAEGFLAPGEIDPLNRRFSTVPKPDVVVQVSILAETEEIKTILKDKGIYVETIAEVYPIRVQPARILSHIYSSLGCNNRMKLSGRPYRHMGVLGTSKLYDIRKTIFTFTPQFIDQQQFYLALDNKMIVEMLRTDLSYLCSRWRMTGQPTITFPISHSMLDEDGTSLNSSILAALRKMQDGYFGGARVQTGKLSEFLTTSCCTHLSFMDPGPEGKLYSEDYDDNYDYLESGNWMNDYDSTSHDVHMYLPTKLFQASRPSFNLLDSPHPRQENQVPSVRVEIHLPRDQSGEVDFKALVLQLKETSSLQEQADILYMLYTMKGPDWNTELYNERSATVRELLTELYGKVGEIRHWGLIRYISGILRKKVEALDEACTDLLSHQKHLTVGLPPEPREKTISAPLPYEALTQLIDEASEGDMSISILTQEIMVYLAMYMRTQPGLFAEMFRLRIGLIIQVMATELAHSLRCSAEEATEGLMNLSPSAMKNLLHHILSGKEFGVERSVRPTDSNVSPAISIHEIGAVGATKTERTGIMQLKSEIKQSPGTSMTPSSGSFPSAYDQQSSKDSRQGQWQRRRRLDGALNRVPVGFYQKVWKVLQKCHGLSVEGFVLPSSTTREMTPGEIKFSVHVESVLNRVPQPEYRQLLVEAILVLTMLADIEIHSIGSIIAVEKIVHIANDLFLQEQKTLGADDTMLAKDPASGICTLLYDSAPSGRFGTMTYLSKAAATYVQEFLPHSICAMQ

SEQ ID NO: 67989 - DNA, 3456 bp, Artificial Sequence
  derived and/or modified sequence
atgcgctcccgatctaactctggtgtgcgcctggatggctatgcaagacttgtgcagcagacaattctttgccaccaaaatcccgtcaccggtctgctccccgcttcctatgatcaaaaagacgcctgggtgcgagataatgtctacagcatactggccgtctggggtctgggactcgcgtatcggaagaacgcagacagggacgaggacaaggccaaagcctatgaactcgaacagtccgtagtcaagctgatgcggggactgcttcactgtatgattaggcaggtagataaagttgagtcttttaaatacagccagagcacgaaagattccttgcacgccaaatacaacaccaagacctgcgctaccgtcgtgggagatgatcaatggggccatctgcaattagacgcaacctctgtctacctcctgttccttgcccagatgaccgcttcgggcttgcatatcatccactctctggatgaggtgaattttatccagaatctggtgttctacattgaggctgcctataaaactgcggatttcggcatatgggagagaggcgacaaaacaaatcagggtataagcgagcttaatgccagctctgttggaatggccaaggcggcgctggaggccctcgacgagctggacttgtttggggtcaagggcggccctcagagtgttatacacgtgctcgctgatgaggtgcagcattgccaaagcattctcaacagtctgctgcccagagcgagtacctctaaagaggtcgacgccagccttttaagcgtggtatcatttcctgcattcgcggtggaggatagtcagctggtagaacttaccaagcaggagatcataactaagttgcagggaagatacggatgctgccgcttcctcagggatggatataagacccctaaggaagatccaaacagactatactacgagcctgctgagctgaagttattcgagaacatcgagtgcgaatggccactcttctggacctatttcatcctggacggcgtgttcagtggtaacgcagaacaggtacaggaatataaggaggccttggaagcagtgctcatcaaggggaagaacggggtgcccttgctacccgagttgtacagcgtgcccccagatcgagttgacgaggaataccagaatccccacaccgtcgaccgcgttccgatggggaagctccctcacatgtggggccaatctctgtacatcttggggtcgctgatggccgagggtttcttagccccaggcgaaattgatccattgaaccggcggttctctacagtgcccaaaccagacgtcgtggttcaggttagcattctggccgaaacggaagagatcaagaccattttgaaggataagggcatctatgtggagactattgcggaggtctaccctattcgggtgcaaccagctcgaattttgtcgcacatctattctagcctaggctgtaacaacaggatgaaactgagcggtcgcccttatcgccatatgggagttctgggtacttctaaattatacgacatacggaaaacaatatttacattcacgccccagttcattgatcagcagcagttttatctcgcactcgataacaaaatgatcgttgagatgctgagaaccgaccttagctatctatgcagtcgctggcggatgacgggacagcctaccattactttccccattagccacagcatgctggatgaagatggtacatcactgaattcctcgattctcgccgcccttaggaagatgcaggatggttatttcggaggtgctcgcgttcagactgggaagttgtccgagtttctcacaacatcatgctgcactcatctctcctttatggatcccggacctgagggcaaactctacagtgaagattacgacgataactatgattatctagaatcgggaaactggatgaatgattacgactcgacttctcacgacgtccacatgtacctccctacaaagctgttccaagcgtcccggccatccttcaacctgctggattcaccccatccacgacaggaaaaccaggtgcctagtgtgcgcgtggagattcacctccccagggatcagagcggagaagtcgatttcaaagctctggttttgcagctgaaggagacttctagccttcaggaacaggctgatatcctgtacatgctgtacactatgaagggtcctgactggaataccgagctgtataacgagcgaagcgccacggtgcgcgagctgcttaccgagctatacgggaaggtgggagaaatccgacactggggcctgatccgatacattagcggcatcttgcggaaaaaagtggaagccctggacgaagcatgtacagacttgctgtcccatcagaagcacctcactgtaggactgccaccagagcccagggaaaagaccattagcgccccactgccttacgaagccttgacccagctcattgatgaagcttctgagggagatatgagcatctccattctcacacaggagattatggtttatctggccatgtacatgcgcacccagcccggattgtttgctgaaatgtttcggctgcgcataggattgatcatacaggtcatggcgaccgagctcgcccattcattacgttgcagcgcggaggaagcgacagagggccttatgaatctctctccatcagctatgaaaaatctgttgcaccatatactttccggcaaagagttcggagtagagcggagtgtcaggcctaccgattccaatgtgtcacctgccattagtattcatgagattggagcggttggggccacaaaaacagaaaggacagggatcatgcagttgaagtcagagataaagcaaagtcctggcaccagcatgacaccatcctctggctccttccctagcgcttacgaccaacagagctccaaagattctagacagggtcagtggcagcggcggcgcaggttggacggagcacttaacagagtgcctgtcggcttttaccaaaaggtgtggaaggttctgcagaagtgccacgggctctcagtagaaggatttgttctcccatcatcaaccacacgcgaaatgacccccggcgagataaaattcagcgtgcacgtggagagcgtgctgaaccgagtaccccagccagagtatcggcagctgcttgtcgaagccatcctcgttctgactatgttggcagacattgaaatacactccataggttccatcattgctgtggaaaagattgtccatattgcgaatgacttgtttttgcaggaacaaaagaccctgggtgctgatgataccatgttagccaaagatcctgcctccggcatctgtacgctcctttacgattctgcacccagcggccggttcgggacaatgacctacctgtcaaaggccgccgcaacttacgtccaagagtttttgccacactcgatctgtgcaatgcagtag

SEQ ID NO: 67990 - DNA, 3456 bp, Artificial Sequence
  derived and/or modified sequence
atgaggagccgcagcaacagcggcgtgcggctggatggctacgcccggctggtgcagcagaccatcctgtgccaccagaaccctgtgacaggcctgctgcctgccagctatgaccagaaggatgcctgggtgcgggacaacgtgtacagcatcctggccgtgtggggcctgggcctggcctacaggaagaatgctgacagagatgaggacaaggccaaggcctatgagctggagcagagcgtggtgaagctgatgaggggcctgctgcactgcatgatccggcaggtggacaaggtggagagcttcaagtacagccagagcaccaaggacagcctgcacgccaagtacaacaccaagacctgtgccaccgtggtgggagatgaccagtggggccacctgcagctggatgccacctctgtgtacctgctcttcctggcccagatgacagccagcggcctgcacatcatccacagcctggatgaggtgaacttcatccagaacctggtgttctacatcgaggccgcctacaagacagctgactttggcatctgggagcggggggacaagaccaaccagggcatcagcgagctgaatgccagctctgtgggcatggccaaggccgccctggaggccctggatgagctggacctgtttggagtgaagggcggcccccagagcgtcatccacgtgctggctgatgaggtgcagcactgccagagcatcctgaacagcctgctgccccgggccagcaccagcaaggaggtggatgccagcctgctgtctgtggtgtccttccctgcctttgctgtggaggacagccagctggtggagctgaccaagcaggagatcatcaccaagctgcagggccgctatggctgctgccgcttcctgagagatggctacaagacccccaaggaggaccccaacagactctactatgagcctgctgagctgaagctgtttgagaacattgaatgtgagtggcccctcttctggacctacttcatcctggatggagtcttctctggaaatgctgagcaggtgcaggagtacaaggaggccctggaggccgtgctgatcaagggcaagaatggagtgcccctgctgcctgagctgtacagcgtgcccccagacagagtggatgaggagtaccagaacccccacacagtggacagagtgcccatgggcaagctgccccacatgtggggccagagcctgtacatcctgggcagcctgatggccgagggcttcctggcccctggagaaattgaccccctgaacagacgcttcagcacagtgcccaagccagatgtggtggtgcaggtgtccatcctggccgagacagaggagatcaagaccatcctgaaggacaagggcatctacgtggagaccatcgccgaggtgtaccccatccgggtgcagcctgcccgcatcctgagccacatctacagcagcctgggctgcaacaacaggatgaagctgagcggccggccctaccgccacatgggcgtgctgggcaccagcaagctgtatgacatcaggaagaccatcttcaccttcaccccccagttcatcgaccagcagcagttctacctggccctggacaacaagatgattgtggagatgctgaggacagacctgagctacctgtgcagccgctggaggatgacaggccagcccaccatcaccttccccatcagccacagcatgctggatgaagatggcaccagcctgaacagcagcatcctggccgccctgaggaagatgcaggacggctactttggaggagcccgggtgcagacaggcaagctgtctgagttcctgaccaccagctgctgcacccacctgtccttcatggaccccggccctgagggcaagctgtacagcgaggactatgatgacaactatgactacctggagagcggcaactggatgaatgactatgacagcaccagccatgatgtgcacatgtacctgcccaccaagctgttccaggccagccggcccagcttcaacctgctggacagcccccacccccggcaggagaaccaggtgcccagcgtgcgggtggagatccacctgccccgggaccagagcggggaggtggacttcaaggccctggtgctgcagctgaaggagaccagcagcctgcaggagcaggccgacatcctgtacatgctgtacaccatgaagggccctgactggaacacagagctgtacaatgaaagaagtgccaccgtgcgggagctgctgacagagctgtatggcaaggtgggggagatccgccactggggcctcatccgctacatcagcggcatcctgaggaagaaggtggaggccctggatgaggcctgcacagacctgctgagccaccagaagcacctgactgtgggcctgcccccagagccccgggagaagaccatcagcgcccccctgccctatgaggccctgacccagctgattgatgaggccagcgagggggacatgagcatcagcatcctgacccaggagatcatggtgtacctggccatgtacatgaggacccagcccggcctgtttgctgagatgttccggctgagaattggcctcatcatccaggtgatggccacagagctggcccacagcctgcgctgcagcgctgaggaggccacagagggcctgatgaacctgagccccagcgccatgaagaacctgctgcaccacatcctgagcggcaaggagtttggagtggagaggtctgtgcggcccacagacagcaatgtgtccccagccatcagcatccacgagatcggggctgtgggcgccaccaagacagagaggacaggcatcatgcagctgaagtctgagatcaagcagagccctggcacctccatgacccccagcagcggcagcttccccagcgcctatgaccagcagagcagcaaggacagccggcagggccagtggcagaggagaagaaggctggatggagccctgaacagagtgcctgtgggcttctaccagaaggtgtggaaggtgctgcagaagtgccacggcctgtctgtggagggctttgtgctgcccagcagcaccacccgggagatgaccccaggagagatcaagttctctgtgcacgtggagagcgtgctgaacagagtgccccagcctgagtaccggcagctgctggtggaggccatcctggtgctgaccatgctggccgacatcgagatccacagcatcggcagcatcatcgctgtggagaagatcgtgcacatcgccaatgacctcttcctgcaggagcagaagaccctgggcgcagatgacaccatgctggccaaggaccctgccagcggcatctgcaccctgctgtatgattctgcccccagcggccgcttcggcaccatgacctacctgagcaaggctgctgccacctacgtgcaggagttcctgccccacagcatctgtgccatgcagtag

SEQ ID NO: 67991 - DNA, 3456 bp, Artificial Sequence
  derived and/or modified sequence
atgcggagccggagcaacagcggcgtgcggctggacggctacgcccgactcgtgcagcaaactattctgtgtcatcagaacccggtcacaggattactgcccgccagctatgatcagaaagacgcttgggtgcgggataatgtgtactcgattctagcagtgtggggcctaggcctggcttaccggaagaatgccgaccgcgacgaggataaggctaaagcatacgaactcgagcagagcgtagtgaagctgatgaggggcctattgcactgcatgatccgccaggtggacaaggtggagtctttcaaatattctcagagcaccaaggatagcctccacgcaaagtacaataccaaaacatgtgctactgtggttggtgatgatcagtggggccacctgcagcttgacgccacgtctgtgtatctccttttcctagcacaaatgaccgcctccggtctgcatattatccattctctggatgaagtcaatttcattcagaaccttgtcttctatatagaggcagcctacaaaaccgctgattttggaatttgggaacggggagacaagacaaaccagggcatctccgagctgaacgcctcaagcgtgggtatggccaaagccgccctcgaagcactggatgagctggatttattcggggtgaaaggaggccctcaaagcgtgatccacgtgctggctgacgaagtccagcattgtcagagtatactgaattctctcctcccgagggccagcacctctaaggaagtcgacgcctcactgctgagcgtggttagcttcccagccttcgccgtcgaagacagccagttggtagagctgactaagcaagaaatcattactaaactgcagggccgctatggatgttgtagattcctccgcgatggatataagacacctaaggaagatcctaatagactatattatgagcctgccgagctcaaacttttcgagaatatagagtgcgagtggcctctattttggacttacttcattcttgatggagtttttagcggcaacgcagaacaagtccaggagtataaggaggccctagaagcagtcctgattaagggcaagaatggggtgccccttttgccagagttgtacagcgtgccgcccgaccgtgttgatgaggaatatcagaacccccacacagtggaccgcgtacccatgggtaaactcccccatatgtgggggcagtctctttatatactgggttctctgatggcggagggttttcttgcccccggggaaattgatcctctcaacaggaggttcagcaccgtaccaaagcctgacgtagtcgtgcaagtgagcatcctggccgaaaccgaggagattaaaacaatcctgaaggacaagggcatctatgttgaaacgattgcggaagtctatccaatcagggtacagcctgctaggattctgagtcacatttactcctctctaggttgcaataaccgaatgaagctaagcgggcggccttataggcatatgggggtcctgggaacaagcaagctgtacgacataaggaaaactatctttacattcactcctcagttcatagaccaacagcagttctacctggcactggacaataaaatgatagtagaaatgcttaggacagacctatcctacctctgcagcaggtggcgcatgacaggtcagccaactataactttccctatctctcacagcatgttggatgaggacggcacctccctgaattccagtatcctcgccgcactacgtaaaatgcaagatggatacttcggaggcgcccgggtccaaaccggcaagttgtccgagtttcttactacatcctgttgtacgcatctgtccttcatggaccccggacctgagggtaagctatactctgaggattacgacgacaattacgattacctggagtcaggcaattggatgaatgattacgattccacaagccacgacgtccatatgtacctgcccactaaattgtttcaagcttcaaggccgtctttcaatctcctggacagtccgcaccctcgacaggaaaaccaagttccatcggttcgagtggagattcatttaccaagagaccaaagcggtgaagttgattttaaagctttagtactccagttaaaggagacaagctctctccaggaacaggctgacatcctctacatgctctatacaatgaagggaccggactggaacactgaactctacaatgaacggtcagctactgtacgggagctcctgaccgagctttatgggaaagtgggggaaatccggcattggggacttatccggtatatctctggtattctgaggaaaaaggtggaggccctggacgaagcatgcaccgatctactctcacatcagaagcacctcaccgtgggattgccccctgagccacgtgaaaagacaatctctgctccgctcccgtatgaagccttgacccagttgatcgatgaagcaagcgaaggggacatgagtattagtattctgacccaggagatcatggtctaccttgcaatgtacatgaggactcagcccggcctgtttgccgagatgttccggcttcgaatcggcttgattatccaggtaatggctacggagctcgcacactcactacgttgctcggccgaagaggcaactgagggcctgatgaatctgtccccaagcgcgatgaagaacctgttgcaccatattctgtccggcaaggagtttggagtggagcgcagcgttagaccaaccgattccaacgtgagtcccgccatctctattcacgaaataggcgcggtgggggctacgaagaccgagagaacgggaatcatgcagctcaaatccgaaatcaagcagtcccctgggacctcgatgactccctctagcggctctttcccttctgcttacgatcagcaatccagcaaggatagtagacaaggccagtggcaaagacgccgccggctagatggggcattgaaccgggtgccagtggggttttaccagaaggtgtggaaagtattgcagaaatgtcacggactgtcagtggaagggtttgtcctgccttcatccactacacgcgagatgacccctggggaaatcaaattcagtgtgcatgtagagagcgttcttaaccgcgtgccacagccggagtacagacagcttctcgtggaagctattctggtgctgacgatgctcgctgatattgaaattcacagcatcgggtctattattgcagtggagaagattgtacacattgcaaacgacctgtttctccaggaacagaaaaccctgggagccgatgacaccatgctggccaaagatcctgcttccggcatctgcactctcttatatgattccgccccatctgggcgtttcggcacgatgacttatttaagcaaggccgccgccacttacgtacaagaatttttacctcacagtatatgtgccatgcagtag

SEQ ID NO: 67992 - DNA, 5944 bp, Artificial Sequence
  derived and/or modified sequence
cacgcggaggccggactggactaagggggcaggagcggcgcctggggcgctgcggcggggctctagaccgcgggaagccagtgctagcgctggcgcgtggtgggcccctgaggccgccggagtccggagaggtacgcggaatccgcggcgccaggcctgagcggtgggagggctctgcggggcctggtgttcaggcgtcccaccacgagggtggagcagcgttggatacttgttccttagggaccgaaggctccggtggcacccgggctatttctcagaggacaattagtaacgtgtcgccatgaggagccggagtaactccggggtccggctggacggctacgctcgactggtgcaacagaccatcctgtgccatcagaatccagtgactggcttgcttccagccagctatgatcagaaagatgcttgggtccgagataatgtgtacagcatcttggctgtgtggggtttgggcctggcctatcggaagaatgcagaccgggatgaggataaggcaaaggcctatgaattggagcagagtgtagtgaagctgatgagaggactactgcactgcatgatcagacaggtggataaagtagaatccttcaaatatagtcagagtactaaggatagcctccatgcaaagtacaacaccaaaacctgtgccactgtagtgggtgatgatcaatggggacacctgcagttggatgctacctctgtgtacctgctcttcttagcccaaatgactgcctcaggactccatatcatccacagcctagatgaagtcaatttcatacagaaccttgtgttttacattgaagctgcatataaaactgctgacttcgggatatgggaacgtggagacaagaccaaccaagggatctcagagttgaatgccagttcagttggaatggcaaaggcagccctggaagcattagatgaactggatctgtttggtgtgaaaggtgggcctcaatcagttatccatgtcctggctgatgaagtacagcactgccagtctatcctaaattcactactgccccgtgcttcaacatcaaaagaggttgatgctagtctactctcagtggtttccttccctgcctttgcagtagaggatagccagttggtggagctcacaaaacaggaaatcatcaccaagcttcagggtcgttatggttgctgtcgctttctacgagatggatataaaactcctaaagaggatcccaatcgtctgtactatgaaccagctgagctgaagctatttgaaaacattgagtgtgaatggccattgttctggacatactttattcttgatggggtcttcagtggcaatgcagaacaggttcaagaatataaagaggctcttgaagcagtcctcatcaagggcaaaaatggagtcccacttctgccagagctgtacagtgttcctcctgacagggtcgatgaagaatatcagaatcctcacactgtggaccgagtccccatggggaaattgcctcacatgtggggtcagtctctatacattttaggaagcttgatggcagagggatttttagcccctggagaaattgatcccctgaatcgcaggttttctactgtaccgaagcccgatgttgtggttcaagtctccattctagctgaaacagaagaaatcaagaccattttgaaggacaagggaatttacgtggagaccattgctgaggtataccccatcagagtacaaccagctcgtattctcagccacatttattccagcctaggatgcaacaatagaatgaaactcagtggacgaccctacagacacatgggagtgcttggaacttcaaaactctatgacattcggaaaactatctttactttcactccacagtttatagaccagcaacagttctacctggctctggacaacaagatgatagtggaaatgcttagaacagacctctcctacctctgtagccgctggcggatgacaggccagcccaccatcaccttccccatctcacacagcatgcttgatgaagatggaacaagcttgaattcaagtatcctggcagcactccgaaaaatgcaagatgggtattttggtggggcaagggttcaaacaggtaaattgtcagagtttttgacaacatcttgttgcacacacttgagcttcatggaccctggacctgagggtaagctgtacagtgaagattatgatgacaactatgattacctggaatctggcaactggatgaatgattatgattcaaccagtcatgatgttcacatgtatcttcctacgaagttatttcaggcttcccggccttcattcaacttacttgattcacctcatccccgacaggagaaccaggttccctctgttcgtgtagaaatacatcttcctagagaccagtctggggaggtggactttaaagcactggttttacagttgaaggagacctcaagcttacaggaacaagctgatatcctctatatgctgtatactatgaaaggacctgactggaacactgaattgtataatgaacggagtgctacagtgagagagcttcttaccgagctgtatggcaaagtgggagaaattcgtcactggggcctgatccgatacatttctgggatcttaaggaagaaagtggaagcacttgatgaggcctgcacagaccttctctcccaccagaaacatttgacagtaggacttcctccagaacctcgagaaaagactatctctgcacctctgccctatgaggcgctcactcagctgatagatgaagccagtgaaggggatatgagcatttcaatccttacacaggaaataatggtatatctagccatgtatatgcgaacccagcctggcctctttgctgaaatgtttcgacttcgaattggtctgatcatacaagttatggcaacagaactggcccactcccttcgatgctcagctgaggaagccacagagggcctgatgaatctcagtccttcggccatgaagaatctcctgcatcacattctcagcggcaaggagtttggagtggaacgaagcgttcgtcccactgattcaaatgtcagtcctgctatttctatccacgagattggtgctgttggagcaaccaaaacagaacgaactgggatcatgcagttaaaaagtgagataaagcagtcacctggaacctctatgactccaagtagtgggtcctttcctagtgcatatgatcagcagtcatctaaagatagtcgtcaaggtcaatggcaacgccgaagaaggctggatggggcactgaatagagttccagttggattttatcagaaagtatggaaagttttgcagaagtgtcacggactttctgttgaagggtttgtccttccttcctctaccactagagagatgactccaggtgagattaaattctctgttcatgtggagtctgtcctgaatcgtgtacctcagccagagtaccgtcagctgctggttgaagccatccttgtcctcaccatgctggcagatattgaaattcatagcatcggaagcatcattgctgtggaaaaaatagtgcatattgccaatgacttgttccttcaagaacagaaaacccttggcgcagatgataccatgttggcaaaggatcccgcatctggcatctgtactcttctgtatgacagtgcacccagtggcaggtttggcaccatgacctacctctccaaggcagccgccacctacgtgcaggagttcctgccccacagcatctgtgccatgcaatgagggctttggttcctggcttctgggagccttttgacagctggtccctgcctcggttgattgtgcatggaactaaaatgttattgcctaatcactccaaccctgcccctttctgtcccatccttcccaagaagagagaactttttcgataaactaactactgtagaagaagtgaacacttacctggaggctcaccttgcagaaccagtgacaatcttatgagtataatgaacactcagccaggcctgtcatgattggctttatttctttcatcattcataaaagtttgcatgtgtttttattctctagatctgttaccaatatagttttctaactcctgtttggggagcaagtgttaataataacttattcctaaagcttggtttttcttttttgtgattttattgtgtatatgagtggtgggtactttgggacattatttcaaatgagtaaactctaaattgttaaatatttatgctgctataaattagaattacctattctacgtgccttttcttaggaaaagagagtactggatcatggttttcttccttacttacaggttgcttcacactgagtgataatttaaaattgtttctatgtagaatcattgtctctactgttgccctctctgtgtctgcacacataatgcctctctcactttggtgaaatatcaaaaaaatgcaagtacagcatgcatatttaagaatttctgaactaacacttgaaatcacattttataaagattgttggtactcagagttgtatttgcagcagaaaatgcagaataacccagaaatggagcccggagcccaattccagagaggaagggaaagaagagacgatgcctggacaatgtcttatacatagggaacagagagggaatcagaggtggcttagttccctgaagacagccttatgcgcttaatccctgcctttgaaaaatgggccaatacacaacacagacaataatttgaagcgtctgtattcagcaaagataaatacagcagtccagtctataggtgctctacttagcattcttttcatgtgctcctggtctctgtctcactcacctactttctactacatccaactcaactccctgacaccctatccccccatctattcttaaactctttcatatatattttcacttcctaattctagtgtacatatccctgtatatcatggtatctgtgggcatatgtctgtttcttataaagacacatatttgtgtgtgtatgtgtgtgtgtgtgtgtgtgtgtgtataagcatacatgggaatttttctgaatgtaagcagttttgatgtgtctgtatatcaatctgtatctacatttgatggactgagtaagaatgttgcatgtgagagaagggatgtgactgtggactcagattgacacacacagattggtggaagaatagcttcagtcctcttccttcatcccatatgtaggtagccttgcttgacaaatgtttcttctaactctccttcttctgaattgtgcagagactctgttaacttccctttttgcacttagataacttcctacttcaaccccctcctttatcttggatttctaaagtttttccccaatattgggaatggtgagggtggggatgagagactctctgaacaattcttgcagaaccagtgacaatcttatgaatataatgaataagtaagcatatagtagggtgatagaatacagatagtagaaacaaagagaggacagcaaaccttttcagcacttctctcagagcaaatggaaacacacagtaagtagctttctgactacattattttctggtcacttttaaagaaagtttacaacctgttctgaaactatttgtcttttcactggttgtaagtgtaccccaatctcagggagtatatctgtagtgccacaggcaaaagatccactccttcccacactcatttgcctgaacttactcgaagggctgcatttctctgagtttacgaaattgtgtcattatggtccccatacagtggtatttaacttttaaagcaacttttaagaaaactcgacttgttttttgttcattttaagtgtgtggtactaaaaagacatgttagactttttttaaaaaagcacttatgttttgaaaatagaataaataataagaatttccaattaaatcatgtctggtgccaatgtgcaaaacttc

SEQ ID NO: 67993 - DNA, 3456 bp, Artificial Sequence
  derived and/or modified sequence
atgaggagccgatctaattcaggagttaggttagacggctatgcccgacttgtgcagcagacgatactgtgccaccagaatcccgtgacaggcttgctcccggcatcttacgaccagaaggatgcatgggtgcgggacaatgtctactctattctagcagtgtgggggctgggcctggcctacaggaagaacgccgaccgcgacgaagacaaggccaaagcttacgaactggagcagagcgtggttaaactgatgaggggactgctgcactgtatgattcgccaggtggacaaggtggagtcatttaagtatagtcagagtaccaaggactccttacatgccaagtacaacaccaagacatgtgctaccgtggtcggggatgaccaatggggtcatctacagcttgacgcaacctctgtatatcttttgttcctcgcccagatgaccgcctctggcttacacatcattcactctctcgatgaggttaatttcatacagaatttagtgttctacattgaggctgcatataagacagctgactttggcatctgggaaagaggcgacaagactaaccagggcataagtgagttgaacgcctcatcagtcggtatggccaaagcggcactggaggctctcgatgagcttgacctcttcggggtcaaaggcggacctcagtctgtaattcatgttctcgctgatgaagtccagcactgtcagtctatcctgaactccctcttgcctagggcgagcaccagtaaagaagtggacgcatcgctgcttagcgtcgtcagtttcccggctttcgccgtggaggattcacagctcgttgagctcaccaaacaggaaatcattacaaaacttcagggcaggtacggctgttgccgctttttgagggatgggtacaagaccccgaaggaggatcccaataggttatactacgagcccgcagagctcaagttgttcgagaatatcgaatgtgagtggccgttattctggacttattttatcttggacggcgtgttttccggaaatgccgaacaggtgcaggagtataaagaggctctggaagccgtactgattaaaggaaaaaacggagtcccactgctgcccgagctttattccgtgccccctgacagagttgacgaggaataccagaatcctcatacagtggatcgggtgcccatggggaagctaccccacatgtgggggcagagcctctacatcctgggcagcctgatggctgaaggtttcctggcaccaggagagatcgaccctctcaaccgtcgctttagcacagtcccgaagcccgatgtggtggtccaggtgtctatcctggccgaaaccgaggaaattaagactattctgaaagataaggggatttacgtggagaccatcgctgaggtataccctattagagtgcagccggcaagaatcctctctcacatctactctagcctcggctgcaataaccggatgaaactatccggacgcccatacagacacatgggggtgcttggaacttccaaactctacgacatccgcaagactatattcacattcacccctcagtttatagaccaacagcaattctacttggccttagataacaagatgattgttgagatgcttcgtacagacttgtcttatttgtgtagccgttggagaatgaccggtcagcctactataacatttccaatcagtcatagcatgctcgacgaggatggaacgtctcttaattctagcatcctcgctgctctgcgaaagatgcaagacggttattttggcggagcccgtgtccagaccgggaagctcagcgaattcttaaccacaagctgttgtacacacctgagcttcatggacccaggacccgaaggaaagctctatagcgaggattatgacgacaactatgattacctggagagtggcaactggatgaatgattacgattctacttctcacgatgtccatatgtatctaccaaccaagctgtttcaagcatcccgcccttcttttaatttgttggactccccacacccgagacaagaaaaccaggtccctagtgtccgcgtggaaattcacctgccccgtgatcagtccggcgaggtggattttaaggcactcgtattacagttaaaggagacgagctccctgcaagagcaagcagacatcttgtacatgctgtacacaatgaaggggccagattggaataccgagttgtacaatgaacgatcggcgaccgtgagagagctacttacggagctgtacgggaaagtgggagagatcaggcactgggggctgatccggtatatctctgggatacttaggaagaaggtggaggcgctcgatgaagcgtgcacagatctcctgagccatcaaaagcatctgacggtgggactccctcccgagcccagagagaagactatttccgcccctctgccctatgaggccttgacacagctaattgatgaggcttccgaaggggacatgtcgatctctatcctgacacaggaaatcatggtctacctggcaatgtatatgcgaacacagcccggtctcttcgccgaaatgtttcgactgcgcatcggacttattatccaggtaatggcaaccgagttagctcactcactgagatgtagcgccgaggaagccacagaggggctaatgaatctgagcccttctgctatgaagaatctgctccatcatattctctccggcaaagaatttggtgtcgaaagaagcgttcgacctaccgatagtaacgtctctcccgctatttcaatccacgaaattggcgctgtaggagctactaagacggaacggaccgggattatgcagcttaaatccgagattaagcagtccccaggaaccagtatgacaccatcaagtggttctttcccatctgcatacgatcagcagtccagtaaggatagccgacaaggccagtggcagaggcgccgacgtttggacggagccctgaaccgggtgcccgtggggttctaccagaaagtgtggaaggtgttgcagaaatgtcacggattgtccgtagaagggttcgtgctcccatcatcgacaaccagagaaatgactcccggagaaattaaattttccgtgcacgtagagtcagtcttaaaccgggtgccccagccagaataccgccagctgttggtagaagctatcctggtccttacaatgttggcagacattgagatccatagtatcggcagtatcattgcagtggagaagattgttcacatcgcgaatgacttgtttcttcaggaacaaaagaccttaggtgcagacgacaccatgcttgctaaagaccccgcaagcgggatctgcacacttctttacgattccgccccatccggaagattcggcaccatgacttatctgtcaaaagccgctgcgacctatgtccaggaattcctgcctcattcaatttgcgctatgcagtag

SEQ ID NO: 67994 - DNA, 3456 bp, Artificial Sequence
  derived and/or modified sequence
atgagaagcagaagcaacagcggcgtgagactggacggctacgccagactggtgcagcagaccatcctgtgccaccagaaccccgtgaccggcctgctgcccgccagctacgaccagaaggacgcctgggtgagagacaacgtgtacagcatcctggccgtgtggggcctgggcctggcctacagaaagaacgccgacagagacgaggacaaggccaaggcctacgagctggagcagagcgtggtgaagctgatgagaggcctgctgcactgcatgatcagacaggtggacaaggtggagagcttcaagtacagccagagcaccaaggacagcctgcacgccaagtacaacaccaagacctgcgccaccgtggtgggcgacgaccagtggggccacctgcagctggacgccaccagcgtgtacctgctgttcctggcccagatgaccgccagcggcctgcacatcatccacagcctggacgaggtgaacttcatccagaacctggtgttctacatcgaggccgcctacaagaccgccgacttcggcatctgggagagaggcgacaagaccaaccagggcatcagcgagctgaacgccagcagcgtgggcatggccaaggccgccctggaggccctggacgagctggacctgttcggcgtgaagggcggcccccagagcgtgatccacgtgctggccgacgaggtgcagcactgccagagcatcctgaacagcctgctgcccagagccagcaccagcaaggaggtggacgccagcctgctgagcgtggtgagcttccccgccttcgccgtggaggacagccagctggtggagctgaccaagcaggagatcatcaccaagctgcagggcagatacggctgctgcagattcctgagagacggctacaagacccccaaggaggaccccaacagactgtactacgagcccgccgagctgaagctgttcgagaacatcgagtgcgagtggcccctgttctggacctacttcatcctggacggcgtgttcagcggcaacgccgagcaggtgcaggagtacaaggaggccctggaggccgtgctgatcaagggcaagaacggcgtgcccctgctgcccgagctgtacagcgtgccccccgacagagtggacgaggagtaccagaacccccacaccgtggacagagtgcccatgggcaagctgccccacatgtggggccagagcctgtacatcctgggcagcctgatggccgagggcttcctggcccccggcgagatcgaccccctgaacagaagattcagcaccgtgcccaagcccgacgtggtggtgcaggtgagcatcctggccgagaccgaggagatcaagaccatcctgaaggacaagggcatctacgtggagaccatcgccgaggtgtaccccatcagagtgcagcccgccagaatcctgagccacatctacagcagcctgggctgcaacaacagaatgaagctgagcggcagaccctacagacacatgggcgtgctgggcaccagcaagctgtacgacatcagaaagaccatcttcaccttcaccccccagttcatcgaccagcagcagttctacctggccctggacaacaagatgatcgtggagatgctgagaaccgacctgagctacctgtgcagcagatggagaatgaccggccagcccaccatcaccttccccatcagccacagcatgctggacgaggacggcaccagcctgaacagcagcatcctggccgccctgagaaagatgcaggacggctacttcggcggcgccagagtgcagaccggcaagctgagcgagttcctgaccaccagctgctgcacccacctgagcttcatggaccccggccccgagggcaagctgtacagcgaggactacgacgacaactacgactacctggagagcggcaactggatgaacgactacgacagcaccagccacgacgtgcacatgtacctgcccaccaagctgttccaggccagcagacccagcttcaacctgctggacagcccccaccccagacaggagaaccaggtgcccagcgtgagagtggagatccacctgcccagagaccagagcggcgaggtggacttcaaggccctggtgctgcagctgaaggagaccagcagcctgcaggagcaggccgacatcctgtacatgctgtacaccatgaagggccccgactggaacaccgagctgtacaacgagagaagcgccaccgtgagagagctgctgaccgagctgtacggcaaggtgggcgagatcagacactggggcctgatcagatacatcagcggcatcctgagaaagaaggtggaggccctggacgaggcctgcaccgacctgctgagccaccagaagcacctgaccgtgggcctgccccccgagcccagagagaagaccatcagcgcccccctgccctacgaggccctgacccagctgatcgacgaggccagcgagggcgacatgagcatcagcatcctgacccaggagatcatggtgtacctggccatgtacatgagaacccagcccggcctgttcgccgagatgttcagactgagaatcggcctgatcatccaggtgatggccaccgagctggcccacagcctgagatgcagcgccgaggaggccaccgagggcctgatgaacctgagccccagcgccatgaagaacctgctgcaccacatcctgagcggcaaggagttcggcgtggagagaagcgtgagacccaccgacagcaacgtgagccccgccatcagcatccacgagatcggcgccgtgggcgccaccaagaccgagagaaccggcatcatgcagctgaagagcgagatcaagcagagccccggcaccagcatgacccccagcagcggcagcttccccagcgcctacgaccagcagagcagcaaggacagcagacagggccagtggcagagaagaagaagactggacggcgccctgaacagagtgcccgtgggcttctaccagaaggtgtggaaggtgctgcagaagtgccacggcctgagcgtggagggcttcgtgctgcccagcagcaccaccagagagatgacccccggcgagatcaagttcagcgtgcacgtggagagcgtgctgaacagagtgccccagcccgagtacagacagctgctggtggaggccatcctggtgctgaccatgctggccgacatcgagatccacagcatcggcagcatcatcgccgtggagaagatcgtgcacatcgccaacgacctgttcctgcaggagcagaagaccctgggcgccgacgacaccatgctggccaaggaccccgccagcggcatctgcaccctgctgtacgacagcgcccccagcggcagattcggcaccatgacctacctgagcaaggccgccgccacctacgtgcaggagttcctgccccacagcatctgcgccatgcagtag

SEQ ID NO: 67995 - DNA, 6618 bp, Artificial Sequence
  derived and/or modified sequence
ctcctcggtgcaacctatataaggctcacagtctgcgctcctggtacacgcgcttcaacttcggttggtgtgtgtcgaagaaacctgactgcgccctgaggagaacagcggagaaggtccaccgagcctggcgaaaggtccgctgagcgggctgtcgtccggagccactccgggctgcggagcacccagtggagaccgcgcctggctcaggtgtgggaccccatccttcctgtcttcgcagaggagtcctcgcgtgaaataagcgggttttgaaaacaaaaaaaagaaggagtggaagagggggccaggatccaggcctccatccccacagaagtgaagctacagctgggaggtctcctcccaccccaaccgtcaccctgggtcccgactgcccacctcctcctcctccccctccccccaacaacaacaacaacaacaactccaagcacaccggccataagagtgcgtgtgtccccaacatgaccgaacgaagaagggacgagctctctgaagagatcaacaacttaagagagaaggtcatgaagcagtcggaggagaacaacaacctgcagagccaggtgcagaagctcacagaggagaacaccacccttcgagagcaagtggaacccacccctgaggatgaggatgatgacatcgagctccgcggtgctgcagcagctgctgccccaccccctccaatagaggaagagtgcccagaagacctcccagagaagttcgatggcaacccagacatgctggctcctttcatggcccagtgccagatcttcatggaaaagagcaccagggatttctcagttgatcgtgtccgtgtctgcttcgtgacaagcatgatgaccggccgtgctgcccgttgggcctcagcaaagctggagcgctcccactacctgatgcacaactacccagctttcatgatggaaatgaagcatgtctttgaagaccctcagaggcgagaggttgccaaacgcaagatcagacgcctgcgccaaggcatggggtctgtcatcgactactccaatgctttccagatgattgcccaggacctggattggaacgagcctgcgctgattgaccagtaccacgagggcctcagcgaccacattcaggaggagctctcccacctcgaggtcgccaagtcgctgtctgctctgattgggcagtgcattcacattgagagaaggctggccagggctgctgcagctcgcaagccacgctcgccaccccgggcgctggtgttgcctcacattgcaagccaccaccaggtagatccaaccgagccggtgggaggtgcccgcatgcgcctgacgcaggaagaaaaagaaagacgcagaaagctgaacctgtgcctctactgtggaacaggaggtcactacgctgacaattgtcctgccaaggcctcaaagtcttcgccggcgggaaactccccggccccgctgtagagggaccttcagcgaccgggccagaaataataaggtccccacaagatgatgcctcatctccacacttgcaagtgatgctccagattcatcttccgggcagacacaccctgttcgtccgagccatgatcgattctggtgcttctggcaacttcattgatcacgaatatgttgctcaaaatggaattcctctaagaatcaaggactggccaatacttgtggaagcaattgatgggcgccccatagcatcgggcccagttgtccacgaaactcacgacctgatagttgacctgggagatcaccgagaggtgctgtcatttgatgtgactcagtctccattcttccctgtcgtcctaggggttcgctggctgagcacacatgatcccaatatcacatggagcactcgatctatcgtctttgattctgaatactgccgctaccactgccggatgtattctccaataccaccatcgctcccaccaccagcaccacaaccgccactctattatccagtagatggatacagagtttaccaaccagtgaggtattactatgtccagaatgtgtacactccagtagatgagcacgtctacccagatcaccgcctggttgaccctcacatagaaatgatacctggagcacacagtattcccagtggacatgtgtattcactgtccgaacctgaaatggcagctcttcgagattttgtggcaagaaatgtaaaagatgggctaattactccaacgattgcacctaatggagcccaagttctccaggtgaagagggggtggaaactgcaagtttcttatgattgccgagctccaaacaattttactatccagaatcagtatcctcgcctatctattccaaatttagaagaccaagcacacctggcaacgtacactgaattcgtacctcaaatacctggataccaaacataccccacatatgccgcgtacccgacctacccagtaggattcgcctggtacccagtgggacgagacggacaaggaagatcactatatgtacctgtgatgatcacttggaatccacactggtaccgccagcctccggtaccacagtacccgccgccacagccgccgcctccaccaccaccaccgccgccgcctccatcttacagtaccctgtaaatacctgtcatgtccttcaggatctctgccctcaaaatttattcctgttcagcttctcaatcagtgactgtgtgctaaattttaggctactgtatcttcaggccacctgaggcacatcctctctgaaacggctatggaaggttagggccactctggactggcacacatcctaaagcaccaaaagaccttcaacattttctgagagcaacagagtatttgccaataaatgatctctcatttttccaccttgactgccaatctaactaaaataattaataagtttactttccagccagtcctggaagtctgggttttacctgccaaaacctccatcaccatctaaattataggctgccaaatttgctgtttaacatttacagagaagctgatacaaacgcaggaaatgctgatttctttatggagggggagacgaggaggaggaggacatgacttttcttgcggtttcggtaccctctttttaaatcactggaggactgaggccttattaaggaagccaaaattatcggtgcagtgtggaaaggcttccgtgatcctctcgctgcacccttagaaacttcaccgtcttcaaactccatttccatggttctgttaattctcaaggagcagcaactcgactggttctcccaggagcaggaaaaacccttgtgacatgaaacatctcaggcctgaaaagaaagtgctctctcagatggactcttgcatgttaagactatgtcttcacatcatggtgcaaatcacatgtacccaatgactccggctttgacacaacaccttaccatcatcatgccatgatggcttccacaaagcattaaacctggtaaccagagattactggtggctccagcgttgttagatgttcatgaaatgtgaccacctctcaatcacctttgagggctaaagagtagcacatcaaaaggactccaaaatcccatacccaactcttaagagatttgtcctggtacttcagaaagaattttcatgagtgttcttaattggctggaaaagcaccagctgacgttttggaagaatctatccatgtgtctgcctccatatgcatctgggcatttcatcttcagtcccctcattagactgtagcattaggatgtgtggagagaggagaaatgatttagcacccagattcacactcctatgcctggaagggggacatctttgaagaagaggaattagggctgtggacactgtcttgaggatgtggacttccttagtgagctccacattacttgatggtaaccacttcaaaaggatcagaatccacgtaatgaaaaaggtccctctagaggatggagctgatgtgaagctgccaatggatgaaaagcctcagaaagcaactcaaaggactcaaagcaacggacaacacaagagttgtcttcagcccagtgacacctctgatgtcccctggaagctttgtgctaacctgggactgcctgacttcctttagcctggtcccttgctactaccttgaactgttttatctaacctctctttttctgtttaattctttgctactgccattgaccctgctgcaggatttgtgtcattttcctgcctggttgctgagactccattttgctgccacacacagagatgtaagaggcaggctttaattgccaaagcacagtttgagcagtagaaaacaacatggtgtatatctcaaattgcctgacatgaagaggagtctaacggtgaagtttcacttttcatcagcatcatctttcacatgttcattatcatctgctcttattcttgcatgtttaaacacttaaaatttttagtataatttttagtgtgttttgaagtggtgactaggctttcaaaaacttccattgaattacaaagcactatccagttcttattgttaaactaagtaaaaatgataagtaacatagtgtaaaatattcctttactgtgaacttcttacaatgctgtgaatgagaggctcctcagaactggagcatttgtataataattcatcctgttcatcttcaattttaacatcatatataatttcaattctatcaattgggcctttaaaaatcatataaaaggatataaaatttgaaaagagaaacctaattggctatttaatccaaaacaactttttttttccttcaatggaatcagaaagcttgtcaatcactcatgtgttttagagtaattacttttaaaatggtgcatttgtgcttctgaactattttgaagagtcacttctgtttacctcaagtatcaattcatcctccatacatttgaattcaagttgtttttttgtcaaatttacagttgtcaattgatcttcaagctgcagggtgcctagaaatgggccgttgtctgtagccctggcatgtgcacacggacatttgccaccactgcaagcaaaagtctggagaagttcaccaacgacaagaacgattagggaaaatatgctgctgtgggttaacaactcagaaagtccctgatccacatttggctgtttactaaagcttgtgattaactttttggcagtgtgtactatgctctattgctatatatgctatctataaatgtagatgttaaggataagtaattctaaatttattattctatagttttgaagtttggttaagtttcctttcactcaattgatttattttgttgttaatcaaatttatgttaattggatcctttaaattttttttggcattttccaacaaaaatggctttattcataagaaaggaaaaaaatcaatggaatttgatatctaaagaagttagaaagggagcaaaataaaaaacataaaggagatagatgaattagtaagcaaatcagtagtcgagtttttcaaactggcaaaattaattaattgacttttagcccaaatttacattgttaattaaatcaagaaggaagaagatctaagagctcccattgataggcaagcctagagagaactagctaaatttatcatgctaggatattgaaacacagaaagtttacatacatttatgaagggtcaatttagtttggacagtgaggtatttgtcttagtggaaaaaaggagaattagtctgatcaaatcgtgaagtaatacagtgaacttgcaggtgcacaaaataagagggccacatctatatggtgcagtctggaattctgtttaagtttgtaggtacctcttggacttctgaattgatccagttgtcatccaccacagacatctcacatcagatacagacagttccaagattgacaacagagaacaacctgctggaaagacctgggcagaaatggagagccctgcgggaaccatgctacattttcatctaaagagagaatgcacatctgatgagactgaaagttctttgttgttttagattgtagaatggtattgaattggtctgtggaaaattgcattgcttttatttctttgtgtaatcaagtttaagtaataggggatatataatcataagcattttagggtgggagggactattaagtaattttaagtgggtggggttatttagaatgttagaataatattatgtattagatatcgctataagtggacatgcgtacttacttgtaaccctttaccctataattgctatccttaaagatttcaaataaactcggagggaactgcagggagaccaacttatttagagcgaattggacatggataaaaaccccagtgggagaaagttcaaaggtgattagattaataatttaatagaggatgagtgacctctgataaattactgctagaatgaacttgtcaatgatggatggtaaattttcatggaagttataaaagtgataaataaaaacccttgcttttacccctgtcagtagccctcctcctaccactgaaccccattgcccctacccctccttctaactttattgctgtattctcttcactctatatttctctctatttgctaatattgcattgctgttacaataaaaattcaataaagatttagtggttaagtgcaaa

SEQ ID NO: 67996 - DNA, 2587 bp, Artificial Sequence
  derived and/or modified sequence
acacgcgcttcaacttcggttggtgtgtgtcgaagaaacctgactgcgccctgaggagaacagcggagaaggtccaccgagcctggcgaaaggtccgctgagcgggctgtcgtccggagccactccgggctgcggagcacccagtggagaccgcgcctggctcaggtgtgggaccccatccttcctgtcttcgcagaggagtcctcgcgtggtgagtatgcgaaataagcgggttttgaaaacaaaaaaaagaaggagtggaagagggggccaggatccaggcctccatccccacagaagtgaagctacagctgggaggtctcctcccaccccaaccgtcaccctgggtcccgactgcccacctcctcctcctccccctccccccaacaacaacaacaacaacaactccaagcacaccggccataagagtgcgtgtgtccccaacatgaccgaacgaagaagggacgagctctctgaagagatcaacaacttaagagagaaggtcatgaagcagtcggaggagaacaacaacctgcagagccaggtgcagaagctcacagaggagaacaccacccttcgagagcaagtggaacccacccctgaggatgaggatgatgacatcgagctccgcggtgctgcagcagctgctgccccaccccctccaatagaggaagagtgcccagaagacctcccagagaagttcgatggcaacccagacatgctggctcctttcatggcccagtgccagatcttcatggaaaagagcaccagggatttctcagttgatcgtgtccgtgtctgcttcgtgacaagcatgatgaccggccgtgctgcccgttgggcctcagcaaagctggagcgctcccactacctgatgcacaactacccagctttcatgatggaaatgaagcatgtctttgaagaccctcagaggcgagaggttgccaaacgcaagatcagacgcctgcgccaaggcatggggtctgtcatcgactactccaatgctttccagatgattgcccaggacctggattggaacgagcctgcgctgattgaccagtaccacgagggcctcagcgaccacattcaggaggagctctcccacctcgaggtcgccaagtcgctgtctgctctgattgggcagtgcattcacattgagagaaggctggccagggctgctgcagctcgcaagccacgctcgccaccccgggcgctggtgttgcctcacattgcaagccaccaccaggtagatccaaccgagccggtgggaggtgcccgcatgcgcctgacgcaggaagaaaaagaaagacgcagaaagctgaacctgtgcctctactgtggaacaggaggtcactacgctgacaattgtcctgccaaggcctcaaagtcttcgccggcgggaaactccccggccccgctgtagagggaccttcagcgaccgggccagaaataataaggtccccacaagatgatgcctcatctccacacttgcaagtgatgctccagattcatcttccgggcagacacaccctgttcgtccgagccatgatcgattctggtgcttctggcaacttcattgatcacgaatatgttgctcaaaatggaattcctctaagaatcaaggactggccaatacttgtggaagcaattgatgggcgccccatagcatcgggcccagttgtccacgaaactcacgacctgatagttgacctgggagatcaccgagaggtgctgtcatttgatgtgactcagtctccattcttccctgtcgtcctaggggttcgctggctgagcacacatgatcccaatatcacatggagcactcgatctatcgtctttgattctgaatactgccgctaccactgccggatgtattctccaataccaccatcgctcccaccaccagcaccacaaccgccactctattatccagtagatggatacagagtttaccaaccagtgaggtattactatgtccagaatgtgtacactccagtagatgagcacgtctacccagatcaccgcctggttgaccctcacatagaaatgatacctggagcacacagtattcccagtggacatgtgtattcactgtccgaacctgaaatggcagctcttcgagattttgtggcaagaaatgtaaaagatgggctaattactccaacgattgcacctaatggagcccaagttctccaggtgaagagggggtggaaactgcaagtttcttatgattgccgagctccaaacaattttactatccagaatcagtatcctcgcctatctattccaaatttagaagaccaagcacacctggcaacgtacactgaattcgtacctcaaatacctggataccaaacataccccacatatgccgcgtacccgacctacccagtaggattcgcctggtacccagtgggacgagacggacaaggaagatcactatatgtacctgtgatgatcacttggaatccacactggtaccgccagcctccggtaccacagtacccgccgccacagccgccgcctccaccaccaccaccgccgccgcctccatcttacagtaccctgtaaatacctgtcatgtcct

SEQ ID NO: 67997 - protein, 410 aa, Artificial Sequence
  derived and/or modified sequence
MRACISLVLAVLCGLAWAGKIESCASRCNEKFNRDAACQCDRRCLWHGNCCEDYEHLCTEDHKESEPLPQLEEETEEALASNLYSAPTSCQGRCYEAFDKHHQCHCNARCQEFGNCCKDFESLCSDHEVSHSSDAITKEEIQSISEKIYRADTNKAQKEDIVLNSQNCISPSETRNQVDRCPKPLFTYVNEKLFSKPTYAAFINLLNNYQRATGHGEHFSAQELAEQDAFLREIMKTAVMKELYSFLHHQNRYGSEQEFVDDLKNMWFGLYSRGNEEGDSSGFEHVFSGEVKKGKVTGFHNWIRFYLEEKEGLVDYYSHIYDGPWDSYPDVLAMQFNWDGYYKEVGSAFIGSSPEFEFALYSLCFIARPGKVCQLSLGGYPLAVRTYTWDKSTYGNGKKYIATAYIVSST

SEQ ID NO: 67998 - protein, 151 aa, Artificial Sequence
  derived and/or modified sequence
MKTAVMKELYSFLHHQNRYGSEQEFVDDLKNMWFGLYSRGNEEGDSSGFEHVFSGEVKKGKVTGFHNWIRFYLEEKEGLVDYYSHIYDGPVPVKPGRISLSCPDIYLGQVHLWEWQEVHRHSLHSVFHLIELRARKGHEGSCETEVLSSLD

SEQ ID NO: 67999 - DNA, 1233 bp, Artificial Sequence
  derived and/or modified sequence
atgcgcgcttgtatttcgctcgtgctagctgtattgtgtggcttagcctgggctggtaaaatcgagagctgcgccagcaggtgtaacgaaaagtttaatagggacgctgcatgtcagtgcgatcggcgttgtttgtggcatgggaattgctgtgaggattatgagcacttgtgtacagaggaccataaagagagcgagcccttgcctcagctggaggaagaaacagaagaggcgctggctagcaacctgtatagtgcccctacaagctgtcaaggtagatgctatgaagcttttgacaaacaccatcagtgtcattgcaatgccagatgccaggagtttggtaactgctgtaaggattttgagtccctctgtagcgaccatgaagtatcacatagctctgatgccattaccaaagaagagatccagagcatttcagagaaaatctacagagccgatacaaataaagcccaaaaggaagatattgtgttgaacagtcaaaactgcatctccccatccgagactcggaaccaagtggataggtgccctaaacccctattcacttacgtcaatgaaaagcttttctccaaaccaacatacgctgcatttatcaatctgttgaacaattaccagcgtgcaacggggcatggggaacatttctccgcccaggagctggccgaacaggacgcttttctgagagagattatgaagaccgccgtgatgaaggaactctatagctttttacatcatcagaatcgttacgggtcggagcaagagttcgtggacgatctcaaaaatatgtggtttgggttgtacagccgtggcaatgaagagggggatagcagcggcttcgagcatgtgttcagtggtgaggtgaagaagggaaaggtgactgggtttcacaattggatcaggttctatcttgaggagaaggagggtctagtggactactactcccacatctacgatggaccttgggatagttatcctgatgtcctggccatgcagtttaactgggatggctattacaaggaggtaggatctgctttcatagggagttcacccgagttcgagtttgccttgtacagcctctgtttcatcgccagaccaggcaaagtgtgtcaattatccctggggggttatccactcgcggttcgtacatatacctgggacaaaagtacctatggcaatggaaagaagtacatcgcaaccgcgtacatcgttagtagcacctag

SEQ ID NO: 68000 - DNA, 2413 bp, Artificial Sequence
  derived and/or modified sequence
acaagtcctggtgtctttaaaaggatcagcttgaggaataaggctcgtctgagagctgtgacattcatctgactctagtgaaagtccaacagccactccctttttggcctccaactgggcaccatgagggcctgcatctccctggtattggccgtgctgtgtggcctggcctgggctggaaaaatagaatcctgtgcatctcgatgtaatgagaaatttaaccgggacgctgcctgccagtgtgaccgccggtgtctctggcatgggaactgctgtgaagactatgaacatctgtgtactgaggaccacaaagagtcagagccattgccacagctggaggaagagacagaagaggccctcgccagcaacttgtactcggcacccacctcctgccagggccgctgctacgaagcctttgacaagcaccaccaatgtcactgcaatgcccgctgccaagagtttgggaactgctgcaaggattttgagagcctgtgtagtgaccacgaggtctcccacagcagtgatgccataacaaaagaggagattcagagcatctctgagaagatctacagggcagacaccaacaaagcccagaaggaagacatcgttctcaatagccaaaactgcatctccccgtcagagaccagaaaccaagtggatcgctgcccaaagccactcttcacttatgtcaatgagaagctgttctccaagcccacctatgcagccttcatcaacctcctcaacaactaccagcgggcaacaggccatggggagcacttcagtgcccaggagctggccgagcaggacgccttcctcagagagatcatgaagacagcagtcatgaaggagctctacagcttcctccatcaccagaatcgctatggctcagagcaagagtttgtcgatgacttgaagaacatgtggtttgggctctattcaagaggcaatgaagagggggactcgagtggctttgaacatgtcttctcaggtgaggtaaaaaaaggcaaggttactggcttccataactggatccgcttctacctggaggagaaggagggtctggttgactattacagtcacatctacgatgggccttgggattcttaccccgatgtgctggcaatgcagttcaactgggacggctactataaggaagtgggctctgctttcatcggcagcagccctgagtttgagtttgcactctactccctgtgcttcatcgccaggccaggcaaagtgtgccagttaagcctgggaggatatcccttagctgtccggacatatacctgggacaagtccacctatgggaatggcaagaagtacatcgccacagcctacatagtgtcttccacctaatagaacttcgagccagaaaggggcatgagggctcttgcgagactgaagtgctatcttctctggactagagagaagagggagaggactggaagggatcaccaaatctcaaagcaatgagaagcattcctaaatcccaaagtgcccacatgggaaagagataaaatgtacaaattagaaaaatgtggataaacagtcaaacctttatcctctagaattttggcaatgttgactaagaaacagagtccaagcagagaaggtaggaaccctccatagctctctgccctgatgtgtgggggaactaggaagaagtcctttgacctcaccaggcctcatgcttccctttaatgtaaagggaaggggtttgcccactttcctctttttggggttggtgagagggcaaaccctgatatttttactgtgaaggtgttttcagttgttcttaggaagaacagctgatagaaattcaagattactataatggctgttattatacacagctctgtaaactaccactcagccctgtgttggggtcctcaaagaagtaaggccacagtaatcaagcaagggcctttggttttttccagagttagatcctctcagaacagagtctgggagaactccaatgctgaatggagaagggtaataggttggtgcagtgaatgggctgggggtggggtggccttctccaggcctgagtgtttttgtgtccagctcagtatctgcaacaagaagtttcccacttgtggatgtttagtgcagccacagacttgtattttgatccccaatttttttttgaaagagttctcctcataggaggatgattcagcatcagaagaagaaggaacccatagcttggtgtcattaacataattattttaagccttatccagcagccataatttgaataactctacgagaccagagagactgtagttccctattttaacctcaattatgcatttgtcccccaaccccactgagaactaaatgctgtaccacagagccgggtgtgaactatggtttagaaggttcaagtttccaattaaagtcattgaag

SEQ ID NO: 68001 - DNA, 1233 bp, Artificial Sequence
  derived and/or modified sequence
atgcgcgcatgtattagcctggttctagcggtgctctgtggcttggcatgggccggcaagatcgagtcctgcgcctctaggtgtaacgagaaattcaaccgcgacgctgcctgtcaatgcgatcgacggtgtctgtggcacggcaactgctgcgaggattacgaacatttatgtacagaagatcataaagaatctgagccactcccccagcttgaggaagagacagaggaagccctagccagcaacctgtattcagcccctacgtcttgccagggccgatgctatgaggcctttgacaaacatcaccaatgtcactgcaatgcgcgttgtcaggaattcggcaattgttgtaaggatttcgagagtctttgtagcgaccacgaagtatcacactcctctgacgcaattaccaaggaggagatacagtctatctctgaaaaaatctaccgcgccgacaccaacaaggcccaaaaggaagatattgtgctgaattctcagaactgtatcagcccctccgagactagaaaccaggtggaccggtgtccaaaaccactcttcacctacgtcaatgaaaagctattctctaaacccacctacgcagcgtttatcaaccttctcaacaattatcagagggctactgggcacggcgagcacttctccgcacaagagctggccgaacaagacgccttcctgcgcgagattatgaaaaccgccgtgatgaaggaactttatagttttctgcaccaccagaataggtatgggtctgagcaggaatttgtcgacgatctgaaaaatatgtggtttggcctttattccaggggaaatgaagagggggactcctctggcttcgaacatgtgtttagtggcgaagtaaagaaagggaaagtgaccggatttcacaattggatccgattttacttagaggaaaaggagggtctggtggactattattcacacatttatgacgggccttgggatagctaccctgacgtcctggctatgcagtttaactgggatgggtattataaggaggtagggagtgctttcatcgggtcctcacctgaatttgagttcgcactgtactcattatgtttcattgcacgcccagggaaggtgtgtcaattaagtctaggcggataccccctcgcggtccgcacttatacatgggataaatcaacctacggcaatggaaaaaagtacatcgccaccgcctatatcgtgagttctacttag

SEQ ID NO: 68002 - DNA, 1233 bp, Artificial Sequence
  derived and/or modified sequence
atgagagcctgcattagtctggttcttgccgtgttgtgtggcctggcatgggcagggaaaatcgagtcatgtgcctctagatgtaatgagaagttcaaccgggacgccgcctgtcaatgtgatcgcagatgtttatggcacgggaattgttgcgaggattatgaacatttatgcactgaggaccataaagagagtgagcctctgccacaacttgaggaggagacagaagaagcgttagcctccaatctttacagcgccccgacgtcgtgccaaggtcggtgctacgaggcttttgacaaacatcaccagtgtcactgcaacgccaggtgtcaagaattcggcaactgctgtaaagactttgaatccctgtgtagtgaccacgaagtatctcacagctccgacgctataaccaaagaagagatccagagtatatcagagaagatctatcgagcagacacgaacaaggcccagaaggaggacatcgtgctaaactcccaaaattgcatctcgccatccgaaactagaaatcaagtcgatcgctgtcctaaaccactctttacctatgtgaacgaaaaactgttttccaagcccacctatgcggcctttattaacctccttaacaattatcagagggctacaggtcacggagaacatttcagtgcgcaggaactggcagagcaagacgcctttcttagggaaataatgaaaacagctgtgatgaaagagctctacagttttctgcatcaccagaacaggtatggatcggagcaagagtttgtggatgacttaaaaaatatgtggtttggtttatactctagaggcaacgaggagggagactcatccggttttgagcatgtcttttcaggcgaggtaaagaagggtaaggtgaccggatttcataattggataaggttttacttggaagaaaaggagggactggtcgactattactcccacatatacgacggcccctgggattcataccctgacgtgctggctatgcagtttaattgggatggttactacaaggaagttggctccgcattcataggttctagccctgagttcgagttcgcattatactcactttgctttatcgcaagaccggggaaagtgtgtcagttatcactgggcggctaccccctggccgtgagaacgtacacctgggacaagagcacctatgggaatggaaaaaaatacattgccaccgcttacatcgtcagttcaacatag

SEQ ID NO: 68003 - DNA, 1233 bp, Artificial Sequence
  derived and/or modified sequence
atgagagcctgcatcagcctggtgctggccgtgctgtgcggcctggcctgggccggcaagatcgagagctgcgccagcagatgcaacgagaagttcaacagagacgccgcctgccagtgcgacagaagatgcctgtggcacggcaactgctgcgaggactacgagcacctgtgcaccgaggaccacaaggagagcgagcccctgccccagctggaggaggagaccgaggaggccctggccagcaacctgtacagcgcccccaccagctgccagggcagatgctacgaggccttcgacaagcaccaccagtgccactgcaacgccagatgccaggagttcggcaactgctgcaaggacttcgagagcctgtgcagcgaccacgaggtgagccacagcagcgacgccatcaccaaggaggagatccagagcatcagcgagaagatctacagagccgacaccaacaaggcccagaaggaggacatcgtgctgaacagccagaactgcatcagccccagcgagaccagaaaccaggtggacagatgccccaagcccctgttcacctacgtgaacgagaagctgttcagcaagcccacctacgccgccttcatcaacctgctgaacaactaccagagagccaccggccacggcgagcacttcagcgcccaggagctggccgagcaggacgccttcctgagagagatcatgaagaccgccgtgatgaaggagctgtacagcttcctgcaccaccagaacagatacggcagcgagcaggagttcgtggacgacctgaagaacatgtggttcggcctgtacagcagaggcaacgaggagggcgacagcagcggcttcgagcacgtgttcagcggcgaggtgaagaagggcaaggtgaccggcttccacaactggatcagattctacctggaggagaaggagggcctggtggactactacagccacatctacgacggcccctgggacagctaccccgacgtgctggccatgcagttcaactgggacggctactacaaggaggtgggcagcgccttcatcggcagcagccccgagttcgagttcgccctgtacagcctgtgcttcatcgccagacccggcaaggtgtgccagctgagcctgggcggctaccccctggccgtgagaacctacacctgggacaagagcacctacggcaacggcaagaagtacatcgccaccgcctacatcgtgagcagcacctag

SEQ ID NO: 68004 - DNA, 1233 bp, Artificial Sequence
  derived and/or modified sequence
atgcgggcgtgtatttcactcgtgctcgctgtgctctgcggtctggcttgggcgggtaagatcgagtcatgcgcaagcaggtgtaacgaaaagtttaaccgggacgcggcctgccagtgcgataggagatgtctctggcatggaaactgttgcgaggattacgaacacctgtgtactgaggatcacaaggagtcagaacctctgcctcagctcgaggaggaaaccgaggaggccctggctagtaacctgtatagcgcacccaccagctgtcaagggcgctgctatgaagcttttgataaacaccaccagtgtcactgtaacgctcggtgccaagagtttgggaattgctgcaaagatttcgagtccctctgttcagaccacgaggtctcccactcctccgacgcgatcactaaggaggagatacagtccatctctgaaaagatttatagagccgatacgaataaggcacagaaagaagatattgtgctcaacagccagaattgtatctcccccagcgaaacgcgtaaccaggtcgaccggtgcccaaaacctctcttcacctatgttaatgaaaagctgttctccaaaccaacatatgctgcctttataaacttgctgaacaactatcagagagcaaccggccacggcgagcactttagtgcacaggaattggcggagcaggacgcttttcttcgggaaattatgaagaccgctgttatgaaagaactctatagctttctgcaccaccagaataggtacgggagtgagcaggagttcgtggatgacctgaaaaacatgtggttcggcctgtattctagaggcaacgaggagggggactctagtggatttgaacatgtgttcagcggggaggtgaagaaaggcaaggttactggtttccacaactggatccgcttctatctagaggagaaggaaggtctggttgactactactcgcatatttacgacggcccctgggacagttacccagatgtgctggctatgcagtttaattgggatgggtattacaaggaggtcggcagcgctttcatcggtagctctccagagtttgaatttgcactatactcgttgtgcttcatcgccagaccgggcaaggtttgtcaactttctctcggcggatacccattggctgtgcggacctacacctgggataagagcacttacggaaacgggaagaagtacattgcgactgcatacattgtgagttccacctag

SEQ ID NO: 68005 - DNA, 1233 bp, Artificial Sequence
  derived and/or modified sequence
atgagggcctgcatcagcctggtgctggccgtgctgtgtggcctggcctgggccggcaagattgagagctgtgccagccgctgcaatgagaagttcaacagagatgctgcctgccagtgtgaccggcgctgcctgtggcacggcaactgctgtgaggactatgagcacctgtgcacagaggaccacaaggagagcgagcccctgccccagctggaggaggagacagaggaggccctggccagcaacctgtacagcgcccccaccagctgccagggccgctgctatgaggcctttgacaagcaccaccagtgccactgcaatgcccgctgccaggagtttggaaactgctgcaaggactttgagagcctgtgcagcgaccacgaggtgagccacagcagtgatgccatcaccaaggaggagatccagagcatcagcgagaagatctacagagctgacaccaacaaggcccagaaggaggacatcgtgctgaacagccagaactgcatcagccccagcgagaccaggaaccaggtggaccgctgccccaagcccctcttcacctacgtgaatgagaagctgttcagcaagcccacctacgccgccttcatcaacctgctgaacaactaccagagggccactggacatggagagcacttcagcgcccaggagctggccgagcaggatgccttcctgcgggagatcatgaagacagctgtgatgaaggagctgtacagcttcctgcaccaccagaacagatatggcagcgagcaggagtttgtggatgacctgaagaacatgtggtttggcctgtacagcagaggaaatgaggagggggacagcagcggctttgaacatgtgttcagcggggaggtgaagaagggcaaggtgacaggcttccacaactggatccgcttctacctggaggagaaggagggcctggtggactactacagccacatctatgatggcccctgggacagctacccagatgtgctggccatgcagttcaactgggatggctactacaaggaggtgggcagcgccttcatcggcagcagccctgagtttgaatttgccctgtacagcctgtgcttcatcgcccggcctgggaaggtgtgccagctgagcctgggcggctaccccctggccgtgaggacctacacctgggacaagagcacctatggaaatggcaagaagtacatcgccacagcctacatcgtgagcagcacctag

SEQ ID NO: 68006 - DNA, 1233 bp, Artificial Sequence
  derived and/or modified sequence
atgcgggcctgcatcagcctggtgctggccgtgctgtgcggcctggcttgggcaggcaaaatcgaatcatgcgcatctaggtgtaacgagaagttcaaccgggacgccgcatgccagtgcgatcgccgctgcctatggcatggcaattgttgtgaggactatgagcacctttgtaccgaggaccacaaagaaagtgaacctctgccccaactggaagaggagacggaagaagccttagcaagcaacctgtacagcgcacctacttcatgccaggggagatgttatgaagccttcgataagcaccatcaatgccattgcaacgccagatgccaagagttcggcaattgctgtaaggatttcgagagcctgtgctcagaccacgaagtctctcactcatcagacgccatcaccaaagaagagattcagagcatctctgaaaagatttatcgagctgacaccaacaaagcccagaaagaggacatcgttctgaatagccagaattgtatcagccccagcgagactcgtaatcaagtcgaccgctgtcccaagcccttgtttacttatgttaacgagaagctgttctccaagcccacatatgccgccttcatcaatctcctgaacaactaccagcgtgcaactggccatggggagcacttcagcgctcaggagctcgcagagcaggacgcttttttacgggagattatgaaaacagctgtgatgaaagagctgtatagctttttgcatcaccagaatagatatggaagcgagcaggaatttgtggatgatctgaagaacatgtggttcggattgtattctaggggaaacgaagagggggatagcagtgggttcgagcacgtcttttctggcgaagtaaaaaagggtaaggttacaggcttccataattggatcaggttctacctcgaagaaaaggagggcctcgtggattactattcccatatttacgatggcccctgggatagctatcccgatgttctcgctatgcagtttaattgggacggttattataaagaagtaggcagtgcatttattggctctagtccggagtttgagttcgccttgtatagcctgtgtttcattgctagacccggaaaagtgtgtcagctctcccttggaggctaccccctcgccgtgaggacgtacacttgggataagtcgacctatggcaacgggaaaaagtacatcgcgaccgcatacatcgtgtcaagcacctag

SEQ ID NO: 68007 - RNA, 1233 nt, Artificial Sequence
  derived and/or modified sequence
augcgcgcauguauuagccugguucuagcggugcucuguggcuuggcaugggccggcaagaucgaguccugcgccucuagguguaacgagaaauucaaccgcgacgcugccugucaaugcgaucgacggugucuguggcacggcaacugcugcgaggauuacgaacauuuauguacagaagaucauaaagaaucugagccacucccccagcuugaggaagagacagaggaagcccuagccagcaaccuguauucagccccuacgucuugccagggccgaugcuaugaggccuuugacaaacaucaccaaugucacugcaaugcgcguugucaggaauucggcaauuguuguaaggauuucgagagucuuuguagcgaccacgaaguaucacacuccucugacgcaauuaccaaggaggagauacagucuaucucugaaaaaaucuaccgcgccgacaccaacaaggcccaaaaggaagauauugugcugaauucucagaacuguaucagccccuccgagacuagaaaccagguggaccgguguccaaaaccacucuucaccuacgucaaugaaaagcuauucucuaaacccaccuacgcagcguuuaucaaccuucucaacaauuaucagagggcuacugggcacggcgagcacuucuccgcacaagagcuggccgaacaagacgccuuccugcgcgagauuaugaaaaccgccgugaugaaggaacuuuauaguuuucugcaccaccagaauagguaugggucugagcaggaauuugucgacgaucugaaaaauaugugguuuggccuuuauuccaggggaaaugaagagggggacuccucuggcuucgaacauguguuuaguggcgaaguaaagaaagggaaagugaccggauuucacaauuggauccgauuuuacuuagaggaaaaggagggucugguggacuauuauucacacauuuaugacgggccuugggauagcuacccugacguccuggcuaugcaguuuaacugggauggguauuauaaggagguagggagugcuuucaucggguccucaccugaauuugaguucgcacuguacucauuauguuucauugcacgcccagggaaggugugucaauuaagucuaggcggauacccccucgcgguccgcacuuauacaugggauaaaucaaccuacggcaauggaaaaaaguacaucgccaccgccuauaucgugaguucuacuuag

SEQ ID NO: 68008 - RNA, 1233 nt, Artificial Sequence
  derived and/or modified sequence
augagagccugcauuagucugguucuugccguguuguguggccuggcaugggcagggaaaaucgagucaugugccucuagauguaaugagaaguucaaccgggacgccgccugucaaugugaucgcagauguuuauggcacgggaauuguugcgaggauuaugaacauuuaugcacugaggaccauaaagagagugagccucugccacaacuugaggaggagacagaagaagcguuagccuccaaucuuuacagcgccccgacgucgugccaaggucggugcuacgaggcuuuugacaaacaucaccagugucacugcaacgccaggugucaagaauucggcaacugcuguaaagacuuugaaucccuguguagugaccacgaaguaucucacagcuccgacgcuauaaccaaagaagagauccagaguauaucagagaagaucuaucgagcagacacgaacaaggcccagaaggaggacaucgugcuaaacucccaaaauugcaucucgccauccgaaacuagaaaucaagucgaucgcuguccuaaaccacucuuuaccuaugugaacgaaaaacuguuuuccaagcccaccuaugcggccuuuauuaaccuccuuaacaauuaucagagggcuacaggucacggagaacauuucagugcgcaggaacuggcagagcaagacgccuuucuuagggaaauaaugaaaacagcugugaugaaagagcucuacaguuuucugcaucaccagaacagguauggaucggagcaagaguuuguggaugacuuaaaaaauaugugguuugguuuauacucuagaggcaacgaggagggagacucauccgguuuugagcaugucuuuucaggcgagguaaagaaggguaaggugaccggauuucauaauuggauaagguuuuacuuggaagaaaaggagggacuggucgacuauuacucccacauauacgacggccccugggauucauacccugacgugcuggcuaugcaguuuaauugggaugguuacuacaaggaaguuggcuccgcauucauagguucuagcccugaguucgaguucgcauuauacucacuuugcuuuaucgcaagaccggggaaagugugucaguuaucacugggcggcuacccccuggccgugagaacguacaccugggacaagagcaccuaugggaauggaaaaaaauacauugccaccgcuuacaucgucaguucaacauag

SEQ ID NO: 68009 - protein, 347 aa, Artificial Sequence
  derived and/or modified sequence
MRACISLVLAVLCGLAWADLYSAPTSCQGRCYEAFDKHHQCHCNARCQEFGNCCKDFESLCSDHEVSHSSDAITKEEIQSISEKIYRADTNKAQKEDIVLNSQNCISPSETRNQVDRCPKPLFTYVNEKLFSKPTYAAFINLLNNYQRATGHGEHFSAQELAEQDAFLREIMKTAVMKELYSFLHHQNRYGSEQEFVDDLKNMWFGLYSRGNEEGDSSGFEHVFSGEVKKGKVTGFHNWIRFYLEEKEGLVDYYSHIYDGPWDSYPDVLAMQFNWDGYYKEVGSAFIGSSPEFEFALYSLCFIARPGKVCQLSLGGYPLAVRTYTWDKSTYGNGKKYIATAYIVSST

SEQ ID NO: 68010 - DNA, 456 bp, Artificial Sequence
  derived and/or modified sequence
atgaagaccgccgtgatgaaggagctgtacagcttcctgcaccaccaaaatagatatggcagcgagcaagaatttgtggatgatctaaaaaatatgtggttcggcttatattctagaggcaacgaggaaggtgatagctcaggatttgagcatgtcttttccggtgaagtgaaaaaaggtaaagtgacagggttccacaattggatcagattttatcttgaagaaaaagaagggctggttgattattattcacacatctacgacgggcccgtccctgtgaagcccggcagaatatcactaagctgtcccgacatctatttaggtcaggtgcatctttgggaatggcaggaagtccaccggcactccctgcactccgtgttccacctgatcgaattgagggcccgcaagggacacgagggatcgtgtgagacggaagtgctgtcgagccttgactag

SEQ ID NO: 68011 - DNA, 1044 bp, Artificial Sequence
  derived and/or modified sequence
atgcgggcctgcatcagcctggtgctggccgtgctgtgcggcctggcttgggccgatctgtactctgctcctacttcctgccaaggaaggtgttacgaagcattcgacaaacaccatcaatgtcattgcaatgctagatgccaggagttcggaaactgctgtaaggacttcgagtctttatgctccgaccacgaggtgagccactcctcagatgcgatcactaaggaggagattcaatccatctcagagaaaatataccgtgctgacacaaacaaggcgcagaaagaggatatcgttctgaattcgcaaaactgtatttccccttccgaaacacgcaatcaggtggacagatgtcccaaacctcttttcacctacgtgaacgaaaagctgtttagtaagcccacctacgcagcattcatcaatctgttaaacaactaccagcgagcaaccggccacggagagcatttctctgcacaggaattggcggagcaggacgcattcctgagggaaattatgaagactgctgtgatgaaagagctatacagctttctgcaccaccagaaccgctacggaagcgagcaggagttcgtcgatgatctcaaaaacatgtggtttggcctgtatagcagggggaacgaggaaggcgacagttctgggtttgagcatgttttcagcggggaagttaaaaagggaaaagttacaggcttccacaactggattcggttctacttggaagaaaaggaagggctcgtggactattactctcatatatacgacggcccctgggactcctacccagatgtactagcaatgcagttcaattgggatggctactataaggaagttggatcagcgttcataggaagttcccctgagttcgagttcgccttatacagcctttgctttattgctcgtcctgggaaggtgtgtcaactttcgctcggagggtacccgctcgcagtgcggacttatacctgggacaagagcacttatggaaacgggaagaagtacatagcaaccgcctatatcgtgtcctccacatag

SEQ ID NO: 68012 - DNA, 456 bp, Artificial Sequence
  derived and/or modified sequence
atgaagactgccgtgatgaaggagctgtattccttcctgcaccaccagaataggtatggatccgaacaggaatttgtggacgacctgaagaacatgtggtttggtttgtactcccgtgggaacgaggagggagacagctcagggtttgaacacgtattcagtggcgaagtcaaaaagggcaaggtgacaggctttcacaactggatcagattctatctggaggaaaaggaggggttagtggattactacagtcatatttatgatggacccgtaccagtgaaacctgggagaatctcactaagctgccctgatatttatctaggtcaggtgcacctttgggagtggcaagaagtccaccgacacagtctgcacagcgtctttcacctgatcgagctgcgcgcacggaaaggacacgaggggagctgcgaaaccgaagtgctgtcatccctcgactag

SEQ ID NO: 68013 - DNA, 1044 bp, Artificial Sequence
  derived and/or modified sequence
atgcgggcttgcatttccctcgtcctcgcagttctctgtggcttggcctgggcagatctgtatagcgccccaacatcatgccaggggaggtgttatgaggccttcgataagcaccatcaatgccattgcaacgctcgctgccaggagtttgggaattgctgcaaagactttgagtccttgtgcagtgaccacgaagtctcccacagcagcgatgctatcacaaaagaagaaatacagtctatttccgaaaaaatttatcgcgcagacacaaacaaagcccagaaagaagatatagtactgaactcccagaactgcattagcccatctgaaactagaaatcaagtggacagatgccccaagccactgttcacttacgtgaatgagaaactgttctctaagcctacttatgctgcttttattaacctgctaaataattaccagcgtgccactggacacggagagcacttttctgctcaagaactcgccgaacaagacgcttttctacgggaaataatgaagactgcagtgatgaaagagctttactcttttcttcatcatcaaaatcggtacggaagcgaacaggaattcgtagacgacttaaagaacatgtggtttggcctgtactccagagggaacgaggaaggggacagtagcggttttgagcacgtgttcagcggggaagtgaagaaaggaaaggttaccggtttccataactggattagattctatctcgaggaaaaggagggcttagtggactattactcccatatttacgatgggccttgggactcctatccggacgtgttggcgatgcaattcaattgggatgggtattacaaggaagtgggttcagctttcattggatcatcacctgaatttgagttcgcattgtatagcctatgctttatcgctcgccctgggaaggtgtgccagctaagcttgggagggtatcctcttgccgttcgtacttacacctgggacaagagtacttatggaaacggcaagaaatatatcgcgacagcatatattgtctcttctacctag

SEQ ID NO: 68014 - DNA, 456 bp, Artificial Sequence
  derived and/or modified sequence
atgaagacagccgtaatgaaagaactctatagctttctgcaccatcaaaaccggtatggtagcgagcaggagtttgtggatgacctcaagaatatgtggtttggactgtacagccggggaaacgaagagggagactcctcgggctttgaacacgtgttctccggagaagttaaaaagggcaaagtgaccgggttccataactggattagattctacctcgaggagaaagaaggactggtcgactattactcccatatatatgatggccctgtacccgttaagcctggaagaatatcactttcctgccctgacatctatctgggccaagtccacctctgggaatggcaggaagtgcatcgccactcactgcacagcgtatttcacctcattgaactgagggcacggaaaggtcacgaaggtagttgcgaaacggaggttctgtcaagtttggattag

SEQ ID NO: 68015 - DNA, 1044 bp, Artificial Sequence
  derived and/or modified sequence
atgcgcgcctgtatttctctcgttttagccgtgctgtgtggcctggcatgggccgatctgtattcagctcccacatcctgtcaaggtagatgttatgaggctttcgacaagcatcaccaatgtcattgtaacgcccgctgtcaggaatttggaaattgctgtaaggattttgaatctctttgctcggatcatgaggtttcacactcatccgacgcaattacaaaagaggaaatccaatccatcagcgaaaagatctaccgcgccgataccaataaggctcagaaggaagacatcgtgttaaatagtcagaattgcatatctccaagtgaaactagaaatcaggtggaccggtgccccaaacccctgttcacgtacgtgaatgaaaaactcttctcgaaaccaacttacgcagcattcattaacctgctcaacaattatcaaagagctaccgggcacggagaacactttagtgctcaggaactggctgagcaggacgcattcctgcgcgagatcatgaagaccgcagttatgaaagagctgtatagctttttgcaccatcaaaatagatacggaagcgaacaggagttcgtggacgacctgaaaaatatgtggttcggcttatattcacgagggaatgaggaaggtgattcttccggcttcgagcatgttttctccggcgaagtgaagaagggaaaagtcactggatttcataattggatccggttctacctggaagagaaagaagggctggtggactactactcacacatttatgacggcccttgggactcgtacccggacgtgctcgcgatgcagttcaactgggacggatattacaaagaagttggaagtgccttcatcggatcctcacccgagttcgaatttgcactctattccctgtgctttatcgccagacccggtaaggtgtgccaactgtctcttggtggctatcctctcgcagtaaggacttacacttgggacaaaagcacttatggtaatgggaaaaagtacatcgcgaccgcctatatagtttcatcaacttag

SEQ ID NO: 68016 - DNA, 456 bp, Artificial Sequence
  derived and/or modified sequence
atgaagacagcagtgatgaaggagttatattcatttctccaccaccagaacagatatggcagcgaacaggaatttgtggacgatctcaagaacatgtggtttggactgtacagccgcggaaacgaagaaggcgactcatcaggatttgaacatgtttttagcggcgaggtgaagaagggaaaagttactggatttcacaattggatccggttctacttggaggaaaaagaagggctggtggactactactcacacatttacgacggcccagtccccgtcaaaccaggaaggatcagcctcagttgtccagacatttacctcggacaggttcatctctgggaatggcaagaggtccaccggcatagcctacattccgttttccaccttatagaattgcgcgccagaaaagggcacgagggctcctgtgaaacagaagtgctttcttcgcttgactag

SEQ ID NO: 68017 - DNA, 1044 bp, Artificial Sequence
  derived and/or modified sequence
atgcgtgcatgcatatccctcgttctagctgtgctgtgcggcctggcttgggcggacctctactcggccccaacctcatgtcaggggaggtgctatgaagcatttgacaaacaccatcagtgccattgtaatgctcgatgtcaggaatttggcaattgttgtaaggacttcgagtctttgtgtagcgaccacgaggtaagtcattcaagtgacgccatcaccaaagaagagatccagagcatcagcgagaaaatttacagagcagatacaaataaggcccagaaggaagacattgtgttgaactcccagaactgcatcagcccttcagagacacgaaaccaggttgaccggtgtcccaaaccactgtttacctatgtaaatgagaaactgtttagtaagccaacatacgccgcttttattaaccttctaaataattatcaaagagcaacaggccatggcgagcatttttcagctcaggaactcgccgagcaggatgccttcctaagagaaattatgaagactgctgtcatgaaggaactgtattcttttttacaccaccagaatagatacggcagcgagcaggagtttgtcgacgatcttaagaacatgtggtttggcctgtattctcgcggcaatgaggaaggcgattcgtcaggattcgaacacgtgtttagcggggaggttaagaagggaaaggtgaccgggtttcataactggatacgattctacttagaggagaaagagggactggttgactactattcacatatctacgacggaccatgggacagctatccagatgttctagctatgcagttcaactgggacggttattataaggaggtaggttcggcttttattgggtcttccccagagtttgaatttgcgctatactctctatgctttatcgcccggcccggtaaggtttgccagctctccctcggtggataccccctcgctgtcaggacatacacctgggacaaatctacatatggcaatggaaaaaagtatatcgcgacagcttacatcgtctcctcaacctag

SEQ ID NO: 68018 - DNA, 1194 bp, Artificial Sequence
  derived and/or modified sequence
actcggcacccacctcctgccagggccgctgctacgaagcctttgacaagcaccaccaatgtcactgcaatgcccgctgccaagagtttgggaactgctgcaaggattttgagagcctgtgtagtgaccacgaggtctcccacagcagtgatgccataacaaaagaggagattcagagcatctctgagaagatctacagggcagacaccaacaaagcccagaaggaagacatcgttctcaatagccaaaactgcatctccccgtcagagaccagaaaccaagtggatcgctgcccaaagccactcttcacttatgtcaatgagaagctgttctccaagcccacctatgcagccttcatcaacctcctcaacaactaccagcgggcaacaggccatggggagcacttcagtgcccaggagctggccgagcaggacgccttcctcagagagatcatgaagacagcagtcatgaaggagctctacagcttcctccatcaccagaatcgctatggctcagagcaagagtttgtcgatgacttgaagaacatgtggtttgggctctattcaagaggcaatgaagagggggactcgagtggctttgaacatgtcttctcaggtgaggtaaaaaaaggcaaggttactggcttccataactggatccgcttctacctggaggagaaggagggtctggttgactattacagtcacatctacgatgggcctgtgccagttaagcctgggaggatatcccttagctgtccggacatatacctgggacaagtccacctatgggaatggcaagaagtacatcgccacagcctacatagtgtcttccacctaatagaacttcgagccagaaaggggcatgagggctcttgcgagactgaagtgctatcttctctggactagagagaagagggagaggactggaagggatcaccaaatctcaaagcaatgagaagcattcctaaatcccaaagtgcccacatgggaaagagataaaatgtacaaattagaaaaatgtggataaacagtcaaacctttatcctctagaattttggcaatgttgactaagaaacagagtccaagcagagaaggtaggaaccctccatagctctctgccctgatgtgtgggggaactaggaagaagtcctttgacctcaccaggcctcatgcttccctttaatgtaaaggg

SEQ ID NO: 68019 - DNA, 1513 bp, Artificial Sequence
  derived and/or modified sequence
aagtcctggtgtctttaaaaggatcagcttgaggaataaggctcgtctgagagctgtgacattcatctgactctagtgaaagtccaacagccactccctttttggcctccaactgggcaccatgagggcctgcatctccctggtattggccgtgctgtgtggcctggcctgggctgacttgtactcggcacccacctcctgccagggccgctgctacgaagcctttgacaagcaccaccaatgtcactgcaatgcccgctgccaagagtttgggaactgctgcaaggattttgagagcctgtgtagtgaccacgaggtctcccacagcagtgatgccataacaaaagaggagattcagagcatctctgagaagatctacagggcagacaccaacaaagcccagaaggaagacatcgttctcaatagccaaaactgcatctccccgtcagagaccagaaaccaagtggatcgctgcccaaagccactcttcacttatgtcaatgagaagctgttctccaagcccacctatgcagccttcatcaacctcctcaacaactaccagcgggcaacaggccatggggagcacttcagtgcccaggagctggccgagcaggacgccttcctcagagagatcatgaagacagcagtcatgaaggagctctacagcttcctccatcaccagaatcgctatggctcagagcaagagtttgtcgatgacttgaagaacatgtggtttgggctctattcaagaggcaatgaagagggggactcgagtggctttgaacatgtcttctcaggtgaggtaaaaaaaggcaaggttactggcttccataactggatccgcttctacctggaggagaaggagggtctggttgactattacagtcacatctacgatgggccttgggattcttaccccgatgtgctggcaatgcagttcaactgggacggctactataaggaagtgggctctgctttcatcggcagcagccctgagtttgagtttgcactctactccctgtgcttcatcgccaggccaggcaaagtgtgccagttaagcctgggaggatatcccttagctgtccggacatatacctgggacaagtccacctatgggaatggcaagaagtacatcgccacagcctacatagtgtcttccacctaatagaacttcgagccagaaaggggcatgagggctcttgcgagactgaagtgctatcttctctggactagagagaagagggagaggactggaagggatcaccaaatctcaaagcaatgagaagcattcctaaatcccaaagtgcccacatgggaaagagataaaatgtacaaattagaaaaatgtggataaacagtcaaacctttatcctctagaattttggcaatgttgactaagaaacagagtccaagcagagaaggtaggaaccctccatagctctctgccctgatgtgtgggggaactaggaagaagtcctttgacctcaccaggcctcatgcttccctttaatgt

SEQ ID NO: 68020 - DNA, 456 bp, Artificial Sequence
  derived and/or modified sequence
atgaagaccgccgtgatgaaggagctgtacagcttcctgcaccaccagaacagatacggcagcgagcaggagttcgtggacgacctgaagaacatgtggttcggcctgtacagcagaggcaacgaggagggcgacagcagcggcttcgagcacgtgttcagcggcgaggtgaagaagggcaaggtgaccggcttccacaactggatcagattctacctggaggagaaggagggcctggtggactactacagccacatctacgacggccccgtgcccgtgaagcccggcagaatcagcctgagctgccccgacatctacctgggccaggtgcacctgtgggagtggcaggaggtgcacagacacagcctgcacagcgtgttccacctgatcgagctgagagccagaaagggccacgagggcagctgcgagaccgaggtgctgagcagcctggactag

SEQ ID NO: 68021 - DNA, 1044 bp, Artificial Sequence
  derived and/or modified sequence
atgagagcctgcatcagcctggtgctggccgtgctgtgcggcctggcctgggccgacctgtacagcgcccccaccagctgccagggcagatgctacgaggccttcgacaagcaccaccagtgccactgcaacgccagatgccaggagttcggcaactgctgcaaggacttcgagagcctgtgcagcgaccacgaggtgagccacagcagcgacgccatcaccaaggaggagatccagagcatcagcgagaagatctacagagccgacaccaacaaggcccagaaggaggacatcgtgctgaacagccagaactgcatcagccccagcgagaccagaaaccaggtggacagatgccccaagcccctgttcacctacgtgaacgagaagctgttcagcaagcccacctacgccgccttcatcaacctgctgaacaactaccagagagccaccggccacggcgagcacttcagcgcccaggagctggccgagcaggacgccttcctgagagagatcatgaagaccgccgtgatgaaggagctgtacagcttcctgcaccaccagaacagatacggcagcgagcaggagttcgtggacgacctgaagaacatgtggttcggcctgtacagcagaggcaacgaggagggcgacagcagcggcttcgagcacgtgttcagcggcgaggtgaagaagggcaaggtgaccggcttccacaactggatcagattctacctggaggagaaggagggcctggtggactactacagccacatctacgacggcccctgggacagctaccccgacgtgctggccatgcagttcaactgggacggctactacaaggaggtgggcagcgccttcatcggcagcagccccgagttcgagttcgccctgtacagcctgtgcttcatcgccagacccggcaaggtgtgccagctgagcctgggcggctaccccctggccgtgagaacctacacctgggacaagagcacctacggcaacggcaagaagtacatcgccaccgcctacatcgtgagcagcacctag

SEQ ID NO: 68022 - DNA, 456 bp, Artificial Sequence
  derived and/or modified sequence
atgaagaccgctgtcatgaaggaactgtacagcttcctgcatcatcagaatcgttatgggtctgagcaggaattcgttgacgacctgaagaatatgtggtttggcctgtactccagagggaacgaggaaggcgacagtagcgggtttgaacatgtgttcagcggggaggtcaagaaggggaaggttaccgggtttcataactggatacgcttttatctggaagagaaagaaggcctcgtcgattattactcacatatatacgacgggcccgtgccagtcaagccaggccgaatttcactttcatgcccggacatctacctgggacaggtgcatctctgggagtggcaggaggtacacagacactcactccacagcgtgtttcacctcattgagctccgtgcacggaaaggacatgagggatcctgtgagacagaagtattgtcaagccttgactag

SEQ ID NO: 68023 - DNA, 1044 bp, Artificial Sequence
  derived and/or modified sequence
atgcgggcttgcatcagtctcgtccttgccgttctgtgcggccttgcttgggccgatttatactccgctcctacttcttgccaagggcgatgctatgaagccttcgacaaacaccatcaatgccattgcaacgctcgatgccaggaatttggcaactgttgtaaggactttgaatctctctgtagcgatcacgaggtcagccactcttctgatgcaatcacaaaggaggagatacagagtatttcagagaagatatatagagctgatacaaataaggcccagaaagaagatatcgtgctaaacagccagaactgcatcagcccctctgaaaccagaaatcaggtcgacaggtgtccaaaacccctctttacctacgtgaacgagaaactgtttagcaagcccacctacgcagcgttcattaatctcttgaataactatcagcgcgctaccggtcacggagagcatttctccgctcaagagcttgctgagcaggatgcctttcttcgcgaaattatgaagactgcagtgatgaaggagctttacagctttctgcaccaccagaacagatacggcagcgagcaggagttcgtagacgacttaaagaatatgtggttcggcctatatagcagaggcaatgaggagggcgacagctcaggcttcgagcatgtgttctctggcgaagtgaaaaaggggaaagtcaccggattccacaactggatcagattttatttagaagagaaagaaggattagtcgactattactcacatatctacgatggaccttgggattcataccccgacgttctcgcgatgcaatttaactgggatgggtactataaggaggtgggttccgcgtttatcggctcttcgccagagtttgagttcgccctctattctctgtgtttcatcgcccgcccaggtaaagtttgccagctgtcgttgggaggatatccgctcgctgtcaggacctatacatgggacaagagcacatatggcaatggtaagaagtacatcgcgaccgcttacatcgtctcctccacttag

SEQ ID NO: 68024 - DNA, 456 bp, Artificial Sequence
  derived and/or modified sequence
atgaagacagctgtgatgaaggagctgtacagcttcctgcaccaccagaacagatatggcagcgagcaggagtttgtggatgacctgaagaacatgtggtttggcctgtacagcagaggaaatgaggagggggacagcagcggctttgaacatgtgttcagcggggaggtgaagaagggcaaggtgacaggcttccacaactggatccgcttctacctggaggagaaggagggcctggtggactactacagccacatctatgatggccctgtgcctgtgaagccaggccgcatcagcctgagctgcccagacatctacctgggccaggtgcacctgtgggagtggcaggaggtgcaccgccacagcctgcacagcgtcttccacctgattgagctgcgggccaggaagggccacgagggcagctgtgaaacagaggtgctgagcagcctggactag

SEQ ID NO: 68025 - DNA, 1044 bp, Artificial Sequence
  derived and/or modified sequence
atgagggcctgcatcagcctggtgctggccgtgctgtgtggcctggcctgggccgacctgtacagcgcccccaccagctgccagggccgctgctatgaggcctttgacaagcaccaccagtgccactgcaatgcccgctgccaggagtttggaaactgctgcaaggactttgagagcctgtgcagcgaccacgaggtgagccacagcagtgatgccatcaccaaggaggagatccagagcatcagcgagaagatctacagagctgacaccaacaaggcccagaaggaggacatcgtgctgaacagccagaactgcatcagccccagcgagaccaggaaccaggtggaccgctgccccaagcccctcttcacctacgtgaatgagaagctgttcagcaagcccacctatgctgccttcatcaacctgctgaacaactaccagagggccaccggccacggggagcacttcagcgcccaggagctggccgagcaggatgccttcctgcgggagatcatgaagacagctgtgatgaaggagctgtacagcttcctgcaccaccagaacagatatggcagcgagcaggagtttgtggatgacctgaagaacatgtggtttggcctgtacagcagaggaaatgaggagggggacagcagcggctttgagcacgtgttttctggagaggtgaagaagggcaaggtgacaggcttccacaactggatccgcttctacctggaggagaaggagggcctggtggactactacagccacatctatgatggcccctgggacagctacccagatgtgctggccatgcagttcaactgggatggctactacaaggaggtgggcagcgccttcatcggcagcagccctgagtttgaatttgccctgtacagcctgtgcttcatcgcccggcctgggaaggtgtgccagctgagcctgggcggctaccccctggccgtgaggacctacacctgggacaagagcacctatggaaatggcaagaagtacatcgccacagcctacatcgtgagcagcacctag

SEQ ID NO: 68026 - RNA, 456 nt, Artificial Sequence
  derived and/or modified sequence
augaagacagccguaaugaaagaacucuauagcuuucugcaccaucaaaaccgguaugguagcgagcaggaguuuguggaugaccucaagaauaugugguuuggacuguacagccggggaaacgaagagggagacuccucgggcuuugaacacguguucuccggagaaguuaaaaagggcaaagugaccggguuccauaacuggauuagauucuaccucgaggagaaagaaggacuggucgacuauuacucccauauauaugauggcccuguacccguuaagccuggaagaauaucacuuuccugcccugacaucuaucugggccaaguccaccucugggaauggcaggaagugcaucgccacucacugcacagcguauuucaccucauugaacugagggcacggaaaggucacgaagguaguugcgaaacggagguucugucaaguuuggauuag

SEQ ID NO: 68027 - RNA, 1044 nt, Artificial Sequence
  derived and/or modified sequence
augcgcgccuguauuucucucguuuuagccgugcuguguggccuggcaugggccgaucuguauucagcucccacauccugucaagguagauguuaugaggcuuucgacaagcaucaccaaugucauuguaacgcccgcugucaggaauuuggaaauugcuguaaggauuuugaaucucuuugcucggaucaugagguuucacacucauccgacgcaauuacaaaagaggaaauccaauccaucagcgaaaagaucuaccgcgccgauaccaauaaggcucagaaggaagacaucguguuaaauagucagaauugcauaucuccaagugaaacuagaaaucagguggaccggugccccaaaccccuguucacguacgugaaugaaaaacucuucucgaaaccaacuuacgcagcauucauuaaccugcucaacaauuaucaaagagcuaccgggcacggagaacacuuuagugcucaggaacuggcugagcaggacgcauuccugcgcgagaucaugaagaccgcaguuaugaaagagcuguauagcuuuuugcaccaucaaaauagauacggaagcgaacaggaguucguggacgaccugaaaaauaugugguucggcuuauauucacgagggaaugaggaaggugauucuuccggcuucgagcauguuuucuccggcgaagugaagaagggaaaagucacuggauuucauaauuggauccgguucuaccuggaagagaaagaagggcugguggacuacuacucacacauuuaugacggcccuugggacucguacccggacgugcucgcgaugcaguucaacugggacggauauuacaaagaaguuggaagugccuucaucggauccucacccgaguucgaauuugcacucuauucccugugcuuuaucgccagacccgguaaggugugccaacugucucuugguggcuauccucucgcaguaaggacuuacacuugggacaaaagcacuuaugguaaugggaaaaaguacaucgcgaccgccuauauaguuucaucaacuuag

SEQ ID NO: 68028 - RNA, 456 nt, Artificial Sequence
  derived and/or modified sequence
augaagacagcagugaugaaggaguuauauucauuucuccaccaccagaacagauauggcagcgaacaggaauuuguggacgaucucaagaacaugugguuuggacuguacagccgcggaaacgaagaaggcgacucaucaggauuugaacauguuuuuagcggcgaggugaagaagggaaaaguuacuggauuucacaauuggauccgguucuacuuggaggaaaaagaagggcugguggacuacuacucacacauuuacgacggcccaguccccgucaaaccaggaaggaucagccucaguuguccagacauuuaccucggacagguucaucucugggaauggcaagagguccaccggcauagccuacauuccguuuuccaccuuauagaauugcgcgccagaaaagggcacgagggcuccugugaaacagaagugcuuucuucgcuugacuag

SEQ ID NO: 68029 - RNA, 1044 nt, Artificial Sequence
  derived and/or modified sequence
augcgugcaugcauaucccucguucuagcugugcugugcggccuggcuugggcggaccucuacucggccccaaccucaugucaggggaggugcuaugaagcauuugacaaacaccaucagugccauuguaaugcucgaugucaggaauuuggcaauuguuguaaggacuucgagucuuuguguagcgaccacgagguaagucauucaagugacgccaucaccaaagaagagauccagagcaucagcgagaaaauuuacagagcagauacaaauaaggcccagaaggaagacauuguguugaacucccagaacugcaucagcccuucagagacacgaaaccagguugaccggugucccaaaccacuguuuaccuauguaaaugagaaacuguuuaguaagccaacauacgccgcuuuuauuaaccuucuaaauaauuaucaaagagcaacaggccauggcgagcauuuuucagcucaggaacucgccgagcaggaugccuuccuaagagaaauuaugaagacugcugucaugaaggaacuguauucuuuuuuacaccaccagaauagauacggcagcgagcaggaguuugucgacgaucuuaagaacaugugguuuggccuguauucucgcggcaaugaggaaggcgauucgucaggauucgaacacguguuuagcggggagguuaagaagggaaaggugaccggguuucauaacuggauacgauucuacuuagaggagaaagagggacugguugacuacuauucacauaucuacgacggaccaugggacagcuauccagauguucuagcuaugcaguucaacugggacgguuauuauaaggagguagguucggcuuuuauugggucuuccccagaguuugaauuugcgcuauacucucuaugcuuuaucgcccggcccgguaagguuugccagcucucccucgguggauacccccucgcugucaggacauacaccugggacaaaucuacauauggcaauggaaaaaaguauaucgcgacagcuuacaucgucuccucaaccuag

SEQ ID NO: 68030 - protein, 139 aa, Artificial Sequence
  derived and/or modified sequence
MGDPERPEAAGLDQDEGLHCDFACLMFQYLVNKPSEERVREIIVDAVKIEQEFLTEALPVGLIGMNCILMKQYIEFVADRLLVELGFSKVFQAENPFDFMENISLEGKTNFFEKRVSEYQRFAVMAETTDNVFTLDADF

SEQ ID NO: 68031 - protein, 66 aa, Artificial Sequence
  derived and/or modified sequence
MGDPERPEAAGLDQDEVFQAENPFDFMENISLEGKTNFFEKRVSEYQRFAVMAETTDNVFTLDADF

SEQ ID NO: 68032 - DNA, 3483 bp, Artificial Sequence
  derived and/or modified sequence
agattgcaagttgcaggaccgctgtaggaaatgttattcgccgcggtcaggacaggcctgtccgcccgccctcgccgcagcctggcttcgtcgttgcgagcgccggggaggccgtccccggggagggcggaggaaggagctgactttgggtttgcgtcccgctcgctgctctgccccggggccagccaaggacgacgcttggaggcctcaggccgggagatcatcttcagacaccaacgaaagtgaaataaagtcaaatgaagagccactcctaagaaagagttctcgccggtttgtcatctttccaatccagtaccctgatatttggaaaatgtataaacaggcacaggcttccttctggacagcagaagaggtcgacttatcaaaggatctccctcactggaacaagcttaaagcagatgagaagtacttcatctctcacatcttagccttttttgcagccagtgatggaattgtaaatgaaaatttggtggagcgctttagtcaggaggtgcaggttccagaggctcgctgtttctatggctttcaaattctcatcgagaatgttcactcagagatgtacagtttgctgatagacacttacatcagagatcccaagaaaagggaatttttatttaatgcaattgaaaccatgccctatgttaagaaaaaagcagattgggccttgcgatggatagcagatagaaaatctacttttggggaaagagtggtggcctttgctgctgtagaaggagttttcttctcaggatcttttgctgctatattctggctaaagaagagaggtcttatgccaggactcactttttccaatgaactcatcagcagagatgaaggacttcactgtgactttgcttgcctgatgttccaatacttagtaaataagccttcagaagaaagggtcagggagatcattgttgatgctgtcaaaattgagcaggagtttttaacagaagccttgccagttggcctcattggaatgaattgcattttgatgaaacagtacattgagtttgtagctgacagattacttgtggaacttggattctcaaaggtttttcaggcagaaaatccttttgattttatggaaaacatttctttagaaggaaaaacaaatttctttgagaaacgagtttcagagtatcagcgttttgcagttatggcagaaaccacagataacgtcttcaccttggatgcagatttttaaaaaacctcttgttttaaaactctataaacttgtcattggtaaatagtagtctattttcctctgcttaaaaaaaattttaagtatatcctttaaaggactgggggtttgctcaaaaggaaatccaaaacctattctaaacaatttgcatttatataattttcctgtttaacaacaagagtgtgacctaaatgcttttgtcttgtcactgaaataaaagatggcattatgtggttaagagcatggggcgaggggtcagacatgagtctaaggttctgcccttactccagtgtgtgacccttggcaagtcagttaatcttggtaaacctcggtgtacttatctttaaaatgggagtaatagtaggtcctaaattcatagagtggatattaggattaggatgcaaaaataaatgcttaaccaacactactactgttagcaccactactaattatcattcattgataatattaattgcaatgatgttgtaataaaatactctcatttccttaaaataattgtgattctaggtcctaggatctagaattagatctttgtatttttaatgcttaggggaagaatataagtatctccttaaaaagaacataattctcattcacgcaagaataagttctttgaattccttagtatgtagtgaagaaaatttagttgttagttgctttgggaagcctacttatggagtggaaaccaggaggttatcatggtagttgaccttataagaaaaatgattcttcttcagaaattaaaaacataactattgccagatttagctctggaatgtttagaatcagtacatcaaagactgagcagttcagtggtacataaatttatctcgccctgcatattcccaacatacttaacacagatgttttttacctgttaacatctcacccagctagtgttcctcagaacaaagattggaaaaagctggccgagaaccatttatacatagaggaagggcttatggactgagaaagggagaacatggtagggattattgaatcatttcaaatttataccagcctgaatagtgtaccagcaattgacttaggctgtgtttctttatggttttaaaactcttgagctgttataagagatagttcttttaatgtgactatgcaacatgatagccaatggtgagggaaaaggaggtttctctagaagagtctgatgaaaggccgggaaccaaggtttttgagaagtctgcccctatttatttttagtaagtatcaagaggtagcctgagcctagttagagttagacctgtctttggatgaagaagtcttaatactgaaatactgaatttttaatacattattatttggtattctgtataccccttcaagcagttgtttcccattcccaacaaactgtactttatacaattctggatgctaaaacttagagattttctctttgcataaattttggctccattctttccataacaatctaatcaaaactgggagttctcaagtgaatgcaaaaggagcaggccataactttatttgttagatacactgtcagaaacttgagatcttttggcctatgataataccattaatttttgcattgcttcagtttgccaagatctgctcatcgtcactgtctgtacagtatttttttttagaggttgtaatgtctcagatttagtcctttaccatctatgttgatttgcttttgtctatttcctcattaattgaatatactttaaatatatatattaaagtatcaaaatatagagagacatttgaactgtattcaggtaatatgtttaaagatatttatatattgccatacaaaaacttaacatttaaaactgataatatctgtaatgacatcagaatgaaagaaaaaaaattgtacagtgtatattcctttgttttgaatccaaatctttttcataggtaatgacagatgccttaatgtgaagcttatttataatagcaataaacctaactggatttggatgaagaagtcttaatactgacatactggatttttaatgcactggtttgttatttggtattctatctctttttccaggcctccaggttgcacatttatttattatgttcaatactttggttcttagttcttaaagaatcaagaagttgtgtaatcttttaaaaatattatcttgcagataaagaaaaaaattaagagtgtgtttacaactgttttctcttttttacagtacatgtatttaaatcattgctataataaagttaagttcattagg

SEQ ID NO: 68033 - protein, 299 aa, Artificial Sequence
  derived and/or modified sequence
MGDPERPEAAGLDQDEVDLSKDLPHWNKLKADEKYFISHILAFFAASDGIVNENLVERFSQEVQVPEARCFYGFQILIENVHSEMYSLLIDTYIRDPKKREFLFNAIETMPYVKKKADWALRWIADRKSTFGERVVAFAAVEGVFFSGSFAAIFWLKKRGLMPGLTFSNELISRDEGLHCDFACLMFQYLVNKPSEERVREIIVDAVKIEQEFLTEALPVGLIGMNCILMKQYIEFVADRLLVELGFSKVFQAENPFDFMENISLEGKTNFFEKRVSEYQRFAVMAETTDNVFTLDADF

SEQ ID NO: 68034 - DNA, 900 bp, Artificial Sequence
  derived and/or modified sequence
atgggtgaccccgaaaggccggaggcagccgggttggaccaggatgaggtggacttgtctaaggatcttcctcactggaacaaactcaaggctgatgaaaaatacttcataagccacatcttggcattctttgctgctagtgacggtatagtgaacgagaacttggtggagcgtttcagtcaagaggtgcaggttcccgaggcccggtgcttttacggcttccagatcctcattgaaaatgttcactctgagatgtattctcttctaattgacacttacattagggatccgaaaaaacgggagttcttgttcaacgcgattgaaactatgccatacgtaaaaaagaaagccgactgggcactgaggtggatcgccgacagaaagagcacattcggggagcgggttgttgcatttgcggctgttgaaggtgtttttttcagtgggagctttgccgccatattttggctgaaaaagcggggcctcatgccaggtttgactttttcaaatgaactgatctcgcgagatgaggggctgcactgcgattttgcctgcctgatgtttcagtacctggtgaacaagcctagcgaagagagggtgagagaaattatagtggatgcggtcaaaatcgagcaggagttccttacggaagcactgcctgtaggccttattgggatgaactgcatacttatgaagcaatacatcgagttcgtggcggatcgactccttgtggaacttggcttctccaaggtgttccaggccgagaacccattcgacttcatggaaaacatctccctggaaggaaaaacgaactttttcgaaaagcgggtgtctgagtaccagcggttcgctgtgatggccgaaacaaccgacaatgtgttcaccctagatgctgacttctag

SEQ ID NO: 68035 - DNA, 420 bp, Artificial Sequence
  derived and/or modified sequence
atgggcgacccagagagaccggaggcggccggcctagatcaggatgaagggctccattgtgacttcgcatgcctaatgttccagtacttagttaataaaccaagcgaagagagagtgagagagataatcgtagacgctgtcaagatagagcaagaatttctcactgaggcactcccggtcggtctgatcggaatgaattgcatcttgatgaagcagtacatcgagttcgtggccgatcgtctcctcgtggaactcggattctctaaagtcttccaggcagagaatccttttgactttatggagaacatcagtttggaaggcaaaacaaatttcttcgagaagcgggtttctgaatatcagcgctttgccgtcatggcagaaacaaccgataatgtattcaccctagacgcagacttctag

SEQ ID NO: 68036 - DNA, 201 bp, Artificial Sequence
  derived and/or modified sequence
atgggcgaccccgagcgccccgaggccgctgggctagaccaggatgaggtcttccaggcagagaatccatttgatttcatggagaacatcagtttagaggggaaaaccaatttcttcgagaagagggtatcagagtatcagaggtttgcagttatggcagaaacaactgacaatgttttcacccttgacgccgatttttag

SEQ ID NO: 68037 - DNA, 900 bp, Artificial Sequence
  derived and/or modified sequence
atgggagaccctgagaggcctgaggccgccggcctggaccaggatgaggtggacctgagcaaggacctgccccactggaacaagctgaaggcagatgagaagtacttcatcagccacatcctggccttctttgctgccagtgatggcatcgtgaatgaaaacctggtggagcgcttcagccaggaggtgcaggtgcctgaggcccgctgcttctacggcttccagatcctgattgaaaatgtgcacagcgagatgtacagcctgctgattgacacctacatccgggaccccaagaagcgggagttcctgttcaatgccatcgagaccatgccctacgtgaagaagaaggctgactgggccctgcgctggattgctgacaggaagagcacctttggagagcgggtggtggcctttgctgctgtggagggcgtcttcttcagcggcagctttgctgccatcttctggctgaagaagaggggcctgatgcctggcctgaccttcagcaatgaactcatcagcagagatgagggcctgcactgtgactttgcctgcctgatgttccagtacctggtgaacaagcccagcgaggagcgggtgcgggagatcatcgtggatgctgtgaagattgagcaggagttcctgacagaggccctgcctgtgggcctgattggcatgaactgcatcctgatgaagcagtacatcgagtttgtggccgaccggctgctggtggagctgggcttcagcaaggtgttccaggccgagaacccctttgacttcatggagaacatcagcctggagggcaagaccaacttctttgagaagagggtgtctgagtaccagagatttgctgtgatggccgagaccacagacaacgtgttcaccctggatgctgacttctag

SEQ ID NO: 68038 - DNA, 420 bp, Artificial Sequence
  derived and/or modified sequence
atgggagaccctgagaggcctgaggccgccggcctggaccaggatgagggcctgcactgtgactttgcctgcctgatgttccagtacctggtgaacaagcccagcgaggagcgggtgcgggagatcatcgtggatgctgtgaagattgagcaggagttcctgacagaggccctgcctgtgggcctgattggcatgaactgcatcctgatgaagcagtacatcgagtttgtggccgaccggctgctggtggagctgggcttcagcaaggtgttccaggccgagaacccctttgacttcatggagaacatcagcctggagggcaagaccaacttctttgagaagagggtgtctgagtaccagagatttgctgtgatggccgagaccacagacaacgtgttcaccctggatgctgacttctag

SEQ ID NO: 68039 - DNA, 201 bp, Artificial Sequence
  derived and/or modified sequence
atgggagaccctgagaggcctgaggccgccggcctggaccaggatgaggtgttccaggccgagaacccctttgacttcatggagaacatcagcctggagggcaagaccaacttctttgagaagagggtgtctgagtaccagagatttgctgtgatggccgagaccacagacaacgtgttcaccctggatgctgacttctag

SEQ ID NO: 68040 - DNA, 900 bp, Artificial Sequence
  derived and/or modified sequence
atgggcgaccccgagcggcccgaggccgccggcctggaccaggacgaggttgacctctcaaaggacctgcctcactggaacaagctcaaggctgacgaaaagtattttattagtcatatactcgcctttttcgcagcctctgacggtattgtgaatgaaaacctcgttgaacgcttttctcaggaagtgcaggtgccagaggcaaggtgtttttacggctttcaaatcctgatcgaaaacgtgcactccgaaatgtattcgcttctgatcgacacatacatcagggatccaaaaaagagggagttcctgttcaatgccattgagacgatgccctacgtcaaaaagaaggccgattgggccctacgctggatcgccgatcggaaaagtacctttggtgaaagagtagtggcctttgcagctgttgagggtgtgttcttctccgggtccttcgctgcgatcttctggcttaagaaaagaggtttaatgcccgggctgacatttagcaatgaactgatcagccgcgatgagggcctccactgcgacttcgcatgcctgatgtttcagtatctggtaaataagcctagtgaggagagggtgcgggagatcatcgttgatgcagtcaaaatcgaacaggagttccttaccgaggcgttacctgtcggactgattggtatgaactgcattctgatgaagcagtacatcgaatttgtagccgatcggctgttggtcgagctcggattcagtaaggtgtttcaggcggaaaacccctttgattttatggagaatatttcactggagggaaagaccaactttttcgagaaacgagtcagtgagtatcagcgtttcgcagtcatggctgaaaccaccgacaacgtcttcacgctggacgctgacttttag

SEQ ID NO: 68041 - DNA, 420 bp, Artificial Sequence
  derived and/or modified sequence
atgggcgaccccgagcggcccgaggccgccggcctggaccaggacgagggcctccactgtgattttgcctgtttgatgtttcagtatctggtgaacaagcccagcgaggaacgcgtgcgggagatcatcgtggacgccgtcaagatagaacaggagttcctgacagaggctctgcctgtcgggcttatcggaatgaactgcattctgatgaagcaatacatcgagttcgtggcagatcgcctgcttgtggaactcggcttcagtaaagtgtttcaggccgagaatccatttgatttcatggaaaacatcagcctggaagggaaaaccaatttctttgagaaaagggtgtcagagtatcagcggtttgcagttatggcagaaacaactgataacgttttcacattggatgcagacttctag

SEQ ID NO: 68042 - DNA, 201 bp, Artificial Sequence
  derived and/or modified sequence
atgggcgaccccgagcggcccgaggccgccggcctggaccaggacgaggtgtttcaggccgaaaatccgttcgattttatggagaacatttctctggagggtaagaccaatttctttgagaaaagagtaagtgagtatcagaggttcgctgttatggccgagacaaccgacaacgtgtttaccctggacgctgatttctag

SEQ ID NO: 68043 - DNA, 900 bp, Artificial Sequence
  derived and/or modified sequence
atgggggatccggaacgcccagaagccgctggactggatcaagacgaggtggatttgtctaaggatctcccccattggaacaaacttaaagcggatgaaaaatatttcatttctcacattctggctttcttcgctgcttctgatggcattgtcaacgagaatttggtggaaagatttagccaggaagtgcaagtccctgaggcccgatgcttctatggcttccagatcctgatcgagaatgttcacagcgagatgtattccttactgatcgacacctacatcagagaccctaaaaagcgggagttcctcttcaacgccatcgagaccatgccatatgttaagaaaaaggccgactgggcactgagatggatcgcggatcgtaaatctaccttcggagaaagagtggtcgcattcgccgctgttgagggagtgtttttcagtggttcattcgctgccattttttggctcaaaaagcggggactcatgccaggactgacatttagcaatgagctgatctcccgggacgaaggattgcattgcgacttcgcttgtttgatgtttcagtatctcgtgaacaaaccttccgaggaaagggtccgggaaattattgtcgacgctgttaaaattgagcaggaattcctgactgaagccctgcccgtgggactgatcggaatgaattgcatcttgatgaaacagtacatcgagtttgttgctgatcggctgctggtggagctcggtttctctaaggtcttccaagctgagaacccgttcgacttcatggaaaatatctcattagagggcaagactaatttcttcgagaagcgagtctccgaataccagagattcgcagtgatggctgagaccaccgataatgtgttcacgctcgatgcagacttctag

SEQ ID NO: 68044 - DNA, 420 bp, Artificial Sequence
  derived and/or modified sequence
atgggtgacccagaacggcctgaggcagctggattggaccaggacgaaggtctgcattgcgatttcgcatgcctgatgttccagtacctcgtcaacaagccatctgaggagcgcgtcagagaaataattgtcgacgctgttaaaatagagcaggaatttcttacagaagcgctgccggtgggtctcatcggcatgaactgtatcctgatgaagcagtatatcgaatttgtcgcggaccggctgttagtggagctgggctttagcaaagtgttccaggccgagaatccgttcgatttcatggaaaacatctctctcgaaggtaaaaccaatttcttcgagaaaagggtatccgagtaccaacggtttgcggtgatggctgaaacaaccgacaatgtctttacccttgatgctgatttctag

SEQ ID NO: 68045 - DNA, 201 bp, Artificial Sequence
  derived and/or modified sequence
atgggagacccagaaagacctgaggcagcagggttggaccaggatgaagtgtttcaggcagagaaccctttcgacttcatggaaaacatctcactcgaaggcaagacgaactttttcgagaagcgtgttagtgagtatcagagattcgcagtgatggctgagaccacagacaatgtgttcacattggacgccgatttctag

SEQ ID NO: 68046 - DNA, 900 bp, Artificial Sequence
  derived and/or modified sequence
atgggcgacccggaaaggccggaagcggccgggctggatcaggatgaggtcgacttatcaaaggatctccctcactggaacaagcttaaagcagatgagaagtacttcatctctcacatcttagccttttttgcagccagtgatggaattgtaaatgaaaatttggtggagcgctttagtcaggaggtgcaggttccagaggctcgctgtttctatggctttcaaattctcatcgagaatgttcactcagagatgtacagtttgctgatagacacttacatcagagatcccaagaaaagggaatttttatttaatgcaattgaaaccatgccctatgttaagaaaaaagcagattgggccttgcgatggatagcagatagaaaatctacttttggggaaagagtggtggcctttgctgctgtagaaggagttttcttctcaggatcttttgctgctatattctggctaaagaagagaggtcttatgccaggactcactttttccaatgaactcatcagcagagatgaaggacttcactgtgactttgcttgcctgatgttccaatacttagtaaataagccttcagaagaaagggtcagggagatcattgttgatgctgtcaaaattgagcaggagtttttaacagaagccttgccagttggcctcattggaatgaattgcattttgatgaaacagtacattgagtttgtagctgacagattacttgtggaacttggattctcaaaggtttttcaggcagaaaatccttttgattttatggaaaacatttctttagaaggaaaaacaaatttctttgagaaacgagtttcagagtatcagcgttttgcagttatggcagaaaccacagataacgtcttcaccttggatgcagatttttaa

SEQ ID NO: 68047 - DNA, 420 bp, Artificial Sequence
  derived and/or modified sequence
atgggcgacccggaaaggccggaagcggccgggctggatcaggatgagggacttcactgtgactttgcttgcctgatgttccaatacttagtaaataagccttcagaagaaagggtcagggagatcattgttgatgctgtcaaaattgagcaggagtttttaacagaagccttgccagttggcctcattggaatgaattgcattttgatgaaacagtacattgagtttgtagctgacagattacttgtggaacttggattctcaaaggtttttcaggcagaaaatccttttgattttatggaaaacatttctttagaaggaaaaacaaatttctttgagaaacgagtttcagagtatcagcgttttgcagttatggcagaaaccacagataacgtcttcaccttggatgcagatttttaa

SEQ ID NO: 68048 - DNA, 201 bp, Artificial Sequence
  derived and/or modified sequence
atgggcgacccggaaaggccggaagcggccgggctggatcaggatgaggtttttcaggcagaaaatccttttgattttatggaaaacatttctttagaaggaaaaacaaatttctttgagaaacgagtttcagagtatcagcgttttgcagttatggcagaaaccacagataacgtcttcaccttggatgcagatttttaa

SEQ ID NO: 68049 - DNA, 389 bp, Artificial Sequence
  derived and/or modified sequence
atgggcgacccggaaaggccggaagcggccgggctggatcaggatgagagatcatcttcagacaccaacgaaagtgaaataaagtcaaatgaagagccactcctaagaaagagttctcgccggagtttttaacagaagccttgccagttggcctcattggaatgaattgcattttgatgaaacagtacattgagtttgtagctgacagattacttgtggaacttggattctcaaaggtttttcaggcagaaaatccttttgattttatggaaaacatttctttagaaggaaaaacaaatttctttgagaaacgagtttcagagtatcagcgttttgcagttatggcagaaaccacagataacgtcttcaccttggatgcagatttttaa

SEQ ID NO: 68050 - DNA, 900 bp, Artificial Sequence
  derived and/or modified sequence
atgggcgaccccgagagacccgaggccgccggcctggaccaggacgaggtggacctgagcaaggacctgccccactggaacaagctgaaggccgacgagaagtacttcatcagccacatcctggccttcttcgccgccagcgacggcatcgtgaacgagaacctggtggagagattcagccaggaggtgcaggtgcccgaggccagatgcttctacggcttccagatcctgatcgagaacgtgcacagcgagatgtacagcctgctgatcgacacctacatcagagaccccaagaagagagagttcctgttcaacgccatcgagaccatgccctacgtgaagaagaaggccgactgggccctgagatggatcgccgacagaaagagcaccttcggcgagagagtggtggccttcgccgccgtggagggcgtgttcttcagcggcagcttcgccgccatcttctggctgaagaagagaggcctgatgcccggcctgaccttcagcaacgagctgatcagcagagacgagggcctgcactgcgacttcgcctgcctgatgttccagtacctggtgaacaagcccagcgaggagagagtgagagagatcatcgtggacgccgtgaagatcgagcaggagttcctgaccgaggccctgcccgtgggcctgatcggcatgaactgcatcctgatgaagcagtacatcgagttcgtggccgacagactgctggtggagctgggcttcagcaaggtgttccaggccgagaaccccttcgacttcatggagaacatcagcctggagggcaagaccaacttcttcgagaagagagtgagcgagtaccagagattcgccgtgatggccgagaccaccgacaacgtgttcaccctggacgccgacttctag

SEQ ID NO: 68051 - DNA, 420 bp, Artificial Sequence
  derived and/or modified sequence
atgggcgaccccgagagacccgaggccgccggcctggaccaggacgagggcctgcactgcgacttcgcctgcctgatgttccagtacctggtgaacaagcccagcgaggagagagtgagagagatcatcgtggacgccgtgaagatcgagcaggagttcctgaccgaggccctgcccgtgggcctgatcggcatgaactgcatcctgatgaagcagtacatcgagttcgtggccgacagactgctggtggagctgggcttcagcaaggtgttccaggccgagaaccccttcgacttcatggagaacatcagcctggagggcaagaccaacttcttcgagaagagagtgagcgagtaccagagattcgccgtgatggccgagaccaccgacaacgtgttcaccctggacgccgacttctag

SEQ ID NO: 68052 - DNA, 201 bp, Artificial Sequence
  derived and/or modified sequence
atgggcgaccccgagagacccgaggccgccggcctggaccaggacgaggtgttccaggccgagaaccccttcgacttcatggagaacatcagcctggagggcaagaccaacttcttcgagaagagagtgagcgagtaccagagattcgccgtgatggccgagaccaccgacaacgtgttcaccctggacgccgacttctag

SEQ ID NO: 68053 - protein, 617 aa, Artificial Sequence [sequence omitted]

SEQ ID NO: 68054 - DNA, 1854 bp, Artificial Sequence
  derived and/or modified sequence
atgctgctggccagaatgaacccccaggtgcagcccgagaacaacggcgccgacaccggccccgagcagcccctgagagccagaaagaccgccgagctgctggtggtgaaggagagaaacggcgtgcagtgcctgctggcccccagagacggcgacgcccagcccagagagacctggggcaagaagatcgacttcctgctgagcgtggtgggcttcgccgtggacctggccaacgtgtggagattcccctacctgtgctacaagaacggcggcggcgccttcctgatcccctacaccctgttcctgatcatcgccggcatgcccctgttctacatggagctggccctgggccagtacaacagagagggcgccgccaccgtgtggaagatctgccccttcttcaagggcgtgggctacgccgtgatcctgatcgccctgtacgtgggcttctactacaacgtgatcatcgcctggagcctgtactacctgttcagcagcttcaccctgaacctgccctggaccgactgcggccacacctggaacagccccaactgcaccgaccccaagctgctgaacggcagcgtgctgggcaaccacaccaagtacagcaagtacaagttcacccccgccgccgagttctacgagagaggcgtgctgcacctgcacgagagcagcggcatccacgacatcggcctgccccagtggcagctgctgctgtgcctgatggtggtggtgatcgtgctgtacttcagcctgtggaagggcgtgaagaccagcggcaaggtggtgtggatcaccgccaccctgccctacttcgtgctgttcgtgctgctggtgcacggcgtgaccctgcccggcgccagcaacggcatcaacgcctacctgcacatcgacttctacagactgaaggaggccaccgtgtggatcgacgccgccacccagatcttcttcagcctgggcgccggcttcggcgtgctgatcgccttcgccagctacaacaagttcgacaacaactgctacagagacgccctgctgaccagcagcatcaactgcatcaccagcttcgtgagcggcttcgccatcttcagcatcctgggctacatggcccacgagcacaaggtgaacatcgaggacgtggccaccgagggcgccggcctggtgttcatcctgtaccccgaggccatcagcaccctgagcggcagcaccttctgggccgtggtgttcttcgtgatgctgctggccctgggcctggacagcagcatgggcggcatggaggccgtgatcaccggcctggccgacgacttccaggtgctgaagagacacagaaagctgttcaccttcggcgtgaccttcagcaccttcctgctggccctgttctgcatcaccaagggcggcatctacgtgctgaccctgctggacaccttcgccgccggcaccagcatcctgttcgccgtgctgatggaggccatcggcgtgagctggttctacggcgtggacagattcagcaacgacatccagcagatgatgggcttcagacccggcctgtactggagactgtgctggaagttcgtgagccccgccttcctgctgttcgtggtggtggtgagcatcatcaacttcaagcccctgacctacgacgactacatcttccccccctgggccaactgggtgggctggggcatcgccctgagcagcatggtgctggtgcccatctacgtgatctacaagttcctgagcacccagggcagcctgtgggagagactggcctacggcatcacccccgagaacgagcaccacctggtggcccagagagacatcagacagttccagctgcagcactggctggccatctag

SEQ ID NO: 68055 - DNA, 1854 bp, Artificial Sequence
  derived and/or modified sequence
atgctgttggcccgtatgaatccccaggtgcaacctgagaacaatggggctgacacaggacccgaacagcctctgagggctaggaaaaccgctgaattgctggtggtcaaggagaggaacggcgtccagtgcctgcttgctccacgcgatggagacgcacagcctagagaaacatggggtaagaaaatagactttctactcagcgtagtgggatttgccgttgatctcgccaatgtttggaggttcccctatctatgttataagaacggagggggcgcctttctgattccttacactctgtttctgattatcgctggaatgccactgttttatatggaactggctctaggccagtataatcgcgagggtgctgctaccgtgtggaaaatctgtccctttttcaaaggtgtgggttacgcagtcatcctgatagccctatatgtcggcttctactataacgtgattattgcatggagtctatactatctttttagcagttttacccttaacctaccctggactgactgtggccatacgtggaactccccaaactgtacagacccaaagctcttgaatgggagcgtcctgggcaaccatacaaagtattctaaatataaatttacacctgccgctgagttttacgagcgtggcgtgctccatcttcacgaatcatccggtattcacgatatcggcctgccccaatggcaattgctgctttgcctgatggtggtggtgatcgtgctctactttagcctgtggaaaggggtgaagaccagcgggaaggtagtatggataaccgccacacttccctactttgtcctttttgtattgcttgttcatggtgtgactctgccaggagcatcgaacgggattaatgcatacttgcatatcgacttttacagactgaaggaggccacagtgtggatagatgctgcgacccagatattcttcagcctaggggctggattcggagtattaattgccttcgcctcctacaacaagtttgataacaattgttatcgggacgctctcctgacaagttctatcaattgcattacctcctttgtgtccgggtttgccattttcagtattctcgggtacatggcccatgagcataaggtcaacatcgaagacgtcgctacagaaggggccgggctggtgtttattctgtaccctgaggccatcagcaccttgtctggatccacattttgggccgtcgtgtttttcgtcatgctcctcgcacttgggttagacagtagcatgggcggcatggaagccgtgatcacaggactggcggatgactttcaagtgcttaagcgacatcgtaagctgttcaccttcggcgtgaccttctcaacctttcttctggccctcttctgcataacaaagggcgggatatacgtgctgacattgttggacacctttgccgccgggacttcaattctgttcgcagtgttaatggaggccataggagtgagttggttttacggcgtggacagattctccaacgacatccagcagatgatgggctttcgtccgggactgtactggagactgtgttggaagttcgttagccctgccttcctcctatttgtggtggtcgttagtataataaatttcaagcctctcacatacgatgactacattttccccccttgggctaattgggttggctgggggattgcacttagtagcatggttttggtgcccatttatgtgatatataaattcttaagcacccaaggcagcctgtgggaacgcctggcttatggcatcactcctgagaacgaacatcacctggtggctcaaagagacataagacagttccagctgcagcactggctcgccatatag

SEQ ID NO: 68056 - DNA, 1854 bp, Artificial Sequence
  derived and/or modified sequence
atgcttctggcaaggatgaaccctcaggtgcagccagagaacaacggagccgacacaggacccgagcagccccttagagcaaggaagacagctgaactgctggtcgtgaaagagcggaacggcgtgcagtgtttactggcacctagagacggcgacgcacagcctcgagagacatggggtaagaaaattgacttcttgctatccgttgttgggtttgccgttgaccttgctaacgtttggcggttcccttacttatgttataaaaacggggggggtgcatttctgatcccctatacactgttcctcattattgccggcatgcccctgttttacatggaactggccttgggacagtacaaccgcgagggagccgctaccgtgtggaaaatatgcccattcttcaagggggtgggatacgccgtgattctgattgccctctacgtagggttttattataatgtgattatagcatggtccctttactacctgttttcttcattcacgcttaatctgccatggacagactgtggccacacctggaactcccccaattgcaccgacccaaagctgttgaatggatcagttctgggtaatcacaccaagtattcaaaatataaatttacacctgcagccgaattctatgaacggggagtcttacatctccacgagtcaagcggcatccatgacattgggttgccccagtggcaactgctgctgtgcctcatggtggtcgttatcgtattgtatttctcgctttggaagggggtgaagacttccggtaaggtcgtgtggataaccgccaccctaccttacttcgtgctcttcgttttgctggtgcacggagtgaccctgccaggagcctcaaatgggatcaatgcatatctacacatcgatttttaccgcctgaaagaagccacagtgtggattgatgcggctacacagatcttcttttcactaggagcggggttcggcgtgctgattgcattcgctagctacaataagtttgataataactgctatcgcgatgctctactgacctcttctattaactgcattacatcgttcgtcagcggcttcgcgatctttagcatactcggctatatggcacacgagcataaggtcaacatagaagacgtggcaacagaaggtgcaggcctggtgttcattctatatcctgaagctataagcacactctccggaagcacattttgggccgttgtgttctttgtgatgttgcttgcattgggtttagatagctcaatgggaggtatggaggctgtaatcaccgggctggccgacgattttcaggttctgaaacgacatcgcaaactgttcacctttggagtgacctttagcacattcctgctggcccttttttgcataacaaaaggaggcatttatgtgctgaccttactggacaccttcgccgcaggcacatccattctatttgctgtgctgatggaggctatcggcgtgagttggttctacggggtcgatcggtttagtaacgacatccagcagatgatgggattcaggcccgggctgtactggagattgtgttggaaatttgtcagcccagcgttccttttgttcgtcgtggtcgttagcattattaattttaaaccgctgacgtatgatgattatattttcccaccctgggcaaattgggtgggttggggaattgcgctaagctcgatggtgttggtgcccatctatgtgatatataagtttctgtccacccagggatctctgtgggaacgcttagcttatggaatcacacccgaaaacgagcatcatctggtggcacaacgggatatccgccagtttcagctacagcactggctggccatctag

SEQ ID NO: 68057 - DNA, 1854 bp, Artificial Sequence
  derived and/or modified sequence
atgctgctggccaggatgaacccccaggtgcagccagaaaataatggagctgacaccggccctgagcagcccctgcgggccaggaagacagctgagctgctggtggtgaaggagagaaatggagtgcagtgcctgctggcccccagagatggagatgcccagccccgggagacctggggcaagaagattgacttcctgctgtctgtggtgggctttgctgtggacctggccaacgtgtggaggttcccctacctgtgctacaagaatggaggaggagccttcctgatcccctacaccctcttcctgatcatcgccggcatgcccctcttctacatggagctggccctgggccagtacaaccgggagggcgccgccaccgtgtggaagatctgccccttcttcaagggcgtgggctacgccgtcatcctgattgccctgtatgtgggcttctactacaacgtcatcatcgcctggagcctgtactacctgttcagcagcttcaccctgaacctgccctggacagactgtggccacacctggaacagccccaactgcacagaccccaagctgctgaatggatctgtgctgggcaaccacaccaagtacagcaagtacaagttcaccccagctgctgagttctatgaaagaggagtgctgcacctgcacgagagcagcggcatccatgacatcggcctgccccagtggcagctgctgctgtgcctgatggtggtggtgattgtgctgtacttcagcctgtggaagggcgtgaagaccagcggcaaggtggtgtggatcacagccaccctgccctactttgtgctgtttgtgctgctggtgcacggcgtgaccctgcccggggccagcaatggcatcaatgcctacctgcacatcgacttctaccgcctgaaggaggccaccgtgtggattgatgctgccacccagatcttcttcagcctgggcgccggctttggagtgctgattgcctttgccagctacaacaagtttgacaacaactgctacagagatgccctgctgaccagcagcatcaactgcatcaccagctttgtgtctggctttgccatcttcagcatcctgggctacatggcccacgagcacaaggtgaacattgaagatgtggccacagaaggagctggcctggtgttcatcctgtacccagaggccatcagcaccctgagcggcagcaccttctgggccgtggtgttctttgtgatgctgctggccctgggcctggacagctccatgggcggcatggaggccgtcatcaccggcctggctgatgacttccaggtgctgaagaggcacaggaagctgttcacctttggagtgaccttcagcaccttcctgctggccctcttctgcatcaccaagggcggcatctacgtgctgaccctgctggacacctttgctgctggcaccagcatcctgtttgctgtgctgatggaggccatcggcgtgtcctggttctacggcgtggaccgcttcagcaatgacatccagcagatgatgggcttccggcccggcctgtactggaggctgtgctggaagtttgtgtccccagccttcctgctgtttgtggtggtggtgtccatcatcaacttcaagcccctgacctatgatgactacatcttccccccctgggccaactgggtgggctggggcatcgccctgagctccatggtgctggtgcccatctacgtgatctacaagttcctgagcacccagggcagcctgtgggagcggctggcctacggcatcaccccagaaaatgagcaccacctggtggcccagagggacatccggcagttccagctgcagcactggctggccatctag

SEQ ID NO: 68058 - DNA, 1854 bp, Artificial Sequence
  derived and/or modified sequence
atgctgctggcccggatgaacccccaggtgcagcccgagaacaacggcgccgacacaggacctgagcagccgctacgtgcccgtaagaccgcagagctgctggtggtgaaagagagaaatggggtgcagtgcctcctggctccacgagatggtgatgcccaaccaagagagacctggggcaaaaagattgacttcctgctgtcggtggtaggttttgccgtggatctggccaacgtgtggcgcttcccctatctctgctataagaacgggggaggcgccttcctcataccctataccttgttcctgatcattgcgggaatgcctcttttctacatggagctggccctggggcagtataatagagagggagcagctactgtgtggaaaatctgtcccttttttaagggagttggatacgcagtcattcttatcgctttgtacgttggcttttactacaacgtgattatcgcttggagtctgtactacctgtttagttcgttcaccctcaacctgccttggactgactgtggccatacatggaactcgcctaattgcacagatcctaagctactcaacggctcagttctgggcaaccataccaagtacagtaagtataaattcactcccgccgccgaattttacgaacggggggtcctgcacctgcacgagagctccggtattcatgacataggattaccccagtggcaactgttgctgtgcttaatggtggtagtaatagtcctgtactttagtttatggaagggagtcaagaccagcggtaaagtggtctggattaccgcaactttaccttatttcgtcctgttcgtgctgctggtccacggtgtgacgcttcctggggcgtctaatggcatcaatgcgtacctgcacattgacttttatcgcctgaaagaggcaactgtctggattgacgcagccacacagatcttcttctccctaggagccggtttcggcgttttgatcgcattcgccagttataacaagttcgacaacaactgttatagggacgcactgcttacgtcatcaataaattgcataacaagcttcgtgtctggcttcgccatctttagtattctgggttacatggcccacgagcacaaggttaatatcgaggacgtggctaccgagggtgccggactggtcttcatcctctatccagaagctattagtacactctcaggttctactttctgggctgtcgtgttttttgtcatgctcctggcactgggtctggatagtagcatgggagggatggaggcggtgatcactggcctcgcagatgatttccaggtacttaagcggcatcgaaaactctttaccttcggcgtcactttttcaacttttttgctagccctattttgcataacaaagggcggcatctacgtccttactctcctggacaccttcgccgccgggaccagcattcttttcgccgtgctcatggaagccattggcgtgtcgtggttctatggcgttgatcggtttagcaatgacatccagcagatgatgggcttccgacctggcctgtattggagactgtgttggaagttcgtgtctcccgctttcctcctattcgtggtcgtggtgtctataattaattttaaaccactgacctatgacgattacatattcccaccttgggctaattgggtggggtgggggatagcacttagctcaatggtgctggtgccaatttacgttatttacaagtttctcagcacccagggatctctgtgggagagactggcctacggcattactcccgagaatgagcatcacctcgttgcccagagggacatcagacagttccagctccaacattggctggctatttag

SEQ ID NO: 68059 - DNA, 1854 bp, Artificial Sequence
  derived and/or modified sequence
atgctgctggcccggatgaacccccaggtgcagcccgagaacaacggtgcagatacgggtcctgaacagccactccgggctcgcaaaacagctgaactgctggtcgtcaaagagaggaatggggtacagtgcctgctcgcgccaagggacggtgacgcccagccccgagagacttggggcaagaaaatcgactttctgctgagcgtcgtggggtttgcggtggacttagctaatgtctggcgctttccctacctgtgttacaagaacggcggcggtgcgtttttaataccttatacgctgttcctaataatcgccggcatgcccctgttttatatggaactggctctgggtcagtataaccgcgagggggcagcaaccgtatggaagatttgccccttctttaagggtgttggctacgccgttatactcatcgctctctatgtcggattttactataacgtcatcattgcttggtctctttactacttgttctcctcatttactctgaacttgccgtggaccgattgcggtcacacgtggaactcaccaaactgcactgaccctaagctgttgaatgggtccgtgctgggcaatcatactaagtattctaagtataagtttactcccgccgccgagttttacgagcgaggcgtgctgcacctccatgaaagttccggaattcatgatatcggactgcctcagtggcagttgctgctgtgtctgatggtggttgtgatagtgctttattttagtctgtggaaaggcgttaaaacttcaggcaaggtggtttggattaccgccacactcccttacttcgtcctgtttgtgttgttggttcacggtgttactctgccaggggcttcaaacggaatcaacgcctatctgcatattgacttctaccggctcaaggaagcaacagtttggatagacgcagcaacacagatttttttttccctgggagctggttttggcgtgctgattgccttcgcgtcatataacaagttcgataataattgttatagagacgcgctcctgacaagctccattaactgtattacctcgtttgtgtccggtttcgcgatcttcagcattctcggctacatggctcacgagcataaagtcaatatcgaggatgtagctaccgagggggcgggattggtctttatactgtatccagaggctatcagcacactgtcagggagcacattctgggcggtggtgttctttgtgatgctgttggctttgggactggactccagcatgggaggaatggaggccgttataacaggcctggccgatgatttccaggttttgaaacgccaccgcaagctgtttacgttcggcgtgacattctccacatttctgctcgccctgttctgcatcacaaagggcgggatctatgtgctgaccttgcttgacacattcgcagcgggtacatcgatccttttcgccgtgttgatggaggccatcggcgtgtcttggttttacggtgtagaccgattctccaacgatatccagcaaatgatgggttttcgccccgggttgtactggcggctatgctggaagtttgtctctcctgcatttctgttgtttgtcgtggtcgtctctattatcaatttcaagccactgacatatgatgattatatcttccccccttgggccaattgggtggggtggggaattgccctgagcagcatggtgctggttcccatttatgtcatctataaattcctcagcacccagggcagcttgtgggaaaggcttgcgtacgggatcactccggagaacgagcatcacttagttgctcagcgcgatatcagacagtttcaactgcagcactggttggcaatatag

SEQ ID NO: 68060 - DNA, 1854 bp, Artificial Sequence
  derived and/or modified sequence
atgctactggccaggatgaatccccaggtccagccggaaaacaacggtgccgacaccggacccgaacagccgttgagggctcgaaagacagccgagctgctggtcgtgaaggagcgaaacggagtgcaatgcctcctcgctccacgcgatggagacgcacagcctagggagacctgggggaaaaagattgacttcctcttaagcgtggtggggttcgcagtggacctggccaatgtgtggagattcccttacctgtgttacaagaatggaggcggagcctttcttataccctacacactgttcctgatcatagccggaatgcccttgttctacatggaattggcgctaggccaatacaatcgggagggcgcagcgaccgtttggaagatttgcccattcttcaagggagtcgggtacgcagtgatccttattgctctctacgttggattctattacaatgttattatcgcatggtcgctttattatttgttcagtagcttcaccctgaatctgccgtggactgactgcggccacacttggaactcccctaattgcaccgatcccaaactcttaaacgggagtgtacttggtaaccataccaaatatagtaaatataagtttactcctgccgcagagttttacgaacgaggagtgctgcatctccacgagtcatctgggatccacgatattggactgccacagtggcagctgctcttatgtcttatggttgtggtcattgtgttatatttttctttgtggaagggcgttaaaacaagtggcaaagttgtgtggataaccgccacacttccctactttgtgttgtttgtccttctggtgcacggcgttacattgcccggagcgtctaatggcattaacgcatacctgcacatcgacttctaccgactcaaggaggctacagtgtggattgacgccgcaacccagatctttttctcacttggcgctggattcggcgtccttattgcttttgccagttacaacaagtttgacaataattgctatcgggatgcactgctcactagctcaataaactgtattactagcttcgtgagcggctttgcaatctttagcatcctgggttatatggcccacgagcataaggttaatattgaggatgtggcgacagaaggcgcaggcctcgtcttcattctttatcccgaggctatttccacactgagtggctccaccttctgggcagtggtcttcttcgtgatgctccttgcactcggtctggactccagcatgggaggaatggaggcggtcattacagggctggccgacgacttccaagtgttaaagagacatcggaaactgtttacttttggtgtgaccttttctacatttctgctggccctgttctgcatcaccaagggaggcatctacgtgctcactctgttggataccttcgcagctggtacctcaattctgttcgctgtgctgatggaggcaattggcgtaagctggttctatggcgtggacagatttagcaatgatatccagcagatgatgggatttagacctggactgtactggcggctctgttggaaattcgtgtcccctgcgtttctcctgttcgtagtggtggtttctatcatcaacttcaagccactgacatatgacgactatatcttcccaccatgggctaattgggtggggtggggtattgccctcagcagcatggtgctggtgcctatctatgtgatctacaagtttttaagcacgcaggggtctctgtgggagcggcttgcttacggtattacccctgagaacgagcaccatctcgtggcccagcgggatatccgccagttccagctgcagcactggctggcaatctag

SEQ ID NO: 68061 - DNA, 1854 bp, Artificial Sequence
  derived and/or modified sequence
atgctcttagctcgcatgaatccccaggtgcaacctgagaataacggtgctgatactggaccagagcagcctctgcgagcacggaaaaccgccgaactgctggtcgtgaaagaaagaaacggagttcagtgcctgctggccccaagagatggcgacgcccagcccagggaaacttggggcaaaaaaattgactttttattgtcagtggtgggctttgccgtggacctcgccaacgtatggaggttcccctacctgtgttataagaatggtggcggtgccttcctgattccatacaccctgtttttaatcattgcaggaatgcctctgttctatatggaattggcactgggtcaatacaaccgggaaggcgctgccactgtctggaagatttgcccttttttcaagggggttggatatgctgtgatccttatagccctatatgtcggattttattacaacgtaatcatagcatggagtttatactacctgttttcatcatttacattaaatctcccttggaccgattgcggtcatacatggaattctccaaactgtacagatcccaaactgttaaacggcagtgttctcggaaatcatacaaagtactcaaaatataagttcacacccgcagcagagttctatgagcgcggagtgctccatctacacgagagcagtggaattcacgatattggtctgcctcagtggcagctactcttgtgcctcatggtggttgtgatcgtgctgtacttctctctgtggaaaggagtaaaaacctcaggaaaagtggtgtggataactgcgaccctgccctatttcgttctgtttgttctcctggtgcatggtgtgacgcttcccggagcatcaaatggaattaatgcttatcttcacatcgacttttatcgtttgaaggaggcgactgtgtggattgacgccgctacacagatttttttttctttaggtgccggattcggcgtactcatcgcctttgcttcctataacaagttcgataataattgttatcgcgacgcacttctcacaagcagcattaactgtattaccagcttcgtttctggttttgcaatcttctcaattctaggctacatggcccacgaacataaagttaacatagaggatgtggcaaccgaaggtgccggtctggtttttatcctctatcctgaggcaatttccaccctgtctggcagtacattctgggcagtggttttctttgtcatgttactcgcactcggactcgacagttccatgggcggtatggaggctgttataaccgggctggctgatgactttcaggtgcttaagcggcatcggaaactctttacgttcggggtgacgttctctacatttttactggccctcttttgtatcaccaagggcggaatttatgtgctcacactgctggatacattcgcagccggaacgtcaattctcttcgccgtgttaatggaagcaattggagtcagctggttctatggcgtcgatcggttcagcaatgacatacaacaaatgatgggatttcgacctgggctctactggaggctgtgctggaagttcgtgagtccagcattcttgctgttcgtggtagtcgtcagtataattaactttaaacccctgacctacgacgattacatcttccccccatgggccaattgggtgggatggggaattgcgctctctagcatggtgctggtgccgatttatgtgatttacaaatttctctctacccaggggtcactctgggaacgtctggcatatgggattactccagagaatgaacaccacttggtagctcagagggatatacgccaatttcaattgcagcactggctagccatctag

SEQ ID NO: 68062 - DNA, 3551 bp, Artificial Sequence
  derived and/or modified sequence
gtcagaagtctccaactcttgagttccggcgtgccccaacctctgtttccaaatttttccagcggacgcgcgcccttttctgggaaccctgcgtccgctcagcgcgcgctcatcccagtgtctaaggcgctcccgggtggtcttgggagttgcaagtagggaggaacggccgggtaaccacctcttttccctttatccaagcagagcctcggcgtgcccccaggaccggtaaagttcctctcgccagccgcatccatgcttctggcgcggatgaacccgcaggtgcagcccgagaacaacggggcggacacgggtccagagcagccccttcgggcgcgcaaaactgcggagctgctggtggtgaaggagcgcaacggcgtccagtgcctgctggcgccccgcgacggcgacgcgcagccccgggagacctggggcaagaagatcgacttcctgctgtccgtagtcggcttcgcagtggacctggccaacgtgtggcgcttcccctacctctgctacaagaacggcggcggtgccttcttgatcccgtacacactgttccttatcatcgcggggatgcccctgttctacatggagctggctctgggacagtacaaccgggagggggctgccaccgtttggaaaatctgcccattcttcaaaggcgttggctatgctgtcatcctgatcgccctgtacgttggcttctactacaacgtcatcatcgcctggtcactctactacctcttctcctccttcaccctcaacctgccctggaccgactgtggccacacctggaacagccccaactgtaccgaccccaagctcctcaatggctccgtgcttggcaaccacaccaagtactccaagtacaagttcacgccggcagccgagttttatgagcgtggtgtcctgcaccttcacgagagcagcgggattcatgacatcggcctgccccagtggcagctcttgctctgtctgatggtcgtcgtcatcgtcttgtattttagcctctggaaaggggtgaagacatcaggaaaggtggtgtggatcacagccacgctgccttacttcgtgctgttcgtgctcctggtccatggcgtcacgctgcccggagcctccaatggcatcaatgcctacctgcacatcgacttctaccgcttgaaagaggccacggtatggattgatgccgcaactcagatatttttttccttgggggctggatttggagtattgattgcatttgccagttacaacaaatttgacaacaactgttacagggatgccctgctgaccagcagcatcaactgtatcaccagcttcgtctctgggttcgccatcttctccatccttggttacatggcccatgaacacaaggtcaacattgaggatgtggccacagaaggagctggcctagtgttcatcctgtatccagaggccatttctaccctgtctggatctacattctgggctgttgtgtttttcgtcatgctcctggcgctgggccttgacagctcaatgggaggcatggaggctgtcatcacgggcctggcagatgacttccaggtcctgaagcgacaccggaaactcttcacatttggcgtcaccttcagcactttccttctcgccctgttctgcataaccaagggtggaatttacgtcttgaccctcctggacacctttgctgcgggcacctccatcctttttgctgtcctcatggaagccatcggagtttcctggttttatggagtggacaggttcagcaacgacatccagcagatgatggggttcaggccgggtctatactggagactgtgctggaagttcgtcagtcctgccttcctcctgttcgtggttgtggtcagcatcatcaacttcaagccactcacctacgacgactacatcttcccgccctgggccaactgggtggggtggggcatcgccctgtcctccatggtcctggtgcccatctacgtcatctataagttcctcagcacgcagggctctctttgggagagactggcctatggcatcacgccagagaacgagcaccacctggtggctcagagggacatcagacagttccagttgcaacactggctggccatctgagcctgcctggaggagaaggaggaacccccatgccaatgtccaggtcacaggcatccgctgcgctcccacctcggacaccatcttgggattcctcccctggaagttgtcctttctgatcctctcttcttttcccatttacaaatgatttcgtgactgtagtttttgttcaccttctgtgcatctggcctgggggctgttagctcagaggagaggagcaaacaggaaaatgacttctgttctgtccccgctgttttgggggaagtctctcccactttgggatcctgctgaagctaggttcatgaggtcggaaatccccaccacatttgcctagactttgggcacaggagttcttagtccaccaaatcagagagaggatgggcttttgatcagatacccctcccaaaaaaaaaaaaaactaaaactaaagcaaaaatcaaacaaaatctggctgagtttagtggggtggttggggaaggtacatagaccctcctcttgcccaccctagacagccctctcatgtctgaacctcagcctgggagttagatttatttgtctctaaaatgaagtcagtggatagatgctttgagggattttgagtagaaacattcatagttaattttcactctggccaatctgagtttgatgtgtgtgttctggaacattcctccagcttttggtggtcagatggcccagagatatgggggacaggaggaagagggtaaatgaaccacagtgagcaggttctaggaggtacctgcatcagacaagctggtggaggccacgtggcaagccacatctactgaggcctcatgctgctcttgctctgtaagacacggagcccagaaacccatctgcacttcctgagacctgcctggggaaacgggggcagggaccaagtgaggcctcatgtgtgtcttcaccgtgctgtcctcacaaggccaggtgggtgcccaaagggagcctgacaggctgttgtgttaatttattgttcttgcacacctgcacagcctccctctggggatcccacctggagtggaccaggggtcttgagaaatggagagttggctgcaaaaactctcatgcactagatgtggcaccttggagggcagggtgagacaagcagcccagaaatactctctcaagtggaggggagaattttgagagtggatggaacagtttggtggtttcagagaatttctaggtttctacttggatctacttctgatacaaacttgcacttggtgccctctggtggtgtttagttttagttccgtaagagaaatgattcctagtttgctaaattggtggcatctttgggaggggtttctgtttatggttagagtctcttacacccttgttggagggattcttattctgactgtgggagctcctgttgcgggatcttgggaaaaaataaagaagccgctgcattcgcacgtcaa

SEQ ID NO: 68063 - DNA, 3887 bp, Artificial Sequence
  derived and/or modified sequence
agagctggtgctgcaccggtcgctgcttccccagtccttttttggcctcctttctgacgcgacgcagaccccagttctggagagtctgtcactcgctccccgtggtgggagatcagaggcctggtgtccttgggagcggcgagcggtgctcggcgcaggatagaaagggagtgcgcgcccgagtcccccagatccctgggaacccgcgccaccctcccgcccctgcccatccccggccgcgctgtcagtctccattagcgctaacaggctccagacggagcgggccgggcgctgggttaatgcaatcggcgcgttacctggggcgcaggctacattaccagcccggcccccgccaggcacggccagaaccagtcagcccgcgccctgccggccgccccgcgcctccagctcttccccggccccgcccgaacgccacacggcggagcccagccccagcccgcgccctagagcctgccaaggcgccgccggtcgggggccggcagggcgcaaggcaccagggatcccctcgccgccggacacagcctcggcgtgcccccaggaccggtaaagttcctctcgccagccgcatccatgcttctggcgcggatgaacccgcaggtgcagcccgagaacaacggggcggacacgggtccagagcagccccttcgggcgcgcaaaactgcggagctgctggtggtgaaggagcgcaacggcgtccagtgcctgctggcgccccgcgacggcgacgcgcagccccgggagacctggggcaagaagatcgacttcctgctgtccgtagtcggcttcgcagtggacctggccaacgtgtggcgcttcccctacctctgctacaagaacggcggcggtgccttcttgatcccgtacacactgttccttatcatcgcggggatgcccctgttctacatggagctggctctgggacagtacaaccgggagggggctgccaccgtttggaaaatctgcccattcttcaaaggcgttggctatgctgtcatcctgatcgccctgtacgttggcttctactacaacgtcatcatcgcctggtcactctactacctcttctcctccttcaccctcaacctgccctggaccgactgtggccacacctggaacagccccaactgtaccgaccccaagctcctcaatggctccgtgcttggcaaccacaccaagtactccaagtacaagttcacgccggcagccgagttttatgagcgtggtgtcctgcaccttcacgagagcagcgggattcatgacatcggcctgccccagtggcagctcttgctctgtctgatggtcgtcgtcatcgtcttgtattttagcctctggaaaggggtgaagacatcaggaaaggtggtgtggatcacagccacgctgccttacttcgtgctgttcgtgctcctggtccatggcgtcacgctgcccggagcctccaatggcatcaatgcctacctgcacatcgacttctaccgcttgaaagaggccacggtatggattgatgccgcaactcagatatttttttccttgggggctggatttggagtattgattgcatttgccagttacaacaaatttgacaacaactgttacagggatgccctgctgaccagcagcatcaactgtatcaccagcttcgtctctgggttcgccatcttctccatccttggttacatggcccatgaacacaaggtcaacattgaggatgtggccacagaaggagctggcctagtgttcatcctgtatccagaggccatttctaccctgtctggatctacattctgggctgttgtgtttttcgtcatgctcctggcgctgggccttgacagctcaatgggaggcatggaggctgtcatcacgggcctggcagatgacttccaggtcctgaagcgacaccggaaactcttcacatttggcgtcaccttcagcactttccttctcgccctgttctgcataaccaagggtggaatttacgtcttgaccctcctggacacctttgctgcgggcacctccatcctttttgctgtcctcatggaagccatcggagtttcctggttttatggagtggacaggttcagcaacgacatccagcagatgatggggttcaggccgggtctatactggagactgtgctggaagttcgtcagtcctgccttcctcctgttcgtggttgtggtcagcatcatcaacttcaagccactcacctacgacgactacatcttcccgccctgggccaactgggtggggtggggcatcgccctgtcctccatggtcctggtgcccatctacgtcatctataagttcctcagcacgcagggctctctttgggagagactggcctatggcatcacgccagagaacgagcaccacctggtggctcagagggacatcagacagttccagttgcaacactggctggccatctgagcctgcctggaggagaaggaggaacccccatgccaatgtccaggtcacaggcatccgctgcgctcccacctcggacaccatcttgggattcctcccctggaagttgtcctttctgatcctctcttcttttcccatttacaaatgatttcgtgactgtagtttttgttcaccttctgtgcatctggcctgggggctgttagctcagaggagaggagcaaacaggaaaatgacttctgttctgtccccgctgttttgggggaagtctctcccactttgggatcctgctgaagctaggttcatgaggtcggaaatccccaccacatttgcctagactttgggcacaggagttcttagtccaccaaatcagagagaggatgggcttttgatcagatacccctcccaaaaaaaaaaaaaactaaaactaaagcaaaaatcaaacaaaatctggctgagtttagtggggtggttggggaaggtacatagaccctcctcttgcccaccctagacagccctctcatgtctgaacctcagcctgggagttagatttatttgtctctaaaatgaagtcagtggatagatgctttgagggattttgagtagaaacattcatagttaattttcactctggccaatctgagtttgatgtgtgtgttctggaacattcctccagcttttggtggtcagatggcccagagatatgggggacaggaggaagagggtaaatgaaccacagtgagcaggttctaggaggtacctgcatcagacaagctggtggaggccacgtggcaagccacatctactgaggcctcatgctgctcttgctctgtaagacacggagcccagaaacccatctgcacttcctgagacctgcctggggaaacgggggcagggaccaagtgaggcctcatgtgtgtcttcaccgtgctgtcctcacaaggccaggtgggtgcccaaagggagcctgacaggctgttgtgttaatttattgttcttgcacacctgcacagcctccctctggggatcccacctggagtggaccaggggtcttgagaaatggagagttggctgcaaaaactctcatgcactagatgtggcaccttggagggcagggtgagacaagcagcccagaaatactctctcaagtggaggggagaattttgagagtggatggaacagtttggtggtttcagagaatttctaggtttctacttggatctacttctgatacaaacttgcacttggtgccctctggtggtgtttagttttagttccgtaagagaaatgattcctagtttgctaaattggtggcatctttgggaggggtttctgtttatggttagagtctcttacacccttgttggagggattcttattctgactgtgggagctcctgttgcgggatcttgggaaaaaataaagaagccgctgcattcgcacgtcaa

SEQ ID NO: 68064 - protein, 512 aa, Artificial Sequence
  derived and/or modified sequence
MGVQWWSHTQGEVAVGLGLGDSYLTPCPCPGVGYAVILIALYVGFYYNVIIAWSLYYLFSSFTLNLPWTDCGHTWNSPNCTDPKLLNGSVLGNHTKYSKYKFTPAAEFYERGVLHLHESSGIHDIGLPQWQLLLCLMVVVIVLYFSLWKGVKTSGKVVWITATLPYFVLFVLLVHGVTLPGASNGINAYLHIDFYRLKEATVWIDAATQIFFSLGAGFGVLIAFASYNKFDNNCYRDALLTSSINCITSFVSGFAIFSILGYMAHEHKVNIEDVATEGAGLVFILYPEAISTLSGSTFWAVVFFVMLLALGLDSSMGGMEAVITGLADDFQVLKRHRKLFTFGVTFSTFLLALFCITKGGIYVLTLLDTFAAGTSILFAVLMEAIGVSWFYGVDRFSNDIQQMMGFRPGLYWRLCWKFVSPAFLLFVVVVSIINFKPLTYDDYIFPPWANWVGWGIALSSMVLVPIYVIYKFLSTQGSLWERLAYGITPENEHHLVAQRDIRQFQLQHWLAI

SEQ ID NO: 68065 - DNA, 1539 bp, Artificial Sequence
  derived and/or modified sequence
atgggcgtgcagtggtggagccacacccagggcgaggtggccgtgggcctgggcctgggcgacagctacctgaccccctgcccctgccccggcgtgggctacgccgtgatcctgatcgccctgtacgtgggcttctactacaacgtgatcatcgcctggagcctgtactacctgttcagcagcttcaccctgaacctgccctggaccgactgcggccacacctggaacagccccaactgcaccgaccccaagctgctgaacggcagcgtgctgggcaaccacaccaagtacagcaagtacaagttcacccccgccgccgagttctacgagagaggcgtgctgcacctgcacgagagcagcggcatccacgacatcggcctgccccagtggcagctgctgctgtgcctgatggtggtggtgatcgtgctgtacttcagcctgtggaagggcgtgaagaccagcggcaaggtggtgtggatcaccgccaccctgccctacttcgtgctgttcgtgctgctggtgcacggcgtgaccctgcccggcgccagcaacggcatcaacgcctacctgcacatcgacttctacagactgaaggaggccaccgtgtggatcgacgccgccacccagatcttcttcagcctgggcgccggcttcggcgtgctgatcgccttcgccagctacaacaagttcgacaacaactgctacagagacgccctgctgaccagcagcatcaactgcatcaccagcttcgtgagcggcttcgccatcttcagcatcctgggctacatggcccacgagcacaaggtgaacatcgaggacgtggccaccgagggcgccggcctggtgttcatcctgtaccccgaggccatcagcaccctgagcggcagcaccttctgggccgtggtgttcttcgtgatgctgctggccctgggcctggacagcagcatgggcggcatggaggccgtgatcaccggcctggccgacgacttccaggtgctgaagagacacagaaagctgttcaccttcggcgtgaccttcagcaccttcctgctggccctgttctgcatcaccaagggcggcatctacgtgctgaccctgctggacaccttcgccgccggcaccagcatcctgttcgccgtgctgatggaggccatcggcgtgagctggttctacggcgtggacagattcagcaacgacatccagcagatgatgggcttcagacccggcctgtactggagactgtgctggaagttcgtgagccccgccttcctgctgttcgtggtggtggtgagcatcatcaacttcaagcccctgacctacgacgactacatcttccccccctgggccaactgggtgggctggggcatcgccctgagcagcatggtgctggtgcccatctacgtgatctacaagttcctgagcacccagggcagcctgtgggagagactggcctacggcatcacccccgagaacgagcaccacctggtggcccagagagacatcagacagttccagctgcagcactggctggccatctag

SEQ ID NO: 68066 - DNA, 1539 bp, Artificial Sequence
  derived and/or modified sequence
atgggagttcaatggtggtcacacacccagggcgaggtcgccgtgggacttggtctgggcgactcttatctaactccatgcccttgccccggggtcggatacgctgttatcctgatcgctctctatgtggggttttactataatgtgatcattgcttggagtctctactacttgttctcttcttttacactgaacctcccttggacagactgcggtcacacttggaactcacctaattgcaccgaccccaaattgttgaatggctcagtgctcggcaatcatactaaatacagcaagtataagttcacacccgccgctgagttctatgagagaggtgtccttcacctccacgagtccagtggtatacatgacatcggtcttcctcagtggcagctcctgctgtgccttatggtagtcgtgatcgttctctactttagtctgtggaaaggcgtgaagacatccggcaaggttgtttggattacggctacattgccctacttcgttctcttcgtgctgcttgtgcacggcgtcacgcttcctggagcttccaacggcatcaatgcatatctgcacatcgatttctacaggctgaaggaggcgacagtatggatagacgcagccacacagatattctttagtctcggggccggctttggagtgctgatcgcttttgcatcgtacaataaattcgacaacaactgttaccgagatgccctcctgacgtcatccatcaactgtattacatcgtttgtatcaggattcgctattttttccattctgggatatatggcgcacgagcacaaggtcaacatcgaagacgtagctacagaaggcgccgggttggtttttatcctctacccagaagccatttctactttgagtggttcgacattttgggccgtcgtgttttttgtcatgctgttagcgttgggactggactcttcaatgggtggcatggaggccgtgatcaccggtttagcggatgacttccaggtgttaaaaaggcatcgcaagctttttacgtttggcgtgactttcagtacgtttctgcttgccctcttttgtattactaagggaggaatttacgtgctcacactactggacacatttgctgccggaaccagcatcctcttcgctgtgctcatggaggccatcggcgtctcttggttctacggtgtggaccgattctccaatgacattcagcaaatgatgggcttcaggcccggcttgtactggcgcctatgctggaaatttgtgagccctgcattcctgctgttcgtggttgttgtatctattatcaacttcaaacccctaacttacgacgattacatcttccccccatgggctaactgggtgggctggggcatcgcgctcagcagcatggtgctggtcccgatctatgttatctataagtttctgagcacccaggggtctttatgggaaagactggcatatggcattactccagagaatgagcaccatctcgttgctcagcgggatatcagacagttccagctgcagcactggctggccatctag

SEQ ID NO: 68067 - DNA, 1539 bp, Artificial Sequence
  derived and/or modified sequence
atgggcgtgcagtggtggagccacacccagggcgaggtggccgtgggcctgggcctgggggacagctacctgaccccctgcccctgccctggggtgggctatgctgtgatcctgattgccctgtatgtgggcttctactacaacgtcatcatcgcctggagcctgtactacctgttcagcagcttcaccctgaacctgccctggacagactgtggccacacctggaacagccccaactgcacagaccccaagctgctgaatggatctgtgctgggcaaccacaccaagtacagcaagtacaagttcaccccagctgctgagttctatgagcggggcgtgctgcacctgcacgagagcagcggcatccatgacatcggcctgccccagtggcagctgctgctgtgcctgatggtggtggtgattgtgctgtacttcagcctgtggaagggcgtgaagaccagcggcaaggtggtgtggatcacagccaccctgccctactttgtgctgtttgtgctgctggtgcatggagtgaccctgcccggggccagcaatggcatcaatgcctacctgcacatcgacttctaccgcctgaaggaggccaccgtgtggattgatgctgccacccagatcttcttcagcctgggcgccggcttcggcgtgctgattgcctttgccagctacaacaagtttgacaacaactgctacagagatgccctgctgaccagcagcatcaactgcatcaccagctttgtgtctggctttgccatcttcagcatcctgggctacatggcccacgagcacaaggtgaacattgaagatgtggccacagagggcgccggcctggtgttcatcctgtacccagaggccatcagcaccctgagcggcagcaccttctgggccgtggtgttctttgtgatgctgctggccctgggcctggacagctccatgggcggcatggaggccgtcatcaccggcctggctgatgacttccaggtgctgaagaggcacaggaagctgttcaccttcggcgtgaccttcagcaccttcctgctggccctcttctgcatcaccaagggcggcatctacgtgctgaccctgctggacacctttgctgctggcaccagcatcctgtttgctgtgctgatggaggccatcggcgtgtcctggttctatggagtggaccgcttcagcaatgacatccagcagatgatgggcttccggcccggcctgtactggaggctgtgctggaagtttgtgtccccagccttcctgctgtttgtggtggtggtgtccatcatcaacttcaagcccctgacctatgatgactacatcttccccccctgggccaactgggtgggctggggcatcgccctgagctccatggtgctggtgcccatctacgtgatctacaagttcctgagcacccagggcagcctgtgggagcggctggcctacggcatcaccccagaaaatgagcaccacctggtggcccagagggacatccggcagttccagctgcagcactggctggccatctag

SEQ ID NO: 68068 - DNA, 1539 bp, Artificial Sequence
  derived and/or modified sequence
atgggcgtgcagtggtggagccacacccagggcgaggtggccgtgggcctggggttgggtgactcttacctgactccttgcccctgccctggggtcggctatgccgtgattttgatagccctgtatgtgggtttctattacaatgtcattattgcatggtccctgtattaccttttcagcagcttcacactgaatctcccatggaccgactgtggacacacatggaatagccctaactgcactgaccccaagctgttgaacgggagtgtcctgggaaatcacacaaaatattccaaatacaaatttactcccgctgcagaattttatgaaagaggggtgcttcacttgcatgaatcaagcggtatccacgatatcggcctcccccagtggcaactcctgctgtgtttaatggtcgtggtcattgtgctgtatttcagcctctggaagggcgtgaaaacgtccgggaaagtggtgtggattactgccaccctcccttacttcgttctgttcgtgcttctggtgcacggtgtgaccttgccaggcgctagtaacggtatcaacgcgtacttacacatcgatttttaccgcctgaaagaggcaacggtgtggatcgatgccgcaacgcagattttctttagcctcggggcagggttcggggtgctaatagcctttgcatcttataacaaattcgacaacaattgctatagggacgcacttctgacatccagcattaattgtattacatcgtttgtatccggattcgctattttctctattcttggctacatggcgcatgagcacaaggtcaacatagaagacgtagccaccgaaggagcaggtctggtgtttatcctgtatccagaagccattagcacgctttccggaagtacattttgggctgtggttttcttcgtgatgctgctggcactgggtctcgactctagcatgggtggcatggaagcggttattaccggccttgccgacgacttccaggtattgaaaagacatcggaagcttttcacctttggagtaacgttcagcacctttctgctcgccctcttttgcattactaaagggggaatctacgtgctgacgctgttggatacgttcgccgctggtacgtcgatcctgtttgcggtccttatggaggccataggcgtgagttggttctacggtgtggatcgctttagcaacgacattcagcagatgatgggcttcaggccgggtctttattggcgcctatgctggaagttcgtgagccccgcctttcttttgttcgtcgtggtggtgtctattatcaacttcaagccactgacatacgatgactacattttccccccgtgggccaattgggtcgggtggggcatagccctgtcttcgatggtactcgtgccaatctacgtgatttataagtttctctctacacaaggaagcttgtgggagcgacttgcttatggaatcaccccggagaatgagcatcatctggtagcccagagagatatccggcagttccagctgcagcactggctggccatctag

SEQ ID NO: 68069 - DNA, 1539 bp, Artificial Sequence
  derived and/or modified sequence
atgggagttcagtggtggagccacacccagggcgaggtggccgtcggattaggtcttggggactcctacctcacaccatgtccatgccctggcgtggggtacgctgtaatcttaatcgcgctgtacgttggtttttactacaacgtgatcatcgcctggagtttatactacctgttctcttcctttacattgaacctgccttggaccgactgtggccacacatggaatagccccaattgcaccgatcccaagctgttaaatggctctgttctgggcaaccacactaagtattccaaatacaaattcacacccgctgcggagttttacgagagaggcgttctgcatctccacgagtcaagcggaatacacgatattggactccctcaatggcagctcctgttgtgcctgatggtggtggttattgtgttatacttttccctctggaagggcgtgaaaacctcgggcaaagtggtgtggatcacagccaccttgccttatttcgtgttgtttgtgctcttggtgcatggcgtcacactgccaggggctagcaacggaatcaatgcttacttgcacatagacttttatcggctcaaggaagctactgtgtggatagacgctgctacccagatcttcttttcattgggggcaggatttggtgttctgatcgctttcgctagctataacaagttcgataataactgctaccgggatgcccttttgactagcagtataaactgcataacaagctttgtgtccggatttgcaatattctctattctgggatatatggcacacgaacataaggtcaatatcgaagacgttgcaaccgaaggcgctggactggtgtttatcctataccccgaggctattagcacattatccggttccactttttgggcagtcgtgttttttgtcatgctgttggcgttgggtctggactcatcaatggggggaatggaagcagtgattacgggcctagccgatgatttccaggtgttaaagaggcataggaagctgttcacctttggcgtaacttttagcactttcttacttgcactgttttgtatcaccaaggggggaatttatgtccttaccctgttggataccttcgctgcgggaacaagtattctcttcgccgttctgatggaggccataggcgttagctggttctacggcgtagatcgcttctccaacgacatccagcaaatgatggggtttaggccaggcctgtattggcgcctgtgttggaagtttgtgtcacccgcatttctactctttgtggtcgtggtctcaatcattaactttaagcctcttacgtatgacgactacatcttccccccatgggctaattgggtgggctggggaatcgccctgtcttcgatggtcctggtgcctatttacgtgatttataagtttctaagtactcagggttccctctgggaaaggctggcatacggtattactccagagaatgagcaccacctggtggcccaacgtgacattaggcagttccaactccagcactggttggctatttag

SEQ ID NO: 68070 - DNA, 3160 bp, Artificial Sequence
  derived and/or modified sequence
aggttgtgtgctccttatgagaatctaactaacgcctgatgacctgaggtggaacggtttcatcttgaaactacccccaccccaaaatctgtggaaaaattgtcttccatgcgacaggtcactggtgctgaaaaggttggggaccgctgttctgcaggaaacgagagacagagggaatgggagtgcagtggtggagccacacccaaggagaggtggctgtggggctgggcctgggagactcctaccttaccccctgtccctgcccaggcgttggctatgctgtcatcctgatcgccctgtacgttggcttctactacaacgtcatcatcgcctggtcactctactacctcttctcctccttcaccctcaacctgccctggaccgactgtggccacacctggaacagccccaactgtaccgaccccaagctcctcaatggctccgtgcttggcaaccacaccaagtactccaagtacaagttcacgccggcagccgagttttatgagcgtggtgtcctgcaccttcacgagagcagcgggattcatgacatcggcctgccccagtggcagctcttgctctgtctgatggtcgtcgtcatcgtcttgtattttagcctctggaaaggggtgaagacatcaggaaaggtggtgtggatcacagccacgctgccttacttcgtgctgttcgtgctcctggtccatggcgtcacgctgcccggagcctccaatggcatcaatgcctacctgcacatcgacttctaccgcttgaaagaggccacggtatggattgatgccgcaactcagatatttttttccttgggggctggatttggagtattgattgcatttgccagttacaacaaatttgacaacaactgttacagggatgccctgctgaccagcagcatcaactgtatcaccagcttcgtctctgggttcgccatcttctccatccttggttacatggcccatgaacacaaggtcaacattgaggatgtggccacagaaggagctggcctagtgttcatcctgtatccagaggccatttctaccctgtctggatctacattctgggctgttgtgtttttcgtcatgctcctggcgctgggccttgacagctcaatgggaggcatggaggctgtcatcacgggcctggcagatgacttccaggtcctgaagcgacaccggaaactcttcacatttggcgtcaccttcagcactttccttctcgccctgttctgcataaccaagggtggaatttacgtcttgaccctcctggacacctttgctgcgggcacctccatcctttttgctgtcctcatggaagccatcggagtttcctggttttatggagtggacaggttcagcaacgacatccagcagatgatggggttcaggccgggtctatactggagactgtgctggaagttcgtcagtcctgccttcctcctgttcgtggttgtggtcagcatcatcaacttcaagccactcacctacgacgactacatcttcccgccctgggccaactgggtggggtggggcatcgccctgtcctccatggtcctggtgcccatctacgtcatctataagttcctcagcacgcagggctctctttgggagagactggcctatggcatcacgccagagaacgagcaccacctggtggctcagagggacatcagacagttccagttgcaacactggctggccatctgagcctgcctggaggagaaggaggaacccccatgccaatgtccaggtcacaggcatccgctgcgctcccacctcggacaccatcttgggattcctcccctggaagttgtcctttctgatcctctcttcttttcccatttacaaatgatttcgtgactgtagtttttgttcaccttctgtgcatctggcctgggggctgttagctcagaggagaggagcaaacaggaaaatgacttctgttctgtccccgctgttttgggggaagtctctcccactttgggatcctgctgaagctaggttcatgaggtcggaaatccccaccacatttgcctagactttgggcacaggagttcttagtccaccaaatcagagagaggatgggcttttgatcagatacccctcccaaaaaaaaaaaaaactaaaactaaagcaaaaatcaaacaaaatctggctgagtttagtggggtggttggggaaggtacatagaccctcctcttgcccaccctagacagccctctcatgtctgaacctcagcctgggagttagatttatttgtctctaaaatgaagtcagtggatagatgctttgagggattttgagtagaaacattcatagttaattttcactctggccaatctgagtttgatgtgtgtgttctggaacattcctccagcttttggtggtcagatggcccagagatatgggggacaggaggaagagggtaaatgaaccacagtgagcaggttctaggaggtacctgcatcagacaagctggtggaggccacgtggcaagccacatctactgaggcctcatgctgctcttgctctgtaagacacggagcccagaaacccatctgcacttcctgagacctgcctggggaaacgggggcagggaccaagtgaggcctcatgtgtgtcttcaccgtgctgtcctcacaaggccaggtgggtgcccaaagggagcctgacaggctgttgtgttaatttattgttcttgcacacctgcacagcctccctctggggatcccacctggagtggaccaggggtcttgagaaatggagagttggctgcaaaaactctcatgcactagatgtggcaccttggagggcagggtgagacaagcagcccagaaatactctctcaagtggaggggagaattttgagagtggatggaacagtttggtggtttcagagaatttctaggtttctacttggatctacttctgatacaaacttgcacttggtgccctctggtggtgtttagttttagttccgtaagagaaatgattcctagtttgctaaattggtggcatctttgggaggggtttctgtttatggttagagtctcttacacccttgttggagggattcttattctgactgtgggagctcctgttgcgggatcttgggaaaaaataaagaagccgctgcattcgcacgtcaagaa

SEQ ID NO: 68071 - protein, 1134 aa, Artificial Sequence
  derived and/or modified sequence
MDGASAEQDGLQEDRSHSGPSSLPEAPLKPPGPLVPPDQQDKVQCAEVNRASTEGESPDGPGQGGLCQNGPTPPFPDPPSSLDPTTSPVGPDASPGVAGFHDNLRKSQGTSAEGSVRKEALQSLRLSLPMQETQLCSTDSPLPLEKEEQVRLQARKWLEEQLKQYRVKRQQERSSQPATKTRLFSTLDPELMLNPENLPRASTLAMTKEYSFLRTSVPRGPKVGSLGLPAHPREKKTSKSSKIRSLADYRTEDSNAGNSGGNVPAPDSTKGSLKQNRSSAASVVSEISLSPDTDDRLENTSLAGDSVSEVDGNDSDSSSYSSASTRGTYGILSKTVGTQDTPYMVNGQEIPADTLGQFPSIKDVLQAAAAEHQDQGQEVNGEVRSRRDSICSSVSLESSAAETQEEMLQVLKEKMRLEGQLEALSLEASQALKEKAELQAQLAALSTKLQAQVECSHSSQQRQDSLSSEVDTLKQSCWDLERAMTDLQNMLEAKNASLASSNNDLQVAEEQYQRLMAKVEDMQRSMLSKDNTVHDLRQQMTALQSQLQQVQLERTTLTSKLKASQAEISSLQSVRQWYQQQLALAQEARVRLQGEMAHIQVGQMTQAGLLEHLKLENVSLSQQLTETQHRSMKEKGRIAAQLQGIEADMLDQEAAFMQIQEAKTMVEEDLQRRLEEFEGERERLQRMADSAASLEQQLEQVKLTLLQRDQQLEALQQEHLDLMKQLTLTQEALQSREQSLDALQTHYDELQARLGELQGEAASREDTICLLQNEKIILEAALQAAKSGKEELDRGARRLEEGTEETSETLEKLREELAIKSGQVEHLQQETAALKKQMQKIKEQFLQQKVMVEAYRRDATSKDQLISELKATRKRLDSELKELRQELMQVHGEKRTAEAELSRLHREVAQVRQHMADLEGHLQSAQKERDEMETHLQSLQFDKEQMVAVTEANEALKKQIEELQQEARKAITEQKQKMRRLGSDLTSAQKEMKTKHKAYENAVGILSRRLQEALAAKEAADAELGQLRAQGGSSDSSLALHERIQALEAELQAVSHSKTLLEKELQEVIALTSQELEESREKVLELEDEVRPGHLLWRQRGAGHVSPGHAATRETRRTKLHRVPSVATFGVATF

SEQ ID NO: 68072 - DNA, 3405 bp, Artificial Sequence
  derived and/or modified sequence
atggacggcgcctctgccgagcaagacggtttacaagaggaccggtcgcactctgggccatcctctcttccagaggcacctctgaagccccccgggccactggttccaccagatcagcaggacaaagtccagtgtgcagaggtgaatcgtgcctcgactgaaggagaaagcccagacgggccaggacaggggggactctgtcagaacgggccgacgccaccttttcccgatcctccaagttcactggaccccactacatcaccagtgggacccgatgcgtcccctggcgtggcagggtttcacgacaacctgcgaaagagtcagggtaccagcgcagaagggtctgtgcgtaaggaggcccttcagtcgctcagattgtccctgcccatgcaggaaactcagctgtgctccacagatagccccctccccttagagaaggaggagcaagttcgcctgcaagctagaaagtggctggaagaacaattgaagcaataccgcgtgaagcggcagcaggagcgatcttctcagcccgccactaagacacggctcttttccacacttgatccagagctcatgctcaaccccgagaacctgccacgggcctccacactagctatgaccaaggagtattcattcctgcggacctccgtgccccggggacctaaagtgggtagtctggggttacccgcccatccgagagaaaagaaaacctccaagagcagcaagatccgtagcctcgccgattacaggaccgaagacagcaatgctggcaactctggagggaatgttcctgctcctgacagcaccaagggctctctgaagcagaacaggagcagcgccgccagcgtcgtatccgaaatatcgctatcccctgataccgatgacagactggaaaatactagcctggcaggcgattcagtcagcgaagttgatggtaatgactctgatagcagttcctacagctcagcatcaacgcgcgggacctatgggatcctttccaagaccgtagggacccaggataccccttacatggtcaatggccaagaaatacctgccgatacactgggacagtttccatccatcaaagacgttctccaggccgcagccgccgagcatcaggaccaaggtcaggaagtgaacggcgaagtgaggtccaggcgcgactccatctgctcatctgtttctctcgaaagtagtgcagcagaaacccaagaagagatgcttcaggtcctgaaagaaaagatgcgtttggagggccaactggaagctctgagtctggaggcttcccaagccctgaaagagaaagcggagctgcaagcacagctggctgccctgtccaccaaactccaggctcaggtcgagtgtagccatagttctcaacagaggcaagactcactgtccagcgaagttgacacgctgaaacagtcgtgctgggatctggagcgggctatgaccgatctccaaaacatgctcgaggctaaaaacgcgtcgctcgcatcctctaataacgacctccaagtcgccgaggagcagtatcagcggctgatggccaaggttgaagacatgcagcgcagcatgttgtcaaaggacaataccgtgcatgacctacggcagcagatgaccgcactgcaatctcagctccagcaggtgcagctggagaggactactttgacctcaaaattgaaggccagccaggcggaaatcagcagtctgcagagcgtccgtcaatggtatcaacagcagctggctctggctcaggaagccagagtccggctccagggcgagatggcccacatacaggtgggtcagatgactcaggcagggctgctggagcatctgaaactagagaatgtgagtctgtcccaacagcttaccgagacccaacacagatctatgaaagaaaagggccgcatagccgcacagctccaagggatcgaggccgacatgttggatcaggaggctgcattcatgcaaatccaggaagcgaaaaccatggtggaggaagacctacaacgacggctggaagagtttgaaggggaacgtgaaagactgcagaggatggccgatagtgccgcaagccttgaacagcagttggagcaagtcaaactgacactgctccagcgggatcagcaactggaggctctgcagcaggaacacttggatctcatgaagcagctcacactgacgcaggaagctctacagtcacgcgaacagtccctggacgccctgcagacacattatgatgaactgcaagctcgcttgggtgagctgcagggggaagcggcatcgcgggaagatacgatctgtctgctgcagaatgaaaaaattattctggaggcagcactgcaggctgctaagagcggaaaggaggaactggacagaggcgcaagaagacttgaggagggcaccgaagaaacatctgagacgctggaaaaactaagagaagagctggccatcaagagcgggcaggtggagcacttgcaacaggagacagccgcactcaagaagcagatgcaaaaaatcaaggagcaattcctacagcagaaagttatggtggaggcttatagacgggacgcaacatctaaggatcaattaatctcagagttgaaagccaccaggaagcggcttgactctgagctgaaggagctgaggcaagagctaatgcaggtccatggggaaaaacgcaccgcagaggctgaactctctcgccttcatcgggaggtggcacaagtacggcaacatatggcagacttggaaggccacctgcagtctgctcagaaggaacgagacgagatggagacccacctgcaaagcctccagttcgacaaagaacagatggttgctgtcactgaggccaatgaagcactgaagaaacagatcgaggagctccagcaggaggccaggaaggccataacagaacagaagcagaagatgcggagactgggtagtgacctgacctccgctcagaaggagatgaagacaaaacacaaagcatatgagaacgcagtgggaatcctgagtaggagactgcaggaagctttagctgctaaggaagctgcggacgcagaactgggtcagctccgggctcagggaggcagttcagacagtagcctggctctgcatgagcgaattcaggcgctggaggccgaactccaagctgttagtcacagtaagactttactcgaaaaggaacttcaggaagtgattgcactgactagccaggaacttgaggagtcccgggaaaaggtgttggagctagaagatgaggtccgccccggtcacttgctttggagacagcggggggccgggcacgtctcaccagggcatgccgccacaagggagactcgacggactaagctgcaccgggtgccatctgtcgctacctttggagtggctacgttttag

SEQ ID NO: 68073 - DNA, 3784 bp, Artificial Sequence
  derived and/or modified sequence
ccgggccgggcggcctccggggctgccagagcagcagggtatcatgatattagctggtttgacatcaagtcatttgtgagtcatcagatcttctcctgaaaatgggagacacagtagggcccctcccaggagctcttggctgttgctgatggcagaagccaagcttgtccaaggttcacttgtagcccctcagcgtcagctcagctggtgtcgtcctgaccatggacggcgcgtcggccgagcaagatggcctccaggaggacagatcccacagtggcccctcgtctctccccgaggccccactgaagcccccgggcccactggtgccacctgaccagcaggacaaagtccagtgtgccgaggtaaacagagcatccacggaaggggaaagcccggatggacctggccagggaggcctctgtcagaacgggccaacgccacccttcccagaccctccgtcgtctctcgatcccaccacaagcccagtgggccctgatgcctctccaggtgtggctggtttccatgacaacctaaggaagtctcagggaactagtgctgagggcagtgttagaaaagaagctttgcagtctctcagactcagtcttcctatgcaagaaacgcaactgtgctctacagattctcccctgcccctggagaaggaggagcaggtccgacttcaggctcggaagtggctggaagagcagctcaaacagtacagggtgaagcgccagcaggagaggtccagtcaacctgcaaccaaaacgagactttttagcacgcttgatcctgagctcatgttaaacccagaaaacttaccaagggccagtaccctggctatgacaaaagaatattccttcctgcgcaccagtgtccctcgggggcctaaggtgggcagcctggggcttccggcacatcctagggagaaaaaaacttccaaatcaagcaaaatccggtctctggccgattacagaactgaagattcaaatgcggggaattctgggggaaatgtcccggctcccgattctaccaagggttccctgaagcagaacagaagcagtgcggcgtccgttgtgtctgagatcagcctgtcccccgacactgacgaccgtctggagaacacctccctggctggagacagcgtgtctgaggtggatggaaatgacagcgacagctcatcgtacagcagcgcctccacccgagggacctatggcattctgtcgaagacagtgggcacgcaggacaccccctatatggtcaacggccaggagattcctgcggataccctgggccagttcccctccattaaggacgtcctccaggccgcagccgctgagcaccaagaccaggggcaggaggtcaacggggaggtgcggagtcggagagacagcatctgcagcagcgtgtccttggagagctctgcagcagaaacacaggaggagatgctgcaggtgctcaaagagaaaatgcgactcgaaggacagctggaagccttgtcactggaggcgagtcaggcacttaaagagaaggctgagctgcaggcccagctggccgccctcagcacgaagctgcaggcgcaggtggagtgcagccacagcagccagcagcggcaggattcgctgagctcggaggtggacaccctgaagcagtcgtgctgggacctggagcgagccatgactgacctgcagaacatgctggaggcaaaaaatgccagcctggcgtcgtccaacaacgacttgcaggtggccgaggagcagtaccagaggcttatggccaaggtagaggacatgcagaggagcatgctcagcaaggacaacacagtgcacgacctgcgacagcagatgacagccttgcagagccagcttcagcaggtgcagctggagcggacgacgctgaccagcaagctgaaggcgtcgcaggcggagatctcgtccctgcagagtgtccggcagtggtaccagcagcagctcgccctggcacaggaggcccgcgtcaggctgcagggtgagatggcccacatccaggttggacagatgacccaggcaggtctcctggagcacctgaaactcgagaatgtgtccctgtcccagcagctgacggaaactcagcacaggtccatgaaggagaaggggcgcatcgcggcacagctgcagggcattgaggctgacatgttggatcaggaagcagccttcatgcagattcaggaggcaaagacgatggtggaggaggaccttcagaggaggctggaagagtttgaaggtgagagggagcggctgcagaggatggcggactcggcggcatccctggagcagcagctggagcaggtgaagttgactttactccagcgagaccagcagcttgaggctttgcagcaggagcacctggacctgatgaaacagctcaccttgactcaggaggctctgcagagcagggagcagtccctcgatgccctgcagacacactacgatgagctgcaggccaggctgggggagctgcagggcgaggccgcctccagggaggacacgatctgcctcctgcagaacgagaagatcatcttggaggcggctttgcaggcggccaagagtggcaaggaggagcttgacagaggagcaagacgcttggaagaaggtaccgaggaaacgtcggaaactttagagaagttaagagaagaattagctatcaaatccggccaggtggaacacctgcagcaggagactgctgctctgaaaaagcaaatgcaaaaaataaaggaacagtttctccaacaaaaggtgatggtggaggcctaccggcgcgacgccacctccaaagaccagctcatcagtgagctgaaagccaccaggaagaggctggactcggagctgaaggagctgcggcaggagctgatgcaagtgcacggggagaagcggactgccgaggcggagctctcgcgcctgcacagagaggtggcccaggtccgtcagcacatggcggaccttgaagggcatctccagtcggcgcagaaggagcgagacgagatggaaacacacttgcagtcgttgcagttcgataaggagcagatggtcgcggtcacagaggccaatgaggcgctgaagaaacaaatcgaagagttgcagcaagaggcccggaaggccatcacggaacagaagcagaagatgaggcggctgggctcagacttgaccagcgcccagaaggagatgaagaccaaacataaggcctacgagaacgccgtgggcatcctcagccgccgcctgcaggaggccctcgcggccaaggaggctgcggacgcggagctgggccagctccgagcccagggtggcagcagtgacagcagcctggctctacatgaaaggatccaggccctggaggcggagctgcaggctgtcagtcatagcaagacgctgctggaaaaggaactgcaggaggtcatagcgctgaccagccaggagctggaggagtcccgggagaaggtgctggagctggaggacgaggtgaggcctggccatctgctgtggcggcagcgtggggcaggtcacgtgagccctggacatgccgccacgcgtgagacccgaagaacaaaacttcaccgtgtgcccagcgttgctacttttggtgttgccaccttctgaccgtcggcctctggctctgtggtggggcaggccctgattccagccctctggggaggatcactgtacagcctctttggtggaatggttacagaattcatagtggaacccttctcagttcaaatgctttggttgcaaataagaaacccaacttcgccagg

SEQ ID NO: 68074 - DNA, 3405 bp, Artificial Sequence
  derived and/or modified sequence
atggatggagccagcgctgagcaggacggcctgcaggaggacaggagccacagcggccccagcagcctgcctgaggcccccctgaagcccccaggccccctggtgcccccagaccagcaggacaaggtgcagtgtgccgaggtgaacagagccagcacagaaggagagagcccagatggccctggccagggcggcctgtgccagaatggccccaccccacccttcccagacccccccagcagcctggaccccaccaccagccctgtgggcccagatgccagccctggggtggccggcttccatgacaacctgaggaagagccagggcaccagcgctgagggctctgtgaggaaggaggccctgcagagcctgcggctgagcctgcccatgcaggagacccagctgtgcagcacagacagccccctgcccctggagaaggaggagcaggtgcggctgcaggccaggaagtggctggaggagcagctgaagcagtacagagtgaagaggcagcaggagaggagcagccagcctgccaccaagaccaggctcttcagcaccctggaccctgagctgatgctgaaccctgagaacctgccccgggccagcaccctggccatgaccaaggagtacagcttcctgcggacctctgtgccccggggccccaaggtgggcagcctgggcctgcctgcccacccccgggagaagaagaccagcaagagcagcaagatccgcagcctggccgactacagaacagaggacagcaatgccggcaacagcggcggcaatgtgcctgccccagacagcaccaagggcagcctgaagcagaacagaagcagcgctgcctctgtggtgtctgagatcagcctgagcccagacacagatgaccggctggagaacaccagcctggccggggacagcgtgtctgaggtggatggaaatgacagcgacagcagcagctacagcagcgccagcacccggggcacctacggcatcctgagcaagacagtgggcacccaggacaccccctacatggtgaatggccaggagatcccagctgacaccctgggccagttccccagcatcaaggatgtgctgcaggccgctgctgctgagcaccaggaccagggccaggaggtgaatggagaggtgcgcagccggcgggacagcatctgcagctctgtgtccctggagagcagcgctgctgagacccaggaggagatgctgcaggtgctgaaggagaagatgaggctggagggccagctggaggccctgagcctggaggccagccaggccctgaaggagaaggccgagctgcaggcccagctggccgccctgagcaccaagctgcaggcccaggtggagtgcagccacagcagccagcagaggcaggacagcctgagcagcgaggtggacaccctgaagcagagctgctgggacctggagcgggccatgacagacctgcagaacatgctggaggccaagaatgccagcctggccagcagcaacaatgacctgcaggtggccgaggagcagtaccagaggctgatggccaaggtggaggacatgcagaggtccatgctgagcaaggacaacacagtgcatgacctgcggcagcagatgacagccctgcagagccagctgcagcaggtgcagctggagaggaccaccctgaccagcaagctgaaggccagccaggccgagatcagcagcctgcagagcgtgcggcagtggtaccagcagcagctggccctggcccaggaggcccgggtgcggctgcagggcgagatggcccacatccaggtgggccagatgacccaggccggcctgctggagcacctgaagctggagaatgtgtccctgagccagcagctgacagagacccagcaccgctccatgaaggagaagggcagaattgctgcccagctgcagggcattgaagctgacatgctggaccaggaggccgccttcatgcagatccaggaggccaagaccatggtggaggaggacctgcagaggcggctggaggagtttgaaggagagcgggagcggctgcagaggatggctgacagcgctgccagcctggagcagcagctggagcaggtgaagctgaccctgctgcagagggaccagcagctggaggccctgcagcaggagcacctggacctgatgaagcagctgaccctgacccaggaggccctgcagagccgggagcagagcctggatgccctgcagacccactatgatgagctgcaggcccggctgggggagctgcagggcgaggccgccagccgggaggacaccatctgcctgctgcagaatgagaagatcatcctggaggccgccctgcaggccgccaagagcggcaaggaggagctggacagaggagcccggcggctggaggagggcacagaggagaccagcgagaccctggagaagctgcgggaggagctggccatcaagagcggccaggtggagcacctgcagcaggagacagctgccctgaagaagcagatgcagaagatcaaggagcagttcctgcagcagaaggtgatggtggaggcctacagaagagatgccaccagcaaggaccagctgatcagcgagctgaaggccaccaggaagaggctggacagcgagctgaaggagctgcggcaggagctgatgcaggtgcatggagagaagaggacagctgaggccgagctgagccggctgcaccgggaggtggcccaggtgcggcagcacatggctgacctggagggccacctgcagagcgcccagaaggagagagatgagatggagacccacctgcagagcctgcagtttgacaaggagcagatggtggccgtgacagaggccaatgaggccctgaagaagcagatcgaggagctgcagcaggaggccaggaaggccatcacagagcagaagcagaagatgaggcggctgggcagtgacctgaccagcgcccagaaggagatgaagaccaagcacaaggcctatgaaaatgctgtgggcatcctgagccggcggctgcaggaggccctggccgccaaggaggccgcagatgctgagctgggccagctgcgggcccagggcggcagcagtgacagcagcctggccctgcacgagcgcatccaggccctggaggccgagctgcaggccgtgagccacagcaagaccctgctggagaaggagctgcaggaggtgattgccctgaccagccaggagctggaggagagccgggagaaggtgctggagctggaggatgaggtgcggcccggccacctgctgtggaggcagagaggagctggccacgtgtccccaggccacgccgccacccgggagaccaggaggaccaagctgcaccgggtgcccagcgtggccacctttggagtggccaccttctag

SEQ ID NO: 68075 - DNA, 3405 bp, Artificial Sequence
  derived and/or modified sequence
atggacggcgccagcgccgagcaggacggcctgcaggaggaccggagccactctgggccttccagcctcccggaggcacccctcaaaccccctgggccactggtcccaccagatcagcaggataaagtgcaatgcgccgaagtcaaccgcgccagtaccgagggagagtcccccgatggacctggccagggaggactctgtcaaaacgggcccactccaccttttccggatcctcccagctctcttgacccaactacgtctccagtgggtccggacgcatctccaggtgttgcaggattccatgacaacctgcggaaatcacagggtacgtccgctgaggggtccgtgcgtaaagaggctctccaaagcctgagactgagtctgccaatgcaggagacacagctgtgtagtacagactcacccctcccactcgagaaagaagagcaagtacggcttcaggcgcggaaatggctcgaagaacagctgaagcagtatagggttaagcgccagcaggaacgctcatcccagcccgccaccaagacaagacttttttccaccctagatccagagctcatgctgaacccggagaacctcccccgggccagtaccctcgctatgaccaaagaatatagcttcctcagaaccagtgttcctcgcgggcctaaagttgggtctctaggcctccctgcacacccaagggagaagaagacatccaaatcatcaaagattagatctctcgcagattatcgcaccgaggactcgaatgcaggtaactctgggggcaatgtgcctgctcccgattcaacgaaggggtctttaaagcagaataggagttccgccgctagcgtggttagtgaaatctccctgagccccgacacagacgaccgactggagaacaccagcctggcgggcgactcagtgtcagaagtcgacgggaatgactcagattcaagtagctattcctccgcgtctactagagggacatacggcatcctctctaaaacagtaggcactcaggacaccccctacatggtgaatggacaggaaatccctgctgataccttggggcagttcccttccattaaagacgtccttcaagccgccgccgccgagcatcaagaccagggccaggaggtaaacggtgaggtacgtagtagacgggattcaatttgctcaagcgtatccctggagtcatctgccgccgagactcaggaagaaatgctccaggttctaaaagagaagatgaggctagaaggacagcttgaggccctatccctggaggcaagccaggcccttaaagaaaaagccgagttgcaggcacagcttgccgccctgtcaacaaagcttcaggcccaggtggagtgttctcactcaagccagcagcggcaagattctctttcatcggaggtggatacccttaagcagtcttgctgggacctggagagagcaatgactgacctgcagaatatgctggaggccaaaaacgcaagcctggccagcagcaacaacgatctgcaagtggcagaggagcaataccagcgactgatggcgaaggtggaggatatgcagagaagtatgctgtccaaagacaataccgtacatgatttgcggcaacagatgacggcactgcagtcccagcttcaacaagtgcagctggagagaactaccttaacgagcaaactgaaggcttctcaggcggagatatccagcctccagtccgtgcggcagtggtaccaacagcagctggctctagctcaggaggccagagtccggctgcagggtgagatggcccacattcaggttggtcagatgactcaggcgggcttattagagcatcttaagctagagaacgtgtcactttcacaacagctgaccgagacacaacatcgctccatgaaagagaagggcaggatagcagcccagcttcaaggcattgaagccgacatgctggatcaggaggccgccttcatgcagattcaggaggcgaaaaccatggtcgaggaggatttgcagagaagattagaggaattcgaaggtgagagggagcgcctccaacgcatggctgacagcgcagcatctttggaacagcagttagagcaggtgaaactgacattgctgcagcgcgatcaacagctcgaagccctccagcaagaacaccttgacctgatgaagcagctcactcttacacaggaagcccttcaatccagagagcagagcttggacgccctccaaacccactacgatgagttgcaagcacgcctaggggaactgcagggagaagcagcctccagggaagatacaatatgtctgctccagaacgaaaaaataattctggaagccgcattgcaagcagctaaatcaggaaaagaagagctggacagaggggcacgccgtctggaggagggtactgaagagacaagcgaaaccctcgagaaactcagggaagagctggcgattaagtcagggcaggtcgagcacctacagcaggaaaccgcggctttaaagaagcaaatgcagaaaatcaaagagcaatttctccagcagaaggtgatggtcgaagcttatagaagggatgctacatccaaagaccagctgatatcagagctgaaggcgaccaggaagaggctggattctgagttaaaagagctgcgccaggagctgatgcaggttcacggagagaagaggacggcagaggcagaattgtctcgactgcacagagaagtggctcaagtcagacagcacatggccgacctggaaggacatctgcaaagcgcgcagaaggagagagatgaaatggagacacatttgcagagcctgcaatttgataaggaacagatggtggctgtgaccgaggcaaatgaggctctgaagaagcagattgaagaacttcagcaggaagcaaggaaggccataaccgagcaaaaacagaagatgaggcggcttggcagcgacctcacatcggcccaaaaggaaatgaaaacaaagcacaaagcatacgaaaatgcggtcggcattctgagtaggcgcttgcaggaggctctcgccgcgaaggaagcagccgatgccgaactggggcagttacgcgcacagggtgggagttctgacagctccctcgctttacacgagagaatccaggccctcgaggcggaactacaggccgtaagtcactctaagaccctgcttgagaaagaactgcaggaagtcatcgcgctcacctctcaggagctggaagagtcccgcgagaaagtgttggagcttgaagacgaggtgaggcctggacatctgctctggcgtcagagaggagccggtcacgtgtccccaggtcacgcagccacgcgcgaaacaaggcgcaccaaactccacagagtgccttcagtagccacattcggggttgccacattttag

SEQ ID NO: 68076 - DNA, 3405 bp, Artificial Sequence
  derived and/or modified sequence
atggatggggcatcagcggagcaagatggactgcaggaggatcggagtcactcaggcccatcttctctcccagaagctcctctgaagcctcctggccctctcgtacctccagatcagcaagataaagtacagtgcgccgaagtgaaccgggcttcaacggaaggcgagtcaccggacggacctggccaggggggtctgtgccagaacggcccaacacctccatttcccgatccacctagctcactggacccaaccacatcaccggttggacccgacgccagcccaggcgttgccggtttccacgataacctgcggaagagccagggtacgagcgccgaaggttccgtccgcaaggaggctttgcagagcctgcggttgtctttacctatgcaggaaacccaactttgcagcaccgactcacctctccctctcgagaaggaggagcaggtgcgtctgcaggcgaggaagtggctagaagagcagctcaaacagtatagggtcaagcggcaacaagagcgtagctcgcagcctgctactaaaacccggcttttttccactttggaccccgagctcatgctgaatccagaaaatctgccaagagcttctactctcgccatgactaaggaatatagttttctgagaaccagcgttcccagagggccaaaggtaggcagccttgggctccccgcacaccccagagaaaagaagacaagtaagagttctaagatacggagtctagccgattaccggacggaggatagtaacgcgggaaatagcgggggtaacgtcccggcacctgactcgactaagggctcccttaagcagaatcgcagttcggctgcttcagttgtgagtgagatctccctgagtcccgacacggatgacagattggagaatacaagccttgccggtgactcggtgtctgaggttgatgggaacgactcggactcgtcttcttattctagcgcctcaaccagagggacctacggaatcctcagtaagactgtcgggacacaggacacaccttatatggtgaacggccaggagatcccggctgataccctgggtcaatttccttcgataaaagacgtactacaggcagctgccgctgagcaccaagatcagggccaagaagtgaacggagaggtgcgaagcagaagggactccatttgcagttccgtgagcctcgaatcgtcggccgctgagacacaggaggaaatgttacaagtgctcaaggagaagatgcgacttgagggccagcttgaggcgttgagtcttgaagcctcccaggcccttaaggagaaggccgagctgcaagctcagttggctgctttgagcacaaagctgcaggcacaggtcgagtgttctcattcctcccagcaacgacaggacagtcttagcagcgaagttgacactttaaagcaatcttgctgggatctggagagggccatgactgacttgcagaatatgctcgaggccaagaacgcctccttagccagttctaacaacgatcttcaggttgcagaggaacagtaccagagactcatggccaaggttgaggacatgcaacggtccatgctttcaaaggataacacagtgcacgacctccgtcagcagatgactgccctgcagtcacaactacagcaggtacaactcgaacgcacaacacttacaagcaaactgaaggctagccaggccgaaatctcatcgctgcagtccgtccggcagtggtatcagcaacaactagcccttgcccaagaagccagagtgaggctgcagggagagatggcccatattcaggtgggccaaatgacccaggccggtctgctggaacacctgaagttggaaaacgtgtccctatcccagcaattgactgaaacacagcacagatccatgaaggagaaggggagaattgctgcccagctgcagggtatcgaagctgatatgctcgatcaggaagcggcattcatgcagattcaggaagctaaaaccatggtggaggaagacctgcagcgacggttggaggaatttgagggagaaagggagcggctacagaggatggctgactctgcggcttccctggagcagcaactagagcaggtgaagcttacgttactgcagcgggatcagcaattagaggctctacagcaagagcatctggatctgatgaaacaactcaccctaacccaggaagctttgcaatcccgtgaacaatcactcgatgctctgcagacgcattacgacgagctacaggccagacttggagagcttcagggagaagctgcgagccgggaagacaccatctgccttttgcaaaacgaaaagattatcctggaagctgccttgcaggccgcaaagagcgggaaggaggagctcgacaggggagcccgtcggttagaggaaggcactgaggagacaagcgaaactctagaaaaactgagggaagaattggccataaagagcggacaggtcgagcacttgcagcaggagacagcagcactcaaaaagcaaatgcagaaaatcaaggaacagtttcttcagcaaaaggttatggtagaagcgtacaggcgggacgccacgagcaaggaccagcttattagcgagctaaaggcgaccaggaaaaggttggactccgagctgaaagagctgcggcaggaactgatgcaggtgcatggagaaaagaggacagctgaggccgagttgtcaagacttcatagggaggtggcccaagtccgccaacatatggctgacctggaggggcacctgcagagcgcccagaaagaacgagacgaaatggaaacacacttgcagtcactacagttcgataaagagcagatggtggccgtgacagaggccaacgaggccctgaagaagcaaattgaagaactccaacaggaagcgagaaaagcaattacagaacagaaacaaaagatgcggagactaggctcagatctgacgtctgctcagaaggagatgaagaccaaacacaaagcctatgagaacgccgtcggaattctgagccggaggcttcaggaagcgctggcagctaaagaagcagccgacgccgaactcggtcagcttagggcacaaggcggaagctcagacagctctcttgcgctccatgagcggattcaggccttagaggccgaactccaggctgtctcacactcaaaaactctactggagaaggaactacaggaagtcattgcacttacttcacaggaacttgaggaatcaagggaaaaggttctggaactggaggatgaagtacgcccaggccacctactttggcgccagagaggtgctggccacgtaagtcctgggcatgccgctacgcgggagactcggcgtacgaagctgcaccgcgtacccagcgtggccacctttggggtggccacattctag

SEQ ID NO: 68077 - DNA, 3405 bp, Artificial Sequence
  derived and/or modified sequence
atggacggcgccagcgccgagcaggacggcctgcaggaggacagaagccacagcggccccagcagcctgcccgaggcccccctgaagccccccggccccctggtgccccccgaccagcaggacaaggtgcagtgcgccgaggtgaacagagccagcaccgagggcgagagccccgacggccccggccagggcggcctgtgccagaacggccccaccccccccttccccgacccccccagcagcctggaccccaccaccagccccgtgggccccgacgccagccccggcgtggccggcttccacgacaacctgagaaagagccagggcaccagcgccgagggcagcgtgagaaaggaggccctgcagagcctgagactgagcctgcccatgcaggagacccagctgtgcagcaccgacagccccctgcccctggagaaggaggagcaggtgagactgcaggccagaaagtggctggaggagcagctgaagcagtacagagtgaagagacagcaggagagaagcagccagcccgccaccaagaccagactgttcagcaccctggaccccgagctgatgctgaaccccgagaacctgcccagagccagcaccctggccatgaccaaggagtacagcttcctgagaaccagcgtgcccagaggccccaaggtgggcagcctgggcctgcccgcccaccccagagagaagaagaccagcaagagcagcaagatcagaagcctggccgactacagaaccgaggacagcaacgccggcaacagcggcggcaacgtgcccgcccccgacagcaccaagggcagcctgaagcagaacagaagcagcgccgccagcgtggtgagcgagatcagcctgagccccgacaccgacgacagactggagaacaccagcctggccggcgacagcgtgagcgaggtggacggcaacgacagcgacagcagcagctacagcagcgccagcaccagaggcacctacggcatcctgagcaagaccgtgggcacccaggacaccccctacatggtgaacggccaggagatccccgccgacaccctgggccagttccccagcatcaaggacgtgctgcaggccgccgccgccgagcaccaggaccagggccaggaggtgaacggcgaggtgagaagcagaagagacagcatctgcagcagcgtgagcctggagagcagcgccgccgagacccaggaggagatgctgcaggtgctgaaggagaagatgagactggagggccagctggaggccctgagcctggaggccagccaggccctgaaggagaaggccgagctgcaggcccagctggccgccctgagcaccaagctgcaggcccaggtggagtgcagccacagcagccagcagagacaggacagcctgagcagcgaggtggacaccctgaagcagagctgctgggacctggagagagccatgaccgacctgcagaacatgctggaggccaagaacgccagcctggccagcagcaacaacgacctgcaggtggccgaggagcagtaccagagactgatggccaaggtggaggacatgcagagaagcatgctgagcaaggacaacaccgtgcacgacctgagacagcagatgaccgccctgcagagccagctgcagcaggtgcagctggagagaaccaccctgaccagcaagctgaaggccagccaggccgagatcagcagcctgcagagcgtgagacagtggtaccagcagcagctggccctggcccaggaggccagagtgagactgcagggcgagatggcccacatccaggtgggccagatgacccaggccggcctgctggagcacctgaagctggagaacgtgagcctgagccagcagctgaccgagacccagcacagaagcatgaaggagaagggcagaatcgccgcccagctgcagggcatcgaggccgacatgctggaccaggaggccgccttcatgcagatccaggaggccaagaccatggtggaggaggacctgcagagaagactggaggagttcgagggcgagagagagagactgcagagaatggccgacagcgccgccagcctggagcagcagctggagcaggtgaagctgaccctgctgcagagagaccagcagctggaggccctgcagcaggagcacctggacctgatgaagcagctgaccctgacccaggaggccctgcagagcagagagcagagcctggacgccctgcagacccactacgacgagctgcaggccagactgggcgagctgcagggcgaggccgccagcagagaggacaccatctgcctgctgcagaacgagaagatcatcctggaggccgccctgcaggccgccaagagcggcaaggaggagctggacagaggcgccagaagactggaggagggcaccgaggagaccagcgagaccctggagaagctgagagaggagctggccatcaagagcggccaggtggagcacctgcagcaggagaccgccgccctgaagaagcagatgcagaagatcaaggagcagttcctgcagcagaaggtgatggtggaggcctacagaagagacgccaccagcaaggaccagctgatcagcgagctgaaggccaccagaaagagactggacagcgagctgaaggagctgagacaggagctgatgcaggtgcacggcgagaagagaaccgccgaggccgagctgagcagactgcacagagaggtggcccaggtgagacagcacatggccgacctggagggccacctgcagagcgcccagaaggagagagacgagatggagacccacctgcagagcctgcagttcgacaaggagcagatggtggccgtgaccgaggccaacgaggccctgaagaagcagatcgaggagctgcagcaggaggccagaaaggccatcaccgagcagaagcagaagatgagaagactgggcagcgacctgaccagcgcccagaaggagatgaagaccaagcacaaggcctacgagaacgccgtgggcatcctgagcagaagactgcaggaggccctggccgccaaggaggccgccgacgccgagctgggccagctgagagcccagggcggcagcagcgacagcagcctggccctgcacgagagaatccaggccctggaggccgagctgcaggccgtgagccacagcaagaccctgctggagaaggagctgcaggaggtgatcgccctgaccagccaggagctggaggagagcagagagaaggtgctggagctggaggacgaggtgagacccggccacctgctgtggagacagagaggcgccggccacgtgagccccggccacgccgccaccagagagaccagaagaaccaagctgcacagagtgcccagcgtggccaccttcggcgtggccaccttctag

SEQ ID NO: 68078 - protein, 364 aa, Artificial Sequence
  derived and/or modified sequence
MEPLFPASTPSWNASSPGAASGGGDNRTLVGPAPSAGARAVLVPVLYLLVCAAGLGGNTLVIYVVLRFAKMKTVTNIYILNLAVADVLYMLGLPFLATQNAASFWPFGPVLCRLVMTLDGVNQFTSVFCLTVMSVDRYLAVVHPLSSARWRRPRVAKLASAAAWVLSLCMSLPLLVFADVQEGGTCNASWPEPVGLWGAVFIIYTAVLGFFAPLLVICLCYLLIVVKVRAAGVRVGCVRRRSERKVTRMVLVVVLVFAGCWLPFFTVNIVNLAVALPQEPASAGLYFFVVILSYANSCANPVLYGFLSDNFRQSFQKVLCLRKGSGAKDADATEPRPDRIRQQQEATPPAHRAAANGLMQTSKL

SEQ ID NO: 68079 - protein, 273 aa, Artificial Sequence
  derived and/or modified sequence
MEPLFPASTPSWNASSPGAASGGGDNRTLVGPAPSAGARAVLVPVLYLLVCAAGLGGNTLVIYVVLRFAKMKTVTNIYILNLAVADVLYMLGLPFLATQNAASFWPFGPVLCRLVMTLDGVNQFTSVFCLTVMSVDRYLAVVHPLSSARWRRPRVAKLASAAAWVLSLCMSLPLLVFADVQEGGTCNASWPEPVGLWGAVFIIYTAVLGFFAPLLRGSGRAGDANGRPWESRRLPPRIVLPPPPQTPAFPGAPGPERGPREPCWGLWGTLALL

SEQ ID NO: 68080 - DNA, 1095 bp, Artificial Sequence
  derived and/or modified sequence
atggagcccctgttccccgccagcacccccagctggaacgccagcagccccggcgccgccagcggcggcggcgacaacagaaccctggtgggccccgcccccagcgccggcgccagagccgtgctggtgcccgtgctgtacctgctggtgtgcgccgccggcctgggcggcaacaccctggtgatctacgtggtgctgagattcgccaagatgaagaccgtgaccaacatctacatcctgaacctggccgtggccgacgtgctgtacatgctgggcctgcccttcctggccacccagaacgccgccagcttctggcccttcggccccgtgctgtgcagactggtgatgaccctggacggcgtgaaccagttcaccagcgtgttctgcctgaccgtgatgagcgtggacagatacctggccgtggtgcaccccctgagcagcgccagatggagaagacccagagtggccaagctggccagcgccgccgcctgggtgctgagcctgtgcatgagcctgcccctgctggtgttcgccgacgtgcaggagggcggcacctgcaacgccagctggcccgagcccgtgggcctgtggggcgccgtgttcatcatctacaccgccgtgctgggcttcttcgcccccctgctggtgatctgcctgtgctacctgctgatcgtggtgaaggtgagagccgccggcgtgagagtgggctgcgtgagaagaagaagcgagagaaaggtgaccagaatggtgctggtggtggtgctggtgttcgccggctgctggctgcccttcttcaccgtgaacatcgtgaacctggccgtggccctgccccaggagcccgccagcgccggcctgtacttcttcgtggtgatcctgagctacgccaacagctgcgccaaccccgtgctgtacggcttcctgagcgacaacttcagacagagcttccagaaggtgctgtgcctgagaaagggcagcggcgccaaggacgccgacgccaccgagcccagacccgacagaatcagacagcagcaggaggccaccccccccgcccacagagccgccgccaacggcctgatgcagaccagcaagctgtag

SEQ ID NO: 68081 - DNA, 822 bp, Artificial Sequence
  derived and/or modified sequence
atggagcccctgttccccgccagcacccccagctggaacgccagcagccccggcgccgccagcggcggcggcgacaacagaaccctggtgggccccgcccccagcgccggcgccagagccgtgctggtgcccgtgctgtacctgctggtgtgcgccgccggcctgggcggcaacaccctggtgatctacgtggtgctgagattcgccaagatgaagaccgtgaccaacatctacatcctgaacctggccgtggccgacgtgctgtacatgctgggcctgcccttcctggccacccagaacgccgccagcttctggcccttcggccccgtgctgtgcagactggtgatgaccctggacggcgtgaaccagttcaccagcgtgttctgcctgaccgtgatgagcgtggacagatacctggccgtggtgcaccccctgagcagcgccagatggagaagacccagagtggccaagctggccagcgccgccgcctgggtgctgagcctgtgcatgagcctgcccctgctggtgttcgccgacgtgcaggagggcggcacctgcaacgccagctggcccgagcccgtgggcctgtggggcgccgtgttcatcatctacaccgccgtgctgggcttcttcgcccccctgctgagaggcagcggcagagccggcgacgccaacggcagaccctgggagagcagaagactgccccccagaatcgtgctgcccccccccccccagacccccgccttccccggcgcccccggccccgagagaggccccagagagccctgctggggcctgtggggcaccctggccctgctgtag

SEQ ID NO: 68082 - DNA, 1095 bp, Artificial Sequence
  derived and/or modified sequence
atggaacctctcttcccagcttcaacacctagctggaatgccagctcacccggggcggcaagtggagggggtgataacaggaccctcgtgggccccgctccaagcgcaggtgccagggccgtcctcgtgccagtcttatatttacttgtgtgcgcagccggcctgggaggtaatacactggtgatttacgtggttctacgcttcgccaaaatgaagaccgtgactaatatctacattcttaacctggctgtggcggatgtgctctacatgctcggtctccctttcctggccactcagaatgcagcctccttttggcctttcggcccagttctgtgtaggctggtcatgacgcttgacggtgtgaaccaatttaccagcgttttttgtctaacagtcatgtcagtggacagatatctggccgtcgtacaccccctttccagcgctcgctggagacgcccacgggtggctaagctggccagtgcagcggcctgggtgctgtcgctgtgcatgtcacttcctcttctagttttcgcggatgttcaggagggcggcacatgtaatgcctcttggccagaaccagtgggcctttggggtgcagtattcataatatatactgctgtcctgggcttctttgctcctctgttggtgatttgcctctgctacctcctgattgttgtgaaagtaagggcggccggagtgcgagtcggatgcgttaggcggcggtcagaacgtaaggtcaccagaatggtcctggtcgttgtgctggtgtttgcaggttgttggctgccctttttcactgtcaacatcgtcaatctggccgtggcattaccccaggaacccgctagcgccggcctctatttcttcgtggtaattttgtcctacgcaaattcttgtgcaaatccggtcctttacggctttttgtcagacaattttcggcaatcattccaaaaagttctatgtctccgcaagggatccggagccaaggacgccgatgcgacagagccgaggcccgatagaattcgccaacagcaggaggcgaccccaccggcacaccgtgcagctgccaatggtttgatgcagacctcgaagctctag

SEQ ID NO: 68083 - DNA, 1095 bp, Artificial Sequence
  derived and/or modified sequence
atggagccccttttcccagcctcaaccccatcgtggaacgctagttcacccggcgctgccagcggcgggggggacaatagaaccctggtgggccctgcaccttccgccggtgcccgagctgtcctggtacccgtgctctatctgctggtttgcgctgccggtcttgggggaaatacattggtcatatatgttgtgcttcggtttgccaagatgaagacagtgacaaacatctatattctcaatctggccgtggctgacgttctgtacatgctcgggcttccgttcttggccacccagaatgcagcctctttctggccattcgggcctgtgctctgcagattggtcatgaccttagatggggtgaaccagttcacctccgtgttttgtctgacggtgatgtctgtggatcgatacctggccgtggtacaccccctatcctcggccagatggcggcgcccccgggtggcaaaattagcctctgctgctgcttgggtgttgtctttgtgtatgagtctgccattgctggttttcgctgatgtacaggaagggggcacctgtaacgccagttggcctgagcccgttggcttatggggggctgtatttatcatttatactgccgtcctggggtttttcgcccctctgctggtcatatgcttatgctacctgcttatagtggtaaaagtgcgggccgccggcgtgagagtgggctgcgtcaggcgccgcagcgaaagaaaggtgaccaggatggtccttgtcgtcgttcttgtctttgctggatgctggctgccattttttactgttaatatagtaaatctggcagtcgcactccctcaggagccagcttccgccggattatacttctttgtcgtgatcttgtcttacgcgaattcttgtgccaaccctgtgctatatggcttcctcagtgacaattttcgacaatcatttcagaaggtgctttgcctgcgaaaagggtcaggcgctaaagatgctgatgcaaccgagccccgaccggatagaattcggcagcaacaggaggctaccccccccgcacatagagctgccgccaacgggcttatgcagacttcaaaactgtag

SEQ ID NO: 68084 - DNA, 822 bp, Artificial Sequence
  derived and/or modified sequence
atggagccattgtttcccgctagcacccccagctggaacgctagtagtccaggagccgcctctggtggcggcgacaaccgcacactagtcggacctgctccaagtgcgggagcccgtgcagtcttagtgcccgtgctttatttgctcgtgtgcgccgcaggactaggcggcaacacactggtcatctatgttgttttgcgattcgccaagatgaagactgttaccaacatctacatactgaatctggccgtggcagatgtactttacatgctcgggctgccattcctggccacccagaatgctgctagtttctggccgttcgggcccgtcctctgtaggctcgtaatgacccttgatggtgtcaaccagttcacctccgtgttttgtttaactgttatgagtgtggatcgttatctcgctgtggtgcaccccttgagcagtgcacgctggagacgaccaagagtggccaaactcgcgtccgctgcagcctgggtgctttccttgtgcatgtccctcccccttctcgtgtttgccgatgttcaggaggggggcacttgtaatgcctcctggcccgaaccagtgggtctctggggggctgtttttattatatatactgctgtgctggggttttttgccccactgttacgcggttcaggcagggccggggacgccaacggaaggccctgggagagtaggcggctgcctccgaggatagttttgccccccccaccccaaaccccagcttttcccggcgcacctggaccagagcgggggccccgggagccctgctgggggctttggggtacgttagcactcctctag

SEQ ID NO: 68085 - DNA, 1095 bp, Artificial Sequence
  derived and/or modified sequence
atggagcccctcttccctgccagcacccccagctggaatgccagcagccctggagctgccagcggcggcggggacaacagaaccctggtgggccctgcccccagcgctggggcccgggctgtgctggtgcctgtgctgtacctgctggtgtgtgccgccggcctgggcggcaacaccctggtgatctacgtggtgctgcgctttgccaagatgaagacagtgaccaacatctacatcctgaacctggccgtggctgatgtgctgtacatgctgggcctgcccttcctggccacccagaatgctgccagcttctggccctttggacctgtgctgtgccgcctggtgatgaccctggatggagtgaaccagttcaccagcgtcttctgcctgactgtgatgtctgtggaccgctacctggccgtggtgcaccccctgagcagcgcccgctggaggcggccccgggtggccaagctggccagcgctgctgcctgggtgctgagcctgtgcatgagcctgcccctgctggtgtttgctgatgtgcaggagggcggcacctgcaatgcctcctggccagagcctgtgggcctgtggggcgctgtgttcatcatctacacagctgtgctgggcttctttgcccccctgctggtgatctgcctgtgctacctgctgattgtggtgaaggtgcgggctgctggggtgcgggtgggctgtgtgagaagaagaagtgagaggaaggtgaccaggatggtgctggtggtggtgctggtgtttgctggctgctggctgcccttcttcaccgtgaacatcgtgaacctggccgtggccctgccccaggagcccgccagcgctggcctgtacttctttgtggtgatcctgtcctatgccaacagctgtgccaaccctgtgctgtatggcttcctgagtgacaacttccggcagagcttccagaaggtgctgtgcctgaggaaaggaagtggggccaaggatgctgatgccacagagcccaggccagaccgcatccggcagcagcaggaggccaccccaccagcccacagagctgctgccaacggcctgatgcagaccagcaagctgtag

SEQ ID NO: 68086 - DNA, 822 bp, Artificial Sequence
  derived and/or modified sequence
atggagcccctcttccctgccagcacccccagctggaatgccagcagccctggagctgccagcggcggcggggacaacagaaccctggtgggccctgcccccagcgctggggcccgggctgtgctggtgcctgtgctgtacctgctggtgtgtgccgccggcctgggcggcaacaccctggtgatctacgtggtgctgcgctttgccaagatgaagacagtgaccaacatctacatcctgaacctggccgtggctgatgtgctgtacatgctgggcctgcccttcctggccacccagaatgctgccagcttctggccctttggacctgtgctgtgccgcctggtgatgaccctggatggagtgaaccagttcaccagcgtcttctgcctgactgtgatgtctgtggaccgctacctggccgtggtgcaccccctgagcagcgcccgctggaggcggccccgggtggccaagctggccagcgctgctgcctgggtgctgagcctgtgcatgagcctgcccctgctggtgtttgctgatgtgcaggagggcggcacctgcaatgcctcctggccagagcctgtgggcctgtggggcgctgtgttcatcatctacacagctgtgctgggcttctttgcccccctgctgcggggcagcggccgggctggagatgccaacggccggccctgggagagccggcggctgcccccacgcatcgtgctgcccccaccaccccagaccccagccttccctggggcccctggccctgagcggggcccccgggagccctgctggggcctgtggggcaccctggccctgctgtag

SEQ ID NO: 68087 - DNA, 1095 bp, Artificial Sequence
  derived and/or modified sequence
atggagcccctgttccccgccagcacccccagctggaacgccagcagtcccggcgccgccagcggaggaggagacaatcggaccttagtgggcccagcaccctctgcgggcgccagggctgttttggtgcctgttctctatctgcttgtctgcgccgcaggactgggcgggaatactctggtcatctacgtggttttaagatttgctaagatgaaaaccgtcacgaacatctatattctcaatctggccgtagccgatgtattgtacatgttgggtctgccattcctagcaacacaaaacgcggctagcttctggccttttggccctgtcctctgcagacttgtcatgaccctcgacggagttaaccagtttaccagcgtgttctgtttgactgtgatgagtgtggaccggtatctcgctgtggtgcaccctcttagtagtgctcgctggcggaggcccagagtggccaagctggcgagcgctgctgcgtgggtcctgtctctgtgcatgtccctaccactactcgtgttcgcagacgtgcaggaaggagggacttgtaatgctagctggcccgagccagttgggctctggggagccgtcttcatcatctacacagccgtgctcggcttcttcgcgcctctgctagttatctgtctgtgctacctgctcattgttgttaaagtgagagcagctggagtccgcgtagggtgcgtgagacggagaagcgagcgaaaggtgactcggatggttttagttgtggttctcgtgttcgcaggatgctggctgcccttctttacagtgaacatcgttaacctggccgttgccctccctcaagagcctgcctcagccggcctttatttttttgtggtgatcctgagttatgccaatagctgcgcaaatcccgtgctgtatggtttcctatccgacaattttcgccaatctttccagaaggtattatgtctgcgaaagggctccggggcaaaagacgcagacgcaactgagcccagacccgaccggatacgacagcagcaggaagcaacgccacctgcacatcgggcggccgccaatggcttaatgcagaccagcaaactgtag

SEQ ID NO: 68088 - DNA, 1095 bp, Artificial Sequence
  derived and/or modified sequence
atggagcccctgttccccgccagcacccccagctggaacgccagctcacccggcgcagctagcggcgggggtgataaccgcaccctggtcgggcctgcacccagtgcgggggcacgcgctgtgctggttccagtgctgtatcttttagtgtgcgccgcaggtctaggagggaacaccctggtgatttacgtggttcttcggttcgccaagatgaagactgtgaccaatatctatatcttgaacctggctgtggcagacgttctgtacatgttgggcctgccatttttggctactcagaatgccgcctctttctggccatttgggccagtgctgtgtagactggttatgacactggacggagtgaaccaattcactagtgtgttttgtctcacggtcatgtcagtggacagatacctcgccgtggtgcacccattatcttcagcccgctggcgaagacctagggtcgcaaagctcgcatctgctgctgcttgggtcttgtcattatgtatgagcctgccacttttggtatttgctgatgtccaagagggcggcacttgcaatgcatcatggcccgagcccgtgggcctgtggggcgcagtatttatcatatataccgccgtactgggatttttcgcccctcttcttgtgatttgtttatgctacctgctcatcgtggtaaaggtgcgggccgctggggtccgagtcggctgtgtgagaaggagatcagaacggaaagttactcgtatggtgctggtggtcgttctagtgtttgctgggtgttggctgccgttctttactgtcaacattgttaatctcgccgtggctctccctcaggaacctgcgagtgccggcctgtacttcttcgttgtgattctgagctacgccaattcctgcgccaaccccgtgctgtatggcttcctcagcgataattttagacagagtttccagaaggttttgtgtctgcgcaaaggctccggagccaaagatgcagacgcgacggagccacgcccagacagaattcgacagcagcaagaggccactccaccagcccatcgcgccgcagccaacggcttgatgcagacttctaaactgtag

SEQ ID NO: 68089 - DNA, 822 bp, Artificial Sequence
  derived and/or modified sequence
atggagcccctgttccccgccagcacccccagctggaacgccagctcaccaggggcggccagtggcggcggagataacagaactttggtcggccccgccccatctgctggcgctcgggctgtgctggtgcccgtcttatacttactggtgtgcgctgccggcttgggaggaaacacgctcgtgatttacgtggtcctacgcttcgctaagatgaaaacagttacaaatatatatatcctcaatctggctgtggcagacgttctctatatgctgggcctgcctttccttgccacacagaacgccgcctctttctggccattcggccccgttctctgtcgtcttgtgatgacgttggacggtgtgaatcagtttacaagcgtgttttgccttacagttatgtctgtagaccggtacttagcagtggtgcaccctctcagcagcgcccgatggcggcggccacgcgtggccaagttggcttcagcggccgcttgggtcctgagcctttgcatgtctctgcctctgcttgtcttcgccgatgtccaggagggaggtacgtgcaatgcttcgtggccagagccggtgggactgtggggcgcagtctttatcatatacacggcggtgttagggttctttgcacccctcctcagggggtctggcagggccggagacgctaacggacggccttgggaatctaggagactcccccccaggatcgtcctgcctcctccgccccagacccccgccttcccgggtgcaccaggcccagaaagaggtccccgcgaaccttgctgggggctttgggggactctggctttgctctag

SEQ ID NO: 68090 - DNA, 1095 bp, Artificial Sequence
  derived and/or modified sequence
atggagcctctgttcccagcgtctaccccctcttggaatgccagctcccccggtgccgcatctggcggaggtgataaccggacgctagtggggccagcaccttctgccggtgccagggccgttctggtcccagtgctgtacctgctggtgtgtgcagccggactcggcggaaataccttggtaatatatgtagtcctgaggttcgccaaaatgaaaactgttacgaacatctatatcctaaacctggctgtggccgatgtactgtacatgcttggacttccttttcttgctacccagaacgcagcgtctttctggccattcgggcctgtgctatgtagactcgtgatgacgcttgatggggtcaaccaatttaccagcgtgttctgcttgacagtgatgagtgtggacagatatcttgccgtggtgcatcctttatccagcgcgaggtggaggaggcctcgtgtggccaaattggcctctgctgctgcgtgggtattgtcactatgcatgagccttccactgctagttttcgctgacgtccaggagggcggaacctgtaatgcttcctggccagagcctgtagggctgtggggcgcagtcttcattatctatactgccgtcctggggttctttgcccctctgcttgtaatctgtctgtgttacctattaatcgtggtgaaagtgcgggcagccggagtgcgagtgggatgtgtgcgcagacgcagcgagaggaaggtgacccgcatggtgctggtcgtggtccttgtgtttgcgggttgttggcttccattcttcaccgttaatatcgtcaaccttgctgtcgctctgccccaggaacctgcctcagcaggtctgtattttttcgtcgttattctttcctatgccaatagttgtgcgaacccagttttgtatggatttttgagcgacaatttcaggcagtcgtttcaaaaggttttgtgtctcagaaaagggtcgggtgctaaagacgccgacgccaccgagccaagacccgaccggatcagacagcagcaggaagcaactcctccagctcatagggctgcggctaacggtctcatgcagacgtctaaactgtag

SEQ ID NO: 68091 - DNA, 1095 bp, Artificial Sequence
  derived and/or modified sequence
atggagccattattccccgctagcacgccctcgtggaatgcaagctctcccggagctgcgtctggaggaggagacaatcggacgttggtgggtcctgcaccgtccgctggggcaagggctgtgctcgtgccggttctatacctcctggtgtgtgcagctggcttgggtggcaacactctcgtgatttacgtcgtgctccgatttgctaagatgaaaacggtgacgaatatctatatactgaatcttgccgtcgccgacgtcctgtacatgctggggttacctttcctggctacccaaaatgcggcatctttctggccttttggacccgtactgtgcaggctcgtgatgacactcgacggggtgaatcagtttacttcggtgttctgtctgaccgttatgtccgtagaccgttacttggcagtggttcacccactgagctcagctaggtggcggagaccgagggtggcaaagcttgcctctgcagcggcttgggtcctgtctctctgtatgtccttgccacttctggttttcgctgatgtgcaggaaggtggcacttgcaatgctagctggcccgaaccagtgggcctgtggggcgctgtgttcatcatttataccgccgttctgggcttcttcgcaccgctgttagtgatttgtctctgctacctattgatcgtggttaaagtgcgggctgcaggcgtccgcgtaggatgtgtgcggagaagaagtgagcgcaaggtcaccagaatggtgttagtggtcgtactggtgttcgctgggtgttggctgccattcttcaccgttaacatcgtaaatttggctgtggcattgccacaggaaccagcatcagctggcctttatttcttcgtggtgatactcagttatgccaacagctgtgctaatccagtcctatatggtttcctgagcgacaacttccggcagtcgttccaaaaggtcctctgtctcaggaagggatcgggtgccaaggacgccgacgcgaccgaaccgagacccgacagaatccgacagcaacaggaggcaacacccccagcacatagagctgccgcaaacggtctgatgcagacttccaaactatag

SEQ ID NO: 68092 - DNA, 822 bp, Artificial Sequence
  derived and/or modified sequence
atggagccactgtttcctgcctcaacaccgtcgtggaacgcttcctcacccggtgcggcaagcggcggaggtgataacaggacactcgtaggaccagcgccttccgctggtgcaagagcggtgctggttccagtgctctacttacttgtatgtgccgctggactcggtggtaatacacttgtcatttacgtggtcctccgcttcgccaagatgaagaccgtgaccaacatctatatcctgaacctagccgtcgccgacgtgctgtacatgcttggacttcccttccttgcaacccaaaatgctgccagtttctggcctttcggtccagtgctctgcaggttggtaatgactcttgatggggtgaaccagttcaccagtgtgttttgcttaaccgtgatgtccgtggaccgatatctcgccgtcgttcatccgttaagctctgccagatggcgacgaccacgggtggccaaactggcctctgcagctgcgtgggtgctgagcctgtgtatgagtctccctctactggtctttgcagacgtgcaggaagggggtacgtgcaatgcttcctggccggagccagtagggctctggggcgcagtctttataatctacacagccgttctgggcttcttcgctccattacttaggggatctgggagggccggtgacgccaacggtaggccttgggaatcgcggagattaccgccacgaatcgtgctccctccccctcctcaaacccccgctttccccggagcgccaggaccagagagaggtccgagggagccatgttggggcctatggggcacgttggcactcctatag

SEQ ID NO: 68093 - DNA, 2674 bp, Artificial Sequence
  derived and/or modified sequence
atgcctgcatgtgctggttcagggactcaccaccctggcgtcctcccttcttctcttgcagagcctgacgcaccccagggctgccgccatggagcccctgttcccagcctccacgcccagctggaacgcctcctccccgggggctgcctctggaggcggtgacaacaggacgctggtggggccggcgccctcggcaggggcccgggcggtgctggtgcccgtgctgtacctgctggtgtgtgcggccgggctgggcgggaacacgctggtcatctacgtggtgctgcgcttcgccaagatgaagaccgtcaccaacatctacattctcaacctggcagtggccgacgtcctgtacatgctggggctgcctttcctggccacgcagaacgccgcgtccttctggcccttcggccccgtcctgtgccgcctggtcatgacgctggacggcgtcaaccagttcaccagtgtcttctgcctgacagtcatgagcgtggaccgctacctggcagtggtgcacccgctgagctcggcccgctggcgccgcccgcgtgtggccaagctggcgagcgccgcggcctgggtcctgtctctgtgcatgtcgctgccgctcctggtgttcgcggacgtgcaggagggcggtacctgcaacgccagctggccggagcccgtggggctgtggggcgccgtcttcatcatctacacggccgtgctgggcttcttcgcgccgctgctggtcatctgcctgtgctacctgctcatcgtggtgaaggtgagggcggcgggcgtgcgcgtgggctgcgtgcggcggcgctcggagcggaaggtgacgcgcatggtgttggtggtggtgctggtgtttgcgggatgttggctgcccttcttcaccgtcaacatcgtcaacctggccgtggcgctgccccaggagcccgcctccgccggcctctacttcttcgtggtcatcctctcctacgccaacagctgtgccaaccccgtcctctacggcttcctctctgacaacttccgccagagcttccagaaggttctgtgcctccgcaagggctctggtgccaaggacgctgacgccacggagccgcgtccagacaggatccggcagcagcaggaggccacgccacccgcgcaccgcgccgcagccaacgggcttatgcagaccagcaagctgtgagagtgcaggcggggggtgggcggccccgtgtcacccccaggagcggaggttgcactgcggtgacccccacccatgacctgccagtcaggatgctccccggcggtggtgtgaggacagagctggctgaagccaggctggggtagacacagggcagtaggttccccaccgtgaccgaccatcccctctaaccgtctgccacacagcgggggctcccgggaggtaggggaggtggccagaccggtggggggctccgccatgccgtgcaagtgctcagggccgcctcaccctccatctggccccagcccatgccggccttccctctggggagcgacttttccagaaggccggccaggcgagagggtcttcctgacggcggagctgacctgcccggcccaccagctgcatgtcagctccgagccaccgggtccccgtccaaggctgctctgctaagttaaagacacccgaaagcgcttgactcaggtccccggagtccctggccagggccccagcccctcgcttgccctgcactgtgtggactctggggatgcaggtgtaaggggagtgtggctgggcagcccctggtcagccagggtcacgcctgtcctgggggccccaccctgctgcccgacaccccccatgggaggctgcgggcggcagttgctgtctcagagaggggagtgtgggggcttgggcgctggcctagccaggggcgaggtggggaggcggctggtgcagaggagagctgggggctgaggttggggtgaaggctgcagccctccaggctgctgggggtgcagatggctgtgccgtgctgagattggctctgtctggaggggtccagtgtggggtgcctgagggcactagggagaggtgctcctgctgcaggaggacctgagggtcagggcttggagaggacagggaacctgcggccgtctcttctgctttggggcaggggctctggcccgggagagggaacggggacaggagcagaggacggtcatccaggcgcagcggggagctgctccccaggccacagcagacagcactgctgagaggcagcggccgcgcgggtgacgcaaatggcaggccctgggaatcccgccgcctcccacctagaattgtcctacctcccccaccccaaacaccagcttttcctggcgccccaggcccagaacgtgggcccagagagccttgctggggtctctggggcaccttggccttgctctgaggctggaaggagaaggaccagggtgcggcatcactcggcctcagggacccctctgccctgcccagcactggccccgacccgtgctcccgccgtctgcccagagcaggacctcaacctcctggagggcacagggagcggctgagtgggcacaaatcctggcaggagaaaggcccaggctgaggccaggcctgggaaacatccaagcagtgaggacacgcgtgtttgacaactgctcccctgaataaatgcgaggataaatgttt

SEQ ID NO: 68094 - DNA, 2640 bp, Artificial Sequence
  derived and/or modified sequence
ccgggagcccggagccagtgccgcgcggacatcggggctcccccagcctgacgcaccccagggctgccgccatggagcccctgttcccagcctccacgcccagctggaacgcctcctccccgggggctgcctctggaggcggtgacaacaggacgctggtggggccggcgccctcggcaggggcccgggcggtgctggtgcccgtgctgtacctgctggtgtgtgcggccgggctgggcgggaacacgctggtcatctacgtggtgctgcgcttcgccaagatgaagaccgtcaccaacatctacattctcaacctggcagtggccgacgtcctgtacatgctggggctgcctttcctggccacgcagaacgccgcgtccttctggcccttcggccccgtcctgtgccgcctggtcatgacgctggacggcgtcaaccagttcaccagtgtcttctgcctgacagtcatgagcgtggaccgctacctggcagtggtgcacccgctgagctcggcccgctggcgccgcccgcgtgtggccaagctggcgagcgccgcggcctgggtcctgtctctgtgcatgtcgctgccgctcctggtgttcgcggacgtgcaggagggcggtacctgcaacgccagctggccggagcccgtggggctgtggggcgccgtcttcatcatctacacggccgtgctgggcttcttcgcgccgctgctggtcatctgcctgtgctacctgctcatcgtggtgaaggtgagggcggcgggcgtgcgcgtgggctgcgtgcggcggcgctcggagcggaaggtgacgcgcatggtgttggtggtggtgctggtgtttgcgggatgttggctgcccttcttcaccgtcaacatcgtcaacctggccgtggcgctgccccaggagcccgcctccgccggcctctacttcttcgtggtcatcctctcctacgccaacagctgtgccaaccccgtcctctacggcttcctctctgacaacttccgccagagcttccagaaggttctgtgcctccgcaagggctctggtgccaaggacgctgacgccacggagccgcgtccagacaggatccggcagcagcaggaggccacgccacccgcgcaccgcgccgcagccaacgggcttatgcagaccagcaagctgtgagagtgcaggcggggggtgggcggccccgtgtcacccccaggagcggaggttgcactgcggtgacccccacccatgacctgccagtcaggatgctccccggcggtggtgtgaggacagagctggctgaagccaggctggggtagacacagggcagtaggttccccaccgtgaccgaccatcccctctaaccgtctgccacacagcgggggctcccgggaggtaggggaggtggccagaccggtggggggctccgccatgccgtgcaagtgctcagggccgcctcaccctccatctggccccagcccatgccggccttccctctggggagcgacttttccagaaggccggccaggcgagagggtcttcctgacggcggagctgacctgcccggcccaccagctgcatgtcagctccgagccaccgggtccccgtccaaggctgctctgctaagttaaagacacccgaaagcgcttgactcaggtccccggagtccctggccagggccccagcccctcgcttgccctgcactgtgtggactctggggatgcaggtgtaaggggagtgtggctgggcagcccctggtcagccagggtcacgcctgtcctgggggccccaccctgctgcccgacaccccccatgggaggctgcgggcggcagttgctgtctcagagaggggagtgtgggggcttgggcgctggcctagccaggggcgaggtggggaggcggctggtgcagaggagagctgggggctgaggttggggtgaaggctgcagccctccaggctgctgggggtgcagatggctgtgccgtgctgagattggctctgtctggaggggtccagtgtggggtgcctgagggcactagggagaggtgctcctgctgcaggaggacctgagggtcagggcttggagaggacagggaacctgcggccgtctcttctgctttggggcaggggctctggcccgggagagggaacggggacaggagcagaggacggtcatccaggcgcagcggggagctgctccccaggccacagcagacagcactgctgagaggcagcggccgcgcgggtgacgcaaatggcaggccctgggaatcccgccgcctcccacctagaattgtcctacctcccccaccccaaacaccagcttttcctggcgccccaggcccagaacgtgggcccagagagccttgctggggtctctggggcaccttggccttgctctgaggctggaaggagaaggaccagggtgcggcatcactcggcctcagggacccctctgccctgcccagcactggccccgacccgtgctcccgccgtctgcccagagcaggacctcaacctcctggagggcacagggagcggctgagtgggcacaaatcctggcaggagaaaggcccaggctgaggccaggcctgggaaacatccaagcagtgaggacacgcgtgtttgacaactgctcccctgaataaa

SEQ ID NO: 68095 - DNA, 1085 bp, Artificial Sequence
  derived and/or modified sequence
atggagcccctgttcccagcctccacgcccagctggaacgcctcctccccgggggctgcctctggaggcggtgacaacaggacgctggtggggccggcgccctcggcaggggcccgggcggtgctggtgcccgtgctgtacctgctggtgtgtgcggccgggctgggcgggaacacgctggtcatctacgtggtgctgcgcttcgccaagatgaagaccgtcaccaacatctacattctcaacctggcagtggccgacgtcctgtacatgctggggctgcctttcctggccacgcagaacgccgcgtccttctggcccttcggccccgtcctgtgccgcctggtcatgacgctggacggcgtcaaccagttcaccagtgtcttctgcctgacagtcatgagcgtggaccgctacctggcagtggtgcacccgctgagctcggcccgctggcgccgcccgcgtgtggccaagctggcgagcgccgcggcctgggtcctgtctctgtgcatgtcgctgccgctcctggtgttcgcggacgtgcaggagggcggtacctgcaacgccagctggccggagcccgtggggctgtggggcgccgtcttcatcatctacacggccgtgctgggcttcttcgcgccgctgctgagaggcagcggccgcgcgggtgacgcaaatggcaggccctgggaatcccgccgcctcccacctagaattgtcctacctcccccaccccaaacaccagcttttcctggcgccccaggcccagaacgtgggcccagagagccttgctggggtctctggggcaccttggccttgctctgaggctggaaggagaaggaccagggtgcggcatcactcggcctcagggacccctctgccctgcccagcactggccccgacccgtgctcccgccgtctgcccagagcaggacctcaacctcctggagggcacagggagcggctgagtgggcacaaatcctggcaggagaaaggcccaggctgaggccaggcctgggaaacatccaagcagtgaggacacgcgtgtttgacaactgctcccctgaataaatgcgaggataaatgttt

SEQ ID NO: 68096 - protein, 159 aa, Artificial Sequence
  derived and/or modified sequence
MRPDRAEAPGPPAMAAGGPGAGSAAPVSSTSSLPLAALNMRVRRRLSLFLNVRTQVAADWTALAEEMDFEYLEIRQLETQADPTGRLLDAWQGRPGASVGRLLELLTKLGRDDVLLELGPSIGAAGWWWLSLMITCRARNVTSRPNLHSASLQVPIRSD

SEQ ID NO: 68097 - DNA, 480 bp, Artificial Sequence
  derived and/or modified sequence
atgagaccagatcgcgctgaagccccaggtccgccagcaatggcagctgggggccccggagcgggctcagctgcgcctgtctccagtacctcatcgcttccattagctgcacttaacatgcgggtcagaaggcggctgtccctgtttctgaatgtgagaacccaagttgctgccgattggactgcactggctgaggagatggacttcgaatacctcgagatacggcagttggaaacacaggccgatcccacaggacgcctcctggatgcctggcaagggcggcccggcgctagcgttggaaggctgttagagctgctaacaaaactgggccgggacgacgtcctgctggagttaggtcctagcattggggctgccggctggtggtggctgtcactgatgattacatgccgggccagaaacgtgacctcccggcctaacctccattccgctagcttacaagtacccatcagatccgactag

SEQ ID NO: 68098 - DNA, 480 bp, Artificial Sequence
  derived and/or modified sequence
atgaggccagacagagctgaggcccctggccccccagccatggccgccggcggccctggagctggcagcgctgcccctgtgagcagcaccagcagcctgcccctggccgccctgaacatgagggtgagaagaaggctgagcctcttcctgaatgtgaggacccaggtggccgctgactggacagccctggccgaggagatggactttgagtacctggagatccggcagctggagacccaggccgaccccaccggccgcctgctggatgcctggcagggccggcctggggcctctgtgggccgcctgctggagctgctgaccaagctgggcagagatgatgtgctgctggagctgggccccagcatcggggctgctggctggtggtggctgagcctgatgatcacctgccgggccagaaatgtgaccagccggcccaacctgcacagcgccagcctgcaggtgcccatccgcagtgactag

SEQ ID NO: 68099 - DNA, 976 bp, Artificial Sequence
  derived and/or modified sequence
agacaatgcgacccgaccgcgctgaggctccaggaccgcccgccatggctgcaggaggtcccggcgcggggtctgcggccccggtctcctccacatcctcccttcccctggctgctctcaacatgcgagtgcggcgccgcctgtctctgttcttgaacgtgcggacacaggtggcggccgactggaccgcgctggcggaggagatggactttgagtacttggagatccggcaactggagacacaagcggaccccactggcaggctgctggacgcctggcagggacgccctggcgcctctgtaggccgactgctcgagctgcttaccaagctgggccgcgacgacgtgctgctggagctgggacccagcattggtgccgccggatggtggtggttgtctctgatgattacctgcagagcaaggaatgtgacttccagaccaaatttgcactcagcctctctccaggtgcccatcagaagcgactgatccccatcaagtacaaggcaatgaagaaagagttccccagcatcctgaggttcatcactgtctgcgactacaccaacccctgcaccaaatcttggttctggactcgccttgccaaggccttgtccctgccctgaagactgttctgaggccctgggtgtgtgtgtatctgtctgcctgtccatgtacttctgccctgcctcctcctttcgttgtaggaggaatctgtgctctacttacctctcaattcctggagatgccaacttcacagacacgtctgcagcagctggacatcacatttcatgtcctgcatggaaccagtggctgtgagtggcatgtccacttgctggattatcagccaggacactatagaacaggaccagctgagactaagaaggaccagcagagccagctcagctctgagccattcacacatcttcaccctcagtttcctcacttgaggagtgggatggggagaacagagagtagctgtg

SEQ ID NO: 68100 - DNA, 480 bp, Artificial Sequence
  derived and/or modified sequence
atgcggcccgaccgggccgaggcccccggcccccccgccatggccgcagggggccccggagcaggcagcgctgcccctgtgtcctcaacaagcagcctccctcttgccgcccttaatatgagagtaagacggcgcctgagcctattcctcaacgtgcggacacaggtcgccgctgactggacagcactggctgaggaaatggatttcgagtatttggaaatccgtcagctcgaaactcaggctgacccgactggtcgcctgctagacgcttggcaagggcggcctggcgcgtccgttggccggcttctcgagctgctcaccaagctaggccgcgacgatgtgctgctggaattgggtccatctatcggtgcggctggttggtggtggcttagtttgatgatcacatgtcgcgcgcggaacgtgacatcaagaccaaatttacattcggcttcattgcaggtacctattcgctcagactag

SEQ ID NO: 68101 - DNA, 480 bp, Artificial Sequence
  derived and/or modified sequence
atgcgacctgaccgtgccgaggccccaggacctccggcaatggcggctgggggaccaggtgccggatctgcggctcctgttagttctacctcatcattgccgctggcagctctcaacatgcgtgtaagacgccgactatctctattcctgaatgtccgcacgcaggttgcagcagactggactgcactggccgaggaaatggacttcgagtatctggagatccggcagcttgaaacacaggccgaccctactggtcgccttctggatgcatggcaggggaggcccggagcaagcgtcggccgtctgctcgagctgcttactaagttaggtcgcgacgatgtgcttttagagctgggtccatcaataggggcagcgggttggtggtggctgtccttgatgatcacgtgcagagcacgcaacgtgacctctcgacctaacctgcattccgcctccctgcaggtgcccatccgcagcgattag

SEQ ID NO: 68102 - DNA, 480 bp, Artificial Sequence
  derived and/or modified sequence
atgagacccgacagagccgaggcccccggcccccccgccatggccgccggcggccccggcgccggcagcgccgcccccgtgagcagcaccagcagcctgcccctggccgccctgaacatgagagtgagaagaagactgagcctgttcctgaacgtgagaacccaggtggccgccgactggaccgccctggccgaggagatggacttcgagtacctggagatcagacagctggagacccaggccgaccccaccggcagactgctggacgcctggcagggcagacccggcgccagcgtgggcagactgctggagctgctgaccaagctgggcagagacgacgtgctgctggagctgggccccagcatcggcgccgccggctggtggtggctgagcctgatgatcacctgcagagccagaaacgtgaccagcagacccaacctgcacagcgccagcctgcaggtgcccatcagaagcgactag

SEQ ID NO: 68103 - protein, 317 aa, Artificial Sequence
  derived and/or modified sequence
MRPDRAEAPGPPAMAAGGPGAGSAAPVSSTSSLPLAALNMRVRRRLSLFLNVRTQVAADWTALAEEMDFEYLEIRQLETQADPTGRLLDAWQGRPGASVGRLLELLTKLGRDDVLLELGPSIEEDCQKYILKQQQEEAEKPLQVAAVDSSVPRTAELAGITTLDDPLGHMPERFDAFICYCPSDIQFVQEMIRQLEQTNYRLKLCVSDRDVLPGTCVWSIASELIEKRLARRPRGGCRRMVVVVSDDYLQSKECDFQTKFALSLSPGAHQKRLIPIKYKAMKKEFPSILRFITVCDYTNPCTKSWFWTRLAKALSLP

SEQ ID NO: 68104 - DNA, 954 bp, Artificial Sequence
  derived and/or modified sequence
atgagacccgacagagccgaggcccccggcccccccgccatggccgccggcggccccggcgccggcagcgccgcccccgtgagcagcaccagcagcctgcccctggccgccctgaacatgagagtgagaagaagactgagcctgttcctgaacgtgagaacccaggtggccgccgactggaccgccctggccgaggagatggacttcgagtacctggagatcagacagctggagacccaggccgaccccaccggcagactgctggacgcctggcagggcagacccggcgccagcgtgggcagactgctggagctgctgaccaagctgggcagagacgacgtgctgctggagctgggccccagcatcgaggaggactgccagaagtacatcctgaagcagcagcaggaggaggccgagaagcccctgcaggtggccgccgtggacagcagcgtgcccagaaccgccgagctggccggcatcaccaccctggacgaccccctgggccacatgcccgagagattcgacgccttcatctgctactgccccagcgacatccagttcgtgcaggagatgatcagacagctggagcagaccaactacagactgaagctgtgcgtgagcgacagagacgtgctgcccggcacctgcgtgtggagcatcgccagcgagctgatcgagaagagactggccagaagacccagaggcggctgcagaagaatggtggtggtggtgagcgacgactacctgcagagcaaggagtgcgacttccagaccaagttcgccctgagcctgagccccggcgcccaccagaagagactgatccccatcaagtacaaggccatgaagaaggagttccccagcatcctgagattcatcaccgtgtgcgactacaccaacccctgcaccaagagctggttctggaccagactggccaaggccctgagcctgccctag

SEQ ID NO: 68105 - DNA, 954 bp, Artificial Sequence
  derived and/or modified sequence
atgagacctgacagagccgaagctcccggtcctcccgctatggctgccggtggccccggggccgggtcagcagcaccggtctcatctactagtagtctgcccctggcagctctgaacatgagagtgagacggcgcctctcactctttctgaatgtgcggacacaggtagcggcagactggactgcactggccgaagaaatggatttcgagtatctagaaattaggcagctcgaaacccaggcggaccccacagggcgcctgctggatgcctggcaaggtcgccccggcgcctcggttggtcgcttgcttgagctgctcacaaaactggggcgtgatgatgtcttactggagctcggaccgagtatcgaggaagattgtcagaagtatatactcaagcagcaacaggaggaggccgagaaacctctccaggtggctgcagtcgatagttctgtccccaggaccgccgagcttgcaggaataaccacactcgatgacccattgggacacatgccagagagattcgatgccttcatttgctattgcccttctgatatccagtttgtacaggaaatgatccggcaactcgagcaaaccaattatcggctcaaactttgtgtaagtgaccgtgacgtgctcccaggtacatgcgtgtggtcgattgcgagcgaactaatagaaaaacgattagctcgacggccacggggcggatgccggcgtatggtcgtggtggtgtccgacgattatttgcagagcaaagaatgtgatttccaaaccaagtttgctctgagtctgtctccaggagctcatcagaaaaggctgattccgattaagtacaaggctatgaaaaaagagttcccatctattttacgatttataacagtttgtgactatactaacccctgcaccaagagctggttctggacacgactcgcaaaagctctgagtctcccctag

SEQ ID NO: 68106 - DNA, 954 bp, Artificial Sequence
  derived and/or modified sequence
atgaggccagacagagctgaggcccctggccccccagccatggccgccggcggccctggagctggcagcgctgcccctgtgagcagcaccagcagcctgcccctggccgccctgaacatgagggtgagaagaaggctgagcctcttcctgaatgtgaggacccaggtggccgctgactggacagccctggccgaggagatggactttgagtacctggagatccggcagctggagacccaggccgaccccaccggccgcctgctggatgcctggcagggccggcctggggcctctgtgggccgcctgctggagctgctgaccaagctgggcagagatgatgtgctgctggagctgggccccagcattgaggaggactgccagaagtacatcctgaagcagcagcaggaggaggccgagaagcccctgcaggtggccgctgtggacagctctgtgcccaggacagctgagctggccggcatcaccaccctggatgaccccctgggccacatgcctgagagatttgatgccttcatctgctactgccccagcgacatccagtttgtgcaggagatgatccggcagctggagcagaccaactaccgcctgaagctgtgtgtgtctgacagagatgtgctgcccggcacctgtgtgtggagcatcgccagcgagctgattgagaagaggctggcccggcggccccggggcggctgcaggaggatggtggtggtggtgtctgatgactacctgcagagcaaagaatgtgacttccagaccaagtttgccctgagcctgagccctggggcccaccagaagaggctcatccccatcaagtacaaggccatgaagaaggagttccccagcatcctgcgcttcatcaccgtgtgtgactacaccaacccctgcaccaagtcctggttctggacccggctggccaaggccctgagcctgccctag

SEQ ID NO: 68107 - DNA, 954 bp, Artificial Sequence
  derived and/or modified sequence
atgcggcccgaccgggccgaggcccccggcccccccgccatggccgccggagggcccggagccggatcagcagctcctgtgagcagcacgtcctcactacccctggccgcgctgaacatgagggtccgcagaagactgagtttgttcctgaatgtacgcacccaggtggctgccgattggactgctttagccgaggaaatggactttgagtacctggagattcgtcagctagaaacccaagccgatccgactgggaggttgttagatgcttggcagggaagaccaggcgcaagcgtggggaggctcctcgagcttctgacaaagctgggtagagacgatgtgttgttagagctagggccatctatcgaagaggattgtcagaagtacatcctaaagcaacagcaggaggaggcagagaagcctctacaggtggccgcagttgattcttccgtgcccaggactgcagaacttgccggaatcaccacacttgacgaccccctgggtcacatgcccgagcgcttcgacgctttcatttgttactgcccctctgacatacagttcgtgcaggagatgatccgccagctggagcagacaaattaccgactcaagctatgcgtgtccgacagggacgtcttaccagggacttgcgtatggtctattgcatctgagttgattgaaaaaagactggccaggaggcctaggggcggctgccgaaggatggtggtcgtggtgtcagacgattatttacagagtaaagaatgcgacttccagaccaagttcgctctctcacttagtcctggcgcccatcagaagcgcctgatcccaatcaaatataaggccatgaaaaaggaattcccttccattctccgttttatcacagtatgtgactacaccaacccatgtactaaatcatggttttggactcggctggctaaagccttgagtctcccttag

SEQ ID NO: 68108 - DNA, 2871 bp, Artificial Sequence
  derived and/or modified sequence
agattcctacttcttacgccccccacatcacccgcctcgagacctcaagggtagaggtgggcacccccgcctccgcacttttgctcggggctccagattgtagggcagggcggcgcttctcggaaagcgaaagccggcggggcggggcgggtgccgcaggagaaagaggaagcgctggcagacaatgcgacccgaccgcgctgaggctccaggaccgcccgccatggctgcaggaggtcccggcgcggggtctgcggccccggtctcctccacatcctcccttcccctggctgctctcaacatgcgagtgcggcgccgcctgtctctgttcttgaacgtgcggacacaggtggcggccgactggaccgcgctggcggaggagatggactttgagtacttggagatccggcaactggagacacaagcggaccccactggcaggctgctggacgcctggcagggacgccctggcgcctctgtaggccgactgctcgagctgcttaccaagctgggccgcgacgacgtgctgctggagctgggacccagcattgaggaggattgccaaaagtatatcttgaagcagcagcaggaggaggctgagaagcctttacaggtggccgctgtagacagcagtgtcccacggacagcagagctggcgggcatcaccacacttgatgaccccctggggcatatgcctgagcgtttcgatgccttcatctgctattgccccagcgacatccagtttgtgcaggagatgatccggcaactggaacagacaaactatcgactgaagttgtgtgtgtctgaccgcgatgtcctgcctggcacctgtgtctggtctattgctagtgagctcatcgaaaagaggttggctagaaggccacggggtgggtgccgccggatggtggtggttgtctctgatgattacctgcagagcaaggaatgtgacttccagaccaaatttgcactcagcctctctccaggtgcccatcagaagcgactgatccccatcaagtacaaggcaatgaagaaagagttccccagcatcctgaggttcatcactgtctgcgactacaccaacccctgcaccaaatcttggttctggactcgccttgccaaggccttgtccctgccctgaagactgttctgaggccctgggtgtgtgtgtatctgtctgcctgtccatgtacttctgccctgcctcctcctttcgttgtaggaggaatctgtgctctacttacctctcaattcctggagatgccaacttcacagacacgtctgcagcagctggacatcacatttcatgtcctgcatggaaccagtggctgtgagtggcatgtccacttgctggattatcagccaggacactatagaacaggaccagctgagactaagaaggaccagcagagccagctcagctctgagccattcacacatcttcaccctcagtttcctcacttgaggagtgggatggggagaacagagagtagctgtgtttgaatccctgtaggaaatggtgaagcatagctctgggtctcctgggggagaccaggcttggctgcgggagagctggctgttgctggactacatgctggccactgctgtgaccacgacactgctggggcagcttcttccacagtgatgcctactgatgcttcagtgcctctgcacaccgcccattccacttcctccttccccacagggcaggtggggaagcagtttggcccagcccaaggagaccccaccttgagccttatttcctaatgggtccacctctcatctgcatctttcacacctcccagcttctgcccaaccttcagcagtgacaagtccccaagagactcgcctgagcagcttgggctgcttttcatttccacctgtcaggatgcctgtggtcatgctctcagctccacctggcatgagaagggatcctggcctctggcatattcatcaagtatgagttctggggatgagtcactgtaatgatgtgagcagggagccttcctccctgggccacctgcagagagctttcccaccaactttgtaccttgattgccttacaaagttatttgtttacaaacagcgaccatataaaagcctcctgccccaaagcttgtgggcacatgggcacatacagactcacatacagacacacacatatatgtacagacatgtactctcacacacacaggcaccagcatacacacgtttttctaggtacagctcccaggaacagctaggtgggaaagtcccatcactgagggagcctaaccatgtccctgaacaaaaattgggcactcatctattccttttctcttgtgtccctactcattgaaaccaaactctggaaaggacccaatgtaccagtatttatacctctaatgaagcacagagagaggaagagagctgcttaaactcacacaacaatgaactgcagacacagctgttctctccctctctccttcccagagcaatttatactttaccctcaggctgtcctctggggagaaggtgccatggtcttaggtgtctgtgccccaggacagaccctaggaccctaaatccaatagaaaatgcatatctttgctccactttcagccaggctggagcaaggtaccttttcttaggatcttgggagggaatggatgcccctctctgcatgatcttgttgaggcatttagctgccatgcacctgtccccctttaatactgggcattttaaagccatctcaagaggcatcttctacatgttttgtacgcattaaaataatttcaaagatatctgagaaaagccgatatttgccattcttcctatatcctggaatatatcttgcatcctgagtttataataataaataatattctaccttgg

SEQ ID NO: 68109 - DNA, 954 bp, Artificial Sequence
  derived and/or modified sequence
atgcggcctgatcgcgcagaagctccagggccacctgcaatggccgctggaggacctggcgcaggatctgctgctcccgtctcctcgaccagcagtctgcctctggctgccttaaacatgagagtcagaagacggttatctcttttcctgaacgtaaggacccaagtggccgcagactggactgcacttgctgaggagatggatttcgaatacctagaaatacgccagctggaaactcaagccgatccaacaggacgattgctggacgcctggcagggaagacctggagcttctgtcggtcgactgctggaattgctgacaaagctgggacgcgacgatgtgctgctcgaattggggccttctattgaggaggactgccagaagtacattcttaagcagcaacaagaagaggctgagaaacctctgcaggtggcggcagtcgattcatctgtgcctcgtacggcagaattagccggtataaccacactcgatgacccccttgggcacatgccggagcgctttgatgcttttatttgttattgccctagcgacatccagttcgttcaggaaatgatcagacagctcgagcagactaactaccggttgaagctttgtgtctctgatcgtgatgtgcttccaggtacatgcgtgtggtctatagcaagcgagctgatagaaaagagactggcccgaagacctagagggggttgccggagaatggtggtggtggtatccgatgactacctccagtccaaggaatgtgatttccagacaaagtttgccctctcattgtcacctggtgcgcatcagaaacgcctgattcccatcaagtacaaggctatgaaaaaggaattcccaagtattctccgatttatcaccgtatgcgactacaccaacccgtgtaccaagtcttggttttggactcgacttgcaaaggctttgtctctgccttag

SEQ ID NO: 68110 - protein, 264 aa, Artificial Sequence
  derived and/or modified sequence
MRPDRAEAPGPPAMAAGGPGAGSAAPVSSTSSLPLAALNMRVRRRLSLFLNVRTQVAADWTALAEEMDFEYLEIRQLETQADPTGRLLDAWQGRPGASVGRLLELLTKLGRDDVLLELGPSIGHMPERFDAFICYCPSDIQFVQEMIRQLEQTNYRLKLCVSDRDVLPGTCVWSIASELIEKRCRRMVVVVSDDYLQSKECDFQTKFALSLSPGAHQKRLIPIKYKAMKKEFPSILRFITVCDYTNPCTKSWFWTRLAKALSLP

SEQ ID NO: 68111 - DNA, 795 bp, Artificial Sequence
  derived and/or modified sequence
atgagacctgatagagcagaagctcctggccctcctgctatggctgctggtggacctggtgcgggttctgcagcccctgtgtccagcaccagcagccttccattggctgccttgaacatgcgggtaagacgtcgcctctctctatttctgaatgtgcgcacacaagtcgcagccgattggactgccctcgctgaggagatggattttgagtacctcgagatccgccaactcgagactcaggccgacccaactggaagactcctagatgcatggcagggccggccgggagccagtgtgggccgcctactcgaactcctaactaagcttggacgcgatgatgtccttttggagctcggcccatcaattggccacatgcccgaacgctttgatgcgttcatttgctactgtccctccgacatccagtttgtccaggaaatgattcgccaactggagcagacaaattatcgtctcaaactgtgcgttagcgaccgggacgttttacctgggacctgtgtgtggagcatcgcttccgagctgattgaaaaaagatgcagaaggatggtagtcgttgtgagcgatgactatctgcagtcaaaagagtgtgactttcagactaagtttgccctctcactttctccaggtgctcatcagaagaggctgatcccaattaaatataaggccatgaagaaggagttcccctctattctgcggtttatcacagtctgtgattacaccaacccttgcactaagagttggttctggacacggctggccaaagccctaagcctcccatag

SEQ ID NO: 68112 - DNA, 795 bp, Artificial Sequence
  derived and/or modified sequence
atgaggccagacagagctgaggcccctggccccccagccatggccgccggcggccctggagctggcagcgctgcccctgtgagcagcaccagcagcctgcccctggccgccctgaacatgagggtgagaagaaggctgagcctcttcctgaatgtgaggacccaggtggccgctgactggacagccctggccgaggagatggactttgagtacctggagatccggcagctggagacccaggccgaccccaccggccgcctgctggatgcctggcagggccggcctggggcctctgtgggccgcctgctggagctgctgaccaagctgggcagagatgatgtgctgctggagctgggccccagcatcggccacatgcctgagagatttgatgccttcatctgctactgccccagcgacatccagtttgtgcaggagatgatccggcagctggagcagaccaactaccgcctgaagctgtgtgtgtctgacagagatgtgctgcccggcacctgtgtgtggagcatcgccagcgagctgattgagaagcgctgcaggaggatggtggtggtggtgtctgatgactacctgcagagcaaagaatgtgacttccagaccaagtttgccctgagcctgagccctggggcccaccagaagaggctcatccccatcaagtacaaggccatgaagaaggagttccccagcatcctgcgcttcatcaccgtgtgtgactacaccaacccctgcaccaagtcctggttctggacccggctggccaaggccctgagcctgccctag

SEQ ID NO: 68113 - DNA, 1279 bp, Artificial Sequence
  derived and/or modified sequence
gcacttttgctcggggctccagattgtagggcagggcggcgcttctcggaaagcgaaagccggcggggcggggcgggtgccgcaggagaaagaggaagcgctggcagacaatgcgacccgaccgcgctgaggctccaggaccgcccgccatggctgcaggaggtcccggcgcggggtctgcggccccggtctcctccacatcctcccttcccctggctgctctcaacatgcgagtgcggcgccgcctgtctctgttcttgaacgtgcggacacaggtggcggccgactggaccgcgctggcggaggagatggactttgagtacttggagatccggcaactggagacacaagcggaccccactggcaggctgctggacgcctggcagggacgccctggcgcctctgtaggccgactgctcgagctgcttaccaagctgggccgcgacgacgtgctgctggagctgggacccagcattgggcatatgcctgagcgtttcgatgccttcatctgctattgccccagcgacatccagtttgtgcaggagatgatccggcaactggaacagacaaactatcgactgaagttgtgtgtgtctgaccgcgatgtcctgcctggcacctgtgtctggtctattgctagtgagctcatcgaaaagaggtgccgccggatggtggtggttgtctctgatgattacctgcagagcaaggaatgtgacttccagaccaaatttgcactcagcctctctccaggtgcccatcagaagcgactgatccccatcaagtacaaggcaatgaagaaagagttccccagcatcctgaggttcatcactgtctgcgactacaccaacccctgcaccaaatcttggttctggactcgccttgccaaggccttgtccctgccctgaagactgttctgaggccctgggtgtgtgtgtatctgtctgcctgtccatgtacttctgccctgcctcctcctttcgttgtaggaggaatctgtgctctacttacctctcaattcctggagatgccaacttcacagacacgtctgcagcagctggacatcacatttcatgtcctgcatggaaccagtggctgtgagtggcatgtccacttgctggattatcagccaggacactatagaacaggaccagctgagactaagaaggaccagcagagccagctcagctctgagccattcacacatcttcaccctcagtttcctcacttgaggagtgggatggggagaacagagagtagctgtgtttgaatccctgtagga

SEQ ID NO: 68114 - DNA, 795 bp, Artificial Sequence
  derived and/or modified sequence
atgcggcccgaccgggccgaggcccccggcccccccgccatggccgctggaggcccaggcgctgggagcgctgcgcccgtgtcttccacctcatcgctgcccttggccgctttgaacatgcgcgtccggaggcggttgtccctgtttctaaatgtccgcactcaggtagctgccgactggacggcactggcagaggagatggactttgagtatctggagattcgtcagctggagacccaggcagaccctaccggccgtctgctggacgcctggcaaggcagacccggagcaagtgtgggacgtctgcttgaactccttacgaaattaggcagggatgatgtgctgttggagttgggcccttccatcggacatatgcccgaacgcttcgacgcgtttatctgttattgtcccagtgacatccagttcgtgcaggagatgatacggcagctggagcagacaaattaccggttaaagttatgtgtgtccgaccgggatgttctccccgggacttgcgtgtggtctatcgcctcggagttgattgagaaaaggtgccgccgcatggtcgtggttgtgagtgacgactatctgcagagcaaggagtgtgacttccaaactaaatttgccctgagcctgagtcctggcgcacaccaaaaaaggcttattccaataaagtacaaggcaatgaagaaggagtttccatctatattgaggtttatcaccgtgtgcgattatacaaatccgtgcacaaagagctggttttggactcgcttagccaaagccctttccctcccttag

SEQ ID NO: 68115 - DNA, 795 bp, Artificial Sequence
  derived and/or modified sequence
atgcgtccggatagagccgaggcccctggccctcctgccatggccgcaggtggacctggagccggtagcgccgctcctgtgtcttccaccagcagtcttccattggctgctttgaatatgagagttagaaggcgacttagcctgtttctcaacgtcaggactcaagtggctgccgattggacagccctcgctgaggagatggactttgaatatctggagattcggcagttggaaacccaggctgaccccactgggcgacttctcgacgcctggcagggtagaccaggcgcttctgtaggaagactgctcgaactcctgactaaactggggagagatgacgtcttgctggagctggggccaagcattggtcacatgccagaaaggtttgacgccttcatttgctattgtcccagtgacattcagttcgtgcaggaaatgataaggcagttggaacaaacgaattataggcttaaactttgcgtgagtgatcgggatgtgctcccgggaacctgtgtgtggtcaattgcaagcgagctcatagagaagcgctgccggaggatggtggtggtagttagtgatgactacctgcagtctaaggagtgtgatttccagaccaagttcgctctctccttatctcctggagctcaccagaaaaggctcataccaataaaatataaggcgatgaaaaaggagtttccatcaatcctcagatttattacagtctgtgattacactaacccatgtaccaagtcctggttttggactaggctcgctaaggcgctgagtctcccctag

SEQ ID NO: 68116 - DNA, 795 bp, Artificial Sequence
  derived and/or modified sequence
atgagacccgacagagccgaggcccccggcccccccgccatggccgccggcggccccggcgccggcagcgccgcccccgtgagcagcaccagcagcctgcccctggccgccctgaacatgagagtgagaagaagactgagcctgttcctgaacgtgagaacccaggtggccgccgactggaccgccctggccgaggagatggacttcgagtacctggagatcagacagctggagacccaggccgaccccaccggcagactgctggacgcctggcagggcagacccggcgccagcgtgggcagactgctggagctgctgaccaagctgggcagagacgacgtgctgctggagctgggccccagcatcggccacatgcccgagagattcgacgccttcatctgctactgccccagcgacatccagttcgtgcaggagatgatcagacagctggagcagaccaactacagactgaagctgtgcgtgagcgacagagacgtgctgcccggcacctgcgtgtggagcatcgccagcgagctgatcgagaagagatgcagaagaatggtggtggtggtgagcgacgactacctgcagagcaaggagtgcgacttccagaccaagttcgccctgagcctgagccccggcgcccaccagaagagactgatccccatcaagtacaaggccatgaagaaggagttccccagcatcctgagattcatcaccgtgtgcgactacaccaacccctgcaccaagagctggttctggaccagactggccaaggccctgagcctgccctag

SEQ ID NO: 68117 - protein, 204 aa, Artificial Sequence
  derived and/or modified sequence
MRPDRAEAPGPPAMAAGGPGAGSAAPVSSTSSLPLAALNMRVRRRLSLFLNVRTQVAADWTALAEEMDFEYLEIRQLETQADPTGRLLDAWQGRPGASVGRLLELLTKLGRDDVLLELGPSIEEDCQKYILKQQQEEAEKPLQVAAVDSSVPRTAELAGITTLDDPLGAAGWWWLSLMITCRARNVTSRPNLHSASLQVPIRSD

SEQ ID NO: 68118 - DNA, 510 bp, Artificial Sequence
  derived and/or modified sequence
atggccgccggcggccccggcgccggcagcgccgcccccgtgagcagcaccagcagcctgcccctggccgccctgaacatgagagtgagaagaagactgagcctgttcctgaacgtgagaacccaggtggccgccgactggaccgccctggccgaggagatggacttcgagtacctggagatcagacagctggagacccaggccgaccccaccggcagactgctggacgcctggcagggcagacccggcgccagcgtgggcagactgctggagctgctgaccaagctgggcagagacgacgtgctgctggagctgggccccagcatcgaggaggactgccagaagtacatcctgaagcagcagcaggaggaggccgagaagcccctgcaggtggccgccgtggacagcagcgtgcccccccacctgatgaccccctggggcatctgcctgagcgtgagcatgcccagcagcgccatcgcccccgccaccagcagcctgtgcagaagatag

SEQ ID NO: 68119 - DNA, 510 bp, Artificial Sequence
  derived and/or modified sequence
atggcagcaggaggcccaggggccggctcagcagcacctgtttcttctacaagcagcctaccacttgcggctttaaacatgagggtacgacggcgactgtcgctgtttctcaatgtgcgaacacaagtggcagccgactggacggcccttgccgaggagatggacttcgaatatctagaaattagacaactcgagactcaggccgatcctacaggccggctgctggacgcttggcaggggcgcccgggcgcttcggtcggtcgactgctggagctactcacaaagttgggtcgggacgacgtcctgctcgagttgggacctagtatagaggaggactgccagaagtatattctcaaacagcaacaggaagaggcagaaaagcctctccaggttgccgctgtggactctagtgtgccgccacatctgatgaccccgtgggggatctgtctcagtgtctcaatgccgtctagcgctattgcccctgccacaagcagcctctgcagacggtag

SEQ ID NO: 68120 - DNA, 510 bp, Artificial Sequence
  derived and/or modified sequence
atggctgctgggggccctggggccggcagcgctgcccctgtgagcagcaccagcagcctgcccctggccgccctgaacatgagggtgagaagaaggctgagcctcttcctgaatgtgaggacccaggtggccgctgactggacagccctggccgaggagatggactttgagtacctggagatccggcagctggagacccaggccgaccccaccggccgcctgctggatgcctggcagggccggcctggggcctctgtgggccgcctgctggagctgctgaccaagctgggcagagatgatgtgctgctggagctgggccccagcattgaggaggactgccagaagtacatcctgaagcagcagcaggaggaggccgagaagcccctgcaggtggccgctgtggacagctctgtgcccccccacctgatgaccccctggggcatctgcctgtctgtgtccatgcccagcagcgccatcgccccagccaccagcagcctgtgcagaagatag

SEQ ID NO: 68121 - DNA, 510 bp, Artificial Sequence
  derived and/or modified sequence
atggccgccggcggccccggcgccggcagcgccgcccccgtgagctccacttcgagcctccccttggccgccctcaatatgagggttaggaggcggctgtccctctttctgaatgtcaggacacaggtcgcagctgactggaccgccctcgctgaagagatggatttcgagtacctggaaatccgccagctggagacccaggctgaccccaccggccggctattggatgcgtggcagggccggccaggcgctagcgtcggtaggctacttgagctgctgaccaaacttggacgggacgatgtgctgctcgaactaggcccaagcatagaggaagactgtcagaaatatattctgaaacagcagcaggaggaggccgaaaaacctcttcaggttgctgccgtcgactcgagtgtccctccccacttaatgactccgtggggaatctgcttgtcagtgagcatgcctagcagtgccatcgcacctgcaacgtcctctctttgcagaagatag

SEQ ID NO: 68122 - DNA, 510 bp, Artificial Sequence
  derived and/or modified sequence
atggctgccggaggcccaggcgctggcagcgctgcacccgtctcttccacaagttcactaccgctggccgcactaaacatgagggtcaggcggcgactgtcactgttcctcaacgtccggacccaagtcgcagctgactggacagctttggccgaggaaatggactttgaatatcttgagattagacagttggagacccaggccgatcccactggacggctcctcgatgcgtggcagggaagaccaggagcttctgtgggacgcctgctggagctactgactaagctaggccgagatgatgtgctcctggagctcggaccatccatcgaagaggattgccagaagtacattctgaaacagcagcaggaagaagccgaaaaaccactgcaggttgccgctgtcgacagctctgtcccccctcacctgatgaccccctggggaatttgcctctcagtgagtatgcctagctcagcaatagcgcctgctacctcaagcctctgccgcaggtag

SEQ ID NO: 68123 - DNA, 615 bp, Artificial Sequence
  derived and/or modified sequence
atgcgccccgatagagctgaggcgccgggcccccctgccatggcagcaggcggccccggtgccggttcggccgcgcccgtcagttccacctcctccttgccactggccgcactcaacatgcgcgttagaaggagactaagcctcttcctgaacgtaagaacacaggtcgccgcagattggactgctctggcagaagagatggacttcgagtatctggagattcgacagctggagacacaagccgacccgacgggacgacttttggatgcctggcagggccgacctggcgcctccgtaggcaggctgctggaactgctcaccaaacttggccgggatgacgtcctactcgagttaggaccgtctatcgaagaggactgccagaagtatatacttaaacagcaacaagaggaggccgagaagccgctgcaggttgccgctgtggatagctctgtgccccgcactgccgagctggcgggaatcactacactggatgaccctctaggcgctgcagggtggtggtggctctctttgatgattacctgtcgcgcacgaaatgtgaccagtagacccaacttgcactctgctagtctacaagtgccaatccggagcgactag

SEQ ID NO: 68124 - DNA, 615 bp, Artificial Sequence
  derived and/or modified sequence
atgaggccagacagagctgaggcccctggccccccagccatggccgccggcggccctggagctggcagcgctgcccctgtgagcagcaccagcagcctgcccctggccgccctgaacatgagggtgagaagaaggctgagcctcttcctgaatgtgaggacccaggtggccgctgactggacagccctggccgaggagatggactttgagtacctggagatccggcagctggagacccaggccgaccccaccggccgcctgctggatgcctggcagggccggcctggggcctctgtgggccgcctgctggagctgctgaccaagctgggcagagatgatgtgctgctggagctgggccccagcattgaggaggactgccagaagtacatcctgaagcagcagcaggaggaggccgagaagcccctgcaggtggccgctgtggacagctctgtgcccaggacagctgagctggccggcatcaccaccctggatgaccccctgggcgccgccggctggtggtggctgagcctgatgatcacctgccgggccagaaatgtgaccagccggcccaacctgcacagcgccagcctgcaggtgcccatccgcagtgactag

SEQ ID NO: 68125 - DNA, 914 bp, Artificial Sequence
  derived and/or modified sequence
aatgcgacccgaccgcgctgaggctccaggaccgcccgccatggctgcaggaggtcccggcgcggggtctgcggccccggtctcctccacatcctcccttcccctggctgctctcaacatgcgagtgcggcgccgcctgtctctgttcttgaacgtgcggacacaggtggcggccgactggaccgcgctggcggaggagatggactttgagtacttggagatccggcaactggagacacaagcggaccccactggcaggctgctggacgcctggcagggacgccctggcgcctctgtaggccgactgctcgagctgcttaccaagctgggccgcgacgacgtgctgctggagctgggacccagcattgaggaggattgccaaaagtatatcttgaagcagcagcaggaggaggctgagaagcctttacaggtggccgctgtagacagcagtgtcccacggacagcagagctggcgggcatcaccacacttgatgaccccctgggtgccgccggatggtggtggttgtctctgatgattacctgcagagcaaggaatgtgacttccagaccaaatttgcactcagcctctctccaggtgcccatcagaagcgactgatccccatcaagtacaaggcaatgaagaaagagttccccagcatcctgaggttcatcactgtctgcgactacaccaacccctgcaccaaatcttggttctggactcgccttgccaaggccttgtccctgccctgaagactgttctgaggccctgggtgtgtgtgtatctgtctgcctgtccatgtacttctgccctgcctcctcctttcgttgtaggaggaatctgtgctctacttacctctcaattcctggagatgccaacttcacagacacgtctgcagcagctggacatcacattt

SEQ ID NO: 68126 - DNA, 615 bp, Artificial Sequence
  derived and/or modified sequence
atgcggcccgaccgggccgaggcccccggcccccccgccatggccgcgggcgggcccggggcgggtagcgccgctcctgtcagctcaacgtctagccttcctctggccgcgttgaatatgagagtgcggaggcgcctgtctcttttcttgaatgtgcgaacccaggtcgccgccgattggacagctcttgccgaagagatggactttgaatatctggagatcagacaattagagacgcaggcagatcctacaggccggttgctcgatgcttggcagggccggcctggagcatcagtgggccgcctcctggagctgcttacaaaactgggaagagatgatgtcttactcgaactaggtccatctattgaggaggattgccagaagtacattttaaagcagcaacaggaagaagccgagaagcccttacaggtagcagctgtggattcgtcagtgcctaggacagcggagttggctggcatcaccactctagacgacccccttggagcagcgggatggtggtggctttctctcatgattacctgtcgggcacgcaacgtgacctcccgccccaacctacactctgcatctctccaggtacccatacggtcagactag

SEQ ID NO: 68127 - DNA, 615 bp, Artificial Sequence
  derived and/or modified sequence
atgcgtcctgaccgggcagaagcccctgggcctccggcaatggccgctggtggcccaggagcaggctccgccgcacccgtgagctcaaccagctctttgcccctggccgcattgaacatgagagtccgcaggcgactgagcttattcctgaacgtgcgcacccaggtagccgcagattggactgcgcttgctgaagagatggatttcgaatacctggagattaggcagctcgagactcaggcagatccaaccgggagactgttagatgcgtggcaagggagacctggtgcctcagtgggcaggttgttggagctgctgaccaaacttggcagagacgatgtgttactggaattgggcccttctatcgaagaggattgtcagaagtacatactgaagcagcaacaggaggaggcagagaaacctctgcaagttgctgcagtcgatagtagtgtacccagaacagccgaacttgccggaatcactacactggatgatcctctgggtgcagccggatggtggtggttgtctttgatgatcacatgcagagccaggaatgtaacatctcggccaaacctccactcggctagtctgcaggtgccgataagaagcgattag

SEQ ID NO: 68128 - DNA, 615 bp, Artificial Sequence
  derived and/or modified sequence
atgagacccgacagagccgaggcccccggcccccccgccatggccgccggcggccccggcgccggcagcgccgcccccgtgagcagcaccagcagcctgcccctggccgccctgaacatgagagtgagaagaagactgagcctgttcctgaacgtgagaacccaggtggccgccgactggaccgccctggccgaggagatggacttcgagtacctggagatcagacagctggagacccaggccgaccccaccggcagactgctggacgcctggcagggcagacccggcgccagcgtgggcagactgctggagctgctgaccaagctgggcagagacgacgtgctgctggagctgggccccagcatcgaggaggactgccagaagtacatcctgaagcagcagcaggaggaggccgagaagcccctgcaggtggccgccgtggacagcagcgtgcccagaaccgccgagctggccggcatcaccaccctggacgaccccctgggcgccgccggctggtggtggctgagcctgatgatcacctgcagagccagaaacgtgaccagcagacccaacctgcacagcgccagcctgcaggtgcccatcagaagcgactag

SEQ ID NO: 68129 - protein, 610 aa, Artificial Sequence
  derived and/or modified sequence
MAAPILKDVVAYVEVWSSNGTENYSKTFTTQLVDMGAKVSKTFNKQVTHVIFKDGYQSTWDKAQKRGVKLVSVLWVEKCRTAGAHIDESLFPAANMNEHLSSLIKKKRKCMQPKDFNFKTPENDKRFQKKFEKMAKELQRQKTNLDDDVPILLFESNGSLIYTPTIEINSRHHSAMEKRLQEMKEKRENLSPTSSQMIQQSHDNPSNSLCEAPLNISRDTLCSDEYFAGGLHSSFDDLCGNSGCGNQERKLEGSINDIKSDVCISSLVLKANNIHSSPSFTHLDKSSPQKFLSNLSKEEINLQRNIAGKVVTPDQKQAAGMSQETFEEKYRLSPTLSSTKGHLLIHSRPRSSSVKRKRVSHGSHSPPKEKCKRKRSTRRSIMPRLQLCRSEDRLQHVAGPALEALSCGESSYDDYFSPDNLKERYSENLPPESQLPSSPAQLSCRSLSKKERTSIFEMSDFSCVGKKTRTVDITNFTAKTISSPRKTGNGEGRATSSCVTSAPEEALRCCRQAGKEDACPEGNGFSYTIEDPALPKGHDDDLTPLEGSLEEMKEAVGLKSTQNKGTTSKISNSSEGEAQSEHEPCFIVDCNMETSTEEKENLPGGYSGSM

SEQ ID NO: 68130 - protein, 562 aa, Artificial Sequence
  derived and/or modified sequence
MAAPILKDVVAYVEVWSSNGTENYSKTFTTQLVDMGAKVSKTFNKQVTHVIFKDGYQSTWDKAQKRGVKLVSVLWVEKCRTAGAHIDESLFPAANMNEHLSSLIKKKRKCMQPKDFNFKTPENDKRFQKKFEKMAKELQRQKTNLASQMIQQSHDNPSNSLCEAPLNISRDTLCSDEYFAGGLHSSFDDLCGNSGCGNQERKLEGSINDIKSDVCISSLVLKANNIHSSPSFTHLDKSSPQKFLSNLSKEEINLQRNIAGKVVTPDQKQAAGMSQETFEEKYRLSPTLSSTKGHLLIHSRPRSSSVKRKRVSHGSHSPPKEKCKRKRSTRRSIMPRLQLCRSEDRLQHVAGPALEALSCGESSYDDYFSPDNLKERYSENLPPESQLPSSPAQLSCRSLSKKERTSIFEMSDFSCVGKKTRTVDITNFTAKTISSPRKTGNGEGRATSSCVTSAPEEALRCCRQAGKEDACPEGNGFSYTIEDPALPKGHDDDLTPLEGSLEEMKEAVGLKSTQNKGTTSKISNSSEGEAQSEHEPCFIVDCNMETSTEEKENLPGGYSGSM

SEQ ID NO: 68131 - DNA, 1689 bp, Artificial Sequence
  derived and/or modified sequence
atggccgcccccatcctgaaggacgtggtggcctacgtggaggtgtggagcagcaacggcaccgagaactacagcaagaccttcaccacccagctggtggacatgggcgccaaggtgagcaagaccttcaacaagcaggtgacccacgtgatcttcaaggacggctaccagagcacctgggacaaggcccagaagagaggcgtgaagctggtgagcgtgctgtgggtggagaagtgcagaaccgccggcgcccacatcgacgagagcctgttccccgccgccaacatgaacgagcacctgagcagcctgatcaagaagaagagaaagtgcatgcagcccaaggacttcaacttcaagacccccgagaacgacaagagattccagaagaagttcgagaagatggccaaggagctgcagagacagaagaccaacctggccagccagatgatccagcagagccacgacaaccccagcaacagcctgtgcgaggcccccctgaacatcagcagagacaccctgtgcagcgacgagtacttcgccggcggcctgcacagcagcttcgacgacctgtgcggcaacagcggctgcggcaaccaggagagaaagctggagggcagcatcaacgacatcaagagcgacgtgtgcatcagcagcctggtgctgaaggccaacaacatccacagcagccccagcttcacccacctggacaagagcagcccccagaagttcctgagcaacctgagcaaggaggagatcaacctgcagagaaacatcgccggcaaggtggtgacccccgaccagaagcaggccgccggcatgagccaggagaccttcgaggagaagtacagactgagccccaccctgagcagcaccaagggccacctgctgatccacagcagacccagaagcagcagcgtgaagagaaagagagtgagccacggcagccacagcccccccaaggagaagtgcaagagaaagagaagcaccagaagaagcatcatgcccagactgcagctgtgcagaagcgaggacagactgcagcacgtggccggccccgccctggaggccctgagctgcggcgagagcagctacgacgactacttcagccccgacaacctgaaggagagatacagcgagaacctgccccccgagagccagctgcccagcagccccgcccagctgagctgcagaagcctgagcaagaaggagagaaccagcatcttcgagatgagcgacttcagctgcgtgggcaagaagaccagaaccgtggacatcaccaacttcaccgccaagaccatcagcagccccagaaagaccggcaacggcgagggcagagccaccagcagctgcgtgaccagcgcccccgaggaggccctgagatgctgcagacaggccggcaaggaggacgcctgccccgagggcaacggcttcagctacaccatcgaggaccccgccctgcccaagggccacgacgacgacctgacccccctggagggcagcctggaggagatgaaggaggccgtgggcctgaagagcacccagaacaagggcaccaccagcaagatcagcaacagcagcgagggcgaggcccagagcgagcacgagccctgcttcatcgtggactgcaacatggagaccagcaccgaggagaaggagaacctgcccggcggctacagcggcagcatgtag

SEQ ID NO: 68132 - DNA, 1689 bp, Artificial Sequence
  derived and/or modified sequence
atggcagcaccaattctaaaagatgttgttgcctacgtggaagtctggtcttccaacgggacagagaactacagcaaaacttttactacccagctggtcgacatgggcgctaaagtgtctaagactttcaacaaacaagttacccatgtgatattcaaggacggataccagtccacttgggacaaggctcaaaagcgaggagtaaagcttgtctctgtcctgtgggtcgagaagtgccgcacagccggcgctcatattgatgaatctctttttcccgccgccaacatgaacgagcacctctcctcattaatcaaaaagaagaggaagtgtatgcagccaaaagactttaacttcaaaacgcctgagaacgacaagcgtttccagaagaaatttgagaaaatggcaaaagaacttcagagacagaagactaatctagccagtcagatgatccagcaaagccatgataatccctcgaactctctctgcgaggctccactgaacatcagcagagatacactctgttccgatgaatactttgccggaggcctgcatagttcttttgatgacctttgtggcaattcgggatgcgggaaccaggaacgcaagttggaggggtccatcaacgatattaagtctgacgtgtgcatttcctcactggttcttaaagccaataacatccacagtagcccctccttcactcacctcgacaagtccagcccacagaagtttctctccaacctgtccaaagaagagatcaatctccagagaaacattgctgggaaggtggtgacccctgatcagaagcaagcagccgggatgtcccaggaaacatttgaggaaaaatacagactctcccctactcttagctccaccaaggggcacctcttgatccacagcaggcccagatcaagcagtgtgaaaagaaagcgtgtgtcacatggatcacactccccccctaaggaaaagtgtaagagaaaaaggtctacccgcaggtcaatcatgcccaggttgcagctctgtaggagcgaggacagactgcagcacgtcgccggaccagctcttgaagctctgtcttgcggggagtcgtcatatgacgactactttagccccgacaaccttaaagagcgctacagcgagaacttacccccggagagccagctcccttccagccccgctcaattgagctgtcgcagcctgagcaaaaaagagaggaccagcatcttcgagatgtcggatttcagctgcgtgggaaagaaaacaagaacggtggacattacaaatttcactgccaaaacaatcagttccccgcgtaaaaccggcaacggggaaggacgggctacgtcttcctgtgtgaccagtgcccccgaggaggcactccggtgctgcagacaggcagggaaggaggacgcctgtcccgagggcaacgggttctcttatacaatcgaggatccggcactgccaaagggacatgacgatgacctaacaccattggagggtagcctggaggaaatgaaagaggcagttgggctcaaatcgacccagaataaagggacaaccagcaaaattagcaacagctccgaaggagaggctcagagcgagcacgaaccatgtttcatcgtggactgcaatatggaaacaagtaccgaggagaaggagaacctgcccggcggctactctggatctatgtag

SEQ ID NO: 68133 - DNA, 1689 bp, Artificial Sequence
  derived and/or modified sequence
atggccgcccccatcctgaaggatgtggtggcctacgtggaggtgtggagcagcaatggaacagagaactacagcaagaccttcaccacccagctggtggacatgggcgccaaggtgtccaagaccttcaacaagcaggtgacccacgtgatcttcaaggatggctaccagagcacctgggacaaggcccagaagaggggcgtgaagctggtgtctgtgctgtgggtggagaagtgcaggacagctggggcccacattgatgagagcctcttccctgctgccaacatgaatgagcacctgagcagcctcatcaagaagaagaggaagtgcatgcagcccaaggacttcaacttcaagaccccagaaaatgacaagcgcttccagaagaagtttgagaagatggccaaggagctgcagaggcagaagaccaacctggccagccagatgatccagcagagccatgacaaccccagcaacagcctgtgtgaggcccccctgaacatcagccgggacaccctgtgcagtgatgagtactttgctgggggcctgcacagcagctttgatgacctgtgtggcaacagcggctgcggcaaccaggagaggaagctggagggcagcatcaatgacatcaagagtgatgtgtgcatcagcagcctggtgctgaaggccaacaacatccacagcagccccagcttcacccacctggacaagagcagcccccagaagttcctgagcaacctgagcaaggaggagatcaacctgcagaggaacattgctgggaaggtggtgaccccagaccagaagcaggccgccggcatgagccaggagacctttgaggagaagtaccgcctgagccccaccctgagcagcaccaagggccacctgctgatccacagccggcccaggagcagctctgtgaagaggaagagggtgagccacggcagccacagcccccccaaggagaagtgcaagaggaagaggagcacccggcgcagcatcatgccccggctgcagctgtgccgctcagaagatcggctgcagcacgtggccggccctgccctggaggccctgagctgtggggagagcagctatgatgactacttctccccagacaacctgaaggagcgctacagcgagaacctgcccccagagagccagctgcccagcagccctgcccagctgagctgccgcagcctgagcaagaaggagaggaccagcatctttgagatgtctgacttcagctgtgtgggcaagaagaccaggacagtggacatcaccaacttcaccgccaagaccatcagcagccccaggaagacaggaaatggagagggccgggccaccagcagctgtgtgaccagcgcccctgaggaggccctgcgctgctgccggcaggccggcaaggaggatgcctgcccagagggcaatggcttctcctacaccatcgaggaccctgccctgcccaagggccatgatgatgacctgacccccctggagggcagcctggaggagatgaaggaggccgtgggcctgaagagcacccagaacaagggcaccaccagcaagatcagcaacagcagcgagggggaggcccagagcgagcacgagccctgcttcatcgtggactgcaacatggagaccagcacagaggagaaggagaacctgcccggcggctacagcggctccatgtag

SEQ ID NO: 68134 - DNA, 2049 bp, Artificial Sequence
  derived and/or modified sequence
agctggccggatcccgccgtctgtcatggcggcccccatcctgaaagatgtagtggcctatgttgaagtgtggtcatccaatggaacagaaaattattcaaagacatttacaacacagcttgtggatatgggggcaaaggtttcaaaaacttttaacaaacaagtaactcacgttatcttcaaagatggctaccagagcacttgggacaaagctcagaagagaggcgtaaagctcgtttcggtgctctgggtggaaaaatgcaggacagctggagcacacattgatgaatcattgttccctgcagctaatatgaatgaacacttatcaagcctaattaaaaaaaaacgtaaatgtatgcagcccaaagattttaattttaaaacaccagaaaatgataagagatttcagaagaaatttgagaaaatggctaaagagctacaaaggcaaaaaacaaatctagcttcccaaatgattcagcagtctcatgataatccaagtaactctctgtgtgaagcacctttgaacatttcacgtgatactttgtgttcagatgaatactttgctggtggcttacactcatcttttgatgatctttgtggaaactcaggatgtggaaatcaggaaaggaagttggaaggatccattaatgacattaaaagtgatgtgtgtatttcttcacttgtattgaaagcaaataatattcattcatcaccatctttcactcacctcgataaatcaagtcctcagaaatttctgagtaatctttcaaaggaagaaataaacttgcaaagaaatattgcaggtaaagtagtcacccctgaccaaaagcaggctgcaggtatgtctcaggagacgtttgaagagaagtatcgtttgtctcctaccttatcttcaacaaaaggccaccttttgatacattcaagacccaggagttcctcagtaaagagaaaaagagtatcacatggctcccattcacctccgaaggaaaaatgcaagagaaagaggagcaccaggagatctatcatgccgaggctgcagctgtgcaggtcggaagacaggctgcagcacgtggcgggacctgccctggaggctcttagctgtggggagtcttcatatgatgactatttttcacctgataatcttaaggaaaggtattcagagaatcttcctcctgaatctcagctgccatcaagccctgctcagttgagctgcagaagtctttctaagaaggagagaacaagcatatttgaaatgtctgatttttcctgcgttggcaaaaaaaccagaacagttgacattaccaatttcacagcaaaaaccatctccagtcctcggaaaactggaaatggtgaaggccgtgcaacttcgagttgcgtgacttctgcccctgaagaagccctaaggtgttgtagacaggctgggaaagaagacgcatgcccagagggaaatggcttttcttacaccattgaggaccctgctcttccaaaaggacatgatgatgatttaactcctttggaaggaagccttgaagaaatgaaagaagcggttggtctgaaaagcacacagaacaaaggtaccacttccaaaatatcaaactcctctgaaggcgaagcccagagtgaacatgagccatgttttatagttgactgtaacatggagacgtctacagaagagaaggaaaacttacccggaggatacagtggaagtatgtgaatctccttttccaagtcaccttcgctaaataaacatgtaacagtgcatccatattttaaatttatcacaactttttcataacttatttccccatttactcctctttttacttaaagaatgtgcatttgatcattccaatgataaactctttaggaatagatgacttgctgtcttgtggaacttctagacttattggttaagtctgttaggaatctatttctccaagacttttccttcttataggtcaaaaggataagtagtccatagtatgaataactgaggggagtgaagtctttttccttattccattggagtcttggcgctgcagcgtgtgt

SEQ ID NO: 68135 - DNA, 1689 bp, Artificial Sequence
  derived and/or modified sequence
atggccgcccccatcctgaaggacgtggtggcctacgtggaggtgtggagctctaatggcacagaaaactactccaaaacattcaccacgcagctcgtcgatatgggagccaaggtttctaaaacattcaacaagcaggtgacccatgtgatctttaaggacggctaccaatctacttgggacaaggcacagaaaagaggggtgaagctggtgagtgtattgtgggttgagaagtgtcggacagccggggcccatatagacgaaagtctgtttcccgctgctaacatgaatgaacacctgtcctcgctgatcaagaagaagcgaaaatgtatgcagcccaaagatttcaacttcaagacgccagagaatgacaagcggttccagaagaagtttgagaaaatggcaaaagaactgcagcggcagaagaccaatctagcatcccagatgatccagcagagtcacgacaacccatctaactccctgtgtgaagcccctctcaacatctcaagggacactctgtgttccgacgaatacttcgccgggggactgcactcttcctttgacgacctctgtggcaattcaggctgtgggaaccaggaacggaaactggaggggagtattaacgacatcaagtccgatgtctgcatttcatctctggtacttaaagccaataacatacatagctcaccctctttcacgcatctggataaatcctcgccccagaagtttctctctaacctgtctaaggaagaaattaacttgcagcgaaacatcgccggcaaggtggtgacgcccgatcagaagcaggcggccggtatgagccaagagacattcgaagaaaagtacaggctcagtcctaccctttcaagtaccaaaggccacctattgatacatagccgccccaggtcttccagtgtgaaacgcaaacgagtttcacatggcagccactcaccacctaaggagaagtgcaagcgaaaacgttcaaccagacgttccattatgccccgactgcaactatgcagaagcgaagacaggttgcagcacgtcgctggtcctgcccttgaagcgcttagctgcggagagtcctcctacgacgattatttctcacccgataacctgaaagaaagatattcggagaatcttccccccgaaagtcagcttccatcatctcctgcccagctctcttgtcggagtctgagcaaaaaggagcgcacaagtatctttgagatgtctgacttctcatgtgtcggcaagaaaacccggaccgtagatataaccaacttcactgcaaaaaccataagcagcccccggaagaccggaaacggagaaggaagggcaacatcctcatgcgttacctccgcacctgaagaagcactgcggtgttgtcggcaagccggaaaggaggacgcttgtcctgaagggaacggattctcatacaccatcgaggatcccgcactacctaagggtcatgacgatgacctgacacctttagagggaagtctggaagaaatgaaagaggcagtgggcttaaaatcgacccaaaataagggaacaacgtccaagatttcaaattctagcgagggtgaggctcagtcggaacacgaaccatgcttcattgtggactgtaacatggagacctcgaccgaggaaaaagaaaatctgccaggcgggtacagcggaagcatgtag

SEQ ID NO: 68136 - DNA, 1689 bp, Artificial Sequence
  derived and/or modified sequence
atggccgctccgatcctaaaggacgtggtcgcttatgtggaggtatggagctccaatggaaccgagaactatagcaagacctttactacgcagctcgtggacatgggagccaaagtaagcaagactttcaataaacaggtgacgcatgtcatcttcaaggatggctaccagagcacttgggacaaagcccaaaagagaggggtgaagctggtcagtgtgttatgggtggagaaatgcaggaccgccggtgctcacatcgatgaatccttgtttccggcagccaatatgaacgaacacctttcttcattaatcaagaaaaagcgcaagtgcatgcagcctaaggattttaatttcaagacccccgaaaacgataaacggtttcaaaaaaaattcgagaagatggccaaggagctccagcggcagaaaacaaatctagccagccagatgatccagcagtcacatgataaccccagtaatagcttgtgcgaggctccccttaacatttctcgcgacactctgtgtagcgatgaatacttcgccggtggtcttcacagtagctttgacgacttgtgtggaaactcaggttgcggcaatcaggagaggaaactggaggggtccatcaacgatatcaagtctgacgtttgtatttccagtctggtgctgaaagcaaataatatccatagcagcccaagtttcactcaccttgacaaatccagtccgcagaagttcttatccaacctgtcaaaagaagaaatcaacctccagaggaacatcgcagggaaggtggtcacacccgatcaaaagcaagccgctggcatgtcccaagaaactttcgaggagaaataccgactatccccaaccctatcatcaactaagggacacctgctgattcactccaggcctcgctcctcttccgttaagcgaaagcgggtgtcacacggatcccactcccccccaaaagaaaaatgtaagagaaaaagatccacccgtaggtcaatcatgccacgactgcagctgtgcaggtcggaagatcgactccagcatgtggccggaccagcgctcgaggccctgagctgtggggaaagcagctatgacgactatttctcccccgacaatttgaaggagcgatattccgaaaatctgcccccagaaagccaactcccatcctcccctgctcagctgtcttgtagatctcttagcaaaaaagaaaggacaagcatcttcgagatgtcagacttctcatgtgtgggcaaaaagacaaggacggtggacataaccaattttactgccaaaaccatctcttccccacgcaagactggcaacggggagggtcgtgctacatcttcgtgtgtaacatccgccccagaggaggctctacgctgttgccggcaagccggtaaggaggacgcctgccccgaggggaacggattttcgtacacaatagaggaccccgcactgccaaagggccacgacgatgatctgacaccactggagggatcgctggaagagatgaaggaggctgtgggtctgaagtccacacaaaacaaaggtactacttccaagatcagtaacagctcagaaggggaggcccagtctgaacatgagccttgctttattgttgactgcaacatggaaacctcaacagaagagaaagaaaatctgccgggtggctatagtggatctatgtag

SEQ ID NO: 68137 - protein, 1408 aa, Artificial Sequence
  derived and/or modified sequence
MAAERGARRLLSTPSFWLYCLLLLGRRAPGAAAARSGSAPQSPGASIRTFTPFYFLVEPVDTLSVRGSSVILNCSAYSEPSPKIEWKKDGTFLNLVSDDRRQLLPDGSLFISNVVHSKHNKPDEGYYQCVATVESLGTIISRTAKLIVAGLPRFTSQPEPSSVYAGNNAILNCEVNADLVPFVRWEQNRQPLLLDDRVIKLPSGMLVISNATEGDGGLYRCVVESGGPPKYSDEVELKVLPDPEVISDLVFLKQPSPLVRVIGQDVVLPCVASGLPTPTIKWMKNEEALDTESSERLVLLAGGSLEISDVTEDDAGTYFCIADNGNETIEAQAELTVQAQPEFLKQPTNIYAHESMDIVFECEVTGKPTPTVKWVKNGDMVIPSDYFKIVKEHNLQVLGLVKSDEGFYQCIAENDVGNAQAGAQLIILEHAPATTGPLPSAPRDVVASLVSTRFIKLTWRTPASDPHGDNLTYSVFYTKEGIARERVENTSHPGEMQVTIQNLMPATVYIFRVMAQNKHGSGESSAPLRVETQPEVQLPGPAPNLRAYAASPTSITVTWETPVSGNGEIQNYKLYYMEKGTDKEQDVDVSSHSYTINGLKKYTEYSFRVVAYNKHGPGVSTPDVAVRTLSDVPSAAPQNLSLEVRNSKSIMIHWQPPAPATQNGQITGYKIRYRKASRKSDVTETLVSGTQLSQLIEGLDRGTEYNFRVAALTINGTGPATDWLSAETFESDLDETRVPEVPSSLHVRPLVTSIVVSWTPPENQNIVVRGYAIGYGIGSPHAQTIKVDYKQRYYTIENLDPSSHYVITLKAFNNVGEGIPLYESAVTRPHTDTSEVDLFVINAPYTPVPDPTPMMPPVGVQASILSHDTIRITWADNSLPKHQKITDSRYYTVRWKTNIPANTKYKNANATTLSYLVTGLKPNTLYEFSVMVTKGRRSSTWSMTAHGTTFELVPTSPPKDVTVVSKEGKPKTIIVNWQPPSEANGKITGYIIYYSTDVNAEIHDWVIEPVVGNRLTHQIQELTLDTPYYFKIQARNSKGMGPMSEAVQFRTPKADSSDKMPNDQASGSGGKGSRLPDLGSDYKPPMSGSNSPHGSPTSPLDSNMLLVIIVSVGVITIVVVVIIAVFCTRRTTSHQKKKRAACKSVNGSHKYKGNSKDVKPPDLWIHHERLELKPIDKSPDPNPIMTDTPIPRNSQDITPVDNSMDSNIHQRRNSYRGHESEDSMSTLAGRRGMRPKMMMPFDSQPPQQSVRNTPSTDTMPASSSQTCCTDHQDPEGATSSSYLASSQEEDSGQSLPTAHVRPSHPLKSFAVPAIPPPGPPTYDPALPSTPLLSQQALNHHIHSVKTASIGTLGRSRPPMPVVVPSAPEVQETTRMLEDSESSYEPDELTKEMAHLEGLMKDLNAITTA

SEQ ID NO: 68138 - DNA, 4227 bp, Artificial Sequence
  derived and/or modified sequence
atggcggctgagagaggggcccgtcgtctgttatccacgccctctttttggctgtattgcctgttgttactgggccgtagggccccaggcgctgccgcggcaagaagcgggtctgctcctcagtcccccggtgcctccattcgtacctttaccccattttatttcctggtcgagcctgttgacaccctcagcgtcagaggctcaagcgtgatcctgaattgtagcgcctactccgagccctctcccaaaatcgagtggaagaaagacggcacttttctcaatttggtgagcgacgaccggcggcagctcctacctgatgggtctttgttcatctccaatgtcgtgcattccaagcacaacaaacctgacgaagggtactatcagtgcgtggctaccgttgagagtttaggtacgattattagtagaaccgcaaagctgatagtcgccgggttgccacggttcacaagtcagccggaaccctcgagcgtgtacgctgggaacaatgccatcttgaactgtgaagtaaacgccgatttggttccttttgtgcggtgggaacaaaataggcaaccgctcctgctggatgaccgcgtgattaaactgccgagtggaatgctggttattagtaacgcaacagagggtgacggcggtttgtatcgttgtgtagtcgaatccggtgggcccccaaaatattcagatgaggtcgagttgaaggtcctgcccgaccccgaggtgatctcagacctggtcttcctgaagcaacctagccctttggtgcgcgttatcggacaggatgtggtgctcccctgtgttgcttccggtcttccaactcctacgatcaaatggatgaagaacgaagaagcgctcgacactgaaagctccgaacgcctggtattactcgccggcgggtccttagagatctctgatgtgacagaagatgatgctggtacttacttttgcatagccgataacggcaatgagacaatcgaagcccaggcagagctgaccgtccaggcccagcctgagttcctcaagcagccaaccaacatctacgcgcacgaatctatggatatagtttttgaatgtgaggttacaggcaagcccactcccactgttaagtgggtgaaaaatggggatatggtaattccctccgattatttcaagatcgtgaaggagcacaacttacaagtgctgggtttggttaagagcgacgaaggtttttatcagtgcatagcggagaacgacgtcggtaatgcccaggccggcgctcagctcattatcctggagcatgctccagctaccacgggccccttgcctagcgcaccccgggatgtggttgcatccctcgtcagcacccgctttattaagttgacttggcgcactccagcttctgatcctcacggcgataacctcacttactccgtcttctatacaaaggagggaattgcccgcgaacgggtcgaaaatacttcccatcccggcgaaatgcaagtgacaattcagaacctgatgcccgcaactgtctacatttttcgggtaatggcccagaataagcacggatccggcgagtcaagcgctcccttacgagtggagacccagccggaggtgcagctgcccggccccgccccgaatctccgcgcttatgctgccagccctacttctattacggttacctgggagactccagtttcaggaaacggcgagattcagaattataaactctactacatggagaaaggaacagataaggagcaggatgtcgacgtcagctcccactcctacaccattaacgggttaaagaaatacacagaatatagctttagagtggtcgcctacaacaagcacggtccaggagtgagtacaccagatgtggcagtgaggaccctatctgatgtgccttcagccgccccacagaacctgtcattggaggtgagaaacagcaaaagtattatgattcactggcagccccccgcccccgccactcagaacggccagatcaccggctataagatacgatacaggaaagcctccaggaagtcagacgtaacagagacattggttagtggtacgcagctgagtcaactaatcgaaggattagatagggggacggagtacaatttccgggttgctgccctgacgataaatggaacagggcctgcaactgactggctctctgccgagacattcgagtcagatctggacgagactcgagtccctgaagtaccctctagccttcacgtgcgccccttggtcactagcatcgttgtatcctggacaccacccgaaaaccagaacatcgtcgttcgcggttatgccatcggttacggaattggctccccccacgctcagacaatcaaggtcgactacaaacagcgctactacacaatcgaaaatctggacccttcctcccattacgtgattactctgaaggcatttaacaatgttggcgaaggaatccccctctacgaatccgctgtaactcggccgcatactgacacaagtgaggtcgatctgtttgtgataaacgccccatatacaccggtccctgaccctacaccgatgatgcctcctgtgggtgtgcaggcttccatcttgagccacgacaccatcaggataacctgggcagataattctttgcctaagcaccagaaaattacagattcccgctactacaccgtgcgttggaagacaaatattcccgcaaatactaagtataaaaatgccaatgcgactactctgtcttacctcgtgacagggttgaaaccaaatacactatacgagttctctgtgatggtgacaaaaggaagaaggagttctacatggtctatgactgcccatggcacaacatttgaactcgtgcccactagtcccccaaaggacgtaactgtggtcagcaaggagggcaaaccaaaaacaatcatcgtcaactggcagccaccatctgaagcaaacggaaaaatcaccggctacatcatctattactccacagacgtgaacgcggagattcacgattgggttatcgaaccagtagtcggaaatagacttactcaccagatacaagaattaacgctcgataccccatattacttcaagatccaggccagaaacagcaagggcatgggccccatgtcagaggctgtacagttccgcacccccaaagccgacagcagcgataagatgccaaacgatcaggcctccgggtctggcggtaagggtagcaggctgccagatctgggctcagactacaagcctcccatgtccgggagcaactccccccatggaagccctacttctccacttgattccaatatgttgctagtaattattgtgtctgtgggcgtgattacaattgtggttgtggttattattgctgtgttctgtacgcggcggacaacatcccatcaaaagaagaaacgggccgcctgtaaatcggtgaacggttctcacaaatacaagggtaacagtaaggacgtaaagccacccgatctgtggatccaccatgaaagactggagcttaagccgatcgacaaatcacccgacccgaatcccattatgaccgatacacccataccccggaatagtcaggatattactcccgttgataactcaatggacagcaacattcaccagcgccgcaattcttacaggggacacgagagtgaggacagcatgagtaccctcgctggaaggcgtgggatgaggccgaaaatgatgatgccttttgacagccaaccaccacagcaaagcgtgaggaacacgcctagcaccgacacaatgcccgccagctctagccagacctgttgcacggatcatcaggatcctgagggcgcgactagctctagctaccttgcatcaagtcaggaagaagacagcggtcaatctctcccaactgcacacgttcgacctagccacccgcttaagagcttcgcggtccccgcaatacctcctccaggtcctccgacatatgacccagccctcccatccactcccctcctgagtcagcaagcgctaaaccatcatatacacagcgtgaagaccgcttccataggcaccctgggtagatccagacccccaatgccagtggttgtcccctctgccccggaggtccaggagaccacccggatgctggaggattcagagtcctcttatgagcccgacgagttgacaaaggagatggctcacctggagggtttgatgaaggatctgaatgccatcacaaccgcatag

SEQ ID NO: 68139 - DNA, 4227 bp, Artificial Sequence
  derived and/or modified sequence
atggctgctgagcggggggcccggcggctgctgagcacccccagcttctggctgtactgcctgctgctgctgggccggcgggcccctggagctgctgctgcccggagcggcagcgccccccagagccctggggccagcatccgcaccttcacccccttctacttcctggtggagcctgtggacaccctgtctgtgcggggcagcagcgtcatcctgaactgcagcgcctacagcgagcccagccccaagattgagtggaagaaggatggcaccttcctgaacctggtgtctgatgaccggcggcagctgctgcctgatggcagcctcttcatcagcaatgtggtgcacagcaagcacaacaagccagatgagggctactaccagtgtgtggccaccgtggagagcctgggcaccatcatcagcaggacagccaagctgattgtggccggcctgccccgcttcaccagccagcctgagcccagctctgtgtatgccggcaacaatgccatcctgaactgtgaggtgaatgctgacctggtgccctttgtgcgctgggagcagaaccggcagcccctgctgctggatgacagagtcatcaagctgcccagcggcatgctggtgatcagcaatgccacagaaggagatggcggcctgtaccgctgtgtggtggagagcggcggcccccccaagtacagtgatgaggtggagctgaaggtgctgcctgaccctgaggtgatcagtgacctggtgttcctgaagcagcccagccccctggtgcgggtcatcggccaggatgtggtgctgccctgtgtggccagcggcctgcccacccccaccatcaagtggatgaagaatgaggaggccctggacacagagagcagcgagcggctggtgctgctggccggcggcagcctggagatcagtgatgtgacagaagatgatgctggcacctacttctgcatcgctgacaatggaaatgagaccatcgaggcccaggccgagctgactgtgcaggcccagcctgagttcctgaagcagcccaccaacatctatgcccacgagagcatggacatcgtgtttgaatgtgaggtgacaggcaagcccacccccaccgtgaagtgggtgaagaatggagacatggtgatccccagcgactacttcaagatcgtgaaggagcacaacctgcaggtgctgggcctggtgaagagtgatgagggcttctaccagtgcatcgcagaaaatgatgtgggcaatgcccaggccggggcccagctgatcatcctggagcacgccccagccaccaccggccccctgcccagcgcccccagagatgtggtggccagcctggtgtccacccgcttcatcaagctgacctggaggaccccagccagtgacccccatggagacaacctgacctacagcgtcttctacaccaaggagggcatcgcccgggagcgggtggagaacaccagccaccctggagagatgcaggtgaccatccagaacctgatgcctgccaccgtgtacatcttccgggtgatggcccagaacaagcacggcagcggggagagcagcgcccccctgcgggtggagacccagcctgaggtgcagctgcccggccctgcccccaacctgcgggcctatgctgccagccccaccagcatcaccgtgacctgggagacccctgtgtctggaaatggagagatccagaactacaagctgtactacatggagaagggcacagacaaggagcaggatgtggatgtgagcagccacagctacaccatcaatggcctgaagaagtacacagagtacagcttccgggtggtggcctacaacaagcacggccctggggtgtccaccccagatgtggccgtgaggaccctgagtgatgtgcccagcgctgccccccagaacctgagcctggaggtgaggaacagcaagagcatcatgatccactggcagcccccagccccagccacccagaatggccagatcaccggctacaagatccgctacaggaaggccagcaggaagagtgatgtgacagagaccctggtgtctggcacccagctgagccagctgattgagggcctggaccggggcacagagtacaacttccgggtggccgccctgaccatcaatggaactggacctgccacagactggctgtctgctgagacctttgaaagtgacctggatgagaccagggtgcctgaggtgcccagcagcctgcacgtgcggcccctggtgaccagcatcgtggtgtcctggaccccacctgagaaccagaacatcgtggtgcggggctacgccatcggctatggaattggcagcccccacgcccagaccatcaaggtggactacaagcagcgctactacaccatcgagaacctggaccccagcagccactacgtgatcaccctgaaggccttcaacaacgtgggggagggcatccccctgtatgagagcgctgtgacccggccccacacagacaccagcgaggtggacctgtttgtgatcaatgccccctacacccctgtgcctgaccccacccccatgatgcctcctgtgggcgtgcaggccagcatcctgagccatgacaccatccgcatcacctgggccgacaacagcctgcccaagcaccagaagatcacagacagccgctactacacagtgcgctggaagaccaacatcccagccaacaccaagtacaagaatgccaatgccaccaccctgagctacctggtgacaggcctgaagcccaacaccctgtatgagttctctgtgatggtgaccaagggccgccgcagcagcacctggagcatgacagcccacggcaccacctttgagctggtgcccaccagcccccccaaggatgtgacagtggtgtccaaggagggcaagcccaagaccatcatcgtgaactggcagcccccatctgaggccaacgggaagatcaccggctacatcatctactacagcacagatgtgaatgctgagatccatgactgggtgattgagcctgtggtgggcaaccggctgacccaccagatccaggagctgaccctggacaccccctactacttcaagatccaggccaggaacagcaagggcatgggccccatgtctgaggccgtgcagttccgcacccccaaggctgacagcagtgacaagatgcccaatgaccaggccagcggcagcggcggcaagggcagccggctgcctgacctgggcagtgactacaagccacccatgagcggcagcaacagcccccacggcagccccaccagccccctggacagcaacatgctgctggtgatcatcgtgtctgtgggcgtcatcaccatcgtggtggtggtgatcatcgctgtgttctgcaccaggaggaccaccagccaccagaagaagaagagagctgcctgcaagtctgtgaatggcagccacaagtacaagggcaacagcaaggatgtgaagcccccagacctgtggatccaccacgagcggctggagctgaagcccatcgacaagagcccagaccccaaccccatcatgacagacacccccatccccaggaacagccaggacatcacccctgtggacaacagcatggacagcaacatccaccagaggaggaacagctaccggggccacgagagtgaagattccatgagcaccctggccggccggcggggcatgaggcccaagatgatgatgccctttgacagccagcccccccagcagagcgtgaggaacacccccagcacagacaccatgcctgccagcagcagccagacctgctgcacagaccaccaggaccctgagggcgccaccagcagcagctacctggccagcagccaggaggaggacagcggccagagcctgcccacagcccacgtgcggcccagccaccccctgaagagctttgctgtgcctgccatccccccacctggcccccccacctatgaccctgccctgcccagcacccccctgctgagccagcaggccctgaaccaccacatccacagcgtgaagacagccagcatcggcaccctgggccgcagcaggcctcccatgcctgtggtggtgcccagcgcccctgaggtgcaggagaccaccaggatgctggaggacagcgagagcagctatgagccagatgagctgaccaaggagatggcccacctggagggcctgatgaaggacctgaatgccatcaccacagcctag

SEQ ID NO: 68140 - DNA, 4227 bp, Artificial Sequence
  derived and/or modified sequence
atggccgccgagcggggcgcccggcggctgctgagcacccccagcttttggctctattgccttctgctgctgggacgcagagcgcctggcgcggctgctgcacggtcgggttccgctccacaaagtcccggcgccagtattagaactttcacacccttttattttttagtggagcctgttgatacactttcagttcgcgggagcagcgtcatcctgaattgtagcgcctattccgagccgagcccgaagatagaatggaagaaggatggtacctttctcaatctggtaagcgacgatcgccgtcaactgctacctgacgggtcactgttcatctccaatgtggttcactcaaagcacaataagcccgacgagggttactaccagtgcgtcgcgaccgtggaatctcttggcaccataatttcccgcacagctaagttgatcgtggccggccttccgcggtttacgagccaacccgagccttcctcggtttacgcaggcaataacgcaattctgaattgcgaggtgaatgccgacctggtacctttcgtgcgatgggaacagaaccgccagccgcttctgctggatgatcgagtgatcaaactaccctccggaatgctggtcatttccaacgccaccgaaggagacggcggactgtacaggtgcgttgtcgaatctggcgggcctcccaagtactccgacgaggttgaactaaaggtgctccccgaccccgaggtgatatcggatctggtcttcctgaaacagccatctccactcgtacgggttatcggccaagacgtcgttttgccttgtgtcgcatccgggcttcctacacctaccatcaagtggatgaagaatgaagaggccttggacactgagtcctctgaacgtctggtgcttctagcagggggatcgctggagatttctgacgtgacggaggacgacgctggtacatatttctgcatagctgataatggaaacgagaccatagaagcccaggccgagctgaccgtgcaggctcagcctgagttcttgaaacagccaacaaatatctatgcacatgagtcgatggacatcgtattcgaatgcgaagtgaccgggaagccaactcccacagtgaagtgggtgaaaaatggcgatatggtgatcccctctgactattttaaaatcgtaaaggaacacaaccttcaggttcttgggctggtgaaatctgatgagggcttttaccagtgtattgccgaaaatgatgtcggcaacgctcaggcaggagcccagcttatcatcctggagcacgcaccggcaactacagggcccttgccaagtgcaccccgcgatgtggtagcaagcctcgtgagcacacgctttattaaattgacctggcgaacccctgccagcgacccccacggggataatcttacatactcagttttctatacgaaggaagggattgcgagagagagggtcgaaaatacatcccaccccggcgaaatgcaggtcaccatacaaaatctgatgcctgccacagtttatatattcagagtgatggctcagaataagcacggatcaggggaatcaagcgcacccctcagagtcgagactcagcccgaagtgcaactccctggaccagcccccaatttgagggcctacgccgccagcccaacgagtataacggtcacctgggagactccagtctccggcaacggagaaatacagaattacaagctgtactacatggaaaaaggcacagataaggaacaagacgtggatgtgagcagtcactcctacactatcaatggcctgaagaagtacaccgaatattcctttagagtagtagcatataataaacacggccccggagtcagcaccccagatgtcgcagtgagaaccctgagtgacgtgccatctgccgctcctcagaacctgtctctcgaagtgcggaacagcaaaagtattatgattcattggcagccacctgcccccgctactcagaatgggcagataaccgggtacaagatacgctataggaaggcgtctagaaaaagtgacgtgacagaaacattggtgagcggaacccagctcagccaactgatagaggggctcgaccgcggcaccgagtacaatttccgggtcgctgcgctgaccatcaatggaacaggtcctgcaactgactggctgtccgctgagaccttcgagtccgacctcgacgagacgcgcgtacctgaggtgccctcctctcttcacgtcaggcccctcgtcacgagcatcgtggtcagctggacccctcctgagaatcaaaatatcgtagtgagaggctacgctatcgggtacggcattgggtcgccccatgcccaaactattaaagtggattataagcagagatactacaccatcgagaacctggatccctcctcccattacgtgatcacgctgaaggcatttaacaatgtcggggaagggattccattgtacgaatctgctgtgacccggccccatactgatacctccgaagtagacctctttgtcattaacgcgccgtatacccctgtgcccgatccaactccgatgatgccaccggtcggcgtgcaagcctctatcttgtcccatgatacaatccggataacctgggccgacaacagtctccctaagcatcagaaaatcaccgactcccggtattacactgtgcgctggaaaactaatattccggccaatacgaaatataaaaacgccaacgcgacaaccctgagttatctcgtgaccgggctgaagcctaataccctttacgagttttctgttatggttaccaaaggccggcgatccagcacttggtctatgaccgcgcacggaacaacctttgagcttgtgccgacttctccacccaaggatgtgactgttgtttccaaagaaggcaagccaaaaacaatcatcgtcaactggcagcctccttcggaagctaacggcaagatcaccggctacattatctactactccactgacgtgaatgccgagatccacgactgggtgatcgaacccgtagtcggaaatcggctaacgcatcagatccaggaattgaccctagataccccttattacttcaaaatacaggccagaaactctaaaggcatgggccccatgagtgaagccgtgcaatttcgtactcccaaggccgactcatcagacaagatgcccaacgaccaggccagcggatcaggcggcaagggatctaggctccccgacctcggaagcgactataagcctccaatgtcggggtcgaattccccccacggctcaccgactagcccactcgactctaacatgctcctggtcattatcgtgagcgtcggagtgatcaccatagttgttgtcgtgatcatcgctgtgttttgtactaggcggactacctcccaccagaagaagaaaagagccgcctgtaaatccgtgaacggtagtcataaatataaaggaaacagtaaggacgtcaaaccgcccgatctgtggatccaccacgagcggctggaattaaagcccatagacaagtcccctgatccaaacccaatcatgacggatactccaataccgcgcaatagccaagatatcacgcctgtggacaattcaatggactccaatattcaccagcggaggaattcctaccggggccacgaaagcgaagattccatgagcaccttggccgggcgacgcggtatgcggcctaagatgatgatgcctttcgattcccagccccctcagcagtcagtacggaacaccccatcaaccgacacgatgccagctagcagttcacagacctgctgtacagaccatcaggatcccgagggcgccacgtcttcctcatacttagcttcatcccaggaagaagatagcggccagtccctgcctaccgcacacgtgcgtccctcacatcctctgaagtcctttgctgtgcctgccattcctccgccgggccctccgacatatgatcccgctctgcccagtacaccattgttgtcacagcaagcactgaaccaccatattcatagcgtgaagactgcaagtattggcaccctcgggagatctcgcccgccgatgcccgtggtagtaccatcagctcctgaggtccaggagactaccagaatgctagaggactcagagagttcctacgagccagacgagctgactaaggaaatggcccacctcgagggattgatgaaagacctgaatgccataacaacggcttag

SEQ ID NO: 68141 - DNA, 4315 bp, Artificial Sequence
  derived and/or modified sequence
gggagggaaggaggcaagggctccgcggcgctgtcgccgccgctgccgctcactctcggggaagagatggcggcggagcggggagcccggcgactcctcagcaccccctccttctggctctactgcctgctgctgctcgggcgccgggcgccgggcgccgcggccgccaggagcggctccgcgccgcagtccccaggagccagcattcgaacgttcactccattttattttctggtggagccggtggatacactctcagttagaggctcttctgttatattaaactgttcagcatattctgagccttctccaaaaattgaatggaaaaaagatggaacttttttaaacttagtatcagatgatcgacgccagcttctcccggatggatctttatttatcagcaatgtggtgcattccaaacacaataaacctgatgaaggttattatcagtgtgtggccactgttgagagtcttggaactattatcagtagaacagcgaagctcatagtagcaggtcttccaagatttaccagccaaccagaaccttcctcagtttatgctgggaacaatgcaattctgaattgtgaagttaatgcagatttggtcccatttgtgaggtgggaacagaacagacaaccccttcttctggatgatagagttatcaaacttccaagtggaatgctggttatcagcaatgcaactgaaggagatggcgggctttatcgctgcgtagtggaaagtggtgggccaccaaagtatagtgatgaagttgaattgaaggttcttccagatcctgaggtgatatcagacttggtatttttgaaacagccttctcccttagtcagagtcattggtcaggatgtagtgttgccatgtgttgcttcaggacttcctactccaaccattaaatggatgaaaaatgaggaggcacttgacacagaaagctctgaaagattggtattgctggcaggtggtagcctggagatcagtgatgttactgaggatgatgctgggacttatttttgtatagctgataatggaaatgagacaattgaagctcaagcagagcttacagtgcaagctcaacctgaattcctgaagcagcctactaatatatatgctcacgaatctatggatattgtatttgaatgtgaagtgactggaaaaccaactccaactgtgaagtgggtcaaaaatggggatatggttatcccaagtgattattttaagattgtaaaggaacataatcttcaagttttgggtctggtgaaatcagatgaagggttctatcagtgcattgctgaaaatgatgttggaaatgcacaagctggagcccaactgataatccttgaacatgcaccagccacaacgggaccactgccttcagctcctcgggatgtcgtggcctccctggtctctacccgcttcatcaaattgacgtggcggacacctgcatcagatcctcacggagacaaccttacctactctgtgttctacaccaaggaagggattgctagggaacgtgttgagaataccagtcacccaggagagatgcaagtaaccattcaaaacctaatgccagcgaccgtgtacatctttagagttatggctcaaaataagcatggctcaggagagagttcagctccactgcgagtagaaacacaacctgaggttcagctccctggcccagcacctaaccttcgtgcatatgcagcttcgcctacctccatcactgttacgtgggaaacaccagtgtctggcaatggggaaattcagaattataaattgtactacatggaaaaggggactgataaagaacaggatgttgatgtttcaagtcactcttacaccattaatgggttgaaaaaatatacagagtatagtttccgagtggtggcctacaataaacatggtcctggagtttccacaccagatgttgctgttcgaacattgtcagatgttcccagtgctgctcctcagaatctgtccttggaagtgagaaattcaaagagtattatgattcactggcagccacctgctccagccacacaaaatgggcagattactggctacaagattcgctaccgaaaggcctcccgaaagagtgatgtcactgagaccttggtaagcgggacacagctgtctcagctgattgaaggtcttgatcgggggactgagtataatttccgagtggctgctctaacaatcaatggtacaggcccggcaactgactggctgtctgctgaaacttttgaaagtgacctagatgaaactcgtgttcctgaagtgcctagctctcttcacgtacgcccgctcgttactagcatcgtagtgagctggactcctccagagaatcagaacattgtggtcagaggttacgccattggttatggcattggcagccctcatgcccagaccatcaaagtggactataaacagcgctattacaccattgaaaatctggatcccagctctcactatgtgattaccctgaaagcatttaataacgtgggtgaaggcatccccctgtatgagagtgctgtgaccaggcctcacacagacacttctgaagttgatttatttgttattaatgctccatacactccagtgccagatcccactcccatgatgccaccagtgggagttcaggcttccattctgagtcatgacaccatcaggattacgtgggcagacaactcgctgcccaagcaccagaagattacagactcccgatactacaccgtccgatggaaaaccaacatcccagcaaacaccaagtacaagaatgcaaatgcaaccactttgagttatttggtgactggtttaaagccgaatacactctatgaattctctgtgatggtgaccaaaggtcgaagatcaagtacatggagtatgacagcccatgggaccacctttgaattagttccgacttctccacccaaggatgtgactgttgtgagtaaagaggggaaacctaagaccataattgtgaattggcagcctccctccgaagccaatggcaaaattacaggttacatcatatattacagtacagatgtgaatgcagagatacatgactgggttattgagcctgttgtgggaaacagactgactcaccagatacaagagttaactcttgacacaccatactacttcaaaatccaggcacggaactcaaagggcatgggacccatgtctgaagctgtccaattcagaacacctaaagcggactcctctgataaaatgcctaatgatcaagcctcagggtctggagggaaaggaagccggctgccagacctaggatccgactacaaacctccaatgagcggcagtaacagccctcatgggagccccacctctcctctggacagtaatatgctgctggtcataattgtttctgttggcgtcatcaccatcgtggtggttgtgattatcgctgtcttttgtacccgtcgtaccacctctcaccagaaaaagaaacgagctgcctgcaaatcagtgaatggctctcataagtacaaagggaattccaaagatgtgaaacctccagatctctggatccatcatgagagactggagctgaaacccattgataagtctccagacccaaaccccatcatgactgatactccaattcctcgcaactctcaagatatcacaccagttgacaactccatggacagcaatatccatcaaaggcgaaattcatacagagggcatgagtcagaggacagcatgtctacactggctggaaggcgaggaatgagaccaaaaatgatgatgccctttgactcccagccaccccagcaatccgttcgaaatacccccagcactgacaccatgccagcctcttcgtctcaaacatgctgcactgatcaccaggaccctgaaggtgctaccagctcctcttacttggccagctcccaagaggaagattcaggccagagtcttcccactgcccatgttcgcccttcccacccattgaagagcttcgccgtgccagcaatcccgcctccaggacctcccacctatgatcctgcattgccaagcacaccattactgtcccagcaagctctgaaccatcacattcactcagtgaagacagcctccatcgggactctaggaaggagccggcctcctatgccagtggttgttcccagtgcccctgaagtgcaggagaccacaaggatgttggaagactccgagagtagctatgaaccagatgagctgaccaaagagatggcccacctggaaggactaatgaaggacctaaacgctatcacaacagcatgacgaccttcaccaggacctgact

SEQ ID NO: 68142 - DNA, 4227 bp, Artificial Sequence
  derived and/or modified sequence
atggcagccgaacggggtgctcgcaggttactctctaccccatctttttggctctattgtcttctgctgctcggcaggcgggcaccaggcgctgctgcagctcgaagcggcagtgcgcctcagtcaccaggcgcatccataaggaccttcacgcccttctacttcttagttgaacctgttgatactctctcggtgcgtgggagctccgtcattctgaattgctccgcctacagcgaaccctctccaaagatcgaatggaaaaaagatggcacttttctgaatcttgtcagtgacgaccgcagacagctgttgcctgacggatcactgttcatctcaaatgttgtgcactcaaagcacaataagcccgacgaaggatattaccagtgtgtggctactgtggagtccctggggaccatcatatccaggaccgcaaagctgattgtggctgggctccctaggtttaccagtcagccagagccatctagcgtgtatgcagggaataacgccatcttgaattgcgaggttaacgccgatctagtcccctttgtaagatgggagcaaaaccgccagcctctcctgctggacgatcgcgtgatcaagttaccttcgggcatgctggtaatttccaacgcaaccgagggagacggaggcctgtacagatgtgttgtggagtccggcggacctccaaaatattcggatgaagtcgagctgaaggtacttcccgaccccgaggtgattagtgaccttgtgttcctgaaacagccctcacctctggtgcgcgtgatagggcaggacgtcgtcttaccatgtgtagcatccggcctgcctacacccactatcaagtggatgaaaaacgaagaagccttagatactgaatcctcagaacgcttggtactgctggctggcggttccttggaaataagtgatgtgactgaagatgacgccggtacatacttttgtatcgccgataatggcaacgaaaccatcgaggcgcaggctgagcttactgtccaagcccagcccgagttcctgaagcaacccacgaatatatatgctcacgaaagcatggacattgtgttcgagtgcgaggttactggcaagccaacaccaaccgtgaaatgggtgaagaacggggatatggtgattccctctgactattttaagattgttaaggagcacaatttgcaagtgcttggcctcgtgaagagcgatgaggggttctaccagtgtatcgccgaaaatgatgtcggtaacgcccaagccggtgctcagctgatcatcctcgaacatgcgccagcaactacgggcccactgccttccgcaccaagggacgtggtagctagtctggtcagcacccggtttattaaactcacctggcgcacacccgcatctgaccctcacggggataatctaacttactctgtgttctataccaaggaaggcattgccagggagcgcgttgaaaacacaagtcatcctggcgagatgcaggtgactattcagaacttgatgccagcgactgtgtacatcttccgcgtcatggctcagaacaagcacggtagcggagaatcttctgcacctctccgtgtagaaacccagccagaggtgcaactgcccggtcccgcaccaaatttaagggcctacgcggcttcacctactagtataacggttacttgggaaacacccgtctccggtaacggggaaatccagaattacaagttgtattatatggaaaaaggtaccgacaaggagcaggacgtcgacgtttctagccattcctacactatcaatggtttaaagaagtatacagagtacagcttccgggtagtggcctacaacaaacacggcccaggtgtgtccacgcctgacgtggccgtgcgaaccctctctgacgtacccagcgccgctccccagaacctcagcctcgaggtccggaatagtaagtccattatgattcactggcagccacctgcgccagccacccagaatgggcagataaccggctacaaaataaggtacaggaaggcgagcagaaagtcagacgtcactgagacacttgtttcaggtacccagctgtcccagttgattgaaggtctagatcgcggtactgagtataacttccgcgtggctgccctaaccataaacgggacagggccagccacggactggctgtccgccgaaaccttcgagtccgatctcgatgagaccagggtaccagaggttccctcgagtctgcacgtgcggccactggtgacgtccatagttgtttcttggacaccaccagaaaatcagaatatcgttgtgaggggctacgccatcgggtacgggatcgggtccccccacgcccaaactattaaggtggactataagcaaaggtattacaccattgaaaatcttgatccctcttcgcactatgtgatcacattgaaagccttcaataacgtcggcgagggaatcccgctgtacgaatctgctgtcactagaccacacacagatactagtgaggtcgatctcttcgtgattaacgcaccctacactcctgtgcccgatcccacacctatgatgcctcccgtgggtgtgcaggctagcattctttcccatgatacgatccgtattacatgggcggacaactcactcccgaagcaccagaaaataacggacagcaggtactataccgtaaggtggaagaccaatatcccagccaatacaaaatacaaaaacgctaacgctactacactcagctatctggtcaccggcctgaaaccgaatactctgtatgaattcagcgtaatggtcaccaagggcaggcgctcatctacctggagcatgaccgcccatgggactaccttcgaattagtgccaacttcccctcccaaagacgttacagtggtgtcgaaagaaggtaagcctaagacaattatagtgaactggcagccaccaagcgaggcgaatgggaagatcaccggctacattatctactactctacggacgtaaatgccgagatccacgattgggtcattgaaccagtggtcgggaacagactaacacatcagattcaggagctgacccttgacacaccctactatttcaaaattcaggccagaaattcaaaggggatgggcccaatgtccgaggcagtgcagttcaggactccgaaagcagattcctccgacaagatgccaaacgatcaggcaagtggtagtgggggaaaaggctctagactgccagaccttggaagcgactacaaaccacctatgagcggcagcaacagcccccatgggtccccaactagccccttggatagcaacatgttgctcgttataattgtgtccgttggtgtcataaccattgtcgtggtcgtgattatcgcagtcttctgtacccggcgaactacaagccatcaaaagaagaagcgggcagcttgcaaatcagtaaacgggagccacaaatataaaggcaacagcaaggatgtaaagccaccggacttatggattcatcatgagagactggagctcaagccaattgacaaatcccccgacccaaatccgattatgactgacacgcccatcccccgaaactctcaggatataacccccgtggacaacagcatggatagcaacatccatcagagacgcaactcataccgcggtcacgaatctgaggattcaatgagcaccctggccggtcgtcgtgggatgcgccctaagatgatgatgcccttcgactctcaaccgccacagcagagcgtacggaatacgcccagcaccgacaccatgccagcttcatcatcccagacgtgttgcacagaccatcaggatccagagggagctactagcagttcttatctcgcttcctctcaggaggaagatagtgggcagagcttgcccaccgcgcacgtgagacctagtcatccacttaaaagcttcgctgttcccgcaatccccccacccggaccacctacttacgatcctgcacttccatctacgccgctgctgtcccaacaggccctcaatcatcacatccatagtgtgaaaacagcctctattgggacactggggcgatcccgcccacctatgcccgtggttgttccttccgcccctgaggtacaagagactacccgtatgcttgaagatagcgaatccagttatgaacctgatgagctcacgaaagagatggcacatttggaaggactcatgaaggacctcaatgccatcaccacggcctag

SEQ ID NO: 68143 - DNA, 4227 bp, Artificial Sequence
  derived and/or modified sequence
atggccgccgagagaggcgccagaagactgctgagcacccccagcttctggctgtactgcctgctgctgctgggcagaagagcccccggcgccgccgccgccagaagcggcagcgccccccagagccccggcgccagcatcagaaccttcacccccttctacttcctggtggagcccgtggacaccctgagcgtgagaggcagcagcgtgatcctgaactgcagcgcctacagcgagcccagccccaagatcgagtggaagaaggacggcaccttcctgaacctggtgagcgacgacagaagacagctgctgcccgacggcagcctgttcatcagcaacgtggtgcacagcaagcacaacaagcccgacgagggctactaccagtgcgtggccaccgtggagagcctgggcaccatcatcagcagaaccgccaagctgatcgtggccggcctgcccagattcaccagccagcccgagcccagcagcgtgtacgccggcaacaacgccatcctgaactgcgaggtgaacgccgacctggtgcccttcgtgagatgggagcagaacagacagcccctgctgctggacgacagagtgatcaagctgcccagcggcatgctggtgatcagcaacgccaccgagggcgacggcggcctgtacagatgcgtggtggagagcggcggcccccccaagtacagcgacgaggtggagctgaaggtgctgcccgaccccgaggtgatcagcgacctggtgttcctgaagcagcccagccccctggtgagagtgatcggccaggacgtggtgctgccctgcgtggccagcggcctgcccacccccaccatcaagtggatgaagaacgaggaggccctggacaccgagagcagcgagagactggtgctgctggccggcggcagcctggagatcagcgacgtgaccgaggacgacgccggcacctacttctgcatcgccgacaacggcaacgagaccatcgaggcccaggccgagctgaccgtgcaggcccagcccgagttcctgaagcagcccaccaacatctacgcccacgagagcatggacatcgtgttcgagtgcgaggtgaccggcaagcccacccccaccgtgaagtgggtgaagaacggcgacatggtgatccccagcgactacttcaagatcgtgaaggagcacaacctgcaggtgctgggcctggtgaagagcgacgagggcttctaccagtgcatcgccgagaacgacgtgggcaacgcccaggccggcgcccagctgatcatcctggagcacgcccccgccaccaccggccccctgcccagcgcccccagagacgtggtggccagcctggtgagcaccagattcatcaagctgacctggagaacccccgccagcgacccccacggcgacaacctgacctacagcgtgttctacaccaaggagggcatcgccagagagagagtggagaacaccagccaccccggcgagatgcaggtgaccatccagaacctgatgcccgccaccgtgtacatcttcagagtgatggcccagaacaagcacggcagcggcgagagcagcgcccccctgagagtggagacccagcccgaggtgcagctgcccggccccgcccccaacctgagagcctacgccgccagccccaccagcatcaccgtgacctgggagacccccgtgagcggcaacggcgagatccagaactacaagctgtactacatggagaagggcaccgacaaggagcaggacgtggacgtgagcagccacagctacaccatcaacggcctgaagaagtacaccgagtacagcttcagagtggtggcctacaacaagcacggccccggcgtgagcacccccgacgtggccgtgagaaccctgagcgacgtgcccagcgccgccccccagaacctgagcctggaggtgagaaacagcaagagcatcatgatccactggcagccccccgcccccgccacccagaacggccagatcaccggctacaagatcagatacagaaaggccagcagaaagagcgacgtgaccgagaccctggtgagcggcacccagctgagccagctgatcgagggcctggacagaggcaccgagtacaacttcagagtggccgccctgaccatcaacggcaccggccccgccaccgactggctgagcgccgagaccttcgagagcgacctggacgagaccagagtgcccgaggtgcccagcagcctgcacgtgagacccctggtgaccagcatcgtggtgagctggaccccccccgagaaccagaacatcgtggtgagaggctacgccatcggctacggcatcggcagcccccacgcccagaccatcaaggtggactacaagcagagatactacaccatcgagaacctggaccccagcagccactacgtgatcaccctgaaggccttcaacaacgtgggcgagggcatccccctgtacgagagcgccgtgaccagaccccacaccgacaccagcgaggtggacctgttcgtgatcaacgccccctacacccccgtgcccgaccccacccccatgatgccccccgtgggcgtgcaggccagcatcctgagccacgacaccatcagaatcacctgggccgacaacagcctgcccaagcaccagaagatcaccgacagcagatactacaccgtgagatggaagaccaacatccccgccaacaccaagtacaagaacgccaacgccaccaccctgagctacctggtgaccggcctgaagcccaacaccctgtacgagttcagcgtgatggtgaccaagggcagaagaagcagcacctggagcatgaccgcccacggcaccaccttcgagctggtgcccaccagcccccccaaggacgtgaccgtggtgagcaaggagggcaagcccaagaccatcatcgtgaactggcagccccccagcgaggccaacggcaagatcaccggctacatcatctactacagcaccgacgtgaacgccgagatccacgactgggtgatcgagcccgtggtgggcaacagactgacccaccagatccaggagctgaccctggacaccccctactacttcaagatccaggccagaaacagcaagggcatgggccccatgagcgaggccgtgcagttcagaacccccaaggccgacagcagcgacaagatgcccaacgaccaggccagcggcagcggcggcaagggcagcagactgcccgacctgggcagcgactacaagccccccatgagcggcagcaacagcccccacggcagccccaccagccccctggacagcaacatgctgctggtgatcatcgtgagcgtgggcgtgatcaccatcgtggtggtggtgatcatcgccgtgttctgcaccagaagaaccaccagccaccagaagaagaagagagccgcctgcaagagcgtgaacggcagccacaagtacaagggcaacagcaaggacgtgaagccccccgacctgtggatccaccacgagagactggagctgaagcccatcgacaagagccccgaccccaaccccatcatgaccgacacccccatccccagaaacagccaggacatcacccccgtggacaacagcatggacagcaacatccaccagagaagaaacagctacagaggccacgagagcgaggacagcatgagcaccctggccggcagaagaggcatgagacccaagatgatgatgcccttcgacagccagcccccccagcagagcgtgagaaacacccccagcaccgacaccatgcccgccagcagcagccagacctgctgcaccgaccaccaggaccccgagggcgccaccagcagcagctacctggccagcagccaggaggaggacagcggccagagcctgcccaccgcccacgtgagacccagccaccccctgaagagcttcgccgtgcccgccatccccccccccggcccccccacctacgaccccgccctgcccagcacccccctgctgagccagcaggccctgaaccaccacatccacagcgtgaagaccgccagcatcggcaccctgggcagaagcagaccccccatgcccgtggtggtgcccagcgcccccgaggtgcaggagaccaccagaatgctggaggacagcgagagcagctacgagcccgacgagctgaccaaggagatggcccacctggagggcctgatgaaggacctgaacgccatcaccaccgcctag

SEQ ID NO: 68144 - protein, 1450 aa, Artificial Sequence
  derived and/or modified sequence
MAAERGARRLLSTPSFWLYCLLLLGRRAPGAAAARSGSAPQSPGASIRTFTPFYFLVEPVDTLSVRGSSVILNCSAYSEPSPKIEWKKDGTFLNLVSDDRRQLLPDGSLFISNVVHSKHNKPDEGYYQCVATVESLGTIISRTAKLIVAGLPRFTSQPEPSSVYAGNNAILNCEVNADLVPFVRWEQNRQPLLLDDRVIKLPSGMLVISNATEGDGGLYRCVVESGGPPKYSDEVELKVLPDPEVISDLVFLKQPSPLVRVIGQDVVLPCVASGLPTPTIKWMKNEEALDTESSERLVLLAGGSLEISDVTEDDAGTYFCIADNGNETIEAQAELTVQAQPEFLKQPTNIYAHESMDIVFECEVTGKPTPTVKWVKNGDMVIPSDYFKIVKEHNLQVLGLVKSDEGFYQCIAENDVGNAQAGAQLIILEHAPATTGPLPSAPRDVVASLVSTRFIKLTWRTPASDPHGDNLTYSVFYTKEGIARERVENTSHPGEMQVTIQNLMPATVYIFRVMAQNKHGSGESSAPLRVETQPEVQLPGPAPNLRAYAASPTSITVTWETPVSGNGEIQNYKLYYMEKGTDKEQDVDVSSHSYTINGLKKYTEYSFRVVAYNKHGPGVSTPDVAVRTLSDVPSAAPQNLSLEVRNSKSIMIHWQPPAPATQNGQITGYKIRYRKASRKSDVTETLVSGTQLSQLIEGLDRGTEYNFRVAALTINGTGPATDWLSAETFESDLDETRVPEVPSSLHVRPLVTSIVVSWTPPENQNIVVRGYAIGYGIGSPHAQTIKVDYKQRYYTIENLDPSSHYVITLKAFNNVGEGIPLYESAVTRPHTDTSEVDLFVINAPYTPVPDPTPMMPPVGVQASILSHDTIRITWADNSLPKHQKITDSRYYTVRWKTNIPANTKYKNANATTLSYLVTGLKPNTLYEFSVMVTKGRRSSTWSMTAHGTTFELVPTSPPKDVTVVSKEGKPKTIIVNWQPPSEANGKITGYIIYYSTDVNAEIHDWVIEPVVGNRLTHQIQELTLDTPYYFKIQARNSKGMGPMSEAVQFRTPKASGSGGKGSRLPDLGSDYKPPMSGSNSPHGSPTSPLDSNMLLVIIVSVGVITIVVVVIIAVFCTRRTTSHQKKKRAACKSVNGSHKYKGNSKDVKPPDLWIHHERLELKPIDKSPDPNPIMTDTPIPRNSQDITPVDNSMDSNIHQRRNSYRGHESEDSMSTLAGRRGMRPKMMMPFDSQPPQPVISAHPIHSLDNPHHHFHSSSLASPARSHLYHPGSPWPIGTSMSLSDRANSTESVRNTPSTDTMPASSSQTCCTDHQDPEGATSSSYLASSQEEDSGQSLPTAHVRPSHPLKSFAVPAIPPPGPPTYDPALPSTPLLSQQALNHHIHSVKTASIGTLGRSRPPMPVVVPSAPEVQETTRMLEDSESSYEPDELTKEMAHLEGLMKDLNAITTA

SEQ ID NO: 68145 - DNA, 4353 bp, Artificial Sequence
  derived and/or modified sequence
atggccgccgaacggggagccaggcggttactgtccacacctagcttttggctgtactgtttgctgctgctgggccgccgcgccccgggagccgccgccgccagaagcggctccgcaccccagtctcctggggctagcattcgaactttcacacctttttacttcctggtcgagcccgtagacaccttatccgtccggggttccagcgtcattctgaactgcagcgcttatagcgaaccctccccaaagatcgaatggaagaaggacgggacattcctgaatctggtgtcagatgatcgaagacaactgcttcctgacggcagcctgttcatttctaatgtggtgcactccaaacataacaaacccgatgaaggatactatcagtgcgtggcgaccgtggaaagccttggtaccatcatttcacgcaccgccaagctgatcgttgcgggcttgccaaggttcacctcccagcctgaaccttcgtccgtgtatgccgggaacaatgccatcctgaattgtgaggtaaacgcagacctcgttccattcgtccgctgggaacagaatagacaacccctcctgctggacgaccgcgttatcaagttaccttctggcatgttggttatctcaaatgccaccgaaggcgatgggggtttgtatcgctgtgtagtggaatctggaggacccccaaaatactccgatgaagtggagctgaaagttctgcccgacccagaagtgattagtgacctcgtcttcctgaaacaaccaagtcctctagtccgtgtgatagggcaggatgttgtgctcccttgtgtggcttccggcctgcccacacccactatcaaatggatgaaaaacgaggaagcgcttgataccgagagttccgagcggctggtactactggccggcggaagcttggaaatctccgatgtgacggaggatgacgcggggacttacttttgtatcgccgataacggcaatgagacaatagaggcacaggccgaactgactgtgcaggcacaacccgagttcctgaaacagcccaccaacatatatgcacatgaatccatggatatcgtgttcgagtgtgaagttaccggcaagccgacccccaccgttaagtgggtcaagaatggggacatggttatcccaagtgattactttaagatcgtcaaggaacataatttgcaagtgctgggcctcgtgaagagtgatgaaggcttttatcagtgcatcgcagagaacgacgtggggaacgcacaggctggggcccagctcatcatcctcgagcatgccccggcgactacaggcccgctgccgagcgcccccagagacgtcgtggcctcattggttagcacgcgcttcatcaagctgacatggagaacacctgcctcggacccccacggagataatctgacatacagcgtgttctatacaaaggaaggtatcgcaagggaaagggtggagaatacttcacacccaggtgagatgcaagtaacaattcagaacctgatgcctgcgacggtatatattttccgggtgatggcccagaataagcatggctccggagagagttcggcccccctcagagttgaaacacagccggaagtgcagcttcctggtccggctcctaacctgcgagcgtacgccgctagtcccacaagtataaccgttacctgggaaaccccagtgtccgggaatggggaaatccaaaactataaactctactatatggagaagggcaccgataaggaacaagacgtagacgtgagctctcattcctatacgatcaacgggctaaagaagtacactgaatattctttccgcgtggttgcctacaataagcacggccctggtgtctcaacacccgatgtggcggtgcggactctgtccgatgtgccgtctgcagccccgcaaaacttaagcttggaggtgcggaactctaaatctatcatgatccattggcagccacccgcacccgccacccaaaatgggcagattacagggtataagatccggtataggaaagcaagccgcaagtccgacgtgactgaaacactggtgtctggaacccagcttagtcagctaattgagggactcgacagggggacagaatacaacttcagggtggcggcactcacaattaacggaaccggaccagccacagattggctatcagccgagaccttcgagtcagaccttgatgagacacgcgtacctgaggtgcccagtagcctgcacgtgcgacccctggttaccagtattgtggttagctggactccacctgagaatcagaatattgtcgtgcggggatatgcaatcggatatggtatcggatcaccccatgcacagactatcaaagtggattataagcagcgttattataccatcgaaaacctcgatccaagttcccattatgtgattacactgaaggctttcaacaacgtaggggagggtatccctctatatgaaagcgctgtaaccagaccacatacggatacttctgaagttgacttattcgtgattaatgcaccatataccccagttcccgatcccacgcccatgatgcctcccgtcggggttcaggcctctatcctttcccatgataccattcgcattacatgggccgacaattcactacctaagcaccagaaaattaccgattctcgttactacacggtaaggtggaagacgaacatcccagcaaacacgaaatataagaacgctaatgctactacgctctcatacctcgtcactggtcttaagccaaataccttgtatgaattctcagtgatggttactaaggggcggcgatcttctacatggtccatgaccgcccacggaacaacattcgagttggtacccacgagcccccccaaagacgtaacagttgtgagcaaagagggtaagcccaaaactatcattgtcaactggcagccaccttccgaagcaaacggtaaaatcacaggctacatcatctactattctaccgacgtcaatgcggagatacatgattgggtcattgagcctgtggttggcaatcgcctgacccatcagatccaagaacttaccctcgatacaccctactattttaaaatccaggcccgaaattctaagggtatggggcccatgagtgaggcagtacagtttagaacgccaaaggccagcgggagtggaggaaagggctcccgcttgcctgacctgggtagcgactacaagcctcctatgagtggatccaattctccccacggctcacctacctcgccccttgattctaacatgctgttggtgattattgtgtcagtgggagtgattaccattgtagttgtggtcattatcgcagtgttctgtacacggagaaccaccagccaccagaagaagaaaagggccgcatgtaaatccgtgaacggtagtcataaatacaaggggaacagcaaggatgtcaagccccccgacctgtggatacaccacgaaagattggagctgaagcccatcgataagtccccggatcccaacccaattatgaccgataccccgattcccagaaacagccaagatattacccctgtggataacagtatggattcaaacatccatcagaggcgaaactcctatagaggacacgagagcgaggacagcatgagcaccctggctggccgtcgggggatgaggcctaagatgatgatgccctttgacagccagcctcctcagcccgtgatatcagcccatcctatacactccctagacaatccacaccaccacttccattcttcctccctggccagcccagctagatcgcacctctaccaccctggtagcccttggcctatcgggacgagcatgtcactgtcagaccgagccaattccaccgaatctgttcgcaatacgccaagcacagacactatgcccgcaagctcttctcaaacatgctgtacggatcatcaagatcccgaaggcgccacttcatcctcctatctggcgtccagccaggaggaagactccggccagagtctgcccacagctcatgtgagaccgtcacacccgttaaagtcattcgcagtcccagcaatcccacctcctggcccccctacgtatgacccagcccttccatctacaccccttttaagtcagcaggcgctgaaccaccatatccactccgtaaagacagcttccatcggcacactcggaagaagccgtcctcctatgccagtagttgtgccttctgcccccgaagtacaagaaactacccgcatgctcgaagacagtgagagtagctatgagccagatgagctgaccaaggagatggcccacttggaaggactcatgaaagacttaaacgccattaccacagcctag

SEQ ID NO: 68146 - DNA, 4353 bp, Artificial Sequence
  derived and/or modified sequence
atggctgctgagcggggggcccggcggctgctgagcacccccagcttctggctgtactgcctgctgctgctgggccggcgggcccctggagctgctgctgcccggagcggcagcgccccccagagccctggggccagcatccgcaccttcacccccttctacttcctggtggagcctgtggacaccctgtctgtgcggggcagcagcgtcatcctgaactgcagcgcctacagcgagcccagccccaagattgagtggaagaaggatggcaccttcctgaacctggtgtctgatgaccggcggcagctgctgcctgatggcagcctcttcatcagcaatgtggtgcacagcaagcacaacaagccagatgagggctactaccagtgtgtggccaccgtggagagcctgggcaccatcatcagcaggacagccaagctgattgtggccggcctgccccgcttcaccagccagcctgagcccagctctgtgtatgccggcaacaatgccatcctgaactgtgaggtgaatgctgacctggtgccctttgtgcgctgggagcagaaccggcagcccctgctgctggatgacagagtcatcaagctgcccagcggcatgctggtgatcagcaatgccacagaaggagatggcggcctgtaccgctgtgtggtggagagcggcggcccccccaagtacagtgatgaggtggagctgaaggtgctgcctgaccctgaggtgatcagtgacctggtgttcctgaagcagcccagccccctggtgcgggtcatcggccaggatgtggtgctgccctgtgtggccagcggcctgcccacccccaccatcaagtggatgaagaatgaggaggccctggacacagagagcagcgagcggctggtgctgctggccggcggcagcctggagatcagtgatgtgacagaagatgatgctggcacctacttctgcatcgctgacaatggaaatgagaccatcgaggcccaggccgagctgactgtgcaggcccagcctgagttcctgaagcagcccaccaacatctatgcccacgagagcatggacatcgtgtttgaatgtgaggtgacaggcaagcccacccccaccgtgaagtgggtgaagaatggagacatggtgatccccagcgactacttcaagatcgtgaaggagcacaacctgcaggtgctgggcctggtgaagagtgatgagggcttctaccagtgcatcgcagaaaatgatgtgggcaatgcccaggccggggcccagctgatcatcctggagcacgccccagccaccaccggccccctgcccagcgcccccagagatgtggtggccagcctggtgtccacccgcttcatcaagctgacctggaggaccccagccagtgacccccatggagacaacctgacctacagcgtcttctacaccaaggagggcatcgcccgggagcgggtggagaacaccagccaccctggagagatgcaggtgaccatccagaacctgatgcctgccaccgtgtacatcttccgggtgatggcccagaacaagcacggcagcggggagagcagcgcccccctgcgggtggagacccagcctgaggtgcagctgcccggccctgcccccaacctgcgggcctatgctgccagccccaccagcatcaccgtgacctgggagacccctgtgtctggaaatggagagatccagaactacaagctgtactacatggagaagggcacagacaaggagcaggatgtggatgtgagcagccacagctacaccatcaatggcctgaagaagtacacagagtacagcttccgggtggtggcctacaacaagcacggccctggggtgtccaccccagatgtggccgtgaggaccctgagtgatgtgcccagcgctgccccccagaacctgagcctggaggtgaggaacagcaagagcatcatgatccactggcagcccccagccccagccacccagaatggccagatcaccggctacaagatccgctacaggaaggccagcaggaagagtgatgtgacagagaccctggtgtctggcacccagctgagccagctgattgagggcctggaccggggcacagagtacaacttccgggtggccgccctgaccatcaatggaactggacctgccacagactggctgtctgctgagacctttgaaagtgacctggatgagaccagggtgcctgaggtgcccagcagcctgcacgtgcggcccctggtgaccagcatcgtggtgtcctggaccccacctgagaaccagaacatcgtggtgcggggctacgccatcggctatggaattggcagcccccacgcccagaccatcaaggtggactacaagcagcgctactacaccatcgagaacctggaccccagcagccactacgtgatcaccctgaaggccttcaacaacgtgggggagggcatccccctgtatgagagcgctgtgacccggccccacacagacaccagcgaggtggacctgtttgtgatcaatgccccctacacccctgtgcctgaccccacccccatgatgcctcctgtgggcgtgcaggccagcatcctgagccatgacaccatccgcatcacctgggccgacaacagcctgcccaagcaccagaagatcacagacagccgctactacacagtgcgctggaagaccaacatcccagccaacaccaagtacaagaatgccaatgccaccaccctgagctacctggtgacaggcctgaagcccaacaccctgtatgagttctctgtgatggtgaccaagggccgccgcagcagcacctggagcatgacagcccacggcaccacctttgagctggtgcccaccagcccccccaaggatgtgacagtggtgtccaaggagggcaagcccaagaccatcatcgtgaactggcagcccccatctgaggccaacgggaagatcaccggctacatcatctactacagcacagatgtgaatgctgagatccatgactgggtgattgagcctgtggtgggcaaccggctgacccaccagatccaggagctgaccctggacaccccctactacttcaagatccaggccaggaacagcaagggcatgggccccatgtctgaggccgtgcagttccgcacccccaaggccagcggcagcggcggcaagggcagccggctgcctgacctgggcagtgactacaagccacccatgagcggcagcaacagcccccacggcagccccaccagccccctggacagcaacatgctgctggtgatcatcgtgtctgtgggcgtcatcaccatcgtggtggtggtgatcatcgctgtgttctgcaccaggaggaccaccagccaccagaagaagaagagagctgcctgcaagtctgtgaatggcagccacaagtacaagggcaacagcaaggatgtgaagcccccagacctgtggatccaccacgagcggctggagctgaagcccatcgacaagagcccagaccccaaccccatcatgacagacacccccatccccaggaacagccaggacatcacccctgtggacaacagcatggacagcaacatccaccagaggagaaattcctaccggggccatgaaagtgaggacagcatgagcaccctggccggcagaagaggcatgaggcccaagatgatgatgccctttgacagccagcccccccagcctgtgatcagcgcccaccccatccacagcctggacaacccccaccaccacttccacagcagcagcctggccagccctgcccggagccacctgtaccaccctggcagcccctggcccatcggcacctccatgagcctgagtgaccgggccaacagcacagaatctgtgaggaacacccccagcacagacaccatgcctgccagcagcagccagacctgctgcacagaccaccaggaccctgagggcgccaccagcagcagctacctggccagcagccaggaggaggacagcggccagagcctgcccacagcccacgtgcggcccagccaccccctgaagagctttgctgtgcctgccatccccccacctggcccccccacctatgaccctgccctgcccagcacccccctgctgagccagcaggccctgaaccaccacatccacagcgtgaagacagccagcatcggcaccctgggccgcagcaggcctcccatgcctgtggtggtgcccagcgcccctgaggtgcaggagaccaccaggatgctggaggacagcgagagcagctatgagccagatgagctgaccaaggagatggcccacctggagggcctgatgaaggacctgaatgccatcaccacagcctag

SEQ ID NO: 68147 - DNA, 4353 bp, Artificial Sequence
  derived and/or modified sequence
atggccgccgagcggggcgcccggcggctgctgagcacccccagcttctggttgtattgcctcctcttgctcggcaggcgggcccccggcgcagcagccgctaggtcaggatcggccccccagagccccggggcttccatcaggacattcacccctttctattttctggttgagcccgtggacactctctccgtgaggggctcaagtgtcatcctcaactgctccgcctattcagagccgagcccgaagattgagtggaaaaaggatggaacctttctgaacctggtgagtgacgaccgccgtcagttgcttcctgatggatccctattcatttctaacgtggtgcattccaagcacaacaaaccggatgagggatactaccagtgtgttgccacagttgaaagcttggggaccatcatttcgaggactgcgaagttgatagttgccggcctgcctcggttcaccagccagcccgaacctagcagtgtctacgcgggaaataacgccatccttaattgcgaggttaatgcagacctcgtcccttttgtgcggtgggagcagaaccggcagcctttgctgttggatgaccgggtgatcaagctgccctcgggaatgctggtgatctccaatgccactgagggggatggaggactgtaccgctgtgtcgtggaatctggcgggccgcccaaatattccgatgaggtggagctgaaagtactgcccgaccccgaagtcatctccgatctggtgtttctgaagcagccctcgccattagtgcgggtcatcggtcaggatgtcgtcctcccctgcgtcgcaagcggcttacccaccccaacgataaagtggatgaagaatgaagaagccctggacaccgagtctagcgagcggcttgtgctgctggcaggcgggtctttagagatcagcgacgtaaccgaggatgatgccggcacctatttctgtatagccgacaacggaaatgaaactattgaggcccaagctgaactgactgtccaggctcagcctgaattcctgaaacagccaactaatatttacgctcacgaaagcatggacatcgtgttcgagtgtgaagtaacgggcaagcctaccccaaccgtcaagtgggtcaagaatggggacatggtgatcccatccgattacttcaaaattgtgaaagagcataaccttcaggtcctcggactcgtgaagtcagatgagggtttttatcagtgcatcgcagagaatgacgtgggcaacgcacaagctggggcacaacttatcatcctggaacacgcacctgcgaccaccggccctcttcccagtgctcccagagacgttgtagcaagcctcgtgtctacccgttttattaagctgacgtggcggacccccgcctccgatcctcatggcgacaacctgacatatagtgttttctatacgaaggagggcattgccagggaaagagtagaaaacacctcccaccccggggagatgcaggtcactatccaaaacctgatgcccgcgaccgtctacatctttcgcgtcatggctcaaaataaacatgggagcggagagagttcggcaccactgagagttgaaacccagcccgaagtgcaacttccaggaccggcgcccaaccttagggcttatgccgcaagtcccaccagcataaccgtgacttgggaaacccccgtgtctggaaacggagagattcaaaactataaactctactatatggaaaaggggactgacaaggaacaggacgttgatgtaagttctcacagctataccatcaacggtctgaaaaagtatacagagtacagctttcgggtggttgcctataacaagcatggaccaggagtttctactcccgacgtcgctgtgcggactttgtcagacgtgccatccgccgccccacagaacctatccctcgaagttaggaatagtaagtctatcatgatccattggcaaccacccgcacccgcgacacagaacggacagattacgggctataaaatccgctacagaaaggcatcccgaaagtccgacgtgaccgagacgttggtgtctggcactcagctctctcagctgatcgaaggtctggatcgtggaaccgaatataacttccgggtagcagctctaacaatcaatggtactggtcccgccaccgactggctctccgcagaaacgttcgagtcagatctggatgaaactcgggttccagaggtcccttcatctctgcacgtgcgtcccttggtgacatcaatcgtcgtgtcatggactccacccgagaatcagaatatagttgtgcgtggatacgccattggctatggcatcggctcaccgcatgctcaaaccataaaagttgattataaacaacgttattacacaattgaaaacttagacccctccagccattatgtaatcacattgaaagcttttaataacgtaggagaaggaatcccgctgtatgaaagcgccgttacaaggccccacacagacactagcgaagtggacctcttcgtcatcaatgcaccttacacccccgtccccgaccctacccctatgatgccccccgtgggtgtgcaggcctcaatcctatctcacgacacaatccgaatcacgtgggcagacaatagcctacccaagcatcagaaaatcacagattcccgttactacactgtaagatggaaaacgaacattccagcaaatacaaaatacaaaaatgcaaatgcaaccaccctgagctacctggtaacaggcctcaagccaaatacattgtacgagttttcggtgatggtcactaaaggacggcgctccagcacatggtctatgactgcccatggaactactttcgagctggtgcccaccagccccccgaaggacgtgactgtcgtctctaaagagggcaagcccaagacaattatcgtgaattggcaacctcctagcgaggctaacggtaaaatcacaggatacataatttactactcaaccgatgtgaatgccgaaatccatgactgggtcatcgagcccgttgtaggaaatcgcctgacacaccaaatccaggaacttacgctggacaccccctattattttaaaatccaggccaggaattccaagggcatggggcctatgagcgaagctgtgcagtttaggacacctaaagcttcaggatcaggtggtaagggatccaggttgccagaccttggaagcgattacaaacccccaatgagtggtagcaattcaccccacggctcacccacctcacctttggactcaaatatgctcttggtgataatcgtgtccgtcggggtaatcacgatcgttgtcgtagtgattatagccgtgttttgcaccaggcgaactacctctcatcagaaaaaaaagagggcggcttgcaaaagcgttaatgggtcccataagtataaagggaactcaaaagatgtcaaaccacctgacctttggattcatcatgaaaggctcgagctgaaacccattgacaaatcgcctgatccaaatcccattatgaccgatacccccatccctaggaacagccaggatatcacaccggttgataactccatggacagcaatatccaccagcgcagaaattcctatcgcggccacgaatccgaagactctatgagcaccctggctggcagaagaggcatgcgtccaaagatgatgatgcctttcgactcccagccacctcagcctgtcatctctgcacacccaatccactcgctggacaacccccatcatcactttcactcctcgagccttgcatcacctgcgcggagccatctttaccatccaggttctccgtggccaatcggaactagtatgagccttagcgatcgtgctaactctactgagtctgtacgaaacacaccttccaccgatactatgccagcatcttcttcccagacatgttgcacagatcaccaggatcctgagggcgccaccagcagctcctatcttgcttccagtcaggaagaagattctggtcagagcctcccgactgcacatgtaagaccttctcaccccctcaagtcctttgccgtgcccgccatcccgcctcccggcccacctacgtatgatcccgccctgccatcaactcctctactttctcagcaagcccttaaccaccacatacattcagtgaagacggcctcgattggcacgctcggtcgttcacgacctccaatgccagtggtggtaccctccgcgccggaggtacaggagacaaccaggatgctggaggactcagaaagcagttatgagcccgatgagctgaccaaagaaatggcccacttggagggactgatgaaggatctgaacgcaataacgacggcctag

SEQ ID NO: 68148 - DNA, 4441 bp, Artificial Sequence
  derived and/or modified sequence
gggagggaaggaggcaagggctccgcggcgctgtcgccgccgctgccgctcactctcggggaagagatggcggcggagcggggagcccggcgactcctcagcaccccctccttctggctctactgcctgctgctgctcgggcgccgggcgccgggcgccgcggccgccaggagcggctccgcgccgcagtccccaggagccagcattcgaacgttcactccattttattttctggtggagccggtggatacactctcagttagaggctcttctgttatattaaactgttcagcatattctgagccttctccaaaaattgaatggaaaaaagatggaacttttttaaacttagtatcagatgatcgacgccagcttctcccggatggatctttatttatcagcaatgtggtgcattccaaacacaataaacctgatgaaggttattatcagtgtgtggccactgttgagagtcttggaactattatcagtagaacagcgaagctcatagtagcaggtcttccaagatttaccagccaaccagaaccttcctcagtttatgctgggaacaatgcaattctgaattgtgaagttaatgcagatttggtcccatttgtgaggtgggaacagaacagacaaccccttcttctggatgatagagttatcaaacttccaagtggaatgctggttatcagcaatgcaactgaaggagatggcgggctttatcgctgcgtagtggaaagtggtgggccaccaaagtatagtgatgaagttgaattgaaggttcttccagatcctgaggtgatatcagacttggtatttttgaaacagccttctcccttagtcagagtcattggtcaggatgtagtgttgccatgtgttgcttcaggacttcctactccaaccattaaatggatgaaaaatgaggaggcacttgacacagaaagctctgaaagattggtattgctggcaggtggtagcctggagatcagtgatgttactgaggatgatgctgggacttatttttgtatagctgataatggaaatgagacaattgaagctcaagcagagcttacagtgcaagctcaacctgaattcctgaagcagcctactaatatatatgctcacgaatctatggatattgtatttgaatgtgaagtgactggaaaaccaactccaactgtgaagtgggtcaaaaatggggatatggttatcccaagtgattattttaagattgtaaaggaacataatcttcaagttttgggtctggtgaaatcagatgaagggttctatcagtgcattgctgaaaatgatgttggaaatgcacaagctggagcccaactgataatccttgaacatgcaccagccacaacgggaccactgccttcagctcctcgggatgtcgtggcctccctggtctctacccgcttcatcaaattgacgtggcggacacctgcatcagatcctcacggagacaaccttacctactctgtgttctacaccaaggaagggattgctagggaacgtgttgagaataccagtcacccaggagagatgcaagtaaccattcaaaacctaatgccagcgaccgtgtacatctttagagttatggctcaaaataagcatggctcaggagagagttcagctccactgcgagtagaaacacaacctgaggttcagctccctggcccagcacctaaccttcgtgcatatgcagcttcgcctacctccatcactgttacgtgggaaacaccagtgtctggcaatggggaaattcagaattataaattgtactacatggaaaaggggactgataaagaacaggatgttgatgtttcaagtcactcttacaccattaatgggttgaaaaaatatacagagtatagtttccgagtggtggcctacaataaacatggtcctggagtttccacaccagatgttgctgttcgaacattgtcagatgttcccagtgctgctcctcagaatctgtccttggaagtgagaaattcaaagagtattatgattcactggcagccacctgctccagccacacaaaatgggcagattactggctacaagattcgctaccgaaaggcctcccgaaagagtgatgtcactgagaccttggtaagcgggacacagctgtctcagctgattgaaggtcttgatcgggggactgagtataatttccgagtggctgctctaacaatcaatggtacaggcccggcaactgactggctgtctgctgaaacttttgaaagtgacctagatgaaactcgtgttcctgaagtgcctagctctcttcacgtacgcccgctcgttactagcatcgtagtgagctggactcctccagagaatcagaacattgtggtcagaggttacgccattggttatggcattggcagccctcatgcccagaccatcaaagtggactataaacagcgctattacaccattgaaaatctggatcccagctctcactatgtgattaccctgaaagcatttaataacgtgggtgaaggcatccccctgtatgagagtgctgtgaccaggcctcacacagacacttctgaagttgatttatttgttattaatgctccatacactccagtgccagatcccactcccatgatgccaccagtgggagttcaggcttccattctgagtcatgacaccatcaggattacgtgggcagacaactcgctgcccaagcaccagaagattacagactcccgatactacaccgtccgatggaaaaccaacatcccagcaaacaccaagtacaagaatgcaaatgcaaccactttgagttatttggtgactggtttaaagccgaatacactctatgaattctctgtgatggtgaccaaaggtcgaagatcaagtacatggagtatgacagcccatgggaccacctttgaattagttccgacttctccacccaaggatgtgactgttgtgagtaaagaggggaaacctaagaccataattgtgaattggcagcctccctccgaagccaatggcaaaattacaggttacatcatatattacagtacagatgtgaatgcagagatacatgactgggttattgagcctgttgtgggaaacagactgactcaccagatacaagagttaactcttgacacaccatactacttcaaaatccaggcacggaactcaaagggcatgggacccatgtctgaagctgtccaattcagaacacctaaagcctcagggtctggagggaaaggaagccggctgccagacctaggatccgactacaaacctccaatgagcggcagtaacagccctcatgggagccccacctctcctctggacagtaatatgctgctggtcataattgtttctgttggcgtcatcaccatcgtggtggttgtgattatcgctgtcttttgtacccgtcgtaccacctctcaccagaaaaagaaacgagctgcctgcaaatcagtgaatggctctcataagtacaaagggaattccaaagatgtgaaacctccagatctctggatccatcatgagagactggagctgaaacccattgataagtctccagacccaaaccccatcatgactgatactccaattcctcgcaactctcaagatatcacaccagttgacaactccatggacagcaatatccatcaaaggcgaaattcatacagagggcatgagtcagaggacagcatgtctacactggctggaaggcgaggaatgagaccaaaaatgatgatgccctttgactcccagccaccccagcctgtgattagtgcccatcccatccattccctcgataaccctcaccatcatttccactccagcagcctcgcttctccagctcgcagtcatctctaccacccgggcagcccatggcccattggcacatccatgtccctttcagacagggccaattccacagaatccgttcgaaatacccccagcactgacaccatgccagcctcttcgtctcaaacatgctgcactgatcaccaggaccctgaaggtgctaccagctcctcttacttggccagctcccaagaggaagattcaggccagagtcttcccactgcccatgttcgcccttcccacccattgaagagcttcgccgtgccagcaatcccgcctccaggacctcccacctatgatcctgcattgccaagcacaccattactgtcccagcaagctctgaaccatcacattcactcagtgaagacagcctccatcgggactctaggaaggagccggcctcctatgccagtggttgttcccagtgcccctgaagtgcaggagaccacaaggatgttggaagactccgagagtagctatgaaccagatgagctgaccaaagagatggcccacctggaaggactaatgaaggacctaaacgctatcacaacagcatgacgaccttcaccaggacctgact

SEQ ID NO: 68149 - DNA, 4353 bp, Artificial Sequence
  derived and/or modified sequence
atggctgccgaaagaggagcgcgacggttactgtctacaccatctttctggctgtactgcctgctgctactcggtaggcgggcaccgggagctgccgctgcgagaagcggctcagctccccagagccctggtgcgtccatcaggacttttacgccattctatttcctagttgagccagtggacacgttatcagtgaggggttctagcgtcatcttgaattgttccgcctacagcgaaccttcccccaagatcgagtggaagaaagatggcactttcctcaacctggttagtgacgatcgacgtcagcttttgccagacggaagcctctttatcagtaacgttgtccactcaaaacacaacaagccagacgaaggctattatcagtgtgtagcgaccgtggaatctctgggaacgattatatcaagaaccgctaaactgattgtggccggtctaccacggttcacatcgcagcctgaaccaagctccgtctacgccggaaataatgccattctgaactgcgaagtgaacgcggacttggtccctttcgtgcgatgggaacagaaccgtcagcccctcctgctcgacgatcgtgtcatcaagctgccctcagggatgttagtcatcagcaatgcaactgagggggacgggggactgtatcggtgtgtggttgaatccggaggacctcctaaatactcagacgaggtggagctgaaggttctgccagacccagaggtgatctctgacctcgtgtttctgaaacagccaagccctctcgtgcgagtgatcgggcaagatgtagtgttgccgtgcgtcgctagcggattaccgacacctaccattaagtggatgaaaaatgaggaggccctggataccgaatcctccgagagacttgtgctgctcgcagggggtagcttggagattagtgacgttaccgaagacgacgctggcacctatttctgtatcgccgataacgggaatgagaccattgaggcacaggcggagttgacagtccaggcccagccagaattcctcaaacaacctaccaatatttatgcccatgagagcatggatatcgtgttcgagtgcgaggtgacggggaaacccacccctactgtcaagtgggtcaagaacggtgacatggtgatcccgtcggactattttaagattgttaaggagcataacctgcaggttttgggcctagtgaagtctgacgaaggattttaccagtgtatcgcagagaacgacgttggaaacgctcaggcaggcgctcaattaatcatactggaacatgctccggcaactacgggacccctgccctccgcccctcgagatgtggtggcctcattggtgtccacaaggttcataaagctcacctggcggaccccggcaagtgacccccacggggataacttaacttactccgttttctacaccaaggaaggcatcgccagagaacgggtggaaaacacgagccatcctggggagatgcaggtcacaattcagaacctaatgcctgctaccgtatacatttttagagtaatggcacagaacaagcatggctctggagaaagcagcgcacccctccgggtcgaaacccagcctgaggttcagctccctggcccagctccgaaccttcgggcatacgctgcatccccaacatccatcactgtaacgtgggagacacccgtctccggtaatggagaaatacagaactacaagctgtactatatggagaagggcaccgacaaggagcaggacgtcgatgtgtcttcacacagctacaccattaacggtctgaaaaaatacactgagtattccttccgggttgtggcttataacaagcatggacccggagtcagtaccccggatgtggctgtgaggaccctgtctgacgtgcccagtgcggctcctcagaacctgtcactggaagtcaggaacagcaagtcaattatgatccactggcaacctcccgctccagcgactcagaacgggcagatcacagggtacaaaatcagataccgcaaggccagcaggaagtcagatgttacagagactttggtgtcaggtactcagttgtcacagctgattgagggattagatcggggtaccgaatacaattttcgcgtggctgccctgaccattaacgggaccggtcccgcaaccgactggttgtccgcagagaccttcgagtcagatttggatgagaccagggtgccagaggtgcctagctcgctccacgtgcgcccactggtgacaagcatagtcgtctcctggaccccccctgaaaatcagaacatagtcgttaggggctatgccatcggctatggcatcggctccccccacgctcagacgattaaggtggattacaaacaacggtactatactatagaaaacctggatccatcatctcactacgtgatcacactgaaggcatttaacaacgttggagagggcatccctctatatgaaagtgcagtgacccggccacataccgacacatctgaggtggatctgttcgtcattaacgctccatacacccccgttccagaccctacacctatgatgccgccagttggagtacaggcatccatactgagtcacgacacgattaggatcacttgggccgataactctttgcctaaacatcagaagatcaccgattctaggtactacacagtgcgatggaagaccaatattcccgctaatactaaatataagaatgccaatgccactaccttaagctatctcgtgacgggcctgaagccaaacaccttgtatgagttctccgtaatggttacaaagggaagaagatcttcaacatggtctatgactgcgcacgggacgacattcgaattggtgccaacaagtccccctaaagacgtcacggtggtcagcaaggaaggaaaacccaagacaataattgtcaattggcaaccaccaagcgaggcgaacggaaagattacagggtacatcatttattatagtaccgatgtgaacgcagaaatccatgattgggtaattgaacccgtagtgggaaataggttgacgcatcagatccaggaactgaccttagatactccctattattttaagattcaggccagaaactctaaggggatgggcccaatgtctgaagcggtccaattcagaactcccaaagcctccggttctggtggcaaaggctctcggctacccgatctcggcagtgattacaagccgcctatgtccggttccaacagcccacacggtagccctacatcccctttagatagtaacatgctcctcgtgatcattgtgagtgtcggtgtgataacaatcgttgtggtggtcattatcgctgtattctgcacacgacggacgacgagccatcaaaagaagaaacgcgcagcttgcaagtccgtgaatggatctcacaagtacaagggaaacagtaaagatgtcaagcctccggacctctggattcatcacgagagactggaactgaagcctatcgataaatctcctgatcctaatcccatcatgaccgatacacccataccgcgaaattcacaggacatcaccccggttgacaatagtatggattccaacatccatcaacgtcgtaactcttaccggggtcacgaatctgaggatagcatgtctaccctggcagggagacggggtatgaggccaaagatgatgatgcccttcgactcccagccaccccagcctgtgatttccgcccaccctatccattctttggataatccccatcaccactttcattctagttctttggcctcaccagccaggtcacacctttaccacccaggaagtccctggccaatcggtacttcaatgtcgctttccgatagggcaaattcaaccgagtcagtgcggaataccccctctaccgacaccatgcctgcctctagttcccagacttgctgcactgaccatcaggaccctgagggcgcaacaagcagtagttatttagcctctagccaggaggaagattccggtcaatcactgcccaccgctcatgtgcggccaagccaccccttgaagtctttcgccgtacccgcaattcctcctccaggaccccctacctacgaccctgctcttcctagtacccccctgctctctcaacaagcccttaaccaccatatccattccgtcaagacggctagtatcggtactttgggcaggtcacgccctccaatgcctgtcgtcgtgccctccgccccagaggtgcaggagactactagaatgctcgaagattctgagtcctcttacgaaccagacgagcttaccaaggagatggcacatctggaaggccttatgaaggacctgaacgctattaccacagcctag

SEQ ID NO: 68150 - DNA, 4353 bp, Artificial Sequence
  derived and/or modified sequence
atggccgccgagagaggcgccagaagactgctgagcacccccagcttctggctgtactgcctgctgctgctgggcagaagagcccccggcgccgccgccgccagaagcggcagcgccccccagagccccggcgccagcatcagaaccttcacccccttctacttcctggtggagcccgtggacaccctgagcgtgagaggcagcagcgtgatcctgaactgcagcgcctacagcgagcccagccccaagatcgagtggaagaaggacggcaccttcctgaacctggtgagcgacgacagaagacagctgctgcccgacggcagcctgttcatcagcaacgtggtgcacagcaagcacaacaagcccgacgagggctactaccagtgcgtggccaccgtggagagcctgggcaccatcatcagcagaaccgccaagctgatcgtggccggcctgcccagattcaccagccagcccgagcccagcagcgtgtacgccggcaacaacgccatcctgaactgcgaggtgaacgccgacctggtgcccttcgtgagatgggagcagaacagacagcccctgctgctggacgacagagtgatcaagctgcccagcggcatgctggtgatcagcaacgccaccgagggcgacggcggcctgtacagatgcgtggtggagagcggcggcccccccaagtacagcgacgaggtggagctgaaggtgctgcccgaccccgaggtgatcagcgacctggtgttcctgaagcagcccagccccctggtgagagtgatcggccaggacgtggtgctgccctgcgtggccagcggcctgcccacccccaccatcaagtggatgaagaacgaggaggccctggacaccgagagcagcgagagactggtgctgctggccggcggcagcctggagatcagcgacgtgaccgaggacgacgccggcacctacttctgcatcgccgacaacggcaacgagaccatcgaggcccaggccgagctgaccgtgcaggcccagcccgagttcctgaagcagcccaccaacatctacgcccacgagagcatggacatcgtgttcgagtgcgaggtgaccggcaagcccacccccaccgtgaagtgggtgaagaacggcgacatggtgatccccagcgactacttcaagatcgtgaaggagcacaacctgcaggtgctgggcctggtgaagagcgacgagggcttctaccagtgcatcgccgagaacgacgtgggcaacgcccaggccggcgcccagctgatcatcctggagcacgcccccgccaccaccggccccctgcccagcgcccccagagacgtggtggccagcctggtgagcaccagattcatcaagctgacctggagaacccccgccagcgacccccacggcgacaacctgacctacagcgtgttctacaccaaggagggcatcgccagagagagagtggagaacaccagccaccccggcgagatgcaggtgaccatccagaacctgatgcccgccaccgtgtacatcttcagagtgatggcccagaacaagcacggcagcggcgagagcagcgcccccctgagagtggagacccagcccgaggtgcagctgcccggccccgcccccaacctgagagcctacgccgccagccccaccagcatcaccgtgacctgggagacccccgtgagcggcaacggcgagatccagaactacaagctgtactacatggagaagggcaccgacaaggagcaggacgtggacgtgagcagccacagctacaccatcaacggcctgaagaagtacaccgagtacagcttcagagtggtggcctacaacaagcacggccccggcgtgagcacccccgacgtggccgtgagaaccctgagcgacgtgcccagcgccgccccccagaacctgagcctggaggtgagaaacagcaagagcatcatgatccactggcagccccccgcccccgccacccagaacggccagatcaccggctacaagatcagatacagaaaggccagcagaaagagcgacgtgaccgagaccctggtgagcggcacccagctgagccagctgatcgagggcctggacagaggcaccgagtacaacttcagagtggccgccctgaccatcaacggcaccggccccgccaccgactggctgagcgccgagaccttcgagagcgacctggacgagaccagagtgcccgaggtgcccagcagcctgcacgtgagacccctggtgaccagcatcgtggtgagctggaccccccccgagaaccagaacatcgtggtgagaggctacgccatcggctacggcatcggcagcccccacgcccagaccatcaaggtggactacaagcagagatactacaccatcgagaacctggaccccagcagccactacgtgatcaccctgaaggccttcaacaacgtgggcgagggcatccccctgtacgagagcgccgtgaccagaccccacaccgacaccagcgaggtggacctgttcgtgatcaacgccccctacacccccgtgcccgaccccacccccatgatgccccccgtgggcgtgcaggccagcatcctgagccacgacaccatcagaatcacctgggccgacaacagcctgcccaagcaccagaagatcaccgacagcagatactacaccgtgagatggaagaccaacatccccgccaacaccaagtacaagaacgccaacgccaccaccctgagctacctggtgaccggcctgaagcccaacaccctgtacgagttcagcgtgatggtgaccaagggcagaagaagcagcacctggagcatgaccgcccacggcaccaccttcgagctggtgcccaccagcccccccaaggacgtgaccgtggtgagcaaggagggcaagcccaagaccatcatcgtgaactggcagccccccagcgaggccaacggcaagatcaccggctacatcatctactacagcaccgacgtgaacgccgagatccacgactgggtgatcgagcccgtggtgggcaacagactgacccaccagatccaggagctgaccctggacaccccctactacttcaagatccaggccagaaacagcaagggcatgggccccatgagcgaggccgtgcagttcagaacccccaaggccagcggcagcggcggcaagggcagcagactgcccgacctgggcagcgactacaagccccccatgagcggcagcaacagcccccacggcagccccaccagccccctggacagcaacatgctgctggtgatcatcgtgagcgtgggcgtgatcaccatcgtggtggtggtgatcatcgccgtgttctgcaccagaagaaccaccagccaccagaagaagaagagagccgcctgcaagagcgtgaacggcagccacaagtacaagggcaacagcaaggacgtgaagccccccgacctgtggatccaccacgagagactggagctgaagcccatcgacaagagccccgaccccaaccccatcatgaccgacacccccatccccagaaacagccaggacatcacccccgtggacaacagcatggacagcaacatccaccagagaagaaacagctacagaggccacgagagcgaggacagcatgagcaccctggccggcagaagaggcatgagacccaagatgatgatgcccttcgacagccagcccccccagcccgtgatcagcgcccaccccatccacagcctggacaacccccaccaccacttccacagcagcagcctggccagccccgccagaagccacctgtaccaccccggcagcccctggcccatcggcaccagcatgagcctgagcgacagagccaacagcaccgagagcgtgagaaacacccccagcaccgacaccatgcccgccagcagcagccagacctgctgcaccgaccaccaggaccccgagggcgccaccagcagcagctacctggccagcagccaggaggaggacagcggccagagcctgcccaccgcccacgtgagacccagccaccccctgaagagcttcgccgtgcccgccatccccccccccggcccccccacctacgaccccgccctgcccagcacccccctgctgagccagcaggccctgaaccaccacatccacagcgtgaagaccgccagcatcggcaccctgggcagaagcagaccccccatgcccgtggtggtgcccagcgcccccgaggtgcaggagaccaccagaatgctggaggacagcgagagcagctacgagcccgacgagctgaccaaggagatggcccacctggagggcctgatgaaggacctgaacgccatcaccaccgcctag

SEQ ID NO: 68151 - protein, 733 aa, Artificial Sequence
  derived and/or modified sequence
MASISEPVTFREFCPLYYLLNAIPTKIQKGFRSIVVYLTALDTNGDYIAVGSSIGMLYLYCRHLNQMRKYNFEGKTESITVVKLLSCFDDLVAAGTASGRVAVFQLVSSLPGRNKQLRRFDVTGIHKNSITALAWSPNGMKLFSGDDKGKIVYSSLDLDQGLCNSQLVLEEPSSIVQLDYSQKVLLVSTLQRSLLFYTEEKSVRQIGTQPRKSTGKFGACFIPGLCKQSDLTLYASRPGLRLWKADVHGTVQATFILKDAFAGGVKPFELHPRLESPNSGSCSLPERHLGLVSCFFQEGWVLSWNEYSIYLLDTVNQATVAGLEGSGDIVSVSCTENEIFFLKGDRNIIRISSRPEGLTSTVRDGLEMSGCSERVHVQQAEKLPGATVSETRLRGSSMASSVASEPRSRSSSLNSTDSGSGLLPPGLQATPELGKGSQPLSQRFNAISSEDFDQELVVKPIKVKRKKKKKKTEGGSRSTCHSSLESTPCSEFPGDSPQSLNTDLLSMTSSVLGSSVDQLSAESPDQESSFNGEVNGVPQENTDPETFNVLEVSGSMPDSLAEEDDIRTEMPHCHHAHGRELLNGAREDVGGSDVTGLGDEPCPADDGPNSTPQHTTHLTSHHSTPHHTTPHCTIPHHISPHHSTPHHTTHHTPHRTAPHRTAPYLATSHHTTPHHTSLPTHGAGCPPPGEHTSAETVKPDGCKWNLDVCTCVPGRDGTGGCMGRGGAEQGSLT

SEQ ID NO: 68152 - protein, 1267 aa, Artificial Sequence
  derived and/or modified sequence
MASISEPVTFREFCPLYYLLNAIPTKIQKGFRSIVVYLTALDTNGDYIAVGSSIGMLYLYCRHLNQMRKYNFEGKTESITVVKLLSCFDDLVAAGTASGRVAVFQLVSSLPGRNKQLRRFDVTGIHKNSITALAWSPNGMKLFSGDDKGKIVYSSLDLDQGLCNSQLVLEEPSSIVQLDYSQKVLLVSTLQRSLLFYTEEKSVRQIGTQPRKSTGKFGACFIPGLCKQSDLTLYASRPGLRLWKADVHGTVQATFILKDAFAGGVKPFELHPRLESPNSGSCSLPERHLGLVSCFFQEGWVLSWNEYSIYLLDTVNQATVAGLEGSGDIVSVSCTENEIFFLKGDRNIIRISSRPEGLTSTVRDGLEMSGCSERVHVQQAEKLPGATVSETRLRGSSMASSVASEPRSRSSSLNSTDSGSGLLPPGLQATPELGKGSQPLSQRFNAISSEDFDQELVVKPIKVKRKKKKKKTEGGSRSTCHSSLESTPCSEFPGDSPQSLNTDLLSMTSSVLGSSVDQLSAESPDQESSFNGEVNGVPQENTDPETFNVLEVSGSMPDSLAEEDDIRTEMPHCHHAHGRELLNGAREDVGGSDVTGLGDEPCPADDGPNSTQLPFQEQDSSPGAHDGEDIQPIGPQSTFCEVPLLNSLTVPSSLSWAPSAEQWLPGTRADEGSPVEPSQEQDILTSMEASGHLSTNLWHAVTDDDTGQKEIPISERVLGSVGGQLTPVSALAASTHKPWLEQPPRDQTLTSSDEEDIYAHGLPSSSSETSVTELGPSCSQQDLSRLGAEDAGLLKPDQFAESWMGYSGPGYGILSLVVSEKYIWCLDYKGGLFCSALPGAGLRWQKFEDAVQQVAVSPSGALLWKIEQKSNRAFACGKVTIKGKRHWYEALPQAVFVALSDDTAWIIRTSGDLYLQTGLSVDRPCARAVKVDCPYPLSQITARNNVVWALTEQRALLYREGVSSFCPEGEQWKCDIVSERQALEPVCITLGDQQTLWALDIHGNLWFRTGIISKKPQGDDDHWWQVSITDYVVFDQCSLFQTIIHATHSVATAAQAPVEKVADKLRMAFWSQQLQCQPSLLGVNNSGVWISSGKNEFHVAKGSLIGTYWNHVVPRGTASATKWAFVLASAAPTKEGSFLWLCQSSKDLCSVSAQSAQSRPSTVQLPPEAEMRAYAACQDALWALDSLGQVFIRTLSKSCPTGMHWTRLDLSQLGAVKLTSLACGNQHIWACDSRGGVYFRVGTQPLNPSLMLPAWIMIEPPVQVSRS

SEQ ID NO: 68153 - DNA, 3804 bp, Artificial Sequence
  derived and/or modified sequence
atggccagcatcagcgagcccgtgaccttcagagagttctgccccctgtactacctgctgaacgccatccccaccaagatccagaagggcttcagaagcatcgtggtgtacctgaccgccctggacaccaacggcgactacatcgccgtgggcagcagcatcggcatgctgtacctgtactgcagacacctgaaccagatgagaaagtacaacttcgagggcaagaccgagagcatcaccgtggtgaagctgctgagctgcttcgacgacctggtggccgccggcaccgccagcggcagagtggccgtgttccagctggtgagcagcctgcccggcagaaacaagcagctgagaagattcgacgtgaccggcatccacaagaacagcatcaccgccctggcctggagccccaacggcatgaagctgttcagcggcgacgacaagggcaagatcgtgtacagcagcctggacctggaccagggcctgtgcaacagccagctggtgctggaggagcccagcagcatcgtgcagctggactacagccagaaggtgctgctggtgagcaccctgcagagaagcctgctgttctacaccgaggagaagagcgtgagacagatcggcacccagcccagaaagagcaccggcaagttcggcgcctgcttcatccccggcctgtgcaagcagagcgacctgaccctgtacgccagcagacccggcctgagactgtggaaggccgacgtgcacggcaccgtgcaggccaccttcatcctgaaggacgccttcgccggcggcgtgaagcccttcgagctgcaccccagactggagagccccaacagcggcagctgcagcctgcccgagagacacctgggcctggtgagctgcttcttccaggagggctgggtgctgagctggaacgagtacagcatctacctgctggacaccgtgaaccaggccaccgtggccggcctggagggcagcggcgacatcgtgagcgtgagctgcaccgagaacgagatcttcttcctgaagggcgacagaaacatcatcagaatcagcagcagacccgagggcctgaccagcaccgtgagagacggcctggagatgagcggctgcagcgagagagtgcacgtgcagcaggccgagaagctgcccggcgccaccgtgagcgagaccagactgagaggcagcagcatggccagcagcgtggccagcgagcccagaagcagaagcagcagcctgaacagcaccgacagcggcagcggcctgctgccccccggcctgcaggccacccccgagctgggcaagggcagccagcccctgagccagagattcaacgccatcagcagcgaggacttcgaccaggagctggtggtgaagcccatcaaggtgaagagaaagaagaagaagaagaagaccgagggcggcagcagaagcacctgccacagcagcctggagagcaccccctgcagcgagttccccggcgacagcccccagagcctgaacaccgacctgctgagcatgaccagcagcgtgctgggcagcagcgtggaccagctgagcgccgagagccccgaccaggagagcagcttcaacggcgaggtgaacggcgtgccccaggagaacaccgaccccgagaccttcaacgtgctggaggtgagcggcagcatgcccgacagcctggccgaggaggacgacatcagaaccgagatgccccactgccaccacgcccacggcagagagctgctgaacggcgccagagaggacgtgggcggcagcgacgtgaccggcctgggcgacgagccctgccccgccgacgacggccccaacagcacccagctgcccttccaggagcaggacagcagccccggcgcccacgacggcgaggacatccagcccatcggcccccagagcaccttctgcgaggtgcccctgctgaacagcctgaccgtgcccagcagcctgagctgggcccccagcgccgagcagtggctgcccggcaccagagccgacgagggcagccccgtggagcccagccaggagcaggacatcctgaccagcatggaggccagcggccacctgagcaccaacctgtggcacgccgtgaccgacgacgacaccggccagaaggagatccccatcagcgagagagtgctgggcagcgtgggcggccagctgacccccgtgagcgccctggccgccagcacccacaagccctggctggagcagccccccagagaccagaccctgaccagcagcgacgaggaggacatctacgcccacggcctgcccagcagcagcagcgagaccagcgtgaccgagctgggccccagctgcagccagcaggacctgagcagactgggcgccgaggacgccggcctgctgaagcccgaccagttcgccgagagctggatgggctacagcggccccggctacggcatcctgagcctggtggtgagcgagaagtacatctggtgcctggactacaagggcggcctgttctgcagcgccctgcccggcgccggcctgagatggcagaagttcgaggacgccgtgcagcaggtggccgtgagccccagcggcgccctgctgtggaagatcgagcagaagagcaacagagccttcgcctgcggcaaggtgaccatcaagggcaagagacactggtacgaggccctgccccaggccgtgttcgtggccctgagcgacgacaccgcctggatcatcagaaccagcggcgacctgtacctgcagaccggcctgagcgtggacagaccctgcgccagagccgtgaaggtggactgcccctaccccctgagccagatcaccgccagaaacaacgtggtgtgggccctgaccgagcagagagccctgctgtacagagagggcgtgagcagcttctgccccgagggcgagcagtggaagtgcgacatcgtgagcgagagacaggccctggagcccgtgtgcatcaccctgggcgaccagcagaccctgtgggccctggacatccacggcaacctgtggttcagaaccggcatcatcagcaagaagccccagggcgacgacgaccactggtggcaggtgagcatcaccgactacgtggtgttcgaccagtgcagcctgttccagaccatcatccacgccacccacagcgtggccaccgccgcccaggcccccgtggagaaggtggccgacaagctgagaatggccttctggagccagcagctgcagtgccagcccagcctgctgggcgtgaacaacagcggcgtgtggatcagcagcggcaagaacgagttccacgtggccaagggcagcctgatcggcacctactggaaccacgtggtgcccagaggcaccgccagcgccaccaagtgggccttcgtgctggccagcgccgcccccaccaaggagggcagcttcctgtggctgtgccagagcagcaaggacctgtgcagcgtgagcgcccagagcgcccagagcagacccagcaccgtgcagctgccccccgaggccgagatgagagcctacgccgcctgccaggacgccctgtgggccctggacagcctgggccaggtgttcatcagaaccctgagcaagagctgccccaccggcatgcactggaccagactggacctgagccagctgggcgccgtgaagctgaccagcctggcctgcggcaaccagcacatctgggcctgcgacagcagaggcggcgtgtacttcagagtgggcacccagcccctgaaccccagcctgatgctgcccgcctggatcatgatcgagccccccgtgcaggtgagcagaagctag

SEQ ID NO: 68154 - DNA, 3804 bp, Artificial Sequence
  derived and/or modified sequence
atggctagcattagtgagcccgtgacgttcagggagttttgccccctctattacttgcttaatgcaatccccacaaagatccagaagggattccggtccattgtcgtgtatctgaccgcccttgacaccaacggcgattacatcgctgtcggctcctccatcggcatgttgtatttgtattgtcggcaccttaatcagatgcggaagtacaacttcgagggcaaaacggagagcatcacagtagtgaagctgctgagttgtttcgatgacctcgtggcagctggtaccgctagcggacgcgtggcagtattccagctggtctccagtctccctggcaggaataaacagctgcggaggtttgacgtcaccggcattcacaaaaactcgataactgcactggcatggtcccctaatggcatgaagctcttctccggcgatgacaaaggcaaaattgtctactcatcactggacctggatcaggggctgtgtaacagccagcttgttcttgaagagccctccagtattgtccaattggattactcacaaaaggtgctattggtatctactctgcagcggtcactgcttttttataccgaggagaagtcagtgcgtcagattggaacccagcccagaaagagcaccgggaaatttggagcatgtttcatccctggtctttgcaagcagtccgacctgactctctacgcgtcgcgtcccggcctgcggctctggaaagcagacgtccacggtactgtgcaggccacatttatactgaaggacgcctttgctggcggggtgaagccattcgaactccaccctcggttggagtctcccaattccggaagctgtagtctgccagagaggcatctgggactggtgtcctgcttcttccaggagggctgggttctgtcctggaatgaatactcaatctacctgctggatacagttaatcaggcaactgtggctggtctcgaaggctctggcgatattgtgtccgtgtcttgcacagaaaacgagatcttctttctgaagggagatcgcaacatcattagaattagctcacggcccgagggcctcaccagcaccgtacgtgatggtttagagatgagcgggtgctcagagcgggtccacgtccagcaggccgagaagttaccgggggccaccgtgagcgagacacgcctgcgcggcagttccatggccagctccgtggcatccgagcctaggtctcggtcttcctcactgaactctacagattccggctcgggcttactgccgcccgggttgcaggcaacccctgaactcggcaagggatctcagccgctgagtcagagattcaacgcaatcagtagtgaggatttcgatcaagaactggtggtgaagcctataaaggtcaagagaaagaagaagaaaaagaagaccgaagggggatctcggagtacttgtcactcgagcctggagtccaccccttgttctgagtttccaggggacagccctcagagcctcaatactgatctactgtccatgacttctagtgtgttgggatcatccgtcgatcagttgtccgctgaatcccccgatcaggaaagtagcttcaatggtgaggtcaatggagtgccacaggaaaatactgaccccgaaacctttaacgtgctggaggtgagcggctcgatgccggactccttagcggaagaagacgacatccgtacagagatgcctcactgccaccatgctcacggccgcgaactcctcaacggcgcgcgagaggacgtgggcggaagcgacgtcactggcttgggagatgagccctgcccggcagatgatggacccaactcaactcagcttccattccaggaacaggattcatctcctggagcgcatgacggagaagatatacagccgatcgggccccagtccaccttctgcgaggtccctctactgaatagcctcacagtaccctcttctttatcatgggctccttccgccgagcagtggctgccaggcactcgggccgatgagggaagcccagtggagccctcccaagagcaggacattctgactagcatggaagctagcggacacttgtctacaaatctgtggcatgcagtgacagatgacgatacaggtcaaaaggaaatccccatttctgagagagtgctcggaagtgtgggtgggcaactgacgcctgtatctgctctagccgcctctacccataaaccatggctggaacagccaccaagggatcagactttgacgtcatcagacgaggaagacatctacgctcacggactcccatccagtagcagcgagacttctgtgaccgaactgggaccatcctgtagtcagcaggatctgagccgactcggagctgaggacgctggactgctgaaaccagatcagttcgccgagagttggatggggtacagtgggcccggctatggaattctttctctggttgtgtcagaaaaatacatttggtgtctcgactacaaagggggtctgttttgctccgctttgccaggagccggcctcaggtggcaaaagtttgaagatgccgtccagcaggtggctgtctctccttccggcgccctactgtggaagatcgaacagaagtcaaatagggccttcgcttgtggaaaagtaacaatcaaagggaaacgtcattggtacgaagcccttccgcaggccgtttttgtggccctgtcggacgatacggcctggattatccgtacaagcggggacctctaccttcagactgggctgagtgttgacagaccctgtgcccgcgctgtgaaggtggactgcccatatccactgagtcaaatcaccgctcgtaacaatgtagtgtgggcgctgacggaacaaagagctctcctatatagagagggcgtttctagtttctgccctgagggggagcaatggaagtgtgatatcgtgagtgagcggcaagccctcgagcctgtgtgcattactctcggagaccagcagactctctgggcacttgatatccatggaaatctttggttccgcactgggataatatcgaagaagccgcaaggcgatgatgaccattggtggcaggtctcaatcacggattacgtagtcttcgatcaatgcagcttgttccaaaccattatccatgcgacacatagcgtggctactgctgcccaagctccagttgagaaagtagccgacaagctgcggatggcattttggagccagcagctgcaatgccagcccagcttgctaggtgtcaacaactccggggtttggattagctccggcaagaatgaattccacgtggcgaagggcagcttgatcggaacctattggaaccacgttgtgcctcgaggaacagcatcggctaccaaatgggctttcgtgctcgcttccgcagcgccaactaaagaggggagttttctttggctgtgccagtccagcaaggacctgtgcagtgtgtctgcccagtccgcccagagtagaccttccaccgtccagctgcctccggaagctgagatgagggcgtacgccgcatgccaggatgccctgtgggccttggattccttaggtcaggtgttcatcagaacactgagcaagtcttgtcctacgggaatgcactggactaggttagacttatcacagctcggtgcagtcaagcttacatccctcgcatgtggaaatcaacacatttgggcttgcgacagccgcggcggcgtgtatttccgtgtggggacccaaccattgaatccatccctcatgctgcccgcctggattatgattgagccccctgttcaagtgtctcgatcctag

SEQ ID NO: 68155 - DNA, 3804 bp, Artificial Sequence
  derived and/or modified sequence
atggccagcatcagcgagcctgtgaccttccgggagttctgccccctgtactacctgctgaatgccatccccaccaagatccagaagggcttccgcagcatcgtggtgtacctgacagccctggacaccaacggggactacatcgctgtgggcagcagcatcggcatgctgtacctgtactgccgccacctgaaccagatgaggaagtacaactttgagggcaagacagagagcatcaccgtggtgaagctgctgagctgctttgatgacctggtggccgccggcacagccagcggccgggtggccgtgttccagctggtgagcagcctgcctggaagaaacaagcagctgcggagatttgatgtgacaggcatccacaagaacagcatcacagccctggcctggagccccaacggcatgaagctgttctctggagatgacaagggcaagatcgtgtacagcagcctggacctggaccagggcctgtgcaacagccagctggtgctggaggagcccagcagcatcgtgcagctggactacagccagaaggtgctgctggtgtccaccctgcagaggagcctgctcttctacacagaggagaagtctgtgcggcagatcggcacccagcccaggaagagcacaggcaagtttggagcctgcttcatccctggcctgtgcaagcagagcgacctgaccctgtatgccagccggcccggcctgcggctgtggaaggcagatgtgcacggcaccgtgcaggccaccttcatcctgaaggatgcctttgctgggggcgtgaagccctttgagctgcacccccggctggagagccccaacagcggcagctgcagcctgcctgagcggcacctgggcctggtgtcctgcttcttccaggagggctgggtgctgtcctggaatgagtacagcatctacctgctggacacagtgaaccaggccaccgtggccggcctggagggcagcggggacatcgtgtctgtgtcctgcacagaaaatgagatcttcttcctgaagggggacaggaacatcatccgcatcagcagcaggcctgagggcctgaccagcacagtgagagatggcctggagatgagcggctgcagcgagcgggtgcacgtgcagcaggccgagaagctgcccggggccaccgtgtctgagacccggctgcggggcagctccatggccagctctgtggccagcgagcccaggagccgcagcagcagcctgaacagcacagacagcggcagcggcctgctgcccccaggcctgcaggccaccccagagctgggcaagggcagccagcccctgagccagcgcttcaatgccatcagcagcgaggactttgaccaggagctggtggtgaagcccatcaaggtgaagaggaagaagaagaagaagaagacagagggcggcagccgcagcacctgccacagcagcctggagagcaccccctgcagcgagttccctggggacagcccccagagcctgaacacagacctgctgtccatgaccagctctgtgctgggcagctctgtggaccagctgtctgctgagagcccagaccaggagagcagcttcaatggagaggtgaatggagtgccccaggagaacacagatcctgagaccttcaacgtgctggaggtgtctggctccatgccagacagcctggccgaggaggatgacatcagaacagagatgccccactgccaccacgcccacggccgggagctgctgaatggagccagagaagatgtgggcggcagtgatgtgacaggcctgggagatgagccctgcccagcagatgatggccccaacagcacccagctgcccttccaggagcaggacagcagccctggggcccatgatggagaggacatccagcccatcggcccccagagcaccttctgtgaggtgcccctgctgaacagcctgactgtgcccagcagcctgtcctgggcccccagcgctgagcagtggctgcccggcaccagggcagatgagggcagccctgtggagcccagccaggagcaggacatcctgacctccatggaggccagcggccacctgagcaccaacctgtggcatgctgtgacagatgatgacaccggccagaaggagatccccatcagcgagcgggtgctgggctctgtgggcggccagctgacccctgtgtctgccctggccgccagcacccacaagccctggctggagcagcccccccgggaccagaccctgaccagcagtgatgaggaggacatctatgcccacggcctgcccagcagcagcagcgagacctctgtgacagagctgggccccagctgcagccagcaggacctgagccggctgggcgcagaagatgctggcctgctgaagccagaccagtttgctgagagctggatgggctacagcggccctggctacggcatcctgagcctggtggtgtctgagaagtacatctggtgcctggactacaagggcggcctcttctgcagcgccctgcccggggccggcctgcgctggcagaagtttgaagatgctgtgcagcaggtggccgtgagccccagcggggccctgctgtggaagattgagcagaagagcaacagagcctttgcctgtgggaaggtgaccatcaagggcaagaggcactggtatgaggccctgccccaggccgtgtttgtggccctgagtgatgacacagcctggatcatccgcaccagcggggacctgtacctgcagacaggcctgtctgtggaccggccctgtgcccgggctgtgaaggtggactgcccctaccccctgagccagatcacagccagaaataatgtggtgtgggccctgacagagcagagggccctgctgtaccgggagggcgtgagcagcttctgcccagagggggagcagtggaagtgtgacatcgtgtctgagcggcaggccctggagcctgtgtgcatcaccctgggggaccagcagaccctgtgggccctggacatccacggcaacctgtggttcagaacaggcatcatcagcaagaagccccagggagatgatgaccactggtggcaggtgtccatcacagattatgtggtgtttgaccagtgcagcctcttccagaccatcatccacgccacccacagcgtggccacagctgcccaggcccctgtggagaaggtggccgacaagctgaggatggccttctggagccagcagctgcagtgccagcccagcctgctgggcgtgaacaacagcggcgtgtggatcagcagcggcaagaatgagttccacgtggccaagggcagcctgattggcacctactggaaccacgtggtgccccggggcacagccagcgccaccaagtgggcctttgtgctggccagcgctgcccccaccaaggagggcagcttcctgtggctgtgccagagcagcaaggacctgtgcagcgtgtctgcccagagcgcccagagccggcccagcacagtgcagctgcccccagaggccgagatgagggcctatgctgcctgccaggatgccctgtgggccctggacagcctgggccaggtgttcatccgcaccctgagcaagagctgccccaccggcatgcactggacccggctggacctgagccagctgggcgctgtgaagctgaccagcctggcctgtggcaaccagcacatctgggcctgtgacagcagaggaggagtgtacttccgggtgggcacccagcccctgaaccccagcctgatgctgcctgcctggatcatgattgagccccctgtgcaggtgagccgctcctag

SEQ ID NO: 68156 - DNA, 3804 bp, Artificial Sequence
  derived and/or modified sequence
atggccagcatcagcgagcccgtgaccttccgggagttctgccccctttactatctattgaatgccattcccaccaaaatccagaagggtttcagatcaatcgtcgtgtatctgacggcccttgacaccaacggggactacatagcggtaggatcctctatagggatgctgtatctgtactgccgccatctgaatcaaatgcggaaatataacttcgaggggaagaccgagtctatcaccgttgtcaagctacttagttgctttgatgatctggtagctgctggaacagcaagcggccgagtggccgtgtttcaactggtgtcgtccttacctgggagaaacaagcagctgcggcgatttgatgtcactggcattcataagaacagtatcacagctttggcatggagtcccaatggcatgaagctgtttagcggagacgacaaaggaaagattgtttactcctccctcgatctcgatcagggtctgtgtaattctcaactcgtgctggaggaaccatcaagcattgtgcaattagattactcacaaaaggtactcctcgtctctacactgcagaggagtctcctgttctacactgaggagaagtcagttcgacagataggaacacagcctcgaaagagtaccggcaagttcggagcctgcttcatcccgggcctgtgtaagcagagtgatctcaccctgtatgcatccaggcctggattgagactgtggaaggcagacgttcacggtacagttcaggccaccttcatcctgaaggacgcctttgccggaggagtgaagccgtttgaacttcatcctcgcctggagtcgcctaatagcggctcctgctctttacccgagagacatctgggcctggtttcatgtttttttcaagaaggatgggtgctgtcttggaacgagtatagtatctacctcctggacaccgtcaaccaggccacagttgcaggtttggaagggtccggcgatatcgttagtgtatcttgtacagaaaacgagattttctttctgaaaggggatagaaatataatccggatttccagtcgacccgagggtctgaccagcaccgtaagggatggcttggagatgtcgggatgctcagagagggtacatgtacagcaggccgagaagctcccgggtgcgactgtgtcggagacccgcctcagaggtagcagcatggcctcaagtgtggcttctgagcctcggagccgatcctctagtttgaattcaactgactctggttccgggttgctacccccagggctccaggccacccctgagctgggcaaggggtcgcagcctctgagccagcggtttaacgctatcagctccgaggactttgatcaggaacttgtggtgaaaccaatcaaggtgaagcggaagaaaaaaaaaaagaaaaccgagggtggatcacgcagcacctgccactcaagcctggagtcaactccttgcagtgagtttcccggggatagccctcagtcactgaacacagatttgcttagcatgacttcctcagtgctgggctcctctgtggaccagctttcagctgagagtcctgaccaggaaagcagcttcaacggggaggtgaatggcgttcctcaggagaataccgaccccgaaacttttaacgtactcgaagtaagtgggtctatgcccgactcattggccgaagaggacgacatcagaaccgagatgccacactgtcatcatgctcacgggcgtgagttactgaatggagcacgggaagacgtgggcgggagtgacgttactggactcggagacgaaccgtgccccgccgacgatgggcccaactcaacacaactcccgttccaggagcaggactctagccctggcgctcatgatggcgaagatatccagccgattgggccccagagcaccttttgtgaggtccctctgctcaacagcctgaccgtgcctagcagtctgagctgggcccctagcgccgaacagtggttacctggcacacgcgccgacgagggctcccccgttgagcctagtcaggagcaggatatcttaacttctatggaagcatcaggccatctgtcaacaaacctgtggcatgccgttacagatgacgatacagggcaaaaagaaatacccatctcggaacgtgttctggggagcgtggggggccagctcacccctgtatcagcactcgctgcttcgacccataagccttggctggaacaaccccctagagaccagaccttgacatcctctgacgaggaggacatctacgcacacgggctcccgtctagtagtagcgagacttctgttactgaactgggtccctcttgcagccaacaggacctgtcccgacttggagctgaggatgccggactgttaaagccagaccaatttgccgaatcgtggatgggttatagcggccctggctacgggattctcagcctcgttgtctctgaaaaatatatctggtgtctagactacaagggcggcctgttctgtagtgccctgccaggtgctggccttcgatggcagaagttcgaggacgcggtgcaacaggtggccgtgtcccctagcggggcacttctgtggaagattgaacagaagtccaatagagcattcgcctgtggcaaggtgactatcaagggtaaaagacactggtacgaagctctcccccaggccgtgttcgtggcactatccgacgacaccgcctggatcattcggacatctggcgatctgtacctccaaactggccttagtgtggatcggccttgcgcccgcgcagtaaaggtcgactgtccctaccccctgtcacagatcacagcccggaacaatgtagtctgggccttaacagagcagagggcgctgctttacagagagggtgtgtcaagtttctgccctgaaggcgaacagtggaagtgcgacatcgtcagtgagcgccaggccctcgagccagtctgcattacactgggcgaccagcagactctatgggccctggatattcacggtaacctgtggttccggacaggaatcatttctaagaaaccgcagggcgatgacgaccattggtggcaggtcagcatcaccgactatgtggtatttgaccagtgctcactttttcagaccatcatacacgctactcattcagtcgctacagccgctcaggcccccgtggaaaaggtggcggataagttgcgcatggctttttggtcacagcagctccaatgtcagccttcactgttgggtgtgaacaattccggagtatggatcagttcaggaaaaaacgaattccacgtggctaagggctcccttatcggaacatactggaatcacgtcgtgccccgcggcaccgctagcgcaacaaaatgggccttcgtcctggcatccgcggcccccaccaaagaagggtcatttctctggctgtgtcaatctagcaaagacctgtgcagcgtaagtgcacagagcgcccaatcccggccgtcaacggtgcagcttccacctgaggccgaaatgagggcctatgccgcatgtcaggatgccctgtgggcattagactcacttggccaggtgttcattaggacactgtccaagtcctgcccaaccggcatgcactggacacgcttagatctatcccagctgggagcagtgaagctgacttctttggcgtgtggtaatcagcacatttgggcctgcgatagtcgtgggggtgtgtatttccgcgttgggacgcagcctttaaatcctagcctgatgttgccagcctggatcatgatcgagccacccgtgcaggtctcaaggtcatag

SEQ ID NO: 68157 - DNA, 3804 bp, Artificial Sequence
  derived and/or modified sequence
atggcaagcatcagtgagccagttaccttccgcgagttctgccccctgtactatcttctcaatgccattccaactaagatccaaaagggatttcgctcaattgtcgtgtatctcaccgcactggatacaaacggagactacattgcagtggggagctccattgggatgctgtacctgtattgtaggcacctcaaccagatgcggaagtataacttcgagggaaaaaccgagtctatcactgtcgtgaagctcttgagttgcttcgatgatcttgttgctgccggaacagcaagcggccgtgtggcagtgtttcaactggtgtcaagcttaccaggacgaaacaagcagctcagaagattcgacgtgaccgggatccacaaaaattcaattactgcattggcctggagtcccaatggcatgaaactgttctccggcgacgataaagggaagatcgtgtattccagcttggatctggatcaaggtctatgtaactctcagcttgtgcttgaggagcctagcagcatcgtgcagctggattactcacagaaagtattgctggtcagcacactgcaacgcagtcttctgttttacacagaagagaagagcgtgagacaaatcgggacacagcctcggaagagtactggaaaattcggcgcttgctttatccccggactttgtaagcagagtgatctcacactgtacgcctcccgtccagggttaagactgtggaaagctgatgtgcacgggacagtccaagctacattcattctcaaggatgcatttgccggaggcgtcaagcccttcgagctccatcccaggcttgagtccccaaactccggcagctgctccctgcctgaacgacacctggggcttgtttcttgcttcttccaggagggatgggtcttaagctggaacgagtactccatttacttgttggatactgtgaaccaggctaccgttgcaggcctcgaaggctctggcgatatcgttagtgtctcatgcaccgagaatgaaatttttttcttgaaaggtgaccgtaatattatcagaatcagctctaggcccgaggggctgacctcaacagtcagagacggattagaaatgtctggctgttcggagagagtccatgtacagcaggctgaaaaactgccaggcgctaccgtgagcgagacgcgcctgcgtggtagcagcatggcttcaagtgtggcatccgagccacgcagcaggagctcgtcccttaactctacagattccggtagcgggctgctgccacctggactgcaggctacaccggaacttggaaaaggatcccaacctctctcccagcgcttcaatgccatctctagcgaagatttcgatcaggagctcgttgtcaagcctataaaagtcaagagaaaaaagaaaaaaaagaaaacagagggcggatctcgaagcacctgtcattcatctctcgaaagcactccttgtagcgagtttcccggagacagtcctcagtccctcaatacagatctgcttagcatgacatcaagcgtgctaggcagttccgttgaccaattgagcgctgaatcccctgaccaagaatcctcatttaacggtgaggtgaacggcgtgccacaagagaacacggatcccgaaacattcaacgtcctggaggtgagcggctcaatgcctgactcactagcggaagaagacgacatcagaaccgaaatgccgcattgccatcacgcccacgggagagaactgctgaacggggcacgggaggacgttggtggatcagacgtgacaggtttgggggacgagccttgtcctgccgatgatgggcctaactctacgcagctgccttttcaggaacaagattcttcccctggcgctcacgacggagaagatatccagcccatcgggccacagtctaccttttgcgaagtgccattactaaactcactgactgtaccaagttcactgtcctgggccccttcagccgagcagtggctccccggaacgcgcgctgatgaaggctctcccgttgaaccttcgcaggaacaagatattctcactagcatggaggcgagcgggcacctttctactaatctctggcatgcggtgactgatgacgatacaggccagaaggaaattcccatctctgaacgagtgctgggaagtgtcggtgggcagctaacccctgttagcgccctcgccgcttccactcataagccttggctcgaacagcccccacgcgaccaaactctgacatcttcagacgaggaagatatttatgcacatgggctcccatcttccagtagcgagactagcgtaacagaactgggcccatcctgttcacagcaggacctcagccggctcggtgcggaggacgctggcctgctgaagcctgatcaattcgccgagagttggatgggctactcaggacccggttatggaattttgtctctagtagtcagcgagaaatacatctggtgtctggactataagggcggtctgttctgcagcgctttgccaggcgcaggactgcgctggcagaagttcgaggatgccgtgcagcaggtggctgtttccccctccggggctctgctgtggaaaattgaacaaaagtctaatagagccttcgcatgtgggaaggtaacaattaagggcaaaaggcactggtacgaagcgctgccccaggccgtttttgtggctttgtccgatgacacggcgtggatcatccggacctccggggatctgtatctacagactgggcttagcgtagataggccttgcgcccgtgctgttaaggttgattgcccctaccccctgagtcagatcacagcaagaaacaacgtggtctgggcacttactgaacagcgcgcactcctgtatcgggaaggtgttagtagtttctgccctgagggtgagcaatggaagtgcgacattgtgtctgagcgccaggctctggaacccgtgtgtattacattgggagaccagcagactctgtgggccctcgacatacatgggaatctctggtttcgcaccggcattatctctaagaagccacagggggatgacgaccattggtggcaagtatccattacagattacgtggtgtttgaccagtgcagcctgttccagacaattatccacgctacacactctgtggctactgcagcccaggctcccgtcgaaaaagtggcggataaactgcgaatggcgttttggtctcaacagttgcagtgccaaccctcactgctgggcgttaataacagcggcgtttggatcagtagcggcaagaacgagtttcacgtggcaaagggaagcttgattgggacttactggaaccatgtggtaccacggggaactgcaagcgcgactaaatgggcattcgtgctggcctccgcagccccaacaaaggaagggtcatttttatggctttgccaatcctccaaagatttgtgtagcgttagcgcccagtctgcccagtcaagaccatcaaccgtgcagctgcctccagaggctgagatgagagcatacgccgcatgccaagacgcgctctgggctttggactcgctcggccaggtgtttatacggacccttagcaaatcttgcccgactggaatgcattggacccgcttggacctatcccagcttggcgctgtgaagcttacaagcctggcctgtgggaatcaacatatctgggcatgcgatagtagggggggtgtttactttcgggttggcacacagcctttgaatcccagccttatgctccccgcttggataatgatagaacctcccgtgcaagtctcaaggtcttag

SEQ ID NO: 68158 - DNA, 4281 bp, Artificial Sequence
  derived and/or modified sequence
cggcggggccgacgagtccggaggggctgccgcgggagcccccaggtttccctagatgacaaataaacattccttttcctgcgtgaagatagtctgtggaaaccttggccatggcatcgatatcagagcctgttacattcagagagttctgcccgttgtactatctcctcaatgccattccgacaaagatccagaagggtttccgctctatcgtggtctatctcacggccctcgacaccaacggggactacatcgcggtgggcagcagcatcggcatgctctatctgtactgccggcacctcaaccagatgaggaagtacaactttgaggggaagacggaatctatcactgtggtgaagctgctgagctgctttgatgacctggtggcagcaggcacagcctctggcagggttgcagtttttcaacttgtatcttcattgccagggagaaataaacagcttcggagatttgatgtcactggtattcacaaaaatagcattacagctctggcttggagccccaatggaatgaaattgttctctggagatgacaaaggcaaaattgtttattcttctctggatctagaccaggggctctgtaactcccagctggtgttggaggagccatcttccattgtgcagctggattatagccagaaagtgctgctggtctctactctgcaaagaagtctgctcttttacactgaagaaaagtctgtaaggcaaattggaacacaaccaaggaaaagtactgggaaatttggtgcttgttttataccaggactctgtaagcaaagtgatctaaccttgtatgcgtcacggcccgggctccggctatggaaggctgatgtccacgggactgttcaagccacgtttatcttaaaagatgcttttgccgggggagtcaagccttttgaactgcacccgcgtctggaatcccccaacagtggaagttgcagcttacctgagaggcacctggggcttgtttcatgtttctttcaagaaggctgggtgctgagttggaatgaatatagtatctatctcctagacacagtcaaccaggccacagttgctggtttggaaggatccggtgatattgtgtctgtttcgtgcacagaaaatgaaatatttttcttgaaaggagataggaacattataagaatttcaagcaggcctgaaggattaacatcaacagtgagagatggtctggagatgtctggatgctcagagcgtgtccacgtgcagcaagcggagaagctgccaggggccacagtttctgagacgaggctcagaggctcttccatggccagctccgtggccagcgagccaaggagcaggagcagctcgctcaactccaccgacagcggctccgggctcctgccccctgggctccaggccacccctgagctgggcaagggcagccagcccctgtcacagagattcaacgccatcagctcagaggactttgaccaggagcttgtcgtgaagcctatcaaagtgaaaaggaagaagaagaagaagaagacagaaggtggaagcaggagcacctgtcacagctccctggaatcgacaccctgctccgaatttcctggggacagtccccagtccttgaacacagacttgctgtcgatgacctcaagtgtcctgggcagtagcgtggatcagttaagtgcagagtctccagaccaggaaagcagcttcaatggtgaagtgaacggtgtcccacaggaaaatactgaccccgaaacgtttaatgtcctggaggtgtcaggatcaatgcctgattctctggctgaggaagatgacattagaactgaaatgccacactgtcaccatgcacatgggcgggagctgctcaatggagcgagggaagatgtgggaggcagtgatgtcacgggactcggagatgagccgtgtcctgcagatgatggaccaaatagcacacagttacccttccaagaacaggacagctctcctggggcgcatgatggggaagacatccaacccattggcccccaaagcactttttgtgaagtccccctcctgaactcactcactgtgccttccagcctcagctgggccccaagtgctgaacagtggctgcctgggaccagagctgatgaaggcagccccgtggagcccagccaagagcaggacatcctaaccagcatggaggcctctggccacctcagcacaaatctctggcatgctgtcactgatgatgacacaggtcagaaagaaatacccatttctgaacgtgtcttggggagtgtgggaggacagctgactccggtctctgccttggcagccagcactcacaagccctggcttgagcagcctccacgggatcagacattgacgtccagcgatgaggaggacatctatgcccacgggcttccttcttcatcctcagagacgagtgtgacagagctcggacctagttgctcccagcaggacctgagccggctgggtgcagaggacgccgggctgctcaagccagatcagtttgcagaaagctggatgggctactcgggtcccggctatggcatcctcagcttggtggtctccgagaagtatatctggtgcctggactacaaaggcggcctgttctgcagcgcgttgccgggcgccgggctgcgctggcagaagtttgaagatgctgtccagcaggtggcagtctcgccctcaggagcccttctctggaagattgaacagaaatctaaccgggcttttgcttgtgggaaagtcaccatcaaggggaagcggcactggtacgaagccctgccccaggcagtgtttgtggccctgagcgatgacacggcctggatcatcaggaccagtggggacctatacttgcagacaggtctgagcgtggatcgcccttgtgccagagccgtaaaggtggactgtccctacccgctgtcccagatcacagcccggaacaatgtggtgtgggcgctgacagagcagagggccctcctgtaccgggagggcgtgagcagcttctgtccggaaggcgagcagtggaagtgtgacattgtcagcgaaaggcaagctttagaacccgtctgcataacgctcggggatcagcagactctctgggccctggacatccatgggaacctgtggttcagaactggcattatttccaagaagccccaaggagatgacgaccattggtggcaagtgagcatcacggactatgtggtgtttgaccagtgcagcttatttcagacgataatccatgccactcactcggtggccacagcagcccaagcccccgtagaaaaggtggcagataagctgcgcatggcgttttggtcccagcagcttcagtgccagccaagccttctcggggtcaataacagcggtgtctggatctcctcgggcaagaatgaattccacgtcgctaagggaagtctcataggcacctactggaatcatgtggttccccgtgggacagcttctgctacaaaatgggcctttgtgttggcttctgcagctcccacgaaggaaggaagcttcctgtggctgtgccagagcagcaaggacctgtgcagcgtcagcgcccagagcgcacagtcgcggccctccacggtgcagctgcctcccgaagccgagatgcgcgcctatgccgcctgccaggatgcgctgtgggcgctggacagcctcggccaggtgttcatcaggacgctctccaagagctgccccacgggcatgcactggaccaggctggacctctcccagctaggagctgtaaaattgacaagcttggcatgtggaaatcagcacatctgggcctgtgattccaggggtggagtttacttccgtgtagggactcagcctctcaatcccagtctcatgcttccagcctggataatgattgagccacctgtccaggtaagcagaagttagctggtggaactcactcttcagtaagacagaaactgtgaggatgctggtactgggaaaaaggatctgcacagcctctagaggcctcccagcaaatgcggggagccatgcccccagggtctacacactctcgttcatcaacatcacaactggaattcgggatttgtgaagtttagagctgaacagactgttacagattatgagtcaacacgtatattttctctttcaaaataataatatttcgtttttgactttttactaagtgaatattattttttaaatctgcctatatattggaacctctattttataataataatgataataaatcagtacccagaagtataaagaaggtaaaagttactttgaa

SEQ ID NO: 68159 - protein, 181 aa, Artificial Sequence
  derived and/or modified sequence
MTFDDLKIQTVKDQPDEKSNGKKAKGLQFLYSPWWCLAAATLGVLCLGLVVTIMVLGMQLSQVSDLLTQEQANLTHQKKKLEGQISARQQAEEASQESENELKEMIETLARKLNEKSKEQMELHHQNLNLQETLKRVANCSGLHPASNFLFQFSILDGAVSEEPQLPMALGGRFSFDAPLI

SEQ ID NO: 68160 - DNA, 546 bp, Artificial Sequence
  derived and/or modified sequence
atgaccttcgacgaccttaagatacaaacagtgaaggatcagcctgatgagaagagtaacgggaagaaggcaaaggggctgcagtttctgtacagcccttggtggtgcctggctgccgcaaccctgggtgtcctgtgcctgggcctggttgtgactattatggtgctgggtatgcagttgtcccaggtctccgatcttctcacacaggagcaggctaatctcactcaccaaaagaagaagcttgaagggcagatctcagcacggcagcaagcagaggaggccagccaggagtccgaaaacgagctgaaggagatgatcgagaccctcgcaaggaaattgaacgaaaagagtaaagaacagatggagctgcaccatcagaatctcaacctccaggaaacactaaagcgcgtcgcaaattgcagcggattgcaccctgcctccaattttttatttcagttttccatcttggacggagcggtaagtgaggaaccgcagctccccatggcactgggaggacgatttagcttcgacgctcccttaatttag

SEQ ID NO: 68161 - DNA, 546 bp, Artificial Sequence
  derived and/or modified sequence
atgacctttgatgacctgaagatccagacagtgaaggaccagccagatgagaagagcaatggcaagaaggccaagggcctgcagttcctgtacagcccctggtggtgcctggccgccgccaccctgggcgtgctgtgcctgggcctggtggtgaccatcatggtgctgggcatgcagctgagccaggtgtctgacctgctgacccaggagcaggccaacctgacccaccagaagaagaagctggagggccagatcagcgcccggcagcaggccgaggaggccagccaggagagtgaaaatgagctgaaggagatgattgagaccctggccaggaagctgaatgagaagagcaaggagcagatggagctgcaccaccagaacctgaacctgcaggagaccctgaagagggtggccaactgcagcggcctgcacccagccagcaacttcctgttccagttcagcatcctggatggagctgtgtctgaggagccccagctgcccatggccctgggcggccgcttctcctttgatgcccccctcatctag

SEQ ID NO: 68162 - DNA, 546 bp, Artificial Sequence
  derived and/or modified sequence
atgaccttcgacgacctgaagatccagaccgtgaaggaccagcccgatgagaaatccaacgggaaaaaagccaaggggctccagtttctatactcgccctggtggtgcctggccgctgctaccctgggggtcctgtgcctcggattggtggttacaatcatggtccttggcatgcagcttagccaagtgtctgacctcttgacgcaggagcaggccaacttaacacaccaaaaaaaaaaactggaaggccaaattagcgccagacagcaggccgaagaggcctctcaggagtctgaaaatgagctgaaggagatgatcgagactctggcacgaaagctaaacgaaaagtccaaggagcaaatggaactgcatcaccagaacctgaatcttcaggagacacttaaaagggtggcgaactgcagtggacttcatcccgcctccaacttcctgtttcagttcagcattcttgacggcgcggtaagcgaagagccccaactcccgatggcacttggaggccgcttctcatttgatgcacctctgatctag

SEQ ID NO: 68163 - DNA, 950 bp, Artificial Sequence
  derived and/or modified sequence
agtttgttgaagttcgtgactgcttcactctctcattcttagcttgaatttggaaatgacttttgatgacctaaagatccagactgtgaaggaccagcctgatgagaagtcaaatggaaaaaaagctaaaggtcttcagtttctttactctccatggtggtgcctggctgctgcgactctaggggtcctttgcctgggattagtagtgaccattatggtgctgggcatgcaattatcccaggtgtctgacctcctaacacaagagcaagcaaacctaactcaccagaaaaagaaactggagggacagatctcagcccggcaacaagcagaagaagcttcacaggagtcagaaaacgaactcaaggaaatgatagaaacccttgctcggaagctgaatgagaaatccaaagagcaaatggaacttcaccaccagaatctgaatctccaagaaacactgaagagagtagcaaattgttcaggacttcatccagcaagcaatttcctattccagttttccattctggatggggctgtctcggaggaaccccagctacccatggctctgggaggacggttctcctttgatgccccacttatttagagtccgaggcgctgtctcccagacatacccttcaggtacctgtgcatatatacaacgaggagctgtttatgcggaaaactgcattttagctgccttcagtatatgtcagaagaaggcaaacctaagagcacagtgaatttgaaggctctggaagaaaagaaaaaagtctttgagttttattctggaatttaagctattctttgtcacttgggtgccaaacatgagagcccagaaaactgtcatttagctggctgcagaactcctttgcagaaactggggttccaggagcctggcacctttatgtcaacatttttgattctagctacctgtattatttcacctagcttgt

SEQ ID NO: 68164 - DNA, 546 bp, Artificial Sequence
  derived and/or modified sequence
atgacctttgatgacttgaaaatccagaccgtgaaggaccaacccgatgagaagtcaaacgggaaaaaagcaaagggcctgcagtttctatactcaccctggtggtgtctggctgctgccaccctgggggtgttgtgcctcggcttggtggtgaccatcatggtgctgggcatgcagctgagtcaggtgtctgacttgctgacgcaggagcaagccaacttgacccatcagaaaaaaaagctagaggggcagatctctgctcgacagcaggcggaagaggccagtcaggagagcgaaaatgagcttaaagagatgatcgaaaccctggcaagaaagctgaatgagaagtcaaaggaacaaatggaactccaccaccagaacctgaacctccaggagaccctcaagcgcgtggcgaattgttctggattgcatcccgcaagtaactttttgttccaattctccatcctcgacggcgcagtaagcgaggagccacagctgcccatggctctgggaggaaggttttcattcgacgctccgctaatatag

SEQ ID NO: 68165 - DNA, 546 bp, Artificial Sequence
  derived and/or modified sequence
atgaccttcgacgacctgaagatccagaccgtgaaggaccagcccgacgagaagagcaacggcaagaaggccaagggcctgcagttcctgtacagcccctggtggtgcctggccgccgccaccctgggcgtgctgtgcctgggcctggtggtgaccatcatggtgctgggcatgcagctgagccaggtgagcgacctgctgacccaggagcaggccaacctgacccaccagaagaagaagctggagggccagatcagcgccagacagcaggccgaggaggccagccaggagagcgagaacgagctgaaggagatgatcgagaccctggccagaaagctgaacgagaagagcaaggagcagatggagctgcaccaccagaacctgaacctgcaggagaccctgaagagagtggccaactgcagcggcctgcaccccgccagcaacttcctgttccagttcagcatcctggacggcgccgtgagcgaggagccccagctgcccatggccctgggcggcagattcagcttcgacgcccccctgatctag

SEQ ID NO: 68166 - protein, 189 aa, Artificial Sequence
  derived and/or modified sequence
MTFDDLKIQTVKDQPDEKSNGKKAKGLQFLYSPWWCLAAATLGVLCLGLVVTIMVLGMQLSQVSDLLTQEQANLTHQKKKLEGQISARQQAEEASQESENELKEMIETLARKLNEKSKEQMELHHQNLNLQETLKRVANCSAPCPQDWIWHGENCYLFSSGSFNWEKSQEKCLSLDAKLLKINSTADLI

SEQ ID NO: 68167 - DNA, 570 bp, Artificial Sequence
  derived and/or modified sequence
atgaccttcgatgaccttaaaattcagaccgtgaaggaccaaccagatgagaaaagtaatggcaagaaagcgaaaggcttgcaatttctttactccccgtggtggtgtctggccgcggctacattaggagttttgtgccttggacttgtggtgacaatcatggtgttgggcatgcagctgagtcaggtgtcagatctgcttacgcaggaacaggcaaaccttactcaccagaaaaaaaaattagaaggacagatttccgctcgtcagcaggctgaggaggcctctcaggagagtgagaacgagttgaaggaaatgattgaaactcttgcgaggaaactcaatgagaagagcaaggagcagatggagcttcatcaccagaaccttaatctccaggagacactgaagagagtcgcgaactgtagcgccccctgcccacaggattggatatggcatggggagaactgttacctattttcctcaggcagttttaactgggaaaaatcccaggagaaatgtctgtctttggatgcgaaacttctgaagattaattccactgctgatctgatatag

SEQ ID NO: 68168 - DNA, 570 bp, Artificial Sequence
  derived and/or modified sequence
atgacctttgatgacctgaagatccagacagtgaaggaccagccagatgagaagagcaatggcaagaaggccaagggcctgcagttcctgtacagcccctggtggtgcctggccgccgccaccctgggcgtgctgtgcctgggcctggtggtgaccatcatggtgctgggcatgcagctgagccaggtgtctgacctgctgacccaggagcaggccaacctgacccaccagaagaagaagctggagggccagatcagcgcccggcagcaggccgaggaggccagccaggagagtgaaaatgagctgaaggagatgattgagaccctggccaggaagctgaatgagaagagcaaggagcagatggagctgcaccaccagaacctgaacctgcaggagaccctgaagagggtggccaactgcagcgccccctgcccccaggactggatctggcatggagagaactgctacctgttcagcagcggcagcttcaactgggagaagagccaggagaagtgcctgagcctggatgccaagctgctgaagatcaacagcacagctgacctgatctag

SEQ ID NO: 68169 - DNA, 570 bp, Artificial Sequence
  derived and/or modified sequence
atgaccttcgacgacctgaagatccagaccgtgaaggaccagcccgacgaaaaatccaacggtaagaaggctaaggggctgcagtttctgtactccccatggtggtgtctggcagccgctaccctaggagttctgtgtcttggactggtagtaacgattatggttctgggcatgcagcttagtcaggtgtctgatctactgacccaggagcaggcgaatctgacccaccaaaaaaagaaattggaggggcagatctctgcccggcagcaggccgaggaagcatcacaggagtctgagaacgagctgaaggaaatgatcgagactctggctcggaagctcaatgagaagagcaaggagcagatggagctgcatcaccaaaatcttaacctgcaagaaactctcaagcgggtcgccaactgttctgcaccatgcccacaggactggatttggcatggggaaaattgctacttattttcatcaggctcatttaattgggaaaaatcacaggagaaatgtctcagtctcgatgcaaagctgttaaaaattaacagcacagccgacctgatctag

SEQ ID NO: 68170 - DNA, 1008 bp, Artificial Sequence
  derived and/or modified sequence
gtgactgcttcactctctcattcttagcttgaatttggaaatgacttttgatgacctaaagatccagactgtgaaggaccagcctgatgagaagtcaaatggaaaaaaagctaaaggtcttcagtttctttactctccatggtggtgcctggctgctgcgactctaggggtcctttgcctgggattagtagtgaccattatggtgctgggcatgcaattatcccaggtgtctgacctcctaacacaagagcaagcaaacctaactcaccagaaaaagaaactggagggacagatctcagcccggcaacaagcagaagaagcttcacaggagtcagaaaacgaactcaaggaaatgatagaaacccttgctcggaagctgaatgagaaatccaaagagcaaatggaacttcaccaccagaatctgaatctccaagaaacactgaagagagtagcaaattgttcagctccttgtccgcaagactggatctggcatggagaaaactgttacctattttcctcgggctcatttaactgggaaaagagccaagagaagtgcttgtctttggatgccaagttgctgaaaattaatagcacagctgatctgatttagagtccgaggcgctgtctcccagacatacccttcaggtacctgtgcatatatacaacgaggagctgtttatgcggaaaactgcattttagctgccttcagtatatgtcagaagaaggcaaacctaagagcacagtgaatttgaaggctctggaagaaaagaaaaaagtctttgagttttattctggaatttaagctattctttgtcacttgggtgccaaacatgagagcccagaaaactgtcatttagctggctgcagaactcctttgcagaaactggggttccaggagcctggcacctttatgtcaacatttttgattctagctacctgtattatttcacctagcttgtcccaagcttccctgccagcctgaagtccattttcccctttttattttaa

SEQ ID NO: 68171 - DNA, 570 bp, Artificial Sequence
  derived and/or modified sequence
atgacattcgatgatctgaaaattcagacggttaaggatcaaccagatgagaaatccaatggcaagaaggccaaaggcttgcagttcctttacagcccctggtggtgcctggcagccgctacactgggggttctgtgtctagggttagttgtgacaataatggtcctcggaatgcagctttcacaggtctctgacctgttgacgcaggagcaggccaacctcacacaccaaaagaagaaacttgagggacagatctccgcacggcagcaggccgaggaggccagtcaggaatccgaaaacgagttgaaagaaatgatcgaaacactggcccgaaaattaaatgaaaagtccaaggaacagatggaacttcaccaccagaacctaaacttgcaagagaccctaaagcgggtcgcgaactgctctgctccttgtcctcaagactggatctggcatggtgagaactgttacctcttctcttctggctccttcaactgggagaagtctcaggagaagtgcctgagcctggacgcaaagctgttgaaaataaacagcacagctgatctgatttag

SEQ ID NO: 68172 - DNA, 570 bp, Artificial Sequence
  derived and/or modified sequence
atgaccttcgacgacctgaagatccagaccgtgaaggaccagcccgacgagaagagcaacggcaagaaggccaagggcctgcagttcctgtacagcccctggtggtgcctggccgccgccaccctgggcgtgctgtgcctgggcctggtggtgaccatcatggtgctgggcatgcagctgagccaggtgagcgacctgctgacccaggagcaggccaacctgacccaccagaagaagaagctggagggccagatcagcgccagacagcaggccgaggaggccagccaggagagcgagaacgagctgaaggagatgatcgagaccctggccagaaagctgaacgagaagagcaaggagcagatggagctgcaccaccagaacctgaacctgcaggagaccctgaagagagtggccaactgcagcgccccctgcccccaggactggatctggcacggcgagaactgctacctgttcagcagcggcagcttcaactgggagaagagccaggagaagtgcctgagcctggacgccaagctgctgaagatcaacagcaccgccgacctgatctag

SEQ ID NO: 68173 - protein, 512 aa, Artificial Sequence
  derived and/or modified sequence
MAAFKLDFLPEMMVDHCSLNSSPVSKKMNGTLDHPDQPDLDAIKMFVGQVPRTWSEKDLRELFEQYGAVYEINVLRDRSQNPPQSKGCCFVTFYTRKAALEAQNALHNMKVLPGMHHPIQMKPADSEKNNVEDRKLFIGMISKKCTENDIRVMFSSFGQIEECRILRGPDGLSRGCAFVTFTTRAMAQTAIKAMHQAQTMEGCSSPMVVKFADTQKDKEQKRMAQQLQQQMQQISAASVWGNLAGLNTLGPQYLALYLQLLQQTASSGNLNTLSSLHPMGGLNAMQLQNLAALAAAASAAQNTPSGTNALTTSSSPLSVLTSSGSSPSSSSSNSVNPIASLGALQTLAGATAGLNVGSLAGMAALNGGLGSSGLSNGTGSTMEALTQAYSGIQQYAAAALPTLYNQNLLTQQSIGAAGSQKEGPEGANLFIYHLPQEFGDQDLLQMFMPFGNVVSAKVFIDKQTNLSKCFGFVSYDNPVSAQAAIQSMNGFQIGMKRLKVQLKRSKNDSKPY

SEQ ID NO: 68174 - DNA, 117 bp, Artificial Sequence
  derived and/or modified sequence
atggccgccttcaagctggacttcctgcccgagatgatggtggaccactgcagcctgaacagcagccccgtgagcaagaagatgaacggcaccctggaccaccccgaccagccctag

SEQ ID NO: 68175 - DNA, 1539 bp, Artificial Sequence
  derived and/or modified sequence
atggccgccttcaagctggacttcctgcccgagatgatggtggaccactgcagcctgaacagcagccccgtgagcaagaagatgaacggcaccctggaccaccccgaccagcccgacctggacgccatcaagatgttcgtgggccaggtgcccagaacctggagcgagaaggacctgagagagctgttcgagcagtacggcgccgtgtacgagatcaacgtgctgagagacagaagccagaaccccccccagagcaagggctgctgcttcgtgaccttctacaccagaaaggccgccctggaggcccagaacgccctgcacaacatgaaggtgctgcccggcatgcaccaccccatccagatgaagcccgccgacagcgagaagaacaacgtggaggacagaaagctgttcatcggcatgatcagcaagaagtgcaccgagaacgacatcagagtgatgttcagcagcttcggccagatcgaggagtgcagaatcctgagaggccccgacggcctgagcagaggctgcgccttcgtgaccttcaccaccagagccatggcccagaccgccatcaaggccatgcaccaggcccagaccatggagggctgcagcagccccatggtggtgaagttcgccgacacccagaaggacaaggagcagaagagaatggcccagcagctgcagcagcagatgcagcagatcagcgccgccagcgtgtggggcaacctggccggcctgaacaccctgggcccccagtacctggccctgtacctgcagctgctgcagcagaccgccagcagcggcaacctgaacaccctgagcagcctgcaccccatgggcggcctgaacgccatgcagctgcagaacctggccgccctggccgccgccgccagcgccgcccagaacacccccagcggcaccaacgccctgaccaccagcagcagccccctgagcgtgctgaccagcagcggcagcagccccagcagcagcagcagcaacagcgtgaaccccatcgccagcctgggcgccctgcagaccctggccggcgccaccgccggcctgaacgtgggcagcctggccggcatggccgccctgaacggcggcctgggcagcagcggcctgagcaacggcaccggcagcaccatggaggccctgacccaggcctacagcggcatccagcagtacgccgccgccgccctgcccaccctgtacaaccagaacctgctgacccagcagagcatcggcgccgccggcagccagaaggagggccccgagggcgccaacctgttcatctaccacctgccccaggagttcggcgaccaggacctgctgcagatgttcatgcccttcggcaacgtggtgagcgccaaggtgttcatcgacaagcagaccaacctgagcaagtgcttcggcttcgtgagctacgacaaccccgtgagcgcccaggccgccatccagagcatgaacggcttccagatcggcatgaagagactgaaggtgcagctgaagagaagcaagaacgacagcaagccctactag

SEQ ID NO: 68176 - DNA, 312 bp, Artificial Sequence
  derived and/or modified sequence
atggccgccttcaagctggacttcctgcccgagatgatggtggaccactgcagcctgaacagcagccccgtgagcaagaagatgaacggcaccctggaccaccccgaccagcccgacctggacgccatcaagatgttcgtgggccaggtgcccagaacctggagcgagaaggacctgagagagctgttcgagcagtacggcgccgtgtacgagatcaacgtgctgagagacagaagccagaaccccccccagagcaagggctgctgcttcgtgaccttctacaccagaaaggccgccctggaggcccagtag

SEQ ID NO: 68177 - DNA, 117 bp, Artificial Sequence
  derived and/or modified sequence
atggccgcgtttaagctggactttctccccgaaatgatggtcgatcattgttcactgaattcctcgccagtaagcaaaaagatgaacggaaccctcgatcaccccgatcagccttag

SEQ ID NO: 68178 - DNA, 1539 bp, Artificial Sequence
  derived and/or modified sequence
atggccgctttcaagttggatttcctaccagagatgatggtcgatcactgctctttaaattcatccccagtgagcaagaagatgaatgggaccctagaccacccagaccagcccgacctcgacgccattaagatgtttgtgggacaagtacctaggacatggagtgagaaggatctgcgagagctgtttgagcagtatggcgcggtgtacgaaatcaatgtactacgggatcgttcccagaatccaccgcagtccaaaggctgctgtttcgtcaccttttacacccgaaaggccgctcttgaagctcaaaacgccttgcacaacatgaaggttctgcccggcatgcatcacccaatccagatgaagcccgcggacagcgagaaaaacaatgtcgaagatcgaaaattgtttataggcatgatcagtaagaagtgtactgagaatgacatccgagtcatgttctcttcatttggccaaattgaagaatgtagaattctgcggggacctgatgggctcagtcggggctgcgcttttgtgacattcactactcgggccatggcccagacggccatcaaagcaatgcaccaagcacagaccatggaagggtgctcatcacccatggtcgtgaaatttgccgatacacagaaggataaggaacaaaagagaatggcccagcagctccagcagcagatgcaacagattagcgctgcctcggtgtgggggaatcttgccgggctgaatacactcggaccgcagtatctggcactgtacctccaactgcttcaacaaacagcctccagtggcaatctcaatactcttagttcgctgcaccccatgggcggtctgaacgctatgcaattacaaaaccttgccgccctggcagcagcagcttccgcagcccagaacactccttctggcactaatgcactgaccacgtcctcatcaccgctctcagtgctgacaagctctgggagtagcccttcttcttcaagttcaaatagcgttaatccgatcgcctcccttggcgctctgcaaaccctcgctggcgccacagccggcttaaatgtgggatcactagcagggatggcagctctgaacggtggcctcggatcctctggtctgtctaatgggaccgggtcgacaatggaggcactcacacaggcttattccggcatccagcaatatgctgctgctgccctgcccacactttataaccagaacctgctgacccaacagagtattggagccgccggatctcagaaggagggcccagaaggagcaaacttgtttatctaccacctgcctcaggagttcggcgatcaggatctgctgcagatgtttatgcctttcggcaacgtcgtcagtgcaaaggtcttcattgataagcagaccaatctgtctaagtgctttgggttcgtctcttatgacaaccccgtgtctgctcaagccgctatacaaagcatgaacggctttcagataggaatgaagagactgaaggtgcaactcaagaggtccaaaaacgatagtaaaccttactag

SEQ ID NO: 68179 - DNA, 312 bp, Artificial Sequence
  derived and/or modified sequence
atggctgcctttaagctcgacttcctgcctgaaatgatggtggatcactgcagcttaaactcatcaccggtgagtaagaagatgaatggaaccttagatcaccctgatcagcccgacctggacgcaatcaaaatgtttgtcggtcaggtgcctcgcacctggtcagagaaggacctcagagaactgttcgaacagtacggggcggtctatgaaattaatgtcctgcgcgaccgctcccagaatcccccccagagtaaagggtgttgttttgtcactttctacaccaggaaggccgcactggaagcccagtag

SEQ ID NO: 68180 - DNA, 117 bp, Artificial Sequence
  derived and/or modified sequence
atggccgccttcaagctggacttcctgcctgagatgatggtggaccactgcagcctgaacagcagccctgtgtccaagaagatgaatggcaccctggaccacccagaccagccctag

SEQ ID NO: 68181 - DNA, 1539 bp, Artificial Sequence
  derived and/or modified sequence
atggccgccttcaagctggacttcctgcctgagatgatggtggaccactgcagcctgaacagcagccctgtgtccaagaagatgaatggcaccctggaccacccagaccagcctgacctggatgccatcaagatgtttgtgggccaggtgcccaggacctggagcgagaaggacctgcgggagctgtttgagcagtacggggctgtgtatgagatcaacgtgctgcgggacaggagccagaaccccccccagagcaagggctgctgctttgtgaccttctacaccaggaaggccgccctggaggcccagaatgccctgcacaacatgaaggtgctgcccggcatgcaccaccccatccagatgaagccagctgacagcgagaagaacaacgtggaggacaggaagctgttcatcggcatgatcagcaagaagtgcacagaaaatgacatccgggtgatgttcagcagctttggccagatcgaggagtgccgcatcctgcggggcccagatggcctgagccggggctgtgcctttgtgaccttcaccacccgggccatggcccagacagccatcaaggccatgcaccaggcccagaccatggagggctgcagcagccccatggtggtgaagtttgctgacacccagaaggacaaggagcagaagaggatggcccagcagctgcagcagcagatgcagcagatctctgctgcctctgtgtggggcaacctggccggcctgaacaccctgggcccccagtacctggccctgtacctgcagctgctgcagcagacagccagcagcggcaacctgaacaccctgagcagcctgcaccccatgggcggcctgaatgccatgcagctgcagaacctggccgccctggccgccgccgccagcgctgcccagaacaccccatctggcaccaatgccctgaccaccagcagcagccccctgtctgtgctgaccagcagcggcagcagccccagcagcagcagcagcaacagcgtgaaccccatcgccagcctgggcgccctgcagaccctggccggggccacagctggcctgaatgtgggcagcctggccggcatggccgccctgaatggaggcctgggcagcagcggcctgagcaatggcaccggcagcaccatggaggccctgacccaggcctacagcggcatccagcagtatgctgctgctgccctgcccaccctgtacaaccagaacctgctgacccagcagagcatcggggctgctggcagccagaaggagggccctgagggcgccaacctcttcatctaccacctgccccaggagtttggagaccaggacctgctgcagatgttcatgccctttggaaatgtggtgtctgccaaggtgttcatcgacaagcagaccaacctgagcaagtgcttcggctttgtgtcctatgacaaccctgtgtctgcccaggccgccatccagagcatgaatggcttccagatcggcatgaagaggctgaaggtgcagctgaagaggagcaagaatgacagcaagccctactag

SEQ ID NO: 68182 - DNA, 312 bp, Artificial Sequence
  derived and/or modified sequence
atggccgccttcaagctggacttcctgcctgagatgatggtggaccactgcagcctgaacagcagccctgtgtccaagaagatgaatggcaccctggaccacccagaccagcctgacctggatgccatcaagatgtttgtgggccaggtgcccaggacctggagcgagaaggacctgcgggagctgtttgagcagtacggggctgtgtatgagatcaacgtgctgcgggacaggagccagaaccccccccagagcaagggctgctgctttgtgaccttctacaccaggaaggccgccctggaggcccagtag

SEQ ID NO: 68183 - DNA, 7666 bp, Artificial Sequence
  derived and/or modified sequence
ctcaaagaaaatgaacggcaccctggaccacccagaccaaccagatcttgatgctatcaagatgtttgtgggccaggttccaaggacctggtctgaaaaggacttgcgggaactcttcgaacagtatggtgctgtgtatgaaatcaacgtcctaagggataggagccaaaacccgcctcagagcaaagggtgctgttttgttacattttacacccgtaaagctgcattagaagctcagaatgctcttcacaacatgaaagtcctcccagggatgcatcaccctatacagatgaaacctgctgacagtgagaagaacaatgtggaagacaggaagctgtttattggtatgatttccaagaagtgcactgaaaatgacatccgagtcatgttctcttcgtttggacagattgaagaatgccggatattgcggggacctgatggcctgagccgaggttgtgcatttgtgacttttacaacaagagccatggcacagacggctatcaaggcaatgcaccaagcacagaccatggagggttgctcatcacccatggtggtaaaatttgctgatacacagaaggacaaagaacagaagagaatggcccagcagctccagcagcagatgcagcaaatcagcgcagcatctgtgtggggaaaccttgctggtctaaatactcttggaccccagtatttagcactttatttgcagctccttcagcagactgcctcctctgggaacctcaacaccctgagcagcctccacccaatgggagggttgaatgcaatgcagttacagaatttggctgcactagctgctgcagctagtgcagctcagaacacaccaagtggtaccaatgctctcactacatccagcagtcccctcagcgtgctcactagttcagggtcctcacctagctctagcagcagtaattctgtcaaccccatagcctcacttggagccctgcagacattagctggagcaacggctggcctcaatgttggctctttggcaggaatggctgctttaaatggtggcctgggcagcagtggcctttccaatggcaccgggagcaccatggaggccctcactcaggcctactcgggtatccagcaatatgctgctgctgcgctccccactctgtacaaccagaatcttctgacacagcagagtattggtgctgctggaagccagaaggaaggtccagagggagccaacctgttcatctaccacctgccccaggagtttggtgatcaggacctgctgcagatgtttatgccctttgggaatgtcgtgtctgccaaggttttcatagacaagcagacaaacctgagcaagtgttttggttttgtaagttacgacaatcctgtttcggcccaagctgccatccagtccatgaacggctttcagattggcatgaagcggcttaaagtgcagctcaaacgttcgaagaatgacagcaagccctactgagcgtgctcccctctgagactggagtgagagggtcttctggcacagcttgccctgaagactcggctactgccttctgtgggagtttcgcttcgtacagaggacaagtttgtgctttggtttccagtgttttactttggagtttaggtgccatatcctgaggttttttttgtttttgtttttgtttctcctttatttaaagtttgctgtgtttgtaaccagtgtgtgttgagaaggaccaacaccaaaccaccctggggaagggggacagggaaacatttaacacagacgatgatcaggatttgccccaaaccaccccaagagagaggactgagtggaacaaaaaagtgacccccagaacctctcttagtgtgagggtgggtagaatgagaactgacacctgggagctgtggggagcagagcggctttggggaagagtggagtgactagacacctaatgccctggcagctggagactcaaactcctgtacagctaccttctgggaaatagtttttgacacctatttttcagattcttgtccggaatttctgctgctcttttcaaaaaagggcattaacaattctctggaaataaagcacctgttagcctgacatatgcaaaaagcagggcggcatcacccattacgagctcccccagccagcagtcagtattggattggccttgcctggctggtggcagtttgggagaaacagccaaagaggttagtttatttcaacaccaaattagaccatggcccatttccaacgggtctctttaaaggcctctatggaatacattgcctggtttccttctttgcagttcaccacagcaaggaatgtcacctccatcccaagccaccattttctcatgaaggcaaatccaagaagggcttgcagttcttgctgaagggggtaccatttgtgggcagagtgatcaataccatctagttgggggaggaggagcttatttcttggtgtacttgaatcagaaggtccctgcaagccagtatgcttcatttgccagtggccagaaattctcccttgcctccttgattgaggtgtcccagatgtagtattcccacaggggtctggcaggcccctcctgtaaccactccagtcacattttctgctcttgaggcagaggtgacatcaggacgtttacagcctccacatgaattgagtgttcatttacctcagtattaccgtgttcatttttgtcctcgtgctacagttagctccctgccgcctcttgcaggtcttacttcagctcttgcctgtgacccacacagcttctgggctctgcctctgctctaagaagtgctgtgggggtagagaaccaggaaggacatgctgttgggaatgtacacctgggcagaggtggccctgttaagatgtgactgtagccacagccagggatgggatccctgggtctctggaatctgaaacctcaacaaataccagtcttgacccctagcagcagagataagaataaaggggttggtttgctattaagtcagatgggggctctctccttgtcatgctgtccctgtgggtaacagacagggattgaccatcttactgttgtacaggtagctggtggtgttggattatcccattgaagctgggacagctgttcctttctcatagtgataacttgggtctgttgtcctctaaggaacgtgaaacatacacttcttaagctgaaccacgtaaacttgaaattctgcgcactgggagaaatgtgtcctgtgtttcaaaggataaaactgttctaaaggcttccagggtcatgatgggattttttaaataaatgcaaaaaataaaaataaaaaagaaaaaagaaaacaaaaaaaaaaaagaaaaaaatgctaggttggggaggcgctgttctgaatcccaaccggctggaaccaagaatgtcgtttctatttttatagaagttttatacagctccggggtggagaatatttattacctaaattatatctctggaaaaggccaggattttgtagaatccagaatgtgattgttatacacacagggtgctgtgtatgattgaaactactgactttctgtggcccgtttgcagcccagctaacctgcccaaggggaaggtgttaatgctgtgaattggcagaggagagagctgtgctccatagggtgctgccggtgctgtgctccctagccttctgttctgtcttcctccttagccagaacgccactcccttcccacatccccttcttctctccgccttcccccatctcaccattatttgtccatggatttgtcctgggctctgggaccttatgaaacccctttcctaatgacataagaggccaaggtgcaatccacccacctttgataccagaccctgagggcttcatacctgctgatgggttttcttttctaaaaggaatgctcgccccagcagggtcctgggctgcttgagcagccagctggtgagaccatgcacttctctgttctctcctccccctgcccagtgagttagcacagcagtagcactgcccttgagcacagttctttccccaggccaaagatggttttgtgaagaagctgctcccctacaagtctcacgtgtgaaagggctcagctcagagtggagactcgctgtcaagtcttaagcaatccttttctgttgtgtgaaggtttcacttacaatgtgttttctgctgtagttttgtttcttacttgggttacatcatgaaattgatttgccttgaatgcagccagaccactgtctcctgggttccccttgagtggccagggcctggatggaagctaagagcttggatttctgggaacaaagggccatccccataagattgagcagaaattctggtcctcttccctgaaaaattttccccaccccagccagcatcttctgcttccccttgggttgtgaccagggagtggggagagaggctgaggctctgctcccctggagaccttctcttaggagttgggtgcttcatggaaaatccaagccttaggttcccttctgtctctggcaattagatgtgttcttggtgtcctccatgtcctttttgacttttccctgtgtccattgttagcatgtgcaaaagttccctgtcattacccaacccctgcccgcccacctcatttcagggctgtacacacagtgagtgttcctgttctctctctctttgtttggatgtattgctctgtgtaactcagtgggtctccctctttctggtttgtttttttttctagattcctgccgtttgttcatcgttgtgcctaaagcatgtcgatgtggcgtcaagtacatcgtccaaatccctgtctcttcagcttctctgatgcttgaactctcacctttgaccttgtgttgacctttgatgctgatgtgtatttttattatgtttgtttctttcttcgtttttttttctttttttctttcctttttttttccttttgtgctgccaaattggttttgctagaacgactgctgaaggggaaatatttaaacttgcatttgaatataaaaaaaatctatttttctagaacttcataagataaccacttgattttgtgattccaattctttgtaattgtcttcagagcagccctactagcacataccgcgtggtgtttgtatttctgtgaacacacagccagtccgtttctaggctttgtttctctgtgtgcttagttttaaagacaactttgaagtaaacaatgaaataaaagatgtcactaaaacctctgaggctcctgagcacattttgctgatacagtctgtggggcttgaggagaccgcatgtattgttctttcttttgtttttcttctgagttctcaactgcggagagcacctgaaccccctttcctttttgaccgcaggctgcactttgggccccagccagccctttttctttttctttttcttttgtggttcttccctggagcgactctggggagtcctggatatcccgcctgccccttcccctcagccccatgcttgttccaacagtctccacagcaaaatgtgatgctttgatttttttgttgttgtttttgtttttgtattgtttttgtgtttttgttttgaattttttcctttcctactaagattatgcccagaaaaaagttttgcatgtttcctgctgtttcttcacaccttcgtatatatcaccttcacctctctgttttctatagtttgtgcaaaaactgatcgatttaaaagggtttcaaagaagctgttttaaattgttgtagggttgattatttttttcaagattgtattgtttaattttgaagtggcaactttctcctctattgcccttagagcgtttgcctgtgcacttagactgtcacttcgtgtggcctccaggtcttaccggggcttccgggaggctggctgctttgctcagagagggtgggaagggggcctggagagacacgagaagcagaggtagagcctagaaggtggcagcaggtgggtaagaggcttatttagcacattaggggcagtgagcacctggaggaaggagggcgctcccaatcacccgtaggaggccatctgcacaccaagcggcaattcacctgctggcgcttttcctaggtgacaagcacaatactacagtcttcacactgtttacagccctgggcaccagccacccggcactggctcttcatcacagctctgctcttgcttagctagtggggtgggggaaagggcagggatttgtttttttaattgggtggagagccaaacagctactgtccctgggtgccaagcaagccagttttttggttccctgagggaaactgaccctcctctcttgtggcaccatccagcctcagggtcttggagacttgagtaagaatgtgagtggagggggagaggtgaggagaggagcacagggtggatctgtggagggaagaggttacagggggaggagctgatgatagatcccacccagacttaagctgctggtgggtgggtgagctgggaagtaggactgtccagggaagggtggagagatgtagctaggggctggggagggggaggtggaagcgctattgagcatcctccacaccaaggttgatgaaggaagggatcccagcagggtttctgctctggggctggcaggttgcctggtattatgcccaaggccgctctgcctgggggaaagggcagccaggcagaggcccagtgtctggtaggctgctgaatttcctggaaggggtgattggatggaaagaggccagaaaccccagcctgagagactgctgtgcaccccacagtctgactgcacagagccgcctctgttggcaggaggcactgaggctccccttcctgtgtattgagaagcagtgtttgccaatatattttgctttcaattccaagaggagctctgggaaaacctgtggataaaaccaaatgccaaatgttggacgttgtttccttttccttttctctctctgattgttttaattgttctgtggtggttttaatggatttgagaccctggagcggcagctgcctttctgatttccagctgctttttgtgaataatttaaaaagaaaaaaaaaaagaaactttacattttggagacaaacctgtgtgagttttttattggtacaaacgttgtatttaacactaggggttttgtacagttttttgccttttctactagaaaacaatgtaaagtgatttcacaatgtgaagagaaaaaaaaattgccactatgaccaaacgcacagtctgttctgcagcaacaacgggattcaatcaactcagtcgtgattcagccgtagaaatgcttttcctttatcttgtttgagcttttcctttctttcctgttttgatttgcaaaagaaaatgtcttttttgtgtgaacttgtgttgtactctgtagaaaattatggattttactttaatggtttaaaaaaaggcaaggagagccctcgtcgcttttcttacctaatcacagagtttgtgtagtgaatttaaaaagaaaaaaaaattgttataagtttggagcaagggagtatgtgtttcaaaggaatctccttcctttttttgtgtgtttttccttttgtcccaatggggaacctaaatctgttttaattgcacagacacatggacaaaaagtcattttgtatctgccaagtgtggtaccttcctttgtttatttgctattaaactgtttg

SEQ ID NO: 68184 - DNA, 117 bp, Artificial Sequence
  derived and/or modified sequence
atggccgccttcaagctggacttcctgcccgagatgatggtggaccattgcagcctcaacagtagtcccgtcagcaagaagatgaatggcacccttgaccatcccgatcagccatag

SEQ ID NO: 68185 - DNA, 1539 bp, Artificial Sequence
  derived and/or modified sequence
atggccgccttcaagctggacttcctgcccgagatgatggtggaccattgtagccttaacagctctccagtgagtaaaaaaatgaacggaacactggaccaccccgatcagcccgaccttgacgctatcaagatgtttgtgggtcaagtgccccgaacatggagtgaaaaagatttaagggaactgttcgagcagtatggagctgtgtacgaaattaacgtgttgcgggataggagtcagaatccccctcagtccaaggggtgttgcttcgttaccttttacacacgaaaggccgccctcgaagcacaaaacgcccttcacaacatgaaggtgctgcccggcatgcaccaccccattcagatgaagcccgctgatagcgaaaagaataacgtggaagaccggaagctcttcattggcatgatctccaagaaatgcaccgagaatgacattagagtaatgttctcttccttcgggcaaattgaggaatgccgcatcctcagaggtccagatggcctgtcccgtggctgcgctttcgtaactttcacgacccgcgcaatggcacagacggcaatcaaggcaatgcaccaggcccaaaccatggagggctgttcctcaccaatggtcgttaaatttgcagatactcagaaagataaggagcagaaaagaatggctcagcagctgcagcagcagatgcagcagatctccgcggcttccgtctggggaaacttggctggacttaatacactgggccctcagtaccttgctctctaccttcaactgcttcagcagactgcctcttctgggaacctcaacacattatcttccctgcatcccatgggcggcctgaatgccatgcaactccagaacctggcagcattggccgctgccgcttccgctgcccagaacacgccatccggaactaacgctttaacaacttcgagcagccccctgagcgtgctgacaagtagtgggtcgtcaccatcttccagttcttctaacagcgtgaacccaattgcaagccttggcgctctgcagacactagctggtgccacagcaggccttaatgttggatccctggctgggatggcagcactcaacggtggactggggtcaagtggactctctaacggcaccggcagcaccatggaggccctcacacaggcatatagcggcattcagcagtacgcggccgccgccctgcctacactctacaaccaaaatttactaactcaacagtctataggggccgcaggttctcagaaggaggggcccgaaggggctaatcttttcatttatcatctgccgcaggagtttggcgaccaggacctgctccaaatgttcatgcccttcggcaacgtggtgtcagccaaggtgtttattgataaacagaccaatctgagcaaatgttttggctttgtctcatacgacaaccctgtaagcgctcaggctgccatccagagtatgaatggtttccaaattggaatgaaaaggctgaaggtgcagctgaaaagaagcaaaaatgatagcaaaccctattag

SEQ ID NO: 68186 - DNA, 312 bp, Artificial Sequence
  derived and/or modified sequence
atggccgccttcaagctggacttcctgcccgagatgatggtggaccactgctccttgaactcttccccagtaagcaagaagatgaatggaacactggatcaccctgatcagcccgacctcgatgcgataaaaatgtttgtcggacaggtgcccagaacatggagcgagaaggatctgcgagagcttttcgaacaatatggcgctgtgtacgagattaacgtgcttagagatcggtcccagaatcctccacagtcaaaggggtgttgctttgtcaccttttatacgcggaaagcggccctcgaggcacaatag

SEQ ID NO: 68187 - DNA, 117 bp, Artificial Sequence
  derived and/or modified sequence
atggctgcatttaaattagattttctaccagagatgatggtggaccactgctctctgaactcttcccccgtctctaagaaaatgaatgggactcttgaccacccagatcaaccgtag

SEQ ID NO: 68188 - DNA, 1539 bp, Artificial Sequence
  derived and/or modified sequence
atggccgctttcaaactggacttcctgcctgaaatgatggtcgaccactgcagccttaattcgagccccgtgagcaaaaagatgaatggtactcttgatcaccccgaccagccagatctcgatgccatcaagatgttcgtgggccaggtgccccgtacctggtcagaaaaagatctcagagaattatttgagcagtacggggcagtttacgagatcaatgtcttaagagaccgttcccaaaatccacctcagtctaaaggctgttgcttcgtcacattctacacccgcaaggccgctttggaggcacagaacgctcttcacaacatgaaggtgctgcctggtatgcatcaccccatccagatgaagccagctgactcagagaaaaataacgtggaagacaggaaactgttcatcgggatgatttccaaaaaatgcactgaaaatgatatcagggtgatgttctcgagcttcggtcagatcgaggaatgccggatcctgcggggtcccgatggcctgagccggggatgtgctttcgtgacctttaccacacgcgctatggcacagaccgcaattaaggcaatgcaccaggctcagactatggaagggtgctcgtccccaatggtggtcaagttcgctgatacccagaaagataaggagcaaaagcgtatggcacagcagctccagcagcagatgcagcagatctctgccgcatcagtctgggggaatcttgctggcctgaatacattgggaccccagtatctggctctgtatttacagctactccaacagacagcctcttctgggaacctgaatacactgtctagcctccacccgatgggcggtcttaacgccatgcaactgcagaatttagccgctttggccgcagcagctagtgctgcacagaacacaccttcaggaaccaacgcccttactacaagctcctcacctttgtcagtgctgacctcttctggatcttcccctagcagctccagttccaattcggtcaatccgatcgctagtctgggggctctacagactctggcaggtgcaaccgccggactgaatgtcgggtcattggcgggtatggccgctcttaacggcggacttgggtcctccggtctgtccaatgggactgggagtacgatggaggcactgacccaagcgtattccgggattcagcaatacgccgctgcagcactcccgactctctataaccagaatctgctgactcaacagtcaattggggcagctggttcgcagaaggagggtcctgaaggcgcaaacctctttatttaccatctccctcaagagttcggcgaccaggatctgttgcagatgttcatgccttttggcaacgtggtcagcgctaaggtgtttatagataagcagacaaacctatccaagtgctttggcttcgtttcatatgacaaccccgtctcagcacaggccgctatccagagcatgaatggcttccagataggcatgaaaagactaaaagttcagctgaagcgctcaaagaacgacagtaagccttactag

SEQ ID NO: 68189 - DNA, 312 bp, Artificial Sequence
  derived and/or modified sequence
atggcagcctttaaactggacttcctgcccgagatgatggtggaccactgctcgctcaacagtagtcctgttagtaagaagatgaatggcactctggatcacccagatcagccggatctggatgccatcaagatgttcgtcggccaggttccccgaacctggtctgagaaggatttaagggagctcttcgaacagtacggagccgtgtatgagatcaacgtgcttcgggatcgatcacagaacccaccccagtctaaggggtgttgtttcgtgaccttttatactaggaaggccgcacttgaagcccagtag

SEQ ID NO: 68190 - DNA, 556 bp, Artificial Sequence
  derived and/or modified sequence
atctcttctgcaccttgtgcattgtaggttttggatgcttatttgtttagggtctaggacctggtgcttagcctctcctggatcctgtatatttactgactttccaaattcttttgagtgtggcattatatctgcttcatcttctctttcttggctattcttagtgcccttctcattttactgtcctaatgttttcccatttatactatgaatcattgtgcaccctatgtagagcctgtcattggagattaaaatcagtggcagctctttgattttacagctcagcctcagctgaacataacttctttttttcaaagttccctgtgttgtgaactgagcttgggtgaagtgaaatctttgaggaagctaaagctgtgtgtatttgtggatcagacaagtgcagcaagttaatatcattggcttctgaaggggagagtgaggtgatggctgcgtttaagttggatttccttccagaaatgatggtggatcattgctctttgaattccagtcccgtctcaaagaaaatgaacggcaccctggaccacccagaccaacc

SEQ ID NO: 68191 - DNA, 3044 bp, Artificial Sequence
  derived and/or modified sequence
gtctgtttaaggaatagcagaagacatgacatgtagacaaatttcaggttattttcagaagatactgggtttgttactgtattttaaaaggatactttcttggtttgttatgagatattctaattaaacagtgatgaattcttactcctggtcagtgtaagtctaaattcaagtttgttgctttgttttacagtttcctttcactcccctcccccatcccctcatgagtcataagcatgcagtgttgggaatagaacttgtcagctgagtggggatgagacagttctctgcccatactatttgtaactgtagtcaatgaggagaggaaaggacgttattaaatgctggagaaacaccttgattgaggcagcttcttctgtggctgtgtggtatggatgcagagttctgtgtgactatacactgatgtattctggctctgaatcacttagggatctcttctgcaccttgtgcattgtaggttttggatgcttatttgtttagggtctaggacctggtgcttagcctctcctggatcctgtatatttactgactttccaaattcttttgagtgtggcattatatctgcttcatcttctctttcttggctattcttagtgcccttctcattttactgtcctaatgttttcccatttatactatgaatcattgtgcaccctatgtagagcctgtcattggagattaaaatcagtggcagctctttgattttacagctcagcctcagctgaacataacttctttttttcaaagttccctgtgttgtgaactgagcttgggtgaagtgaaatctttgaggaagctaaagctgtgtgtatttgtggatcagacaagtgcagcaagttaatatcattggcttctgaaggggagagtgaggtgatggctgcgtttaagttggatttccttccagaaatgatggtggatcattgctctttgaattccagtcccgtctcaaagaaaatgaacggcaccctggaccacccagaccaaccagatcttgatgctatcaagatgtttgtgggccaggttccaaggacctggtctgaaaaggacttgcgggaactcttcgaacagtatggtgctgtgtatgaaatcaacgtcctaagggataggagccaaaacccgcctcagagcaaagggtgctgttttgttacattttacacccgtaaagctgcattagaagctcagaatgctcttcacaacatgaaagtcctcccagggatgcatcaccctatacagatgaaacctgctgacagtgagaagaacaatgtggaagacaggaagctgtttattggtatgatttccaagaagtgcactgaaaatgacatccgagtcatgttctcttcgtttggacagattgaagaatgccggatattgcggggacctgatggcctgagccgaggttgtgcatttgtgacttttacaacaagagccatggcacagacggctatcaaggcaatgcaccaagcacagaccatggagggttgctcatcacccatggtggtaaaatttgctgatacacagaaggacaaagaacagaagagaatggcccagcagctccagcagcagatgcagcaaatcagcgcagcatctgtgtggggaaaccttgctggtctaaatactcttggaccccagtatttagcactttatttgcagctccttcagcagactgcctcctctgggaacctcaacaccctgagcagcctccacccaatgggagggttgaatgcaatgcagttacagaatttggctgcactagctgctgcagctagtgcagctcagaacacaccaagtggtaccaatgctctcactacatccagcagtcccctcagcgtgctcactagttcagggtcctcacctagctctagcagcagtaattctgtcaaccccatagcctcacttggagccctgcagacattagctggagcaacggctggcctcaatgttggctctttggcaggaatggctgctttaaatggtggcctgggcagcagtggcctttccaatggcaccgggagcaccatggaggccctcactcaggcctactcgggtatccagcaatatgctgctgctgcgctccccactctgtacaaccagaatcttctgacacagcagagtattggtgctgctggaagccagaaggaaggtccagagggagccaacctgttcatctaccacctgccccaggagtttggtgatcaggacctgctgcagatgtttatgccctttgggaatgtcgtgtctgccaaggttttcatagacaagcagacaaacctgagcaagtgttttggttttgtaagttacgacaatcctgtttcggcccaagctgccatccagtccatgaacggctttcagattggcatgaagcggcttaaagtgcagctcaaacgttcgaagaatgacagcaagccctactgagcgtgctcccctctgagactggagtgagagggtcttctggtcttacttcagctcttgcctgtgacccacacagcttctgggctctgcctctgctctaagaagtgctgtgggggtagagaaccaggaaggacatgctgttgggaatgtacacctgggcagaggtggccctgttaagatgtgactgtagccacagccagggatgggatccctgggtctctggaatctgaaacctcaacaaataccagtcttgacccctagcagcagagataagaataaaggggttggtttgctattaagtcagatgggggctctctccttgtcatgctgtccctgtgggtaacagacagggattgaccatcttactgttgtacaggtagctggtggtgttggattatcccattgaagctgggacagctgttcctttctcatagtgataacttgggtctgttgtcctctaaggaacgtgaaacatacacttcttaagctgaaccacgtaaacttgaaattctgcgcactgggagaaatgtgtcctgtgtttcaaaggataaaactgttctaaaggcttccagggtcatgatgggattttttaaataaatgcaaaaaataaaaat

SEQ ID NO: 68192 - DNA, 549 bp, Artificial Sequence
  derived and/or modified sequence
attgtgtgctgggctgagcctcccttcacatggtcacatccccattttaatccaatactccctttccctaccccttccccagtcctgcctctttctgtggcacttattgctggtttccctgagctcctgtttccactttgtgttttttgtggggcccaggaagctaaagctgtgtgtatttgtggatcagacaagtgcagcaagttaatatcattggcttctgaaggggagagtgaggtgatggctgcgtttaagttggatttccttccagaaatgatggtggatcattgctctttgaattccagtcccgtctcaaagaaaatgaacggcaccctggaccacccagaccaaccagatcttgatgctatcaagatgtttgtgggccaggttccaaggacctggtctgaaaaggacttgcgggaactcttcgaacagtatggtgctgtgtatgaaatcaacgtcctaagggataggagccaaaacccgcctcagagcaaagggtgctgttttgttacattttacacccgtaaagctgcattagaagctcag

SEQ ID NO: 68193 - DNA, 576 bp, Artificial Sequence
  derived and/or modified sequence
agttccctgctcctccctctctgagcacggagcagaatctgttctgctgaagctgctgttccactttttagcttgctatatttgtacagcaacagcaggagcagcccactagctaggccgtgtggccaccctttggcacccgcaccggctcagacctgctcaggactcagccagggcacacagtttgtgttcttacgtgcatccatctgtctgtctgtgtgcgtctctgtggaggactgaggttttcaagtgaaagaggctgaacataacttctttttttcaaagttccctgtgttgtgaactgagcttgggtgaagtgaaatctttgagctcaaagaaaatgaacggcaccctggaccacccagaccaaccagatcttgatgctatcaagatgtttgtgggccaggttccaaggacctggtctgaaaaggacttgcgggaactcttcgaacagtatggtgctgtgtatgaaatcaacgtcctaagggataggagccaaaacccgcctcagagcaaagggtgctgttttgttacattttacacccgtaaagctgcattagaagctcagaatgctct

SEQ ID NO: 68194 - protein, 485 aa, Artificial Sequence
  derived and/or modified sequence
MNGTLDHPDQPDLDAIKMFVGQVPRTWSEKDLRELFEQYGAVYEINVLRDRSQNPPQSKGCCFVTFYTRKAALEAQNALHNMKVLPGMHHPIQMKPADSEKNNVEDRKLFIGMISKKCTENDIRVMFSSFGQIEECRILRGPDGLSRGCAFVTFTTRAMAQTAIKAMHQAQTMEGCSSPMVVKFADTQKDKEQKRMAQQLQQQMQQISAASVWGNLAGLNTLGPQYLALYLQLLQQTASSGNLNTLSSLHPMGGLNAMQLQNLAALAAAASAAQNTPSGTNALTTSSSPLSVLTSSGSSPSSSSSNSVNPIASLGALQTLAGATAGLNVGSLAGMAALNGGLGSSGLSNGTGSTMEALTQAYSGIQQYAAAALPTLYNQNLLTQQSIGAAGSQKEGPEGANLFIYHLPQEFGDQDLLQMFMPFGNVVSAKVFIDKQTNLSKCFGFVSYDNPVSAQAAIQSMNGFQIGMKRLKVQLKRSKNDSKPY

SEQ ID NO: 68195 - protein, 79 aa, Artificial Sequence
  derived and/or modified sequence
MNGTLDHPDQPDLDAIKMFVGQVPRTWSEKDLRELFEQYGAVYEINVLRDRSQNPPQSKGCCFVTFYTRKAALEAQNAL

SEQ ID NO: 68196 - DNA, 1458 bp, Artificial Sequence
  derived and/or modified sequence
atgaacggcaccctggaccaccccgaccagcccgacctggacgccatcaagatgttcgtgggccaggtgcccagaacctggagcgagaaggacctgagagagctgttcgagcagtacggcgccgtgtacgagatcaacgtgctgagagacagaagccagaaccccccccagagcaagggctgctgcttcgtgaccttctacaccagaaaggccgccctggaggcccagaacgccctgcacaacatgaaggtgctgcccggcatgcaccaccccatccagatgaagcccgccgacagcgagaagaacaacgtggaggacagaaagctgttcatcggcatgatcagcaagaagtgcaccgagaacgacatcagagtgatgttcagcagcttcggccagatcgaggagtgcagaatcctgagaggccccgacggcctgagcagaggctgcgccttcgtgaccttcaccaccagagccatggcccagaccgccatcaaggccatgcaccaggcccagaccatggagggctgcagcagccccatggtggtgaagttcgccgacacccagaaggacaaggagcagaagagaatggcccagcagctgcagcagcagatgcagcagatcagcgccgccagcgtgtggggcaacctggccggcctgaacaccctgggcccccagtacctggccctgtacctgcagctgctgcagcagaccgccagcagcggcaacctgaacaccctgagcagcctgcaccccatgggcggcctgaacgccatgcagctgcagaacctggccgccctggccgccgccgccagcgccgcccagaacacccccagcggcaccaacgccctgaccaccagcagcagccccctgagcgtgctgaccagcagcggcagcagccccagcagcagcagcagcaacagcgtgaaccccatcgccagcctgggcgccctgcagaccctggccggcgccaccgccggcctgaacgtgggcagcctggccggcatggccgccctgaacggcggcctgggcagcagcggcctgagcaacggcaccggcagcaccatggaggccctgacccaggcctacagcggcatccagcagtacgccgccgccgccctgcccaccctgtacaaccagaacctgctgacccagcagagcatcggcgccgccggcagccagaaggagggccccgagggcgccaacctgttcatctaccacctgccccaggagttcggcgaccaggacctgctgcagatgttcatgcccttcggcaacgtggtgagcgccaaggtgttcatcgacaagcagaccaacctgagcaagtgcttcggcttcgtgagctacgacaaccccgtgagcgcccaggccgccatccagagcatgaacggcttccagatcggcatgaagagactgaaggtgcagctgaagagaagcaagaacgacagcaagccctactag

SEQ ID NO: 68197 - DNA, 1458 bp, Artificial Sequence
  derived and/or modified sequence
atgaatggaactctggatcatcccgatcagccagacttagacgctattaagatgtttgtcggtcaagttcctcggacgtggtcagagaaggacctacgcgagttgttcgagcaatatggcgccgtgtacgaaatcaatgttttgcgggaccggagccaaaatcccccacagtctaagggttgttgttttgttacgttttacacaaggaaagctgccctggaggctcagaatgccctccacaatatgaaggttctgcccggcatgcaccatcctatccagatgaagccagcggattccgaaaaaaacaacgtggaagatcggaagttgttcataggtatgattagtaagaagtgtactgaaaacgatatacgggtgatgttttcaagctttggtcaaatcgaagagtgcaggatactgcgaggccctgacggcctgtcacgcggctgtgcatttgtgacattcacgactagagccatggcgcagacagctataaaagccatgcatcaggctcagaccatggaggggtgctccagtccgatggttgtaaagtttgcagatacgcagaaggataaggagcagaaacgcatggcccagcagctgcagcagcaaatgcaacaaatctctgctgccagcgtgtggggaaatttagccggccttaatactcttggcccacagtatctcgcattgtatctacaactgctccaacagaccgcctcttctggcaacctgaacaccctctcaagtttgcacccaatgggaggactgaatgctatgcagctgcagaacttggccgccctggcagctgccgcgtccgctgctcagaatacaccgagtggcaccaatgctctgaccactagtagcagtcctctgtccgtcctgactagctccggctcttcgcctagctctagcagttcgaattccgtcaaccctatcgcttcattgggcgctctgcaaacactcgccggcgctacagcagggttaaacgtgggctccttggcaggcatggccgccttgaacggcggccttgggagctccggccttagcaatggcacagggagcaccatggaagctttgactcaggcttactctggcattcagcagtatgccgctgcagccctccccactttatacaatcaaaacttgcttacccagcagtctatcggcgccgctggctcccaaaaggagggtcccgaaggcgcaaacttgttcatttatcacctcccacaggagttcggtgatcaggacctccttcagatgttcatgccattcggaaacgttgtctccgccaaagttttcatcgacaagcagacaaacctcagtaagtgctttggtttcgtgtcatacgataatcctgtgagcgcccaggccgcaatccaaagtatgaatggatttcaaattgggatgaagcgtcttaaggtccaactaaagagatctaagaatgattctaagccctactag

SEQ ID NO: 68198 - DNA, 1458 bp, Artificial Sequence
  derived and/or modified sequence
atgaatggcaccctggaccacccagaccagcctgacctggatgccatcaagatgtttgtgggccaggtgcccaggacctggagcgagaaggacctgcgggagctgtttgagcagtatggagctgtgtatgagatcaacgtgctgcgggacaggagccagaaccccccccagagcaagggctgctgctttgtgaccttctacaccaggaaggccgccctggaggcccagaatgccctgcacaacatgaaggtgctgcccggcatgcaccaccccatccagatgaagccagctgacagcgagaagaacaacgtggaggacaggaagctgttcatcggcatgatcagcaagaagtgcacagaaaatgacatccgggtgatgttcagcagctttggccagattgaagaatgtcgcatcctgcggggcccagatggcctgagccggggctgtgcctttgtgaccttcaccacccgggccatggcccagacagccatcaaggccatgcaccaggcccagaccatggagggctgcagcagccccatggtggtgaagtttgctgacacccagaaggacaaggagcagaagaggatggcccagcagctgcagcagcagatgcagcagatctctgctgcctctgtgtggggcaacctggccggcctgaacaccctgggcccccagtacctggccctgtacctgcagctgctgcagcagacagccagcagcggcaacctgaacaccctgagcagcctgcaccccatgggcggcctgaatgccatgcagctgcagaacctggccgccctggccgctgctgccagcgctgcccagaacacccccagcggcaccaatgccctgaccaccagcagcagccccctgtctgtgctgaccagcagcggcagcagccccagcagcagcagcagcaacagcgtgaaccccatcgccagcctgggcgccctgcagaccctggccggggccacagctggcctgaatgtgggcagcctggccggcatggccgccctgaatggaggcctgggcagcagcggcctgagcaatggaacaggcagcaccatggaggccctgacccaggcctacagcggcatccagcagtatgctgctgctgccctgcccaccctgtacaaccagaacctgctgacccagcagagcattggagctgctggcagccagaaggagggccctgagggcgccaacctcttcatctaccacctgccccaggagtttggagaccaggacctgctgcagatgttcatgccctttggaaatgtggtgtctgccaaggtgttcatcgacaagcagaccaacctgagcaaatgttttggatttgtgtcctatgacaaccctgtgtctgcccaggccgccatccagagcatgaatggcttccagatcggcatgaagaggctgaaggtgcagctgaagaggagcaagaatgacagcaagccctactag

SEQ ID NO: 68199 - DNA, 1458 bp, Artificial Sequence
  derived and/or modified sequence
atgaacggcaccctggaccaccccgaccagcccgacctggacgccataaagatgttcgtggggcaggttcctaggacgtggtccgagaaggatctgagggagctgtttgaacagtacggggcggtgtacgaaataaatgtgctcagggataggagtcagaaccccccgcagtcgaaaggctgttgctttgtcacattttataccagaaaagctgcactggaggctcagaatgctctgcacaacatgaaagtcttgccggggatgcaccacccaattcagatgaaaccagctgactctgaaaaaaacaacgtggaggaccgcaaactgtttatcggcatgatcagcaaaaaatgcaccgaaaatgacattagagtgatgttctcctcatttgggcaaatcgaggagtgtaggatcctccggggcccagacggactcagtcgcgggtgtgcattcgtgaccttcactacaagggccatggcccaaactgctattaaggccatgcatcaggcccagacgatggaaggctgtagtagccccatggtggtgaagttcgccgacactcagaaggacaaggagcaaaagagaatggcacagcaactgcagcagcagatgcagcaaatttccgctgcctccgtgtggggcaatctggctggtctcaacaccctgggtcctcagtatcttgccctgtatttacaacttttacagcagactgcctccagcggtaacttaaatactctgagttctctccatcccatgggcggccttaacgcaatgcaactgcagaatctcgctgcactggccgctgctgcctccgccgctcaaaacactccctccgggacgaatgccctgaccaccagctctagtcctttatccgtgttgacttcctctggaagcagcccaagctcctccagttccaatagtgtcaaccctattgcttcattaggggcattgcaaacactagctggcgcaaccgcgggcctcaatgtcgggtcactggccggcatggccgccctgaacggggggcttggatcttcgggtctgtcaaacggcacagggagcaccatggaagccttgacccaggcctattccggcattcaacagtatgctgctgctgctctgcctacactgtataatcagaatcttttgacccaacaatcaatcggggcagctggttctcagaaggaaggccctgagggtgccaacctttttatatatcatctgccacaggagttcggcgatcaggatctgctccagatgttcatgccattcggcaatgtagtcagtgcaaaagttttcatcgacaagcagaccaatttaagcaagtgctttgggttcgtgagctacgacaaccccgtctcagcccaggcagcaatacaaagcatgaatgggttccaaatcgggatgaaaagactcaaagtccagctaaaacgaagtaagaatgattctaaaccttactag

SEQ ID NO: 68200 - DNA, 1458 bp, Artificial Sequence
  derived and/or modified sequence
atgaatgggacgttggaccaccctgatcagccagatctcgacgccattaaaatgttcgtgggacaggtaccccgaacatggagcgaaaaagatttacgcgaactcttcgagcagtacggggctgtgtacgagattaatgtcctcagggatcggtcccaaaacccccctcagagcaaaggctgctgctttgtcaccttctacactagaaaggccgctttagaagctcaaaacgccctccacaacatgaaggtgttgcctgggatgcatcaccctatccagatgaaaccggcagattctgaaaagaataatgtagaagaccgaaagctgtttatcggtatgatatcaaagaagtgtactgagaacgatatcagagtgatgttctccagcttcggtcaaatcgaggaatgccgcatccttagagggcctgatggtctgtcccgaggatgcgcttttgtaacgttcaccacacgagcaatggcccagactgcgatcaaagctatgcaccaggcccagacaatggaagggtgtagctcacccatggtcgttaagttcgctgacacgcagaaggacaaggagcagaagcgaatggcccagcagttgcagcagcagatgcagcagattagtgccgcaagtgtgtggggcaatctggcaggactgaacacactaggcccacagtatttggctctgtatttacagctgctccaacagactgctagctcaggcaatctaaacacactctcttctctgcatccaatggggggactaaacgccatgcagttgcagaatctggccgctctcgctgcggctgcgtccgctgctcagaatacgccttcgggtacaaacgcactaacgacttctagctccccactgtcggtacttacatccagtggcagctctccaagcagctccagctcaaatagcgttaacccgatcgcctccctaggggcactgcagaccctcgctggggctaccgcaggtctgaatgtcggcagtctggctgggatggctgcacttaatggaggcctgggatcatctggcttatcaaatggtacgggctcaaccatggaagccctcacgcaggcatatagtgggatccaacaatatgctgccgctgccttacctaccctgtataatcaaaatctgctcactcagcagagcataggtgccgctgggagccagaaagagggacccgagggagccaacctctttatctatcacctgcctcaggaattcggtgatcaggatctcttacagatgttcatgcccttcggaaatgtggtgtcggctaaagtgttcatcgacaagcagaccaatttatcaaaatgtttcggttttgtttcatacgacaaccctgttagcgcccaggcagctattcagagcatgaacggatttcagatcggcatgaagcgacttaaagtccagcttaagagaagcaaaaacgactccaaaccatactag

SEQ ID NO: 68201 - protein, 168 aa, Artificial Sequence
  derived and/or modified sequence
MYHDASRWGLTLQTYVQLTMLDRHTRPQVSSVRLMERSIHSARYIFVENLYRSGKMPEVDYVVLSEWFDWILRNMDVSVDLIVYLRTNPETCYQRLKKRCREEEKVIPLEYLEAIHHLHEEWLIKGSLFPMAAPVLVIEADHHMERMLELFEQNRDRILTPENRKHCP

SEQ ID NO: 68202 - protein, 234 aa, Artificial Sequence
  derived and/or modified sequence
MGAFCQRPSSDKEQEKEKKSVICVEGNIASGKTTCLEFFSNATDVEVLTEPVSKWRNVRGHNPLGLMYHDASRWGLTLQTYVQLTMLDRHTRPQVSSVRLMERSIHSARYIFVENLYRSGKMPEVDYVVLSEWFDWILRNMDVSVDLIVYLRTNPETCYQRLKKRCREEEKVIPLEYLEAIHHLHEEWLIKGSLFPMAAPVLVIEADHHMERMLELFEQNRDRILTPENRKHCP

SEQ ID NO: 68203 - DNA, 705 bp, Artificial Sequence
  derived and/or modified sequence
atgggcgccttctgccagagacccagcagcgacaaggagcaggagaaggagaagaagagcgtgatctgcgtggagggcaacatcgccagcggcaagaccacctgcctggagttcttcagcaacgccaccgacgtggaggtgctgaccgagcccgtgagcaagtggagaaacgtgagaggccacaaccccctgggcctgatgtaccacgacgccagcagatggggcctgaccctgcagacctacgtgcagctgaccatgctggacagacacaccagaccccaggtgagcagcgtgagactgatggagagaagcatccacagcgccagatacatcttcgtggagaacctgtacagaagcggcaagatgcccgaggtggactacgtggtgctgagcgagtggttcgactggatcctgagaaacatggacgtgagcgtggacctgatcgtgtacctgagaaccaaccccgagacctgctaccagagactgaagaagagatgcagagaggaggagaaggtgatccccctggagtacctggaggccatccaccacctgcacgaggagtggctgatcaagggcagcctgttccccatggccgcccccgtgctggtgatcgaggccgaccaccacatggagagaatgctggagctgttcgagcagaacagagacagaatcctgacccccgagaacagaaagcactgcccctag

SEQ ID NO: 68204 - DNA, 705 bp, Artificial Sequence
  derived and/or modified sequence
atgggcgctttttgccagcggccatccagcgataaggagcaggagaaggaaaagaagagcgtgatttgtgttgagggcaacatagcctcgggtaagacgacgtgtctagagttcttcagcaacgctaccgatgttgaggttctcactgaaccagtgagtaaatggcggaacgttcgggggcacaaccccctcgggttaatgtaccacgacgcatcaaggtggggattgacgttacagacttacgtccaattaacaatgttagaccgccatactcggccccaggtgagttccgtcaggctgatggagagatccattcattcggcacgttacatattcgtggagaacctgtataggtccggaaagatgccagaagttgactatgtagttttgtccgaatggtttgactggattctccgaaatatggatgttagtgtcgacctgatagtctacctacggacaaatccggaaacgtgctatcagcgcctgaaaaagcgatgcagagaagaggagaaggtgatcccattagaatacctcgaggcaattcatcacctccatgaggagtggctgattaaagggagcttgtttcccatggctgctccagtgcttgtcatcgaagcggatcatcacatggagaggatgttggagctctttgaacaaaatcgggacaggattctgactcctgaaaaccgtaagcattgtccctag

SEQ ID NO: 68205 - DNA, 705 bp, Artificial Sequence
  derived and/or modified sequence
atgggcgccttctgccagaggcccagcagtgacaaggagcaggagaaggagaagaagagcgtcatctgtgtggagggcaacatcgccagcggcaagaccacctgcctggagttcttcagcaatgccacagatgtggaggtgctgacagagcctgtgtccaagtggagaaatgtgcggggccacaaccccctgggcctgatgtaccatgatgccagccgctggggcctgaccctgcagacctacgtgcagctgaccatgctggacagacacacccggccccaggtgtcctctgtgcggctgatggagaggagcatccacagcgcccgctacatctttgtggagaacctgtacagaagtggcaagatgcctgaggtggactatgtggtgctgtctgagtggtttgactggatcctgaggaacatggatgtgtctgtggacctgattgtgtacctgcggaccaaccctgagacctgctaccagaggctgaagaagcgctgccgggaggaggagaaggtgatccccctggagtacctggaggccatccaccacctgcacgaggagtggctgatcaagggcagcctcttccccatggccgcccctgtgctggtgattgaggccgaccaccacatggagaggatgctggagctgtttgagcagaacagagaccgcatcctgaccccagagaacaggaagcactgcccctag

SEQ ID NO: 68206 - DNA, 705 bp, Artificial Sequence
  derived and/or modified sequence
atgggcgccttctgccagcggcccagcagcgacaaggagcaggagaaggagaaaaaatcagtgatatgcgtggagggcaacatcgcgagtggaaagacgacatgtctggagtttttctctaatgcaactgatgtagaagtgcttacagagcctgtttcgaaatggagaaacgtgaggggacataaccctttaggcctgatgtaccacgacgcaagtagatggggcctgacactgcaaacgtacgtgcaattgaccatgctggatagacacactaggccacaggtctcctccgtacgattgatggagcggagcattcactctgcaagatacatttttgtcgagaatctctatagatctgggaaaatgcctgaggtagattatgttgtgctctctgagtggttcgattggattctccgtaatatggacgtctcagtggatctgatcgtatacttgcgaaccaatccagaaacttgctaccagcgcctgaagaagcgctgtagggaggaggagaaggtgattcctcttgaatatttagaggcaattcaccacctacacgaggaatggttgataaaaggcagcctgttccctatggccgcccctgtactggtgatagaggccgatcaccatatggagcgcatgttggagttgttcgaacaaaatcgggatcggattctcacaccagaaaacagaaagcactgcccctag

SEQ ID NO: 68207 - DNA, 705 bp, Artificial Sequence
  derived and/or modified sequence
atgggcgcattttgtcaacgcccttcgtccgacaaggagcaggagaaagagaagaagtcagtgatatgtgtagagggcaacatcgcatcagggaagacaacttgtctcgaatttttttcaaatgccacggacgtggaggtcctcactgaaccagtttcaaaatggcggaatgtgcgcggtcataaccctctaggcctgatgtatcatgatgctagcaggtgggggctcaccctacagacctacgtgcaactgactatgctcgaccggcatacccgcccacaggttagcagcgtgcgtctgatggagagatccatccactcagctcgatatatcttcgtcgaaaatctgtatcgaagcggaaagatgcccgaggtagactacgtcgtgctgagcgaatggttcgactggattctccgcaacatggacgtcagcgtggatctgatcgtctacttgaggacaaaccccgaaacctgctaccagagacttaagaaacgatgtagagaagaggagaaggtcattcctcttgagtacttggaggcaattcatcatctgcacgaggaatggctgataaaagggagcctattcccgatggctgcaccggttctcgtgatcgaggccgatcatcatatggaacgaatgctggagttgttcgagcagaatcgggataggattcttacaccagaaaaccgcaaacactgtccctag

SEQ ID NO: 68208 - DNA, 1178 bp, Artificial Sequence
  derived and/or modified sequence
tttcctccccggctgcggctgggacgggggcggccatcggccgttacccgggcgcgagaccgcagcgagcgctgggggcgctcggctttggttctgggatggagagagggcctttaaagagcaggacggacacgctctgaacattccggcccaaactcggtcccccgacccatttcctgtcccgattctttcgaccttgggggcgatggggactgggagctgccttaagccgattctgctcacactctgataaagaacaggaaaaagagaaaaaatcagtgatctgtgtcgagggcaatattgcaagtgggaagacgacatgcctggaattcttctccaacgcgacagacgtcgaggtgttaacggagcctgtgtccaagtggagaaatgtccgtggccacaatcctctgggcctgatgtaccacgatgcctctcgctggggtcttacgctacagacttatgtgcagctcaccatgctggacaggcatactcgtcctcaggtgtcatctgtacggttgatggagaggtcgattcacagcgcaagatacatttttgtagaaaacctgtatagaagtgggaagatgccagaagtggactatgtagttctgtcggaatggtttgactggatcttgaggaacatggacgtgtctgttgatttgatagtttaccttcggaccaatcctgagacttgttaccagaggttaaagaagagatgcagggaagaggagaaggtcattccgctggaatacctggaagcaattcaccatctccatgaggagtggctcatcaaaggcagccttttccccatggcagcccctgttctggtgattgaggctgaccaccacatggagaggatgttagaactctttgaacaaaatcgggatcgaatattaactccagagaatcggaagcattgcccataggaggcaaaaggtctatggctcatgtctgaaaaatgcctgctgctgccaagttagctattgggagcaatctggaaaaacttgctcccaggagggctttgtgtctggccagcttgattttcctaatggtctcatctcctttgctagtgtctttgtcatgcgtctctggccctcgtgggtaaatgacaaacgggaccaatgggtttgccaagccctttgctgttcgcagcctcacattcccccggtgcctctcccatg

SEQ ID NO: 68209 - DNA, 1937 bp, Artificial Sequence
  derived and/or modified sequence
gccaagttatgggtgcgttctgccagcgtcctagcagtgataaagaacaggaaaaagagaaaaaatcagtgatctgtgtcgagggcaatattgcaagtgggaagacgacatgcctggaattcttctccaacgcgacagacgtcgaggtgttaacggagcctgtgtccaagtggagaaatgtccgtggccacaatcctctgggcctgatgtaccacgatgcctctcgctggggtcttacgctacagacttatgtgcagctcaccatgctggacaggcatactcgtcctcaggtgtcatctgtacggttgatggagaggtcgattcacagcgcaagatacatttttgtagaaaacctgtatagaagtgggaagatgccagaagtggactatgtagttctgtcggaatggtttgactggatcttgaggaacatggacgtgtctgttgatttgatagtttaccttcggaccaatcctgagacttgttaccagaggttaaagaagagatgcagggaagaggagaaggtcattccgctggaatacctggaagcaattcaccatctccatgaggagtggctcatcaaaggcagccttttccccatggcagcccctgttctggtgattgaggctgaccaccacatggagaggatgttagaactctttgaacaaaatcgggatcgaatattaactccagagaatcggaagcattgcccataggaggcaaaaggtctatggctcatgtctgaaaaatgcctgctgctgccaagttagctattgggagcaatctggaaaaacttgctcccaggagggctttgtgtctggccagcttgattttcctaatggtctcatctcctttgctagtgtctttgtcatgcgtctctggccctcgtgggtaaatgacaaacgggaccaatgggtttgccaagccctttgctgttcgcagcctcacattcccccggtgcctctcccatggctttgtgctgctgagtcgctctcatgaagcccttagggagagcacctgttgtgtgcctgacaccacgctggagctgtgtaccaatcgtctcagccttcattaggaggccgaggtaggagtcttatatcccaggtgaggaatttgaagctcagaaaggttgaggggctccccagaggtcacacagcctgtgtgcagtggagctggcaccattcagactttcagccgactcagcaactttcccttgccctgggctgcctcctcctgagagctgttccccaccgccctgcctcttccggttggaggctctcatgtctctttggggagagctggcagtgtgcggagctgataacattttcccaatattgagcagttcccaaggacagtcagcatttctagacttccacaaaattatgctgcatttggctggagcccggtgttcagtggtttccctgcccgaggtcgctgcagccccatctaccacatcttcatgtggacattgagattcacatgctggctcctgaagggtgctcagtctccttggtgattaaggtcctgcttgaactgctgccaactccatgtcagggaagtcgcttttggtgcctggctggtttgcccagagccaagctggggcaaggggcagccagccctggcttccaaggctcccgtactgtctgtgtccttgtataaggagctttgctcttggaattactgaaagtctgtggcccaagagagagacacaagtggccttaagtctttttgaagtgttatttcatccagggaaatgcctcgagccatagagcctgaaatcatctttgttggctcagaaaataccttagcttcactcagctggactgcattgaaggcgaggctgccccttggatcaagcagaaaacaagagaaagaaagaacgttccctttggggatagtctggaaagttgggatttgcaaataaaggctctggaagcatt

SEQ ID NO: 68210 - DNA, 2687 bp, Artificial Sequence
  derived and/or modified sequence
gggcggccatcggccgttacccgggcgcgagaccgcagcgagcgctgggggcgctcggctttggttctgggatggagagagggcctttaaagagcaggacggacacgctctgaacattccggcccaaactcggtcccccgacccatttcctgtcccgattctttcgaccttgggggcgatggggactgggagctgccttaagccgattctgctcacactctggtgccagcgtgggggaggggggttacgcccccggcgctctcctgccctccctgggagtggggacccacacagaaacgggtcactgttacacccgggttctggtgtccgccatatggctgttgagagacgcctcagaaccacctgtgggacggatgggcagcgatgcccgccctgggcctagaggaacacctgggtcccaggcccaaaaccacgtccgccgcccactcttccccgtgcaccgcgagtggaggctgttctgcctttccacttgcttaacatccagtctgtgaagatctaaataaataacgtggaaaatgcaaagtataatgtactaagtgaaagaactcgagcacactgggggtccacgaagctgcagctgcagcccagggtggcacatcggcgagacggtggtgcgcgcctccaatctcggagggcgcccaaaatggaaaatgtttttaggccagggagtgagcataaacattagtgtttttgtggtcatgtagcaaattagggcagaggagagttatttaaaagtgagtttaaaaactgatttcctttcttttgtagataaagaacaggaaaaagagaaaaaatcagtgatctgtgtcgagggcaatattgcaagtgggaagacgacatgcctggaattcttctccaacgcgacagacgtcgaggtgttaacggagcctgtgtccaagtggagaaatgtccgtggccacaatcctctgggcctgatgtaccacgatgcctctcgctggggtcttacgctacagacttatgtgcagctcaccatgctggacaggcatactcgtcctcaggtgtcatctgtacggttgatggagaggtcgattcacagcgcaagatacatttttgtagaaaacctgtatagaagtgggaagatgccagaagtggactatgtagttctgtcggaatggtttgactggatcttgaggaacatggacgtgtctgttgatttgatagtttaccttcggaccaatcctgagacttgttaccagaggttaaagaagagatgcagggaagaggagaaggtcattccgctggaatacctggaagcaattcaccatctccatgaggagtggctcatcaaaggcagccttttccccatggcagcccctgttctggtgattgaggctgaccaccacatggagaggatgttagaactctttgaacaaaatcgggatcgaatattaactccagagaatcggaagcattgcccataggaggcaaaaggtctatggctcatgtctgaaaaatgcctgctgctgccaagttagctattgggagcaatctggaaaaacttgctcccaggagggctttgtgtctggccagcttgattttcctaatggtctcatctcctttgctagtgtctttgtcatgcgtctctggccctcgtgggtaaatgacaaacgggaccaatgggtttgccaagccctttgctgttcgcagcctcacattcccccggtgcctctcccatggctttgtgctgctgagtcgctctcatgaagcccttagggagagcacctgttgtgtgcctgacaccacgctggagctgtgtaccaatcgtctcagccttcattaggaggccgaggtaggagtcttatatcccaggtgaggaatttgaagctcagaaaggttgaggggctccccagaggtcacacagcctgtgtgcagtggagctggcaccattcagactttcagccgactcagcaactttcccttgccctgggctgcctcctcctgagagctgttccccaccgccctgcctcttccggttggaggctctcatgtctctttggggagagctggcagtgtgcggagctgataacattttcccaatattgagcagttcccaaggacagtcagcatttctagacttccacaaaattatgctgcatttggctggagcccggtgttcagtggtttccctgcccgaggtcgctgcagccccatctaccacatcttcatgtggacattgagattcacatgctggctcctgaagggtgctcagtctccttggtgattaaggtcctgcttgaactgctgccaactccatgtcagggaagtcgcttttggtgcctggctggtttgcccagagccaagctggggcaaggggcagccagccctggcttccaaggctcccgtactgtctgtgtccttgtataaggagctttgctcttggaattactgaaagtctgtggcccaagagagagacacaagtggccttaagtctttttgaagtgttatttcatccagggaaatgcctcgagccatagagcctgaaatcatctttgttggctcagaaaataccttagcttcactcagctggactgcattgaaggcgaggctgccccttggatcaagcagaaaacaagagaaagaaagaacgttccctttggggatagtctggaaagttgggatttgcaaataaaggctctggaagcatt

SEQ ID NO: 68211 - protein, 240 aa, Artificial Sequence
  derived and/or modified sequence
MLLWPLRGWAARALRCFGPGSRGSPASGPGPRRVQRRAWPPDKEQEKEKKSVVLTEPVSKWRNVRGHNPLGLMYHDASRWGLTLQTYVQLTMLDRHTRPQVSSVRLMERSIHSARYIFVENLYRSGKMPEVDYVVLSEWFDWILRNMDVSVDLIVYLRTNPETCYQRLKKRCREEEKVIPLEYLEAIHHLHEEWLIKGSLFPMAAPVLVIEADHHMERMLELFEQNRDRILTPENRKHCP

SEQ ID NO: 68212 - DNA, 723 bp, Artificial Sequence
  derived and/or modified sequence
atgctgctgtggcccctgagaggctgggccgccagagccctgagatgcttcggccccggcagcagaggcagccccgccagcggccccggccccagaagagtgcagagaagagcctggccccccgacaaggagcaggagaaggagaagaagagcgtggtgctgaccgagcccgtgagcaagtggagaaacgtgagaggccacaaccccctgggcctgatgtaccacgacgccagcagatggggcctgaccctgcagacctacgtgcagctgaccatgctggacagacacaccagaccccaggtgagcagcgtgagactgatggagagaagcatccacagcgccagatacatcttcgtggagaacctgtacagaagcggcaagatgcccgaggtggactacgtggtgctgagcgagtggttcgactggatcctgagaaacatggacgtgagcgtggacctgatcgtgtacctgagaaccaaccccgagacctgctaccagagactgaagaagagatgcagagaggaggagaaggtgatccccctggagtacctggaggccatccaccacctgcacgaggagtggctgatcaagggcagcctgttccccatggccgcccccgtgctggtgatcgaggccgaccaccacatggagagaatgctggagctgttcgagcagaacagagacagaatcctgacccccgagaacagaaagcactgcccctag

SEQ ID NO: 68213 - DNA, 723 bp, Artificial Sequence
  derived and/or modified sequence
atgctgctgtggcccctccgaggttgggccgccagagcacttcggtgttttggtcctggatcacgaggctctccggcctccggccccgggcccagaagagtgcagaggcgcgcctggcccccagataaggaacaggagaaggaaaaaaagtccgtggttctcaccgaaccagtctcaaagtggaggaatgtgcgggggcacaatccacttggactgatgtaccacgacgcttcacgctggggtctgacgctccagacttatgttcagttgacaatgctagacagacatacccgccctcaggtaagcagcgtgagacttatggagcgtagtatccatagtgctaggtacatatttgtcgagaacctttaccgcagcggcaaaatgccagaggtggactatgtggtgctctccgaatggttcgattggatactgcggaacatggacgtttctgttgatttaatagtttatttgagaacaaatccagagacatgctatcagcggctgaagaagcggtgtagagaagaggaaaaagttatacccctcgagtacctggaagccatccatcaccttcatgaggaatggctgataaaaggtagcctgttccccatggcagcgcctgtgctcgttatcgaggcagatcatcatatggagaggatgttggaactcttcgagcagaaccgagatcgcatcctaacccctgagaataggaaacattgtccgtag

SEQ ID NO: 68214 - DNA, 723 bp, Artificial Sequence
  derived and/or modified sequence
atgctgctgtggcccctgcggggctgggccgcccgggccctgcgctgctttggacctggcagccggggcagccctgccagcggccctggcccccggcgggtgcagaggcgggcctggcccccagacaaggagcaggagaaggagaagaagtctgtggtgctgacagagcctgtgtccaagtggagaaatgtgcggggccacaaccccctgggcctgatgtaccatgatgccagccgctggggcctgaccctgcagacctacgtgcagctgaccatgctggacagacacacccggccccaggtgtcctctgtgcggctgatggagaggagcatccacagcgcccgctacatctttgtggagaacctgtacagaagtggcaagatgcctgaggtggactatgtggtgctgtctgagtggtttgactggatcctgaggaacatggatgtgtctgtggacctgattgtgtacctgcggaccaaccctgagacctgctaccagaggctgaagaagcgctgccgggaggaggagaaggtgatccccctggagtacctggaggccatccaccacctgcacgaggagtggctgatcaagggcagcctcttccccatggccgcccctgtgctggtgattgaggccgaccaccacatggagaggatgctggagctgtttgagcagaacagagaccgcatcctgaccccagagaacaggaagcactgcccctag

SEQ ID NO: 68215 - DNA, 723 bp, Artificial Sequence
  derived and/or modified sequence
atgctgctgtggcccctgcggggctgggccgcccgggccctgcggtgctttggcccaggatcccgcggcagccccgcaagcggccctggcccaagacgagtgcaaagacgggcctggccccctgacaaggaacaagagaaggaaaagaaaagtgtcgtacttaccgagcctgttagtaagtggaggaacgtccggggtcacaaccccctcggtctgatgtaccacgatgccagtcgttggggcctcactctgcagacatatgtgcagctgacaatgctcgaccggcacactcgcccccaggtctccagtgtgcgcttaatggaacgctctattcatagcgctcgttatatttttgtagagaatttgtaccggtccggcaaaatgcctgaggtggactacgtggttttgtcagagtggtttgattggatcctgcgcaatatggacgtatcagtcgatctcatcgtctatctaaggacaaacccggagacgtgctaccagagactcaaaaaacgttgccgcgaggaggaaaaggtgatcccgctggaatatctcgaggcgatccatcatcttcatgaagagtggttgattaagggttcgctgttcccgatggctgctcctgtcctggttatagaagctgatcatcatatggagcgaatgctcgagctgtttgaacagaaccgtgaccgaattttgacgccagagaacagaaaacattgtccatag

SEQ ID NO: 68216 - DNA, 723 bp, Artificial Sequence
  derived and/or modified sequence
atgctcctgtggcccctgcggggttgggctgccagagccctgcgctgctttggcccaggatcccgtgggtctccagcaagtgggccagggcctcgcagggtgcagagacgagcttggccaccagataaggaacaagaaaaagaaaaaaagtctgtggttttgaccgagcccgtgagcaaatggcgaaatgtcagaggacataaccctctggggctcatgtaccacgacgcttctcgctggggtctcacactccagacttatgttcagttgacaatgcttgatcgacacaccagacctcaggtgagttccgtccggctgatggaacgttccattcattctgccaggtacatcttcgtggagaacttatatcgctcagggaagatgcccgaggttgattatgtcgttctgagtgaatggttcgattggatcctgcgaaacatggatgtttctgtggatctcatcgtgtaccttaggacaaatcctgaaacatgctaccagagactcaagaaaaggtgtagggaagaagaaaaagtgattcctctggagtacctagaggctatccaccatttgcacgaggagtggctaatcaaggggtctctgttccccatggccgcacccgtcttggtgatcgaggctgaccaccatatggaaagaatgctggaattgtttgagcagaacagggaccgaatcctgaccccagaaaacagaaaacactgcccatag

SEQ ID NO: 68217 - DNA, 5039 bp, Artificial Sequence
  derived and/or modified sequence
ggaataagtgacatcatgagtgtgtgccaggtgtctgattacagaaggtgttcaattaatctgcaatcattaattaacccttcagtcgctggtattatttgccatccatcctccgagtgttgccaagttatgggtgcgttctgccagcgtcctagcagtggtaaggcttctggctgccagcggcgaacctctcccttcgagtatttctcctcttgctgagatgaaatgcgaccgggtctctttaagggccaggcgccgggatccaggcggcgcccaacggctggactagcagtcgtccgcgccgactcgcacaagaaggaaccccgggcctctggatccgctcgcccggctatgctgctgtggccgctgcggggctgggccgcccgggcgctgcgctgctttgggccgggaagtcgcgggagcccggcctcaggccccgggccgcggagggtgcagcgccgggcctggcctcccgataaagaacaggaaaaagagaaaaaatcagtggtgttaacggagcctgtgtccaagtggagaaatgtccgtggccacaatcctctgggcctgatgtaccacgatgcctctcgctggggtcttacgctacagacttatgtgcagctcaccatgctggacaggcatactcgtcctcaggtgtcatctgtacggttgatggagaggtcgattcacagcgcaagatacatttttgtagaaaacctgtatagaagtgggaagatgccagaagtggactatgtagttctgtcggaatggtttgactggatcttgaggaacatggacgtgtctgttgatttgatagtttaccttcggaccaatcctgagacttgttaccagaggttaaagaagagatgcagggaagaggagaaggtcattccgctggaatacctggaagcaattcaccatctccatgaggagtggctcatcaaaggcagccttttccccatggcagcccctgttctggtgattgaggctgaccaccacatggagaggatgttagaactctttgaacaaaatcgggatcgaatattaactccagagaatcggaagcattgcccataggaggcaaaaggtctatggctcatgtctgaaaaatgcctgctgctgccaagttagctattgggagcaatctggaaaaacttgctcccaggagggctttgtgtctggccagcttgattttcctaatggtctcatctcctttgctagtgtctttgtcatgcgtctctggccctcgtgggtaaatgacaaacgggaccaatgggtttgccaagccctttgctgttcgcagcctcacattcccccggtgcctctcccatggctttgtgctgctgagtcgctctcatgaagcccttagggagagcacctgttgtgtgcctgacaccacgctggagctgtgtaccaatcgtctcagccttcattaggaggccgaggtaggagtcttatatcccaggtgaggaatttgaagctcagaaaggttgaggggctccccagaggtcacacagcctgtgtgcagtggagctggcaccattcagactttcagccgactcagcaactttcccttgccctgggctgcctcctcctgagagctgttccccaccgccctgcctcttccggttggaggctctcatgtctctttggggagagctggcagtgtgcggagctgataacattttcccaatattgagcagttcccaaggacagtcagcatttctagacttccacaaaattatgctgcatttggctggagcccggtgttcagtggtttccctgcccgaggtcgctgcagccccatctaccacatcttcatgtggacattgagattcacatgctggctcctgaagggtgctcagtctccttggtgattaaggtcctgcttgaactgctgccaactccatgtcagggaagtcgcttttggtgcctggctggtttgcccagagccaagctggggcaaggggcagccagccctggcttccaaggctcccgtactgtctgtgtccttgtataaggagctttgctcttggaattactgaaagtctgtggcccaagagagagacacaagtggccttaagtctttttgaagtgttatttcatccagggaaatgcctcgagccatagagcctgaaatcatctttgttggctcagaaaataccttagcttcactcagctggactgcattgaaggcgaggctgccccttggatcaagcagaaaacaagagaaagaaagaacgttccctttggggatagtctggaaagttgggatttgcaaataaaggctctggaagcattgctggtcctgaagctttggaggtgggcagagagagcttcaagaagactagatgcaaaccctggaaaggattaaggctcaactctggagaaacaggccacagcctctcagagcagctgttggctgtaaatagaggtagcaaggccgctcccaggcccctgtgagtgtgggcacctgtgcatgcaatgctccgactctgcagaggtgccaagtgcccctgctgggccagtcccagagagttaggaagtcaaggcctgcaactcctggttcttcctgtttggaccagttcttgtgccattggcaggatgagaggcagcagccaggcgggagctgtgtctagcagcacctgtagcccacgtgctgctaattagctggaaaactggcgaaggcagaacctttgctaccaggaatcttgacatgtggggtctgtctttgagaatttgtaaatgaacagtccaatatttcctctcggctcattttgcacatccatttttggggaaatgtgatttctctctctttttttttttttttttttgcctaaggcacaatctcaagaggtcctgagaccacgtacccatgatttttttcttgctctgtgatacccaataactccttcacctaagccctgttgttgattttgaagtgcttcctaggccagtgattttagcttctgccagctgcttttgccagtagattaacgtgtttttatttttcaaactccgtgtttcctaacgtggagtgtatgggtctaagagagcctgctgtcctccctgccttccaccttggagaggaggctggacgcatcagcagtggccagggcaggtcgcaaaatctcccagcctagagaccacacctgaaacggctgaagccagcttgcacaagggctgctgtccctctgcggcaggcagagctggtgggggcaggggtcacagagcagtcatagacaccatggaccagggcaggagaagggcagatggcacatgggcacaacagggccttgtccttagagcactggggggtcatggctgggaggggcatggcaggggctggcatccctgtagagccagaggggccacccagggcagtgacattccagatatgttgggctcacctcatccttgctgtgagactggagttccatggggacatgaagtcagtacaccgcagagctgctcagctgctctacctctcgctgacttttttgttgcacatatacattttctttcaattagcatttatttcagcttttatttaagctttttgacagtacatgtaaaatatatgattataaccatttaaaaataccttatgtacctggttttttttggaaactagatagaaatatatttatcttttacataaaagaagtgtgtagtggggtggtccagggctttgtggtggcttagtggccatcggggtcccaggctcttcccacctttctcttttgggtccacctcttggctcctggcttccttcctctggggcctgactgtccaggatggcagctggagctcctgctctgggcacggttggcatcagagcccactgctccccatccactctttaatccagatgctggtaatgtccctttccaaggcataactaagataagctggaaggttcttacgaggctttgctagaggccctgggaggtggggggaaaggcaagagggcagtgcccacccatagaccgggtcacatgacctggcatcagcgccgtggggtcctttgggcttcacctccctctcccctctgcccccacgtcatcccaccctcatcctcaccctcaccattcccatcccgtaccgtaatgtcccttgcaaggcctaactctgtgaggaatgaaaccacctcatccttgttccaataacatgagtgaccgaatttacaaacgagtgaatgtggacctctggaaacattacccagcttgtttttacttttcactttctctttctgcccctttcatttccgtaggagccctttacctagatgagaagtgtccccccgcctggggaatatatcagtcagaacaatcttcctgcagacatgcaccattagacccgagtgacggtggtgccatttaaacctcagagcaggtaaaaggtggtcctgaaacctgtctacccacagggtgctatggaatctgaatcacttcttttttcctagagccctggggtggggagctccctcaagtgttcacatgtgtgtggaatgaggaacacccatctccttggccctctccaccctgaagagttagttattaaaataattggcaagctcttgcaaatgtcagtcatccattgttcagaatggaatagcaataatacatccctggctgccctgggcttggccaggattactcactgaaggcctcagggttactggcacacactttcttttcctaataatcccatcccctcagctttcctaaggctagagtgaatttcgtgttcctttagtttacataagatggtgaacttggcaaaagctatcattaaacagaagctaagagaaagcctatgtcgtggaatccagaatgggtattgccattcactgctgtccacagaagctgtcttgaatttctttctgtgtcttttctttttttttctttaagactgttgtttaccagactgggctctgtggaacacaggtgtcctgggagatggttaatcattacaaaatattggtaacaatctaaagatgcatacataagagagtggtcaaataaaccattttccattca

SEQ ID NO: 68218 - protein, 247 aa, Artificial Sequence
  derived and/or modified sequence
MLLWPLRGWAARALRCFGPGSRGSPASGPGPRRVQRRAWPPDKEQEKEKKSVICVEGNIASGKTTCLEFFSNATDVEGLMYHDASRWGLTLQTYVQLTMLDRHTRPQVSSVRLMERSIHSARYIFVENLYRSGKMPEVDYVVLSEWFDWILRNMDVSVDLIVYLRTNPETCYQRLKKRCREEEKVIPLEYLEAIHHLHEEWLIKGSLFPMAAPVLVIEADHHMERMLELFEQNRDRILTPENRKHCP

SEQ ID NO: 68219 - DNA, 744 bp, Artificial Sequence
  derived and/or modified sequence
atgctgctgtggcccctgagaggctgggccgccagagccctgagatgcttcggccccggcagcagaggcagccccgccagcggccccggccccagaagagtgcagagaagagcctggccccccgacaaggagcaggagaaggagaagaagagcgtgatctgcgtggagggcaacatcgccagcggcaagaccacctgcctggagttcttcagcaacgccaccgacgtggagggcctgatgtaccacgacgccagcagatggggcctgaccctgcagacctacgtgcagctgaccatgctggacagacacaccagaccccaggtgagcagcgtgagactgatggagagaagcatccacagcgccagatacatcttcgtggagaacctgtacagaagcggcaagatgcccgaggtggactacgtggtgctgagcgagtggttcgactggatcctgagaaacatggacgtgagcgtggacctgatcgtgtacctgagaaccaaccccgagacctgctaccagagactgaagaagagatgcagagaggaggagaaggtgatccccctggagtacctggaggccatccaccacctgcacgaggagtggctgatcaagggcagcctgttccccatggccgcccccgtgctggtgatcgaggccgaccaccacatggagagaatgctggagctgttcgagcagaacagagacagaatcctgacccccgagaacagaaagcactgcccctag

SEQ ID NO: 68220 - DNA, 744 bp, Artificial Sequence
  derived and/or modified sequence
atgttgctatggcctctccgcggctgggcggctcgagcactgaggtgctttggccctggttcccgaggcagtcctgccagtggacccgggcctcggcgagtgcagagacgggcctggccccctgacaaagaacaggagaaggaaaagaagtccgtcatttgcgtggagggcaatattgcctccggaaaaacgacttgtctcgaattcttctcaaatgccaccgatgttgagggactgatgtatcatgatgctagtagatggggattgaccctacagacctatgtgcagttaacaatgttagacaggcacactcgaccccaggtcagcagtgtgcgcttgatggaacgctcgattcactcggccaggtacatctttgtagagaacctctaccgcagtgggaagatgccagaagttgattacgtggtcctcagcgagtggttcgactggattctgcgcaacatggacgttagtgtggatctcatcgtgtatctaaggacgaaccccgagacctgttaccagcgcctgaagaagcgctgtcgcgaagaggaaaaggttataccgctggagtacctggaagccattcatcatctgcacgaagagtggctcattaaaggatctctgtttccaatggctgcccctgtcctggtcatcgaagccgatcaccacatggagagaatgctcgagctttttgaacagaacagggatcggatactgacgcccgagaacaggaaacactgtccatag

SEQ ID NO: 68221 - DNA, 744 bp, Artificial Sequence
  derived and/or modified sequence
atgctgctgtggcccctgcggggctgggccgcccgggccctgcgctgctttggacctggcagccggggcagccctgccagcggccctggcccccggcgggtgcagaggcgggcctggcccccagacaaggagcaggagaaggagaagaagagcgtcatctgtgtggagggcaacatcgccagcggcaagaccacctgcctggagttcttcagcaatgccacagatgtggagggcctgatgtaccatgatgccagccgctggggcctgaccctgcagacctacgtgcagctgaccatgctggacagacacacccggccccaggtgtcctctgtgcggctgatggagaggagcatccacagcgcccgctacatctttgtggagaacctgtaccgcagcggcaagatgcctgaggtggactatgtggtgctgtctgagtggtttgactggatcctgaggaacatggatgtgtctgtggacctgattgtgtacctgcggaccaaccctgagacctgctaccagaggctgaagaagcgctgccgggaggaggagaaggtgatccccctggagtacctggaggccatccaccacctgcacgaggagtggctgatcaagggcagcctcttccccatggccgcccctgtgctggtgattgaagctgaccaccacatggagaggatgctggagctgtttgagcagaacagagaccgcatcctgaccccagaaaataggaagcactgcccctag

SEQ ID NO: 68222 - DNA, 744 bp, Artificial Sequence
  derived and/or modified sequence
atgctgctgtggcccctgcggggctgggccgcccgggccctgcggtgtttcggcccaggatccaggggaagccctgccagtggcccagggccaagacgcgttcaaaggcgagcctggcctcccgataaagagcaagaaaaagaaaaaaagtcggtgatatgcgtggaaggtaacattgccagcggcaagacgacatgtctggagtttttctcaaacgctaccgacgttgaaggccttatgtatcacgatgcatcccgatgggggttgacccttcagacttacgtccagctaaccatgctggatcggcatacccgccctcaggtttcatctgtgcggctgatggaaagatcaattcactctgcccggtacatctttgtggaaaatctataccggtccggaaaaatgcctgaagtcgattacgtagtgctgagtgaatggttcgattggatcctgagaaatatggacgtctccgtagatttgatagtgtatcttagaactaatcccgagacctgctaccaaagacttaagaagcgatgccgggaagaagagaaagtcattcctctcgaatatctcgaagccatccatcacttgcatgaggagtggctgatcaagggaagcctattccctatggctgctccggtactcgttatagaggccgaccatcatatggagcggatgctcgagctgttcgagcaaaatagagataggattctgacccccgaaaacagaaagcattgtccgtag

SEQ ID NO: 68223 - DNA, 744 bp, Artificial Sequence
  derived and/or modified sequence
atgttgctgtggcccctacggggttgggcagcacgggcacttcgctgctttggacccggttccaggggcagccccgcttcggggccaggccctagacgagtccaacgacgtgcatggccccctgataaagagcaggaaaaagagaaaaagagtgtgatttgtgtagagggaaacattgccagtggtaagacgacctgcctggagttctttagcaacgctacagatgtggaaggactaatgtaccacgacgctagtaggtggggactaacccttcagacgtatgtgcagctgacaatgctagataggcacacgcggccacaggtgtctagtgtgaggctgatggagcggtccatccacagcgcaaggtacatattcgtcgaaaatctgtaccggagtggtaaaatgcctgaggttgactatgtagttcttagcgagtggttcgactggatcctgcgtaacatggacgtgtctgttgatctgatagtttatttgcgaacaaaccctgaaacatgctaccaaaggctaaaaaagcgctgcagggaagaggagaaggtaatccctcttgaatacctcgaggccattcatcacctacacgaggagtggctcatcaaaggctcactttttccgatggctgccccagtgctggtcattgaggctgaccaccacatggagagaatgctggagctgttcgaacaaaatagagacaggattctaacccctgaaaataggaaacattgcccctag

SEQ ID NO: 68224 - DNA, 5060 bp, Artificial Sequence
  derived and/or modified sequence
ggaataagtgacatcatgagtgtgtgccaggtgtctgattacagaaggtgttcaattaatctgcaatcattaattaacccttcagtcgctggtattatttgccatccatcctccgagtgttgccaagttatgggtgcgttctgccagcgtcctagcagtggtaaggcttctggctgccagcggcgaacctctcccttcgagtatttctcctcttgctgagatgaaatgcgaccgggtctctttaagggccaggcgccgggatccaggcggcgcccaacggctggactagcagtcgtccgcgccgactcgcacaagaaggaaccccgggcctctggatccgctcgcccggctatgctgctgtggccgctgcggggctgggccgcccgggcgctgcgctgctttgggccgggaagtcgcgggagcccggcctcaggccccgggccgcggagggtgcagcgccgggcctggcctcccgataaagaacaggaaaaagagaaaaaatcagtgatctgtgtcgagggcaatattgcaagtgggaagacgacatgcctggaattcttctccaacgcgacagacgtcgagggcctgatgtaccacgatgcctctcgctggggtcttacgctacagacttatgtgcagctcaccatgctggacaggcatactcgtcctcaggtgtcatctgtacggttgatggagaggtcgattcacagcgcaagatacatttttgtagaaaacctgtatagaagtgggaagatgccagaagtggactatgtagttctgtcggaatggtttgactggatcttgaggaacatggacgtgtctgttgatttgatagtttaccttcggaccaatcctgagacttgttaccagaggttaaagaagagatgcagggaagaggagaaggtcattccgctggaatacctggaagcaattcaccatctccatgaggagtggctcatcaaaggcagccttttccccatggcagcccctgttctggtgattgaggctgaccaccacatggagaggatgttagaactctttgaacaaaatcgggatcgaatattaactccagagaatcggaagcattgcccataggaggcaaaaggtctatggctcatgtctgaaaaatgcctgctgctgccaagttagctattgggagcaatctggaaaaacttgctcccaggagggctttgtgtctggccagcttgattttcctaatggtctcatctcctttgctagtgtctttgtcatgcgtctctggccctcgtgggtaaatgacaaacgggaccaatgggtttgccaagccctttgctgttcgcagcctcacattcccccggtgcctctcccatggctttgtgctgctgagtcgctctcatgaagcccttagggagagcacctgttgtgtgcctgacaccacgctggagctgtgtaccaatcgtctcagccttcattaggaggccgaggtaggagtcttatatcccaggtgaggaatttgaagctcagaaaggttgaggggctccccagaggtcacacagcctgtgtgcagtggagctggcaccattcagactttcagccgactcagcaactttcccttgccctgggctgcctcctcctgagagctgttccccaccgccctgcctcttccggttggaggctctcatgtctctttggggagagctggcagtgtgcggagctgataacattttcccaatattgagcagttcccaaggacagtcagcatttctagacttccacaaaattatgctgcatttggctggagcccggtgttcagtggtttccctgcccgaggtcgctgcagccccatctaccacatcttcatgtggacattgagattcacatgctggctcctgaagggtgctcagtctccttggtgattaaggtcctgcttgaactgctgccaactccatgtcagggaagtcgcttttggtgcctggctggtttgcccagagccaagctggggcaaggggcagccagccctggcttccaaggctcccgtactgtctgtgtccttgtataaggagctttgctcttggaattactgaaagtctgtggcccaagagagagacacaagtggccttaagtctttttgaagtgttatttcatccagggaaatgcctcgagccatagagcctgaaatcatctttgttggctcagaaaataccttagcttcactcagctggactgcattgaaggcgaggctgccccttggatcaagcagaaaacaagagaaagaaagaacgttccctttggggatagtctggaaagttgggatttgcaaataaaggctctggaagcattgctggtcctgaagctttggaggtgggcagagagagcttcaagaagactagatgcaaaccctggaaaggattaaggctcaactctggagaaacaggccacagcctctcagagcagctgttggctgtaaatagaggtagcaaggccgctcccaggcccctgtgagtgtgggcacctgtgcatgcaatgctccgactctgcagaggtgccaagtgcccctgctgggccagtcccagagagttaggaagtcaaggcctgcaactcctggttcttcctgtttggaccagttcttgtgccattggcaggatgagaggcagcagccaggcgggagctgtgtctagcagcacctgtagcccacgtgctgctaattagctggaaaactggcgaaggcagaacctttgctaccaggaatcttgacatgtggggtctgtctttgagaatttgtaaatgaacagtccaatatttcctctcggctcattttgcacatccatttttggggaaatgtgatttctctctctttttttttttttttttttgcctaaggcacaatctcaagaggtcctgagaccacgtacccatgatttttttcttgctctgtgatacccaataactccttcacctaagccctgttgttgattttgaagtgcttcctaggccagtgattttagcttctgccagctgcttttgccagtagattaacgtgtttttatttttcaaactccgtgtttcctaacgtggagtgtatgggtctaagagagcctgctgtcctccctgccttccaccttggagaggaggctggacgcatcagcagtggccagggcaggtcgcaaaatctcccagcctagagaccacacctgaaacggctgaagccagcttgcacaagggctgctgtccctctgcggcaggcagagctggtgggggcaggggtcacagagcagtcatagacaccatggaccagggcaggagaagggcagatggcacatgggcacaacagggccttgtccttagagcactggggggtcatggctgggaggggcatggcaggggctggcatccctgtagagccagaggggccacccagggcagtgacattccagatatgttgggctcacctcatccttgctgtgagactggagttccatggggacatgaagtcagtacaccgcagagctgctcagctgctctacctctcgctgacttttttgttgcacatatacattttctttcaattagcatttatttcagcttttatttaagctttttgacagtacatgtaaaatatatgattataaccatttaaaaataccttatgtacctggttttttttggaaactagatagaaatatatttatcttttacataaaagaagtgtgtagtggggtggtccagggctttgtggtggcttagtggccatcggggtcccaggctcttcccacctttctcttttgggtccacctcttggctcctggcttccttcctctggggcctgactgtccaggatggcagctggagctcctgctctgggcacggttggcatcagagcccactgctccccatccactctttaatccagatgctggtaatgtccctttccaaggcataactaagataagctggaaggttcttacgaggctttgctagaggccctgggaggtggggggaaaggcaagagggcagtgcccacccatagaccgggtcacatgacctggcatcagcgccgtggggtcctttgggcttcacctccctctcccctctgcccccacgtcatcccaccctcatcctcaccctcaccattcccatcccgtaccgtaatgtcccttgcaaggcctaactctgtgaggaatgaaaccacctcatccttgttccaataacatgagtgaccgaatttacaaacgagtgaatgtggacctctggaaacattacccagcttgtttttacttttcactttctctttctgcccctttcatttccgtaggagccctttacctagatgagaagtgtccccccgcctggggaatatatcagtcagaacaatcttcctgcagacatgcaccattagacccgagtgacggtggtgccatttaaacctcagagcaggtaaaaggtggtcctgaaacctgtctacccacagggtgctatggaatctgaatcacttcttttttcctagagccctggggtggggagctccctcaagtgttcacatgtgtgtggaatgaggaacacccatctccttggccctctccaccctgaagagttagttattaaaataattggcaagctcttgcaaatgtcagtcatccattgttcagaatggaatagcaataatacatccctggctgccctgggcttggccaggattactcactgaaggcctcagggttactggcacacactttcttttcctaataatcccatcccctcagctttcctaaggctagagtgaatttcgtgttcctttagtttacataagatggtgaacttggcaaaagctatcattaaacagaagctaagagaaagcctatgtcgtggaatccagaatgggtattgccattcactgctgtccacagaagctgtcttgaatttctttctgtgtcttttctttttttttctttaagactgttgtttaccagactgggctctgtggaacacaggtgtcctgggagatggttaatcattacaaaatattggtaacaatctaaagatgcatacataagagagtggtcaaataaaccattttccattca

SEQ ID NO: 68225 - protein, 1187 aa, Artificial Sequence
  derived and/or modified sequence
MAKPYEFNWQKEVPSFLQEGAVFDRYEEESFVFEPNCLFKVDEFGFFLTWRSEGKEGQVLECSLINSIRSGAIPKDPKILAALEAVGKSENDLEGRIVCVCSGTDLVNISFTYMVAENPEVTKQWVEGLRSIIHNFRANNVSPMTCLKKHWMKLAFMTNTNGKIPVRSITRTFASGKTEKVIFQALKELGLPSGKNDEIEPTAFSYEKFYELTQKICPRTDIEDLFKKINGDKTDYLTVDQLVSFLNEHQRDPRLNEILFPFYDAKRAMQIIEMYEPDEDLKKKGLISSDGFCRYLMSDENAPVFLDRLELYQEMDHPLAHYFISSSHNTYLTGRQFGGKSSVEMYRQVLLAGCRCVELDCWDGKGEDQEPIITHGKAMCTDILFKDVIQAIKETAFVTSEYPVILSFENHCSKYQQYKMSKYCEDLFGDLLLKQALESHPLEPGRALPSPNDLKRKILIKNKRLKPEVEKKQLEALRSMMEAGESASPANILEDDNEEEIESADQEEEAHPEFKFGNELSADDLGHKEAVANSVKKASDDLEHENNKKGLVTVEDEQAWMASYKYVGATTNIHPYLSTMINYAQPVKFQGFHVAEERNIHYNMSSFNESVGLGYLKTHAIEFVNYNKRQMSRIYPKGGRVDSSNYMPQIFWNAGCQMVSLNYQTPDLAMQLNQGKFEYNGSCGYLLKPDFMRRPDRTFDPFSETPVDGVIAATCSVQVISGQFLSDKKIGTYVEVDMYGLPTDTIRKEFRTRMVMNNGLNPVYNEESFVFRKVILPDLAVLRIAVYDDNNKLIGQRILPLDGLQAGYRHISLRNEGNKPLSLPTIFCNIVLKTYVPDGFGDIVDALSDPKKFLSITEKRADQMRAMGIETSDIADVPSDTSKNDKKGKANTAKANVTPQSSSELRPTTTAALASGVEAKKGIELIPQVRIEDLKQMKAYLKHLKKQQKELNSLKKKHAKEHSTMQKLHCTQVDKIVAQYDKEKSTHEKILEKAMKKKGGSNCLEMKKETEIKIQTLTSDHKSKVKEIVAQHTKEWSEMINTHSAEEQEIRDLHLSQQCELLKKLLINAHEQQTQQLKLSHDRESKEMRAHQAKISMENSKAISQDKSIKNKAERERRVRELNSSNTKKFLEERKRLAMKQSKEMDQLKKVQLEHLEFLEKQNEQAKEMQQMVKLEAEMDRRPATVV

SEQ ID NO: 68226 - protein, 1023 aa, Artificial Sequence
  derived and/or modified sequence
PVRSITRTFASGKTEKVIFQALKELGLPSGKNDEIEPTAFSYEKFYELTQKICPRTDIEDLFKKINGDKTDYLTVDQLVSFLNEHQRDPRLNEILFPFYDAKRAMQIIEMYEPDEDLKKKGLISSDGFCRYLMSDENAPVFLDRLELYQEMDHPLAHYFISSSHNTYLTGRQFGGKSSVEMYRQVLLAGCRCVELDCWDGKGEDQEPIITHGKAMCTDILFKDVIQAIKETAFVTSEYPVILSFENHCSKYQQYKMSKYCEDLFGDLLLKQALESHPLEPGRALPSPNDLKRKILIKNKRLKPEVEKKQLEALRSMMEAGESASPANILEDDNEEEIESADQEEEAHPEFKFGNELSADDLGHKEAVANSVKKASDDLEHENNKKGLVTVEDEQAWMASYKYVGATTNIHPYLSTMINYAQPVKFQGFHVAEERNIHYNMSSFNESVGLGYLKTHAIEFVNYNKRQMSRIYPKGGRVDSSNYMPQIFWNAGCQMVSLNYQTPDLAMQLNQGKFEYNGSCGYLLKPDFMRRPDRTFDPFSETPVDGVIAATCSVQVISGQFLSDKKIGTYVEVDMYGLPTDTIRKEFRTRMVMNNGLNPVYNEESFVFRKVILPDLAVLRIAVYDDNNKLIGQRILPLDGLQAGYRHISLRNEGNKPLSLPTIFCNIVLKTYVPDGFGDIVDALSDPKKFLSITEKRADQMRAMGIETSDIADVPSDTSKNDKKGKANTAKANVTPQSSSELRPTTTAALASGVEAKKGIELIPQVRIEDLKQMKAYLKHLKKQQKELNSLKKKHAKEHSTMQKLHCTQVDKIVAQYDKEKSTHEKILEKAMKKKGGSNCLEMKKETEIKIQTLTSDHKSKVKEIVAQHTKEWSEMINTHSAEEQEIRDLHLSQQCELLKKLLINAHEQQTQQLKLSHDRESKEMRAHQAKISMENSKAISQDKSIKNKAERERRVRELNSSNTKKFLEERKRLAMKQSKEMDQLKKVQLEHLEFLEKQNEQAKEMQQMVKLEAEMDRRPATVV

SEQ ID NO: 68227 - protein, 81 aa, Artificial Sequence
  derived and/or modified sequence
MAKPYEFNWQKEVPSFLQEGAVFDRYEEESFVFEPNCLFKVDEFGFFLTWRSEGKEGQVLECSLINSIRSGAIPKDPKILA

SEQ ID NO: 68228 - DNA, 3564 bp, Artificial Sequence
  derived and/or modified sequence
atggctaagccttacgagttcaactggcagaaagaggtgccctcttttttgcaggagggcgctgtcttcgatcgctacgaggaggagagtttcgtctttgaacccaattgtctgtttaaagtggacgagtttggcttctttctgacgtggagatccgaaggtaaggaagggcaagtgctcgagtgtagtctgattaacagcattcgctctggggctattcctaaggaccctaagatcctggcggctttggaagccgtggggaagtcagagaacgatctggagggcaggattgtatgcgtgtgcagcggcactgatcttgtgaacattagcttcacctacatggtggctgagaatcctgaggtgactaagcagtgggtggaaggcctccgttctattattcacaactttcgagccaacaatgtctctccaatgacgtgcctgaaaaagcactggatgaaacttgccttcatgactaacacaaacggaaagatacctgtccgtagtattactcgaaccttcgcctcagggaagaccgagaaagttatatttcaggcactgaaggaactgggtctgccctcaggaaagaacgacgaaatcgaacctacagccttctcctatgaaaaattctatgaactcactcagaaaatttgtcctcgcactgacatcgaggatctattcaagaagatcaatggcgataagacagactacttaactgtcgatcagctcgtgtccttcctgaacgagcatcaaagagatcccaggctcaatgaaatattattcccgttttatgatgcaaagagggctatgcagataatcgagatgtatgagccggatgaggatcttaaaaagaaggggctcatctcctctgacggattttgcagatacttaatgagcgacgaaaatgctcccgtgttcctggacaggctcgagctatatcaggagatggaccatccattggcacactatttcatctcaagctcccacaacacctatctcaccgggagacagtttggagggaaatctagtgtagagatgtaccgacaagtgcttctggctggatgtcgatgtgtggaactggattgctgggacggaaagggcgaagaccaggagcctatcattacccatgggaaggctatgtgcaccgatatcctattcaaggatgttattcaggcaattaaggaaacggcctttgttacttcagaataccccgttattctgtcctttgagaatcactgtagcaagtaccagcagtacaaaatgtctaagtactgcgaggacctgttcggggatctcctgctgaaacaggcactagaatcccaccccctcgaacccggaagagctctaccctcgcccaatgacctcaaaaggaaaatcttaattaagaataagcgcttgaagccagaagttgaaaaaaagcagcttgaggccttgcgctccatgatggaggcaggggaaagcgcttcaccggctaatattcttgaggacgacaatgaggaggaaatcgagagcgccgatcaggaagaagaggctcatccagagttcaagttcggcaatgagctcagcgccgatgacctaggacataaggaagctgtggccaacagcgtcaagaaagcctccgacgatctggagcatgagaacaataaaaaggggttggtgaccgtggaagacgaacaggcgtggatggccagttacaagtacgtgggggcaactaccaatatccacccttatctgtccacaatgatcaattacgcgcagcctgtgaaatttcagggatttcatgtcgctgaagaaaggaacatacactataatatgtcctcattcaacgaatctgtagggctggggtacctcaaaactcatgctattgagttcgttaattataacaaacgccaaatgtcccgaatctatcctaaaggtggaagggtagatagttccaactatatgccacaaattttttggaatgctggctgccaaatggtgtctttaaattaccaaacaccagacctcgccatgcagctgaatcaggggaagttcgagtacaatgggtcttgtggctatctgctgaagccggactttatgaggcggcctgatcggacgttcgacccattctcagagacacctgtggatggcgtgatcgccgcgacatgctcagtgcaggtgatttcaggacagttcctcagtgacaaaaaaattggtacttatgtggaagttgacatgtacggcttgccgacggacactatccggaaggaattccgaactagaatggtgatgaataatggactgaaccctgtgtacaatgaagaatcctttgtcttcagaaaagtaattctgcctgatttagccgttttgaggatcgctgtgtatgacgacaacaacaagttaattggtcagcgtatccttccactggacggactgcaggccggctaccgccacatctcattgaggaatgaggggaacaagccactcagccttcccacgattttttgcaatatcgtgttgaaaacatacgtcccagatgggttcggggacatcgtggatgccctgagcgaccccaaaaaatttctgtctattacagaaaagagggccgatcagatgcgggcaatgggaatcgagacaagtgacattgcagacgtccctagcgacacatccaagaacgataagaagggcaaggccaatactgctaaagccaacgtgacaccccaatcctcatctgaactcaggcccactaccaccgcagctttagcctccggagttgaagcaaaaaaagggatcgagctgataccccaggtgagaatcgaagacttgaagcaaatgaaagcctacctcaagcacctgaaaaaacagcagaaggagctgaatagtttgaagaaaaagcatgcgaaggagcatagtaccatgcaaaagcttcactgtactcaggttgacaagattgttgcccagtatgataaagagaagtcaacccatgaaaagatccttgagaaggccatgaagaagaaaggcgggagcaactgtctcgaaatgaaaaaggaaaccgaaatcaagattcagacgctcaccagcgaccataagagcaaagtcaaggagattgtggcgcagcatacaaaagaatggagcgagatgataaacactcactccgctgaggaacaggaaattcgcgacctccacctgagccagcagtgcgagctgctgaaaaagttgcttattaacgctcatgagcagcagacacaacagctaaagctgtctcacgaccgggaaagtaaagaaatgagggcccaccaggccaagataagcatggaaaactcgaaggccattagccaggataaaagcataaagaataaagctgagcgggaaaggagagtgcgggagcttaattcatccaacactaaaaagtttttagaggagcggaagaggctcgcaatgaaacaatctaaggagatggatcaactcaaaaaggtacagcttgagcacctggagttccttgaaaaacagaatgagcaggccaaggagatgcagcagatggttaaattggaagccgaaatggacaggcgacctgctactgttgtgtag

SEQ ID NO: 68229 - DNA, 3072 bp, Artificial Sequence
  derived and/or modified sequence
ccggtgcgcagcatcaccaggaccttcgcttctgggaaaacagagaaagtgatatttcaggccctgaaagaactgggtttaccctccggcaaaaacgacgagatcgagccaaccgcattctcctacgagaaattctacgaacttacacagaaaatttgccctagaacagacattgaagacctgtttaaaaaaatcaacggcgataagactgactatctcacggtggatcagttggtgagcttcctgaatgaacaccagcgggacccacgcctgaacgagatcctatttccgttttacgacgcaaaaagagccatgcagattatcgagatgtatgagccagacgaggacttgaagaagaagggcctgattagttctgacggcttttgcagatatctgatgagcgatgagaacgccccagtgttcttggaccggcttgaactttaccaggaaatggatcatccgctggcccattactttatctcatccagtcacaatacatacctgacaggccggcagttcggaggaaagtcatccgtggaaatgtataggcaggtactgttagctgggtgtaggtgcgtagaattggactgctgggacggaaagggagaagaccaggagccaataataactcacggcaaggccatgtgtaccgacattctcttcaaggatgtaatccaagcaataaaagagaccgctttcgtgaccagtgaataccccgtcatcctgtcattcgaaaatcattgttccaaataccagcaatacaagatgtctaagtactgcgaggatttgttcggagatctgctcctcaaacaggctttggagagccacccgctggagccgggtcgggcactgccttcacccaacgacctaaagcgtaaaatcctgataaaaaacaaacgtctgaaacccgaggttgaaaagaagcaactggaggctctccggtctatgatggaggccggagagtccgcaagtcctgccaacatcctcgaggacgataacgaggaggagattgaatccgcggatcaggaggaagaggctcaccctgaattcaagtttggtaacgagctgtccgccgacgatctgggtcacaaggaggcggtggcgaattccgtcaaaaaggcctctgatgatctggaacatgaaaacaacaagaaaggcctcgtgaccgtcgaagacgagcaagcatggatggctagttataagtatgttggagctactactaatatacacccttatttaagcaccatgattaactacgcccagcctgtcaaatttcagggctttcacgtcgccgaggagaggaatatacactataatatgagttcctttaacgagagcgtaggtcttgggtacttaaaaacacacgccatagagttcgtcaattacaataaacgacaaatgagcagaatatatcctaaggggggacgcgtggactcttctaactacatgcctcagattttttggaacgctggttgccagatggtgtcactcaattatcagacgcccgacctggcaatgcagctgaaccagggcaaatttgaatacaatggcagctgcgggtacctgctgaaaccggattttatgaggcgccccgatcgcaccttcgacccattcagtgagacacccgtcgacggagttatcgccgccacatgctcggtgcaggtgataagtggtcaatttctcagtgacaaaaagattggcacctatgtggaagtagacatgtatggactccccaccgacacaatcagaaaggagtttagaacaagaatggtgatgaacaatgggctgaatcctgtatacaacgaagaaagctttgtgttccgaaaggtgattctgcccgacctggccgttttaaggatcgcagtgtacgacgataacaataagctcatcggccagcgtatcctgcctctggatggcctgcaggctggctaccgacatattagccttaggaatgagggcaataaacctcttagtttgccaactatcttctgtaacattgtgctgaagacatacgtccctgacggctttggcgacattgtggacgcactgagcgatccaaaaaaattcttgagcataaccgagaagcgcgcagatcaaatgagggctatgggaatcgagaccagcgacatcgccgacgtgccatcagacacaagtaagaacgataaaaaaggcaaagccaacacagccaaggctaacgtcactcctcaatcaagtagcgagctgagacccacaactaccgctgcactcgcttctggggtggaagccaagaagggcatagagttgatcccacaagtgcgaattgaggacttgaagcagatgaaagcctacctcaaacatctgaaaaagcagcagaaggagcttaatagcttgaagaagaaacacgccaaggaacattctaccatgcaaaagctacattgtactcaggtggataaaatagtcgctcagtatgacaaggagaaaagcacccacgagaagattctggaaaaggcaatgaaaaaaaagggcggtagcaattgcctggaaatgaagaaggagacagagataaaaatccagacattaaccagcgaccacaaaagcaaagtgaaagagatcgtggcgcaacataccaaagaatggtccgagatgattaatacacactctgctgaggagcaggaaatcagggacctgcatttatcacaacagtgcgagctgttgaagaaactgttgattaatgctcatgaacaacagacccagcagctgaagctgtcccacgatcgagagtctaaggagatgagggcacaccaggctaaaatttcgatggaaaactcgaaggctatcagccaggataagtccataaagaacaaggccgaacgggagaggagagtacgcgagctaaattctagtaatactaaaaagttcctcgaggagagaaaacggctcgctatgaagcaaagcaaggagatggatcagctgaaaaaagtccagctcgagcacctggagtttctggagaagcagaacgagcaggccaaagaaatgcagcagatggttaagctggaggcagagatggacaggagacccgctacagtggtgtag

SEQ ID NO: 68230 - DNA, 3564 bp, Artificial Sequence
  derived and/or modified sequence
atggccaagccctatgagttcaactggcagaaggaggtgcccagcttcctgcaggagggcgctgtgtttgacagatatgaggaggagagctttgtgtttgagcccaactgcctcttcaaggtggatgaatttggcttcttcctgacctggaggtctgagggcaaggagggccaggtgctggagtgcagcctcatcaacagcatccgcagcggggccatccccaaggaccccaagatcctggccgccctggaggccgtgggcaagtcagaaaatgacctggagggcagaattgtgtgtgtgtgcagcggcacagacctggtgaacatctccttcacctacatggtggctgaaaatcctgaggtgaccaagcagtgggtggagggcctgcggagcatcatccacaacttccgggccaacaacgtgagccccatgacctgcctgaagaagcactggatgaagctggccttcatgaccaacaccaacgggaagatccctgtgcgcagcatcaccaggacctttgccagcggcaagacagagaaggtgatcttccaggccctgaaggagctgggcctgcccagcggcaagaatgatgaaattgagcccacagccttctcctatgagaagttctatgagctgacccagaagatctgccccaggacagacattgaagatctcttcaagaagatcaacggggacaagacagactacctgactgtggaccagctggtgtccttcctgaatgagcaccagagggacccccggctgaatgagatcctcttccccttctatgatgccaagagggccatgcagatcatcgagatgtatgagccagatgaggacctgaagaagaagggcctcatcagcagtgatggcttctgccgctacctgatgtctgatgaaaatgcccctgtgttcctggaccggctggagctgtaccaggagatggaccaccccctggcccactacttcatcagcagcagccacaacacctacctgaccggccggcagtttggaggcaagagctctgtggagatgtaccggcaggtgctgctggccggctgccgctgtgtggagctggactgctgggatggaaaaggagaggaccaggagcccatcatcacccacggcaaggccatgtgcacagacatcctcttcaaggatgtgatccaggccatcaaggagacagcctttgtgaccagcgagtaccctgtgatcctgagctttgagaaccactgcagcaagtaccagcagtacaagatgagcaagtactgtgaggacctgtttggagacctgctgctgaagcaggccctggagagccaccccctggagcccggccgggccctgcccagccccaatgacctgaagaggaagatcctgatcaagaacaagaggctgaagccagaggtggagaagaagcagctggaggccctgcgctccatgatggaggccggggagagcgccagccctgccaacatcctggaggatgacaatgaggaggagattgaatctgctgaccaggaggaggaggcccaccctgagttcaagtttggaaatgagctgtctgcagatgacctgggccacaaggaggccgtggccaacagcgtgaagaaggccagtgatgacctggagcacgagaacaacaagaagggcctggtgacagtggaggatgagcaggcctggatggccagctacaagtatgtgggcgccaccaccaacatccacccctacctgagcaccatgatcaactatgcccagcctgtgaagttccagggcttccacgtggccgaggagaggaacatccactacaacatgagcagcttcaatgaatctgtgggcctgggctacctgaagacccacgccattgaatttgtgaactacaacaagaggcagatgagccgcatctaccccaagggcggccgggtggacagcagcaactacatgccccagatcttctggaatgccggctgccagatggtgtccctgaactaccagaccccagacctggccatgcagctgaaccagggcaagtttgagtacaacggcagctgtggctacctgctgaagccagacttcatgagaagaccagacaggacctttgaccccttcagcgagacccctgtggatggagtgattgctgccacctgcagcgtgcaggtgatcagcggccagttcctgagtgacaagaagattggcacctacgtggaggtggacatgtatggcctgcccacagacaccatcaggaaggagttccgcaccaggatggtgatgaacaacggcctgaaccctgtgtacaatgaggagagctttgtgttcaggaaggtgatcctgcctgacctggccgtgctgagaattgctgtgtatgatgacaacaacaagctgattggccagaggatcctgcccctggatggcctgcaggccggctaccgccacatcagcctgagaaatgaaggcaacaagcccctgagcctgcccaccatcttctgcaacatcgtgctgaagacctacgtgcctgatggctttggagacatcgtggatgccctgagtgaccccaagaagttcctgagcatcacagagaagagagctgaccagatgagggccatgggcatcgagaccagtgacattgctgatgtgcccagcgacaccagcaagaatgacaagaagggcaaggccaacacagccaaggccaacgtgaccccccagagcagcagcgagctgcggcccaccaccacagctgccctggccagcggcgtggaggccaagaagggcatcgagctgatcccccaggtgagaattgaggacctgaagcagatgaaggcctacctgaagcacctgaagaagcagcagaaggagctgaacagcctgaagaagaagcacgccaaggagcacagcaccatgcagaagctgcactgcacccaggtggacaagatcgtggcccagtatgacaaggagaagagcacccatgagaagatcctggagaaggccatgaagaagaagggcggcagcaactgcctggagatgaagaaggagacagagatcaagatccagaccctgaccagtgaccacaagagcaaggtgaaggagatcgtggcccagcacaccaaggagtggagcgagatgatcaacacccacagcgctgaggagcaggagatccgggacctgcacctgagccagcagtgtgagctgctgaagaagctgctgatcaatgcccacgagcagcagacccagcagctgaagctgagccatgaccgggagagcaaggagatgagggcccaccaggccaagatctccatggagaacagcaaggccatcagccaggacaagagcatcaagaacaaggccgagcgggagaggagagtgcgggagctgaacagcagcaacaccaagaagttcctggaggagaggaagaggctggccatgaagcagagcaaggagatggaccagctgaagaaggtgcagctggagcacctggagttcctggagaagcagaatgagcaggccaaggagatgcagcagatggtgaagctggaggccgagatggacagaagacctgccaccgtggtgtag

SEQ ID NO: 68231 - DNA, 3072 bp, Artificial Sequence
  derived and/or modified sequence
cctgtgcgcagcatcaccaggacctttgccagcggcaagacagagaaggtgatcttccaggccctgaaggagctgggcctgcccagcggcaagaatgatgaaattgagcccacagccttctcctatgagaagttctatgagctgacccagaagatctgccccaggacagacattgaagatctcttcaagaagatcaacggggacaagacagactacctgactgtggaccagctggtgtccttcctgaatgagcaccagagggacccccggctgaatgagatcctcttccccttctatgatgccaagagggccatgcagatcatcgagatgtatgagccagatgaggacctgaagaagaagggcctcatcagcagtgatggcttctgccgctacctgatgtctgatgaaaatgcccctgtgttcctggaccggctggagctgtaccaggagatggaccaccccctggcccactacttcatcagcagcagccacaacacctacctgaccggccggcagtttggaggcaagagctctgtggagatgtaccggcaggtgctgctggccggctgccgctgtgtggagctggactgctgggatggaaaaggagaggaccaggagcccatcatcacccacggcaaggccatgtgcacagacatcctcttcaaggatgtgatccaggccatcaaggagacagcctttgtgaccagcgagtaccctgtgatcctgagctttgagaaccactgcagcaagtaccagcagtacaagatgagcaagtactgtgaggacctgtttggagacctgctgctgaagcaggccctggagagccaccccctggagcccggccgggccctgcccagccccaatgacctgaagaggaagatcctgatcaagaacaagaggctgaagccagaggtggagaagaagcagctggaggccctgcgctccatgatggaggccggggagagcgccagccctgccaacatcctggaggatgacaatgaggaggagattgaatctgctgaccaggaggaggaggcccaccctgagttcaagtttggaaatgagctgtctgcagatgacctgggccacaaggaggccgtggccaacagcgtgaagaaggccagtgatgacctggagcacgagaacaacaagaagggcctggtgacagtggaggatgagcaggcctggatggccagctacaagtatgtgggcgccaccaccaacatccacccctacctgagcaccatgatcaactatgcccagcctgtgaagttccagggcttccacgtggccgaggagaggaacatccactacaacatgagcagcttcaatgaatctgtgggcctgggctacctgaagacccacgccattgaatttgtgaactacaacaagaggcagatgagccgcatctaccccaagggcggccgggtggacagcagcaactacatgccccagatcttctggaatgccggctgccagatggtgtccctgaactaccagaccccagacctggccatgcagctgaaccagggcaagtttgagtacaacggcagctgtggctacctgctgaagccagacttcatgagaagaccagacaggacctttgaccccttcagcgagacccctgtggatggagtgattgctgccacctgcagcgtgcaggtgatcagcggccagttcctgagtgacaagaagattggcacctacgtggaggtggacatgtatggcctgcccacagacaccatcaggaaggagttccgcaccaggatggtgatgaacaacggcctgaaccctgtgtacaatgaggagagctttgtgttcaggaaggtgatcctgcctgacctggccgtgctgagaattgctgtgtatgatgacaacaacaagctgattggccagaggatcctgcccctggatggcctgcaggccggctaccgccacatcagcctgagaaatgaaggcaacaagcccctgagcctgcccaccatcttctgcaacatcgtgctgaagacctacgtgcctgatggctttggagacatcgtggatgccctgagtgaccccaagaagttcctgagcatcacagagaagagagctgaccagatgagggccatgggcatcgagaccagtgacattgctgatgtgcccagcgacaccagcaagaatgacaagaagggcaaggccaacacagccaaggccaacgtgaccccccagagcagcagcgagctgcggcccaccaccacagctgccctggccagcggcgtggaggccaagaagggcatcgagctgatcccccaggtgagaattgaggacctgaagcagatgaaggcctacctgaagcacctgaagaagcagcagaaggagctgaacagcctgaagaagaagcacgccaaggagcacagcaccatgcagaagctgcactgcacccaggtggacaagatcgtggcccagtatgacaaggagaagagcacccatgagaagatcctggagaaggccatgaagaagaagggcggcagcaactgcctggagatgaagaaggagacagagatcaagatccagaccctgaccagtgaccacaagagcaaggtgaaggagatcgtggcccagcacaccaaggagtggagcgagatgatcaacacccacagcgctgaggagcaggagatccgggacctgcacctgagccagcagtgtgagctgctgaagaagctgctgatcaatgcccacgagcagcagacccagcagctgaagctgagccatgaccgggagagcaaggagatgagggcccaccaggccaagatctccatggagaacagcaaggccatcagccaggacaagagcatcaagaacaaggccgagcgggagaggagagtgcgggagctgaacagcagcaacaccaagaagttcctggaggagaggaagaggctggccatgaagcagagcaaggagatggaccagctgaagaaggtgcagctggagcacctggagttcctggagaagcagaatgagcaggccaaggagatgcagcagatggtgaagctggaggccgagatggacagaagacctgccaccgtggtgtag

SEQ ID NO: 68232 - DNA, 3564 bp, Artificial Sequence
  derived and/or modified sequence
atggccaagccctacgagttcaactggcagaaggaggtgcccagctttttgcaggagggggccgtcttcgacagatacgaagaagagtctttcgtattcgagcctaattgcctgtttaaagttgatgaatttggatttttcctcacttggagatccgagggcaaggaggggcaggtgctagagtgttctctgataaatagtattcggtccggagccattccgaaggacccaaaaattctagcagcgctggaagcagtgggcaaatccgagaacgatctggaggggaggatagtatgcgtgtgtagcgggacggacttggtgaatatttcatttacatatatggtagctgagaaccctgaggttacaaaacagtgggtcgagggccttcgatcgattatccacaattttcgggccaataacgttagccctatgacctgcctgaaaaagcactggatgaagcttgcctttatgacaaacactaacggcaaaattccagtccgcagcatcacccgaactttcgccagcggcaagactgaaaaagttatcttccaggccctaaaggagttaggactgccttctggcaaaaacgatgaaatcgaaccaaccgcttttagctacgagaagttctacgagctcacacagaagatatgcccaaggaccgatatcgaggacctgttcaaaaagattaatggcgacaagactgattacttgaccgtggaccagctcgtgagttttcttaatgagcatcaacgcgaccctaggcttaacgaaatcttgttcccattctacgacgcgaagagggcgatgcagatcatagagatgtatgagcccgacgaagacctgaagaaaaaggggttaatttcgagtgacggtttctgtaggtacctcatgagcgacgagaacgcacccgtctttctggatcggctggagctgtatcaggagatggaccaccctttggcccactactttatctccagtagtcacaatacatacctcaccggcaggcagtttggaggaaaaagttctgttgaaatgtatcgtcaggtgctcttggccgggtgtagatgtgtggagcttgattgttgggatgggaaaggggaggatcaggaacccatcataacccacgggaaagctatgtgtactgacatacttttcaaggatgtgatccaggcgattaaggaaacggccttcgtaacctcagagtatcctgtgattctgtcctttgagaatcattgtagcaagtatcagcagtacaaaatgagcaaatattgcgaggacttgttcggagacctgttacttaagcaagccttggaatcccaccccttggagcctggcagggcactgccgtctccgaacgatctaaagagaaagattctcataaagaataaaagattaaagcccgaagtggaaaagaaacagttagaggctctccgctctatgatggaggcaggagaatccgcctctcctgctaacatcctagaagatgacaatgaggaagaaattgagagcgccgaccaggaggaggaggcccaccccgagtttaaatttggcaacgagctttccgccgatgatcttggtcataaggaggccgtggctaattcagtcaagaaggctagcgacgatttggaacacgagaacaataagaagggtctggttaccgttgaggatgagcaggcttggatggcctcttacaagtatgtcggggccaccactaatatacacccctacctgagcactatgattaattacgcccagcccgtcaaattccagggctttcatgtggctgaagagaggaatattcattacaatatgagttctttcaatgagtctgtgggattgggttacttaaaaacccacgctattgaattcgtgaactataacaagcgccagatgtctaggatctacccaaaaggcggtcgcgtcgatagtagcaattacatgccccaaattttttggaacgccggttgccagatggtgtcactgaattatcagacgcccgatctggctatgcagttgaaccagggcaaattcgagtacaatgggagttgtgggtacttgttgaagccagatttcatgcggcgccccgacaggacctttgatccgtttagtgagacacccgtggacggcgtaatcgcagccacatgctcggtgcaggtgattagtgggcagtttctgtcagacaaaaagattgggacatatgtggaggtggatatgtacggtttaccaaccgatacgatacgcaaggagttccggaccagaatggtgatgaataacggattaaaccctgtgtacaacgaggaatctttcgtgtttcggaaggttatcctgcccgatcttgcagtgctgcggattgctgtgtatgacgataataacaagttaataggacagagaattcttccgttggatggcctacaggcagggtatcggcacattagcctgcgaaacgagggaaacaagcctctgagtctgcccaccattttctgtaacattgtcctcaagacatatgtacctgacggattcggagatattgtcgatgccctgagcgacccaaagaagttcctgtctattactgaaaagcgggccgaccagatgagggccatggggatcgagacaagcgacatagctgatgtgcctagcgatacaagtaagaatgacaaaaaagggaaagctaacaccgccaaagccaacgtgacccctcagtcaagctcagagctccggccgactacaacagccgcattggcaagcggcgtggaagctaagaaaggcattgagctaattccgcaggttaggatcgaggacttgaaacaaatgaaagcctatctcaagcatctcaaaaagcagcagaaagaactcaactccctgaagaagaaacatgccaaggaacactccaccatgcaaaaacttcattgtactcaggtggacaagattgtggcccagtatgataaagagaagagcacacacgaaaaaatcttagagaaagctatgaagaaaaagggcgggagcaattgcctggagatgaagaaggagactgagatcaagatacagaccttgacctccgaccacaaaagcaaggttaaagagattgtcgcccagcacaccaaggaatggagtgagatgattaacacgcattcagccgaagagcaagaaatccgggacctgcacctgtcccagcagtgcgagctgctgaagaaactgctaatcaacgctcacgagcaacagacacagcaattaaagctctcccacgacagggaatctaaggaaatgcgcgcacaccaagccaagatctctatggaaaattcgaaggccatttcccaggataagagcattaagaacaaggcagagagggaacgtcgggtgagagagttgaatagcagcaacactaaaaaatttctggaagagcgcaaacgtcttgcaatgaagcagtccaaagagatggaccagctgaagaaggttcagctggagcacttagagttcctagagaaacagaatgagcaggccaaagaaatgcagcaaatggtgaaactcgaggccgaaatggatcgccgcccggccactgtggtttag

SEQ ID NO: 68233 - DNA, 3072 bp, Artificial Sequence
  derived and/or modified sequence
cccgtgcggagcatcacccggaccttcgccagcggcaagaccgagaaggtaatcttccaggccctgaaagagctgggccttccgtctggaaagaacgatgagatcgagccgacagccttcagttatgagaagttttacgaactcacacagaagatctgtccccgaaccgatattgaagacctattcaagaagattaacggggacaagacagactatctgacggtagatcagctcgtctcattcctgaatgaacaccaacgggatccccggctgaatgagatcctcttcccattctacgatgctaaacgtgctatgcagatcatagagatgtacgagccagatgaggatttaaagaaaaaagggttgatatcctctgacggtttctgcagatatctaatgagtgatgagaatgcaccagtgtttctcgatagactggagttgtaccaggagatggaccatccactggctcactactttatcagttctagccacaatacctatctcaccggccggcagtttggagggaagtcaagtgtcgagatgtatcgccaggtactattagccgggtgccgatgcgttgaacttgactgttgggacggaaagggcgaagaccaggaacccattatcacccacggcaaggcaatgtgcacagatatcttatttaaggacgtgatccaggcgatcaaggagactgccttcgtgacttctgaatacccagtgattctgagtttcgagaaccactgcagcaaataccagcagtacaagatgtcaaagtattgcgaggatctctttggcgacctactcttaaagcaagcattagaaagccacccactggagcccggaagagccctccccagtcctaacgacctgaaacgcaagatccttatcaagaataaacggttgaaacctgaggtagaaaagaaacaattggaagctctgaggtctatgatggaggctggagagtccgccagtccagctaatatactggaggacgacaatgaggaagagattgaatcagccgatcaggaagaggaggcccacccagagtttaagtttggaaatgaactgtctgcggatgacctgggacacaaagaggctgtggccaactctgtcaagaaggcctcagacgatctggagcatgagaacaacaaaaaagggctagtgaccgtggaggacgagcaggcgtggatggcctcttataaatacgtgggcgccacgaccaatatacacccttatctgagcacaatgattaattacgctcagcctgtgaaatttcagggcttccacgtggctgaggagagaaatattcattacaacatgtcctcttttaatgaatccgttggcctaggttatctgaagacccacgccattgaattcgtgaattacaacaaacgacagatgtctcgcatttacccaaagggggggcgagtcgactcatcaaattatatgccccaaattttctggaacgccggctgtcaaatggttagtctcaattaccaaacacccgacctagctatgcagctcaatcagggaaaattcgaatataacggctcgtgcggctatctcctcaagccagatttcatgcggcgacctgaccgcacctttgatccctttagcgaaacccctgttgatggagtgatcgctgctacatgcagcgttcaggtgatttccgggcagtttctatctgacaagaagataggtacctatgtcgaagtggacatgtatggtctgcccacagacacaataagaaaagagtttcgtacccggatggttatgaataacgggctcaatcccgtttacaatgaggaaagttttgtgttccgcaaggtaattctgccagatctcgccgtcctgcgaattgccgtatatgacgacaataataaacttatcggccagagaattctgccgctggacggcctgcaggctgggtatcggcacatctccctgaggaacgaaggcaacaagccactgtctctgcctactattttctgtaatatcgttctgaaaacctatgtccctgatggatttggggacatcgtggacgctctcagtgatcccaaaaagttcttgagtatcactgagaagagggcggaccagatgagggccatgggcatcgagaccagtgatatcgcagatgtgccttccgataccagcaaaaatgacaaaaaggggaaggctaatactgccaaggccaatgtgaccccacaatcttcttccgaactgcgtccaacaacgaccgcagccctcgcttcgggcgtggaagccaaaaaagggatcgagttgataccccaggtgcgaattgaagacctgaaacagatgaaggcatacctcaagcatttgaagaagcagcagaaagaactcaactcgttgaaaaaaaagcacgccaaagagcactccaccatgcaaaaactgcactgcacccaagtggacaagattgtcgcacagtacgataaagagaaaagcacccacgaaaagatcctggagaaagccatgaaaaagaagggcgggtcaaactgcttagaaatgaagaaagagacagagattaaaattcagaccctgaccagcgatcataagtcgaaagtcaaggagatcgtggcccagcatacgaaggagtggtctgaaatgatcaacacgcactccgcagaggaacaggaaattagggatctacatctgtcacagcagtgcgagttgctaaagaagttgctgattaatgcccacgaacagcagacccagcagttgaagctgagccatgatagggagtctaaagagatgagggcacaccaggccaagatttccatggagaacagcaaagcgattagccaggacaaatcaattaagaataaagcggaaagggaaagaagggtgcgcgaactgaactcctcaaacacaaaaaaatttcttgaggagcgcaagcggctcgctatgaaacagtctaaagagatggaccaactgaagaaggttcaactggagcacctggagtttctcgaaaaacaaaacgaacaagccaaagagatgcagcagatggtcaaattggaagccgagatggataggagaccagctacagtggtctag

SEQ ID NO: 68234 - DNA, 5619 bp, Artificial Sequence
  derived and/or modified sequence
agtaagtgagctgcaccgccaacaagatctctcacacacagacacacacacgcacacgcacacacgggcgcgcacacacacgcgcgtacacactgggtctccaggcagcggccgtcgccgcatccccggcagcagctccaggcaaagtgacagaggacagtgctgctgtgagtttgacgaagtggacatcacctgcagtcagtccagagctgcccagtcttgaatataatcatggccaaaccttatgaatttaactggcagaaggaagttccctcctttttgcaagaaggagcagtttttgacagatacgaggaggaatcctttgtgtttgaacccaactgcctcttcaaagtggatgagtttggcttctttctgacatggagaagtgaaggcaaggaaggacaggtgctagaatgctccctcatcaacagtattcggtcgggagccataccaaaggatcccaaaatcttggctgctcttgaagctgttggaaaatcagaaaatgatctggaagggcggatagtttgtgtctgcagtggcacagatctagtgaacattagttttacctacatggtggctgaaaatccagaagtaactaagcaatgggtagaaggcctgagatcaatcatacacaacttcagggccaacaacgtcagtccaatgacatgcctcaagaaacactggatgaaattggcatttatgaccaacacaaatggtaaaattccagttaggagtattactagaacatttgcatcgggaaaaacagaaaaggtgatctttcaagcactcaaggagttaggtcttcccagtggaaagaatgatgaaattgagcccacagcattttcttatgaaaagttctatgaactgacacaaaagatttgtcctcggacagatatagaagatcttttcaaaaaaatcaatggagacaaaactgattatttaacggtagaccaattagtgagctttctaaatgaacatcaacgagatcctcgattgaatgaaattttatttccattttatgatgccaaaagggcaatgcagatcattgagatgtatgaacctgatgaagatttgaagaaaaaaggccttatatcaagtgatgggttttgcagatatctgatgtcagatgaaaacgccccagtcttcctagatcgtttagaactttaccaagaaatggaccatcctctggctcactacttcatcagttcttcccataacacttatctcactggcagacagttcggcgggaagtcttcggtagaaatgtacagacaggttctcctggctggttgcagatgtgttgaacttgactgctgggatggaaaaggtgaagaccaagaaccaataataactcatggaaaagcaatgtgtacagatatcctttttaaggatgtaattcaagccatcaaggaaactgcatttgtcacatcagaatatcctgtaattctctcctttgaaaatcactgcagcaaatatcaacagtacaagatgtccaaatattgcgaagatctatttggggatctcctgttgaaacaagcacttgaatcacatccacttgaaccaggcagggctttgccatcccccaatgacctcaaaagaaaaatactcataaaaaacaagcggctgaaacctgaagttgaaaaaaaacagctggaagctttgagaagcatgatggaagctggagaatctgcctccccagcaaacatcttagaggacgataatgaagaggagatcgaaagtgctgaccaagaggaggaagctcaccccgaattcaaatttggaaatgaactttctgctgatgacttgggtcacaaggaagctgttgcaaatagcgtcaagaaggcttcagatgaccttgaacatgaaaacaacaaaaagggcctggtcactgtagaagatgagcaggcgtggatggcatcttataaatatgtaggtgctaccactaatatccatccatatttgtccacaatgatcaactacgcccagcctgtaaagtttcaaggtttccatgtggcagaagaacgcaatattcattataacatgtcttcttttaatgaatcagtcggtcttggctacttgaagacacatgcaattgaatttgtcaattataacaaacggcaaatgagtcgcatttaccccaagggaggccgagtcgattccagtaattacatgcctcagattttctggaacgctggctgccagatggtttcactgaactatcaaaccccagatttagcgatgcaattgaatcagggaaaatttgagtataatggatcgtgcgggtaccttctcaaaccagatttcatgaggcggcctgatcgaacatttgaccccttctctgaaactcctgttgatggtgttattgcagccacttgctcagtgcaggttatatcaggtcaattcttatcagataagaaaattggcacctacgtagaggtggatatgtatgggttgcccactgacaccatacgtaaggaattccgaactcgcatggttatgaataatggactcaatccagtttacaatgaagagtcatttgtatttcggaaggtgatcctgccggacctggctgtcttgagaatagctgtgtatgatgataacaacaagctgattggccagaggatcctcccgcttgatggcctccaagccggatatcgacacatttcccttcgaaatgagggaaataaaccattatcactaccaacaattttctgcaatattgttcttaaaacatatgtgcctgatggatttggagatatcgtggatgctttatcagatccaaagaaatttctctcaattacagaaaagagagcagaccaaatgagagctatgggcattgaaactagtgacatagccgacgtgcccagtgacacttccaaaaatgacaagaaaggaaaggccaacaccgccaaagcaaatgtgacccctcagagtagctctgagctcagaccaaccaccacggctgccctggcctctggtgtggaagccaagaaaggtattgaacttatccctcaagtaaggatagaagacttaaagcagatgaaggcttacttgaagcatttaaagaaacagcagaaggagctaaattctttaaagaagaaacatgcaaaggaacacagtaccatgcagaagttacactgcacgcaagttgacaaaattgtggcacagtatgacaaagagaagtcgactcatgagaaaatcctagagaaggcaatgaagaagaaggggggaagtaattgtctcgaaatgaaaaaagaaacagaaatcaaaattcagacgctgacatcagatcacaaatctaaggtcaaagagattgtagcacagcacacaaaggaatggtcagaaatgatcaatacccacagtgctgaggagcaagaaatccgagacctgcacctcagccagcagtgtgagctgctgaaaaagctactcatcaatgcccacgagcagcaaacccagcagctgaaactgtcccatgacagggaaagcaaggaaatgcgagcacaccaggctaagatttctatggaaaatagcaaagccatcagccaagataaatctatcaagaataaagcagaacgggaaaggcgagtcagggagttaaacagcagcaacactaaaaagtttctggaagaaagaaagagacttgccatgaagcagtccaaagaaatggatcagttgaaaaaagtccagcttgaacatctagaattcctagagaaacagaatgagcaggcgaaggagatgcagcagatggtgaaattggaagccgagatggaccgcagaccagcaacagtagtatgaaactccaaaatgcaaactgaagcagcaaacccacaaagcatcaaaagactcactcacaaacttctgaacacaaactccatggatgaaagctgtttattttgtttcctttatgtgtaaacaagatgatatctgaaaccagagagacttggaatgtctgactgacttctatttaacagcttgagtattgcatttccttggccaaacaaaaatagctacaaatccacaaaaatttactattccagtaaggcagagtccaaccattgataatacaacttaaacatgtttgctataaaataccatcacaagtaaatgagcttggtgtgaacaactctcctttgtgatgccttaggacatgtttgaactgcagcaaaaaacaaaaacaaaaaacagtgcattagcaatttcatagcaagtgcatgcactaggaaaagaaaactctgtctacaagtttattagcagaagtggtggtctgctagacaaataattttgcaaaatttttctacatctaagttacctcatcagtaagtgccatgtctctaccatgccatcagaggctaatttcctgtaaaagttgtggaaattgttagaacaatagaaaaatagagcagtgtatgtgtgccaaaactcatcattactcaaaggagaactgtgttaggcacatttaagaaagtttacatctgacattgctttataggaattgtttctgcagattccggatattataattcacaccataaagattgtgaagtggttattggcaaacgtttgtaaatgtgaccatgtataaagtatttatactctttaattcacactgttagagagcaaaatcatctaagtattgccacatgacaagattagtaaacaggaatactagaactatgtttgcatgatacacaagcaccaataaagactaatccatacacagttaacctaatgccaaataaatactggttaaataaatgtatggcacagaatataatttgactatcaagacttttagcataatgaaaaaccctctctctatatatatatgtgtatatgaattatgtgggcattcttgatacttcaagttctagtttgaaaaaaatacataactaatttaattttacacaaaaatatttatgcagattttcagaatttcatatcaggaaatgacctttttatgtctgttaaatatcaaaacaatttgctacagtgttaatctgcatggtctttaagcctgctgtagttgagttgcagacagtgcatgaaaaagtattccgctgggaattgagccatgccaccaaagccaagaggagcgcatggaaacccggtagtctagaactaatcagattactgattttagggcacagcaccagatgaattgttgtatatgcttgtaaaaattgattctgtgtgttcctctgaacaaagcggagaaaatgatgataccatcaatattgaaattaaacttccaacttctctaataaaaaattaaaacacgcataacactcgtcaagagtatttgctcccaagacacattctagcaaatgttttgcctttttcatatacatgatatcatcgttattttcaaagggggcttattaataccctcagcatgtttttcacccaaatgatgcaaaacatgcagattctagttgacttcagttgtaatagacttgtttttctcctatttatgatttgaagtggattctgtaaaatatctcttgttcttagtttccttatctgtaaaacagtggagttagactacatatcttttggcactaacatctcatgaaaaattatggttaataaaatatcaccacatttggattgccaattttc

SEQ ID NO: 68235 - DNA, 5325 bp, Artificial Sequence
  derived and/or modified sequence
ccagttaggagtattactagaacatttgcatcgggaaaaacagaaaaggtgatctttcaagcactcaaggagttaggtcttcccagtggaaagaatgatgaaattgagcccacagcattttcttatgaaaagttctatgaactgacacaaaagatttgtcctcggacagatatagaagatcttttcaaaaaaatcaatggagacaaaactgattatttaacggtagaccaattagtgagctttctaaatgaacatcaacgagatcctcgattgaatgaaattttatttccattttatgatgccaaaagggcaatgcagatcattgagatgtatgaacctgatgaagatttgaagaaaaaaggccttatatcaagtgatgggttttgcagatatctgatgtcagatgaaaacgccccagtcttcctagatcgtttagaactttaccaagaaatggaccatcctctggctcactacttcatcagttcttcccataacacttatctcactggcagacagttcggcgggaagtcttcggtagaaatgtacagacaggttctcctggctggttgcagatgtgttgaacttgactgctgggatggaaaaggtgaagaccaagaaccaataataactcatggaaaagcaatgtgtacagatatcctttttaaggatgtaattcaagccatcaaggaaactgcatttgtcacatcagaatatcctgtaattctctcctttgaaaatcactgcagcaaatatcaacagtacaagatgtccaaatattgcgaagatctatttggggatctcctgttgaaacaagcacttgaatcacatccacttgaaccaggcagggctttgccatcccccaatgacctcaaaagaaaaatactcataaaaaacaagcggctgaaacctgaagttgaaaaaaaacagctggaagctttgagaagcatgatggaagctggagaatctgcctccccagcaaacatcttagaggacgataatgaagaggagatcgaaagtgctgaccaagaggaggaagctcaccccgaattcaaatttggaaatgaactttctgctgatgacttgggtcacaaggaagctgttgcaaatagcgtcaagaaggcttcagatgaccttgaacatgaaaacaacaaaaagggcctggtcactgtagaagatgagcaggcgtggatggcatcttataaatatgtaggtgctaccactaatatccatccatatttgtccacaatgatcaactacgcccagcctgtaaagtttcaaggtttccatgtggcagaagaacgcaatattcattataacatgtcttcttttaatgaatcagtcggtcttggctacttgaagacacatgcaattgaatttgtcaattataacaaacggcaaatgagtcgcatttaccccaagggaggccgagtcgattccagtaattacatgcctcagattttctggaacgctggctgccagatggtttcactgaactatcaaaccccagatttagcgatgcaattgaatcagggaaaatttgagtataatggatcgtgcgggtaccttctcaaaccagatttcatgaggcggcctgatcgaacatttgaccccttctctgaaactcctgttgatggtgttattgcagccacttgctcagtgcaggttatatcaggtcaattcttatcagataagaaaattggcacctacgtagaggtggatatgtatgggttgcccactgacaccatacgtaaggaattccgaactcgcatggttatgaataatggactcaatccagtttacaatgaagagtcatttgtatttcggaaggtgatcctgccggacctggctgtcttgagaatagctgtgtatgatgataacaacaagctgattggccagaggatcctcccgcttgatggcctccaagccggatatcgacacatttcccttcgaaatgagggaaataaaccattatcactaccaacaattttctgcaatattgttcttaaaacatatgtgcctgatggatttggagatatcgtggatgctttatcagatccaaagaaatttctctcaattacagaaaagagagcagaccaaatgagagctatgggcattgaaactagtgacatagccgacgtgcccagtgacacttccaaaaatgacaagaaaggaaaggccaacaccgccaaagcaaatgtgacccctcagagtagctctgagctcagaccaaccaccacggctgccctggcctctggtgtggaagccaagaaaggtattgaacttatccctcaagtaaggatagaagacttaaagcagatgaaggcttacttgaagcatttaaagaaacagcagaaggagctaaattctttaaagaagaaacatgcaaaggaacacagtaccatgcagaagttacactgcacgcaagttgacaaaattgtggcacagtatgacaaagagaagtcgactcatgagaaaatcctagagaaggcaatgaagaagaaggggggaagtaattgtctcgaaatgaaaaaagaaacagaaatcaaaattcagacgctgacatcagatcacaaatctaaggtcaaagagattgtagcacagcacacaaaggaatggtcagaaatgatcaatacccacagtgctgaggagcaagaaatccgagacctgcacctcagccagcagtgtgagctgctgaaaaagctactcatcaatgcccacgagcagcaaacccagcagctgaaactgtcccatgacagggaaagcaaggaaatgcgagcacaccaggctaagatttctatggaaaatagcaaagccatcagccaagataaatctatcaagaataaagcagaacgggaaaggcgagtcagggagttaaacagcagcaacactaaaaagtttctggaagaaagaaagagacttgccatgaagcagtccaaagaaatggatcagttgaaaaaagtccagcttgaacatctagaattcctagagaaacagaatgagcaggcgaaggagatgcagcagatggtgaaattggaagccgagatggaccgcagaccagcaacagtagtatgaaactccaaaatgcaaactgaagcagcaaacccacaaagcatcaaaagactcactcacaaacttctgaacacaaactccatggatgaaagctgtttattttgtttcctttatgtgtaaacaagatgatatctgaaaccagagagacttggaatgtctgactgacttctatttaacagcttgagtattgcatttccttggccaaacaaaaatagctacaaatccacaaaaatttactattccagtaaggcagagtccaaccattgataatacaacttaaacatgtttgctataaaataccatcacaagtaaatgagcttggtgtgaacaactctcctttgtgatgccttaggacatgtttgaactgcagcaaaaaacaaaaacaaaaaacagtgcattagcaatttcatagcaagtgcatgcactaggaaaagaaaactctgtctacaagtttattagcagaagtggtggtctgctagacaaataattttgcaaaatttttctacatctaagttacctcatcagtaagtgccatgtctctaccatgccatcagaggctaatttcctgtaaaagttgtggaaattgttagaacaatagaaaaatagagcagtgtatgtgtgccaaaactcatcattactcaaaggagaactgtgttaggcacatttaagaaagtttacatctgacattgctttataggaattgtttctgcagattccggatattataattcacaccataaagattgtgaagtggttattggcaaacgtttgtaaatgtgaccatgtataaagtatttatactctttaattcacactgttagagagcaaaatcatctaagtattgccacatgacaagattagtaaacaggaatactagaactatgtttgcatgatacacaagcaccaataaagactaatccatacacagttaacctaatgccaaataaatactggttaaataaatgtatggcacagaatataatttgactatcaagacttttagcataatgaaaaaccctctctctatatatatatgtgtatatgaattatgtgggcattcttgatacttcaagttctagtttgaaaaaaatacataactaatttaattttacacaaaaatatttatgcagattttcagaatttcatatcaggaaatgacctttttatgtctgttaaatatcaaaacaatttgctacagtgttaatctgcatggtctttaagcctgctgtagttgagttgcagacagtgcatgaaaaagtattccgctgggaattgagccatgccaccaaagccaagaggagcgcatggaaacccggtagtctagaactaatcagattactgattttagggcacagcaccagatgaattgttgtatatgcttgtaaaaattgattctgtgtgttcctctgaacaaagcggagaaaatgatgataccatcaatattgaaattaaacttccaacttctctaataaaaaattaaaacacgcataacactcgtcaagagtatttgctcccaagacacattctagcaaatgttttgcctttttcatatacatgatatcatcgttattttcaaagggggcttattaataccctcagcatgtttttcacccaaatgatgcaaaacatgcagattctagttgacttcagttgtaatagacttgtttttctcctatttatgatttgaagtggattctgtaaaatatctcttgttcttagtttccttatctgtaaaacagtggagttagactacatatcttttggcactaacatctcatgaaaaattatggttaataaaatatcaccacatttggattgccaattttcaaagattctgagtggcttctcatcatcaaatcaaatcaaatccaagagctcaactatgctcaccattctgtaacacttgactgaattcatcacttgcctcctcttgtttctgctttggagaggtactactagtttttccatttttcttatttcttccctcttttcatcctcctaggccaccataagcatttatattttccagtgttatacatggaaccagtttgtttttctttgatccaggttacttttagtatttgagacatcataccattaatccattgtagtaggattaaaatgtacacacaactcaaatgtgcaacaaaagcatgtgttacctgctattgtcagttcatattgcactcaaaccttgcattatcccttattatgaagaaaaattaatagccaattaaagtaactcagtgtcttcca

SEQ ID NO: 68236 - DNA, 3564 bp, Artificial Sequence
  derived and/or modified sequence
atggccaagccttatgagtttaactggcagaaagaggtgccgtctttcctccaggagggggcagtgttcgatcgatatgaagaggagtccttcgtgttcgagcctaattgtctcttcaaagtggacgaattcggattcttcctaacctggaggagcgaaggaaaagagggtcaagtactggaatgcagtctcatcaattcaatccgatcaggagccatccccaaagatcccaagattttggccgcactagaggctgtcggtaagagtgagaacgacctggagggcagaatcgtctgcgtatgcagtggcaccgacctggtgaatatatccttcacgtatatggtcgcagagaacccagaagttacaaagcagtgggttgaaggcctcagaagtattatacataacttccgtgccaacaacgtgagccctatgacgtgtctcaagaagcactggatgaagctcgccttcatgacaaataccaatggaaagataccagtgcgctcgattactcgcacctttgccagtggtaaaacagaaaaagtaatcttccaggctctgaaggagttggggctgccctctgggaagaacgacgagatcgagccaaccgcattctcatacgagaagttttacgagctcacccagaaaatctgccctcgcactgacattgaggatctcttcaagaaaattaacggagacaaaactgattatcttaccgtcgatcaacttgtttccttcctgaatgagcaccaacgggaccctcgcctgaacgaaattctgttcccattctatgacgctaagcgcgcaatgcagataatcgagatgtatgagcccgatgaggatctcaaaaaaaagggcctgatcagctctgacggtttttgtcggtacctaatgtccgatgaaaatgcaccagttttcctcgatcggctcgaactctaccaggagatggaccaccccctggctcattattttatcagttcaagtcacaatacgtacttgacagggagacagttcgggggaaagagcagcgtagagatgtaccgccaggtcctgctggctggttgccgctgcgtagagctagactgctgggacggaaagggcgaagaccaagaacccatcatcacccacgggaaagcaatgtgcactgatatcctgttcaaggatgtgattcaggccatcaaagagaccgcttttgttacctcagaatacccagtcatcttgagctttgagaatcattgttcaaagtaccagcagtataaaatgtccaagtattgtgaggatttgttcggggacctattgcttaaacaggccctagagtcccatcccttggaacccggtcgggctttgccctctccaaatgacttaaagagaaagatcctgattaaaaataaacgactgaaacctgaggtcgagaagaaacagctcgaggctctgaggagtatgatggaagcaggcgaatccgcttcccctgctaacatcttagaggacgacaacgaagaggaaattgaatctgcagatcaagaggaggaagctcatccagagttcaaattcggcaacgaactgtccgccgatgacctgggtcacaaggaggccgtggctaactccgtaaagaaggccagtgatgatctggagcatgaaaacaacaagaaaggtctggtgactgtggaggatgaacaggcctggatggcttcctacaaatatgtgggggcaaccactaatattcatccatacctcagcactatgattaattacgcccagcccgtgaagtttcagggtttccatgtggccgaagagcgtaatattcactataatatgtcaagcttcaatgaatcagtggggttggggtacctcaaaacacacgcaattgaatttgtcaattataacaagcgacaaatgagccgcatctatcccaaaggagggagggtggactcatctaactacatgcctcaaatcttttggaacgctggatgtcaaatggttagcctgaattatcagactccagatcttgcgatgcagctgaaccagggaaagtttgaatacaacggatcctgtgggtatctgctgaaaccagacttcatgagaagaccagatagaacgttcgaccccttcagtgagacaccagtggatggagtcatcgctgcaacttgctccgtgcaagtgattagtggccagtttctgagcgacaagaaaatcgggacatacgtcgaagtggatatgtatggcctccctacagacacgatacgcaaggagttcagaactcgaatggtcatgaacaacggattgaatccagtttataacgaggagagctttgtgttccgcaaagtgatcctgcctgatttggctgttctgagaatcgctgtatatgatgataataataagcttatcggtcaaagaatcctccctctggacggcctgcaggccggttaccggcatatctctcttaggaatgaaggtaataagcccctctctttgcccactatcttctgcaatattgtgctcaagacctatgtgccagatggattcggagatatcgtcgacgcgctgagcgatccaaagaagtttctcagcataaccgaaaaaagagctgaccagatgagggccatgggtattgaaacctctgacattgccgacgtaccctcagatacctccaaaaatgataaaaaggggaaggcgaacacggctaaggccaacgtcacaccacaatcgagttccgagctcaggcctaccacaacggccgctcttgcctccggtgtcgaagccaagaagggcatagaactgattccgcaggtacggatcgaagacctgaagcagatgaaggcgtacttaaaacacctcaaaaaacaacagaaagaactgaactccctgaaaaagaagcacgctaaagaacattccaccatgcaaaagctccactgcacccaggtggacaagattgtggctcagtacgataaggagaagagcacacatgagaaaatccttgagaaggcgatgaaaaaaaaaggcggatctaactgtctcgaaatgaagaaagaaacagaaattaagattcagactctgacgagcgaccataaatccaaggtgaaagagatagttgcccagcacacaaaggagtggtcagagatgattaatacgcacagcgcagaggagcaggagatcagggacctgcatttatcccagcaatgcgaactgctgaaaaagctgttgattaacgctcatgagcagcagactcagcagctcaagctaagtcacgatcgggaaagcaaggagatgcgtgctcatcaggccaagattagtatggaaaatagtaaagcaataagtcaggataagtctatcaaaaataaggccgaaagagagcggagggtgcgagaactcaatagcagtaatactaaaaagttcctggaagagagaaagagattggccatgaagcagtcaaaagagatggaccagctgaaaaaagttcaattagagcacttggagtttttggaaaaacagaatgagcaggcaaaggagatgcagcagatggtcaagctggaagcggaaatggaccgcagacccgctaccgtggtctag

SEQ ID NO: 68237 - DNA, 3072 bp, Artificial Sequence
  derived and/or modified sequence
cctgtacgatcgatcactagaacttttgcttcagggaaaacggagaaagttatctttcaggcgttgaaggagttggggctcccctccgggaagaatgacgaaattgaaccaactgctttctcttatgagaagttttatgagctcacacagaaaatatgccctagaacagacatcgaggacctgtttaagaagattaacggggacaaaactgattatctgaccgtcgaccagctggtcagctttcttaacgaacaccagcgagacccccgtctcaatgaaattctcttccccttctatgatgctaagagagccatgcagattattgaaatgtacgaacccgatgaagatttgaaaaagaaagggctcatatcttctgacggattctgtcgttatttaatgagtgatgagaacgcgcctgtcttcctcgacagacttgagctgtaccaggagatggatcaccctttagcccactacttcatttcatcttctcacaatacctacctgaccggacggcagttcggcggaaagagcagcgtagagatgtatcgccaggtgctactggcgggatgccggtgcgtcgaattggattgctgggacggcaagggtgaggatcaagaaccaatcattacacacggcaaggcgatgtgcactgatattttgttcaaggatgttatccaggccatcaaggagacggccttcgtgacctccgagtatcccgtgatcttgtccttcgagaaccactgtagcaaataccagcagtataaaatgagtaaatattgcgaagacctgtttggggatttgctgctcaaacaagctcttgaaagccatccattagaaccaggtagagcgctcccatcccccaacgatctcaaacgaaagattctaatcaagaataaaaggttgaagccagaggttgaaaagaaacagctggaagcattaaggagtatgatggaggccggagagtctgccagcccagcgaatatactcgaggacgacaatgaagaagagattgagagtgccgaccaggaggaagaggctcatcccgagttcaagttcgggaacgagctttccgcggatgaccttggccataaggaagctgtggccaactccgtgaagaaagccagcgacgatctggagcacgaaaataacaagaaagggctggtgaccgtcgaggatgagcaggcttggatggcgagctacaagtatgtcggtgcaacaacgaacatccacccttatctgtccactatgattaactacgctcagcccgtgaaattccagggctttcatgtcgcagaggagagaaacatccactataacatgtctagcttcaatgaaagtgtcgggttaggatacttaaagactcatgccatcgagttcgtaaactacaataaaagacaaatgtcaaggatataccccaagggcggtcgggttgatagcagcaactacatgccacagattttttggaacgctggctgtcagatggtctccctgaactaccagacacctgatctcgccatgcaattaaaccagggaaagttcgaatacaatgggagttgcggctatctgctgaagcccgattttatgcgacgtccggatcggacatttgatcctttttcagaaacgcctgtcgacggagttatcgcagctacatgttccgtacaggtgatttcaggccagttccttagcgataagaagattggtacatacgtggaagtcgatatgtacgggttgcctactgacaccattcgtaaggaattcaggacaagaatggttatgaataatggactgaaccctgtgtataacgaagagagcttcgtgttccgaaaggtgatacttcctgatttggcagtcctgcgaatagcagtatacgatgataacaacaagctcatcgggcagaggattctgcccttggatggcctgcaggctgggtacaggcacatctcacttcggaatgaaggaaacaagcctttgtcactcccaaccattttctgcaacatcgttcttaaaacttatgtacccgacggctttggggacattgttgacgcactgagcgaccctaaaaagttcctgtccatcactgaaaaaagagctgatcaaatgcgcgcaatggggatagaaacaagtgacattgcagatgtgccctccgacaccagcaagaatgacaaaaagggcaaagccaataccgctaaggccaatgtgactccgcagtcttccagcgagctccggccaaccacaaccgcagcactcgcctccggggttgaggccaaaaagggcatagaactcatacctcaagtgagaattgaggacctcaaacagatgaaggcgtacctgaagcatctcaaaaaacaacagaaggaactgaattcattgaaaaagaagcatgccaaagaacattcaaccatgcagaagctgcactgcacccaggtggataagatcgtggcgcagtatgacaaggagaaaagtacacacgagaagatattagagaaggccatgaaaaagaagggcggatcaaattgcctagaaatgaagaaggagacggaaataaagatacagactctaacgtccgaccacaaaagtaaggttaaggaaattgtggcccagcatacaaaggagtggtctgagatgatcaacactcactctgcagaggaacaagagattcgtgatcttcacctgtcacaacagtgcgaacttttgaaaaagttgttgatcaacgcccacgaacagcagacacagcagttgaaactgtctcacgaccgagaatcaaaggagatgcgggctcatcaggccaaaatttccatggaaaactcgaaagctatttctcaagataaatcaatcaaaaacaaagcagaaagggaacggcgtgttagagagttaaactcatccaataccaagaagttcttggaggaacggaagcgtcttgcgatgaaacagagtaaggaaatggatcaactcaaaaaggtacagctagagcatctggagttccttgagaagcagaacgaacaggctaaagaaatgcagcagatggttaagctcgaggctgagatggatcggcgaccggctactgtagtctag

SEQ ID NO: 68238 - DNA, 3564 bp, Artificial Sequence
  derived and/or modified sequence
atggccaagccctacgagttcaactggcagaaggaggtgcccagcttcctgcaggagggcgccgtgttcgacagatacgaggaggagagcttcgtgttcgagcccaactgcctgttcaaggtggacgagttcggcttcttcctgacctggagaagcgagggcaaggagggccaggtgctggagtgcagcctgatcaacagcatcagaagcggcgccatccccaaggaccccaagatcctggccgccctggaggccgtgggcaagagcgagaacgacctggagggcagaatcgtgtgcgtgtgcagcggcaccgacctggtgaacatcagcttcacctacatggtggccgagaaccccgaggtgaccaagcagtgggtggagggcctgagaagcatcatccacaacttcagagccaacaacgtgagccccatgacctgcctgaagaagcactggatgaagctggccttcatgaccaacaccaacggcaagatccccgtgagaagcatcaccagaaccttcgccagcggcaagaccgagaaggtgatcttccaggccctgaaggagctgggcctgcccagcggcaagaacgacgagatcgagcccaccgccttcagctacgagaagttctacgagctgacccagaagatctgccccagaaccgacatcgaggacctgttcaagaagatcaacggcgacaagaccgactacctgaccgtggaccagctggtgagcttcctgaacgagcaccagagagaccccagactgaacgagatcctgttccccttctacgacgccaagagagccatgcagatcatcgagatgtacgagcccgacgaggacctgaagaagaagggcctgatcagcagcgacggcttctgcagatacctgatgagcgacgagaacgcccccgtgttcctggacagactggagctgtaccaggagatggaccaccccctggcccactacttcatcagcagcagccacaacacctacctgaccggcagacagttcggcggcaagagcagcgtggagatgtacagacaggtgctgctggccggctgcagatgcgtggagctggactgctgggacggcaagggcgaggaccaggagcccatcatcacccacggcaaggccatgtgcaccgacatcctgttcaaggacgtgatccaggccatcaaggagaccgccttcgtgaccagcgagtaccccgtgatcctgagcttcgagaaccactgcagcaagtaccagcagtacaagatgagcaagtactgcgaggacctgttcggcgacctgctgctgaagcaggccctggagagccaccccctggagcccggcagagccctgcccagccccaacgacctgaagagaaagatcctgatcaagaacaagagactgaagcccgaggtggagaagaagcagctggaggccctgagaagcatgatggaggccggcgagagcgccagccccgccaacatcctggaggacgacaacgaggaggagatcgagagcgccgaccaggaggaggaggcccaccccgagttcaagttcggcaacgagctgagcgccgacgacctgggccacaaggaggccgtggccaacagcgtgaagaaggccagcgacgacctggagcacgagaacaacaagaagggcctggtgaccgtggaggacgagcaggcctggatggccagctacaagtacgtgggcgccaccaccaacatccacccctacctgagcaccatgatcaactacgcccagcccgtgaagttccagggcttccacgtggccgaggagagaaacatccactacaacatgagcagcttcaacgagagcgtgggcctgggctacctgaagacccacgccatcgagttcgtgaactacaacaagagacagatgagcagaatctaccccaagggcggcagagtggacagcagcaactacatgccccagatcttctggaacgccggctgccagatggtgagcctgaactaccagacccccgacctggccatgcagctgaaccagggcaagttcgagtacaacggcagctgcggctacctgctgaagcccgacttcatgagaagacccgacagaaccttcgaccccttcagcgagacccccgtggacggcgtgatcgccgccacctgcagcgtgcaggtgatcagcggccagttcctgagcgacaagaagatcggcacctacgtggaggtggacatgtacggcctgcccaccgacaccatcagaaaggagttcagaaccagaatggtgatgaacaacggcctgaaccccgtgtacaacgaggagagcttcgtgttcagaaaggtgatcctgcccgacctggccgtgctgagaatcgccgtgtacgacgacaacaacaagctgatcggccagagaatcctgcccctggacggcctgcaggccggctacagacacatcagcctgagaaacgagggcaacaagcccctgagcctgcccaccatcttctgcaacatcgtgctgaagacctacgtgcccgacggcttcggcgacatcgtggacgccctgagcgaccccaagaagttcctgagcatcaccgagaagagagccgaccagatgagagccatgggcatcgagaccagcgacatcgccgacgtgcccagcgacaccagcaagaacgacaagaagggcaaggccaacaccgccaaggccaacgtgaccccccagagcagcagcgagctgagacccaccaccaccgccgccctggccagcggcgtggaggccaagaagggcatcgagctgatcccccaggtgagaatcgaggacctgaagcagatgaaggcctacctgaagcacctgaagaagcagcagaaggagctgaacagcctgaagaagaagcacgccaaggagcacagcaccatgcagaagctgcactgcacccaggtggacaagatcgtggcccagtacgacaaggagaagagcacccacgagaagatcctggagaaggccatgaagaagaagggcggcagcaactgcctggagatgaagaaggagaccgagatcaagatccagaccctgaccagcgaccacaagagcaaggtgaaggagatcgtggcccagcacaccaaggagtggagcgagatgatcaacacccacagcgccgaggagcaggagatcagagacctgcacctgagccagcagtgcgagctgctgaagaagctgctgatcaacgcccacgagcagcagacccagcagctgaagctgagccacgacagagagagcaaggagatgagagcccaccaggccaagatcagcatggagaacagcaaggccatcagccaggacaagagcatcaagaacaaggccgagagagagagaagagtgagagagctgaacagcagcaacaccaagaagttcctggaggagagaaagagactggccatgaagcagagcaaggagatggaccagctgaagaaggtgcagctggagcacctggagttcctggagaagcagaacgagcaggccaaggagatgcagcagatggtgaagctggaggccgagatggacagaagacccgccaccgtggtgtag

SEQ ID NO: 68239 - DNA, 3072 bp, Artificial Sequence
  derived and/or modified sequence
cccgtgagaagcatcaccagaaccttcgccagcggcaagaccgagaaggtgatcttccaggccctgaaggagctgggcctgcccagcggcaagaacgacgagatcgagcccaccgccttcagctacgagaagttctacgagctgacccagaagatctgccccagaaccgacatcgaggacctgttcaagaagatcaacggcgacaagaccgactacctgaccgtggaccagctggtgagcttcctgaacgagcaccagagagaccccagactgaacgagatcctgttccccttctacgacgccaagagagccatgcagatcatcgagatgtacgagcccgacgaggacctgaagaagaagggcctgatcagcagcgacggcttctgcagatacctgatgagcgacgagaacgcccccgtgttcctggacagactggagctgtaccaggagatggaccaccccctggcccactacttcatcagcagcagccacaacacctacctgaccggcagacagttcggcggcaagagcagcgtggagatgtacagacaggtgctgctggccggctgcagatgcgtggagctggactgctgggacggcaagggcgaggaccaggagcccatcatcacccacggcaaggccatgtgcaccgacatcctgttcaaggacgtgatccaggccatcaaggagaccgccttcgtgaccagcgagtaccccgtgatcctgagcttcgagaaccactgcagcaagtaccagcagtacaagatgagcaagtactgcgaggacctgttcggcgacctgctgctgaagcaggccctggagagccaccccctggagcccggcagagccctgcccagccccaacgacctgaagagaaagatcctgatcaagaacaagagactgaagcccgaggtggagaagaagcagctggaggccctgagaagcatgatggaggccggcgagagcgccagccccgccaacatcctggaggacgacaacgaggaggagatcgagagcgccgaccaggaggaggaggcccaccccgagttcaagttcggcaacgagctgagcgccgacgacctgggccacaaggaggccgtggccaacagcgtgaagaaggccagcgacgacctggagcacgagaacaacaagaagggcctggtgaccgtggaggacgagcaggcctggatggccagctacaagtacgtgggcgccaccaccaacatccacccctacctgagcaccatgatcaactacgcccagcccgtgaagttccagggcttccacgtggccgaggagagaaacatccactacaacatgagcagcttcaacgagagcgtgggcctgggctacctgaagacccacgccatcgagttcgtgaactacaacaagagacagatgagcagaatctaccccaagggcggcagagtggacagcagcaactacatgccccagatcttctggaacgccggctgccagatggtgagcctgaactaccagacccccgacctggccatgcagctgaaccagggcaagttcgagtacaacggcagctgcggctacctgctgaagcccgacttcatgagaagacccgacagaaccttcgaccccttcagcgagacccccgtggacggcgtgatcgccgccacctgcagcgtgcaggtgatcagcggccagttcctgagcgacaagaagatcggcacctacgtggaggtggacatgtacggcctgcccaccgacaccatcagaaaggagttcagaaccagaatggtgatgaacaacggcctgaaccccgtgtacaacgaggagagcttcgtgttcagaaaggtgatcctgcccgacctggccgtgctgagaatcgccgtgtacgacgacaacaacaagctgatcggccagagaatcctgcccctggacggcctgcaggccggctacagacacatcagcctgagaaacgagggcaacaagcccctgagcctgcccaccatcttctgcaacatcgtgctgaagacctacgtgcccgacggcttcggcgacatcgtggacgccctgagcgaccccaagaagttcctgagcatcaccgagaagagagccgaccagatgagagccatgggcatcgagaccagcgacatcgccgacgtgcccagcgacaccagcaagaacgacaagaagggcaaggccaacaccgccaaggccaacgtgaccccccagagcagcagcgagctgagacccaccaccaccgccgccctggccagcggcgtggaggccaagaagggcatcgagctgatcccccaggtgagaatcgaggacctgaagcagatgaaggcctacctgaagcacctgaagaagcagcagaaggagctgaacagcctgaagaagaagcacgccaaggagcacagcaccatgcagaagctgcactgcacccaggtggacaagatcgtggcccagtacgacaaggagaagagcacccacgagaagatcctggagaaggccatgaagaagaagggcggcagcaactgcctggagatgaagaaggagaccgagatcaagatccagaccctgaccagcgaccacaagagcaaggtgaaggagatcgtggcccagcacaccaaggagtggagcgagatgatcaacacccacagcgccgaggagcaggagatcagagacctgcacctgagccagcagtgcgagctgctgaagaagctgctgatcaacgcccacgagcagcagacccagcagctgaagctgagccacgacagagagagcaaggagatgagagcccaccaggccaagatcagcatggagaacagcaaggccatcagccaggacaagagcatcaagaacaaggccgagagagagagaagagtgagagagctgaacagcagcaacaccaagaagttcctggaggagagaaagagactggccatgaagcagagcaaggagatggaccagctgaagaaggtgcagctggagcacctggagttcctggagaagcagaacgagcaggccaaggagatgcagcagatggtgaagctggaggccgagatggacagaagacccgccaccgtggtgtag

SEQ ID NO: 68240 - protein, 481 aa, Artificial Sequence
  derived and/or modified sequence
MAAGWLTTWSQNSVTFQEVAVDFSQEEWALLDPAQKNLYKDVMLENFRNLASVGYQLCRHSLISKVDQEQLKTDERGILQGDCADWETQLKPKDTIAMQNIPGGKTSNGINTAENQPGEHSLECNHCGKFRKNTRFICTRYCKGEKCYKYIKYSKVFNHPSTLRSHVSIHIGEKTLEFTDCRKAFNQESSLRKHLRTPTGQKFQEYEQCDMSFSLHSSCSVREQIPTGEKGDECSDYGKISPLSVHTKTGSVEEGLECNEHEKTFTDPLSLQNCVRTHSGEMPYECSDCGKAFIFQSSLKKHMRSHTGEKPYECDHCGKSFSQSSHLNVHKRTHTGEKPYDCKECGKAFTVPSSLQKHVRTHTGEKPYECSDCGKAFIDQSSLKKHTRSHTGEKPYECNQCGKSFSTGSYLIVHKRTHTGEKTYECKECGKAFRNSSCLRVHVRTHTGEKPYKCIQCEKAFSTSTNLIMHKRIHNGQKLHE

SEQ ID NO: 68241 - DNA, 1446 bp, Artificial Sequence
  derived and/or modified sequence
atggccgccggctggctgaccacctggagccagaacagcgtgaccttccaggaggtggccgtggacttcagccaggaggagtgggccctgctggaccccgcccagaagaacctgtacaaggacgtgatgctggagaacttcagaaacctggccagcgtgggctaccagctgtgcagacacagcctgatcagcaaggtggaccaggagcagctgaagaccgacgagagaggcatcctgcagggcgactgcgccgactgggagacccagctgaagcccaaggacaccatcgccatgcagaacatccccggcggcaagaccagcaacggcatcaacaccgccgagaaccagcccggcgagcacagcctggagtgcaaccactgcggcaagttcagaaagaacaccagattcatctgcaccagatactgcaagggcgagaagtgctacaagtacatcaagtacagcaaggtgttcaaccaccccagcaccctgagaagccacgtgagcatccacatcggcgagaagaccctggagttcaccgactgcagaaaggccttcaaccaggagagcagcctgagaaagcacctgagaacccccaccggccagaagttccaggagtacgagcagtgcgacatgagcttcagcctgcacagcagctgcagcgtgagagagcagatccccaccggcgagaagggcgacgagtgcagcgactacggcaagatcagccccctgagcgtgcacaccaagaccggcagcgtggaggagggcctggagtgcaacgagcacgagaagaccttcaccgaccccctgagcctgcagaactgcgtgagaacccacagcggcgagatgccctacgagtgcagcgactgcggcaaggccttcatcttccagagcagcctgaagaagcacatgagaagccacaccggcgagaagccctacgagtgcgaccactgcggcaagagcttcagccagagcagccacctgaacgtgcacaagagaacccacaccggcgagaagccctacgactgcaaggagtgcggcaaggccttcaccgtgcccagcagcctgcagaagcacgtgagaacccacaccggcgagaagccctacgagtgcagcgactgcggcaaggccttcatcgaccagagcagcctgaagaagcacaccagaagccacaccggcgagaagccctacgagtgcaaccagtgcggcaagagcttcagcaccggcagctacctgatcgtgcacaagagaacccacaccggcgagaagacctacgagtgcaaggagtgcggcaaggccttcagaaacagcagctgcctgagagtgcacgtgagaacccacaccggcgagaagccctacaagtgcatccagtgcgagaaggccttcagcaccagcaccaacctgatcatgcacaagagaatccacaacggccagaagctgcacgagtag

SEQ ID NO: 68242 - DNA, 1446 bp, Artificial Sequence
  derived and/or modified sequence
atggccgctggctggctgactacatggagtcagaattccgtgacatttcaagaggttgcagtagacttctcacaggaagaatgggcactgctggaccccgcccagaagaacttatacaaggatgtgatgctggaaaatttcaggaaccttgctagtgttggctaccaactctgtagacacagcttgataagtaaggtggaccaggaacagcttaaaactgatgagcggggcatcctgcagggtgactgcgctgactgggaaacccagcttaaaccaaaggacactattgccatgcagaacattcctggcggaaagacttccaacggtattaacacagccgagaatcaaccgggggaacattcattagaatgcaatcactgcggcaaatttagaaagaatacaagattcatctgtactcgttattgtaagggtgagaaatgctacaagtacatcaaatactcaaaggtattcaaccacccctctacgctgaggagtcacgtcagtattcacattggggagaaaacactagagttcacggattgccgtaaggcgttcaatcaagagtcttctctaaggaaacacctgcggaccccaacaggccagaagttccaggagtacgagcagtgcgatatgagcttttctctacatagctcatgctcagtccgggaacaaatccccacgggggagaagggagacgaatgctcagattatggtaagataagtccgctgtctgtacatactaaaaccgggtccgtcgaagaaggtctcgagtgcaacgagcacgaaaagacatttactgaccccctttcgctgcaaaattgtgtccgtactcactcaggggaaatgccctacgagtgcagtgactgcggaaaggcttttatcttccagtccagtctgaagaagcacatgagatcacatactggcgaaaaaccatatgagtgtgaccactgtggcaaatcttttagtcaatcatctcacttaaatgtgcacaaaaggactcacaccggcgaaaaaccttacgattgcaaagaatgtggcaaggcattcactgtgcccagttccctgcaaaagcacgtgcgaactcacactggggagaaaccgtatgagtgctctgactgcggtaaagccttcatcgatcaatcatcactgaaaaagcacacaaggtctcatactggagagaaaccttatgaatgcaaccagtgcgggaaatccttctccaccggatcttatctgatcgtacacaagcggacccacaccggagaaaaaacatatgagtgtaaggagtgcgggaaggcgttccggaattcctcgtgtttgcgcgtccatgttagaacgcatactggagaaaagccttacaagtgcatccagtgcgaaaaggctttttctactagcactaatctgataatgcataagcggattcacaatggccagaaactgcacgaatag

SEQ ID NO: 68243 - DNA, 1446 bp, Artificial Sequence
  derived and/or modified sequence
atggctgctggctggctgaccacctggagccagaacagcgtgaccttccaggaggtggccgtggacttcagccaggaggagtgggccctgctggaccctgcccagaagaacctgtacaaggatgtgatgctggagaacttcaggaacctggcctctgtgggctaccagctgtgccgccacagcctcatcagcaaggtggaccaggagcagctgaagacagatgagcggggcatcctgcagggcgactgtgccgactgggagacccagctgaagcccaaggacaccatcgccatgcagaacatccctgggggcaagaccagcaatggcatcaacacagctgagaaccagcctggagagcacagcctggagtgcaaccactgcggcaagttcaggaagaacacccgcttcatctgcacccgctactgcaagggggagaagtgctacaagtacatcaagtacagcaaggtgttcaaccaccccagcaccctgcggagccacgtgtccatccacatcggggagaagaccctggagttcacagactgcaggaaggccttcaaccaggagagcagcctgaggaagcacctgcggacccccaccggccagaagttccaggagtatgagcagtgtgacatgtccttcagcctgcacagcagctgcagcgtgcgggagcagatccccactggagagaagggagatgaatgtagtgactatggcaagatcagccccctgtctgtgcacaccaagacaggctctgtggaggagggcctggagtgcaatgaacatgagaagaccttcacagaccccctgagcctgcagaactgtgtgaggacccacagcggggagatgccctatgaatgtagtgactgtgggaaggccttcatcttccagagcagcctgaagaagcacatgaggagccacactggagagaagccctatgaatgtgaccactgcggcaagagcttcagccagagcagccacctgaatgtgcacaagaggacccacactggagagaagccctatgactgcaaggaatgtgggaaggccttcaccgtgcccagcagcctgcagaagcacgtgaggacccacactggagagaagccctatgaatgtagtgactgtgggaaggccttcatcgaccagagcagcctgaagaagcacaccaggagccacactggagagaagccctatgagtgcaaccagtgtgggaagagcttcagcacaggcagctacctgattgtgcacaagaggacccacactggagagaagacctatgagtgcaaggaatgtgggaaggccttcaggaacagcagctgcctgcgggtgcacgtgaggacccacactggagagaagccctacaagtgcatccagtgtgagaaggccttcagcaccagcaccaacctgatcatgcacaagaggatccacaacggccagaagctgcacgagtag

SEQ ID NO: 68244 - DNA, 1446 bp, Artificial Sequence
  derived and/or modified sequence
atggccgccggctggctgaccacctggagccagaacagcgtgacctttcaagaagtggctgtcgacttcagccaggaggagtgggcactactggacccagcccagaagaatttatataaagacgtgatgctagagaatttccgcaacctggcctctgtaggctaccagctgtgtcgacattcactcatttcgaaggtcgaccaggagcagctgaaaaccgacgagagagggattctccagggcgactgcgccgattgggaaacacagctcaagcccaaggatacaatcgcaatgcaaaacataccgggaggaaaaacatcaaatggcattaacaccgcagaaaaccagccaggagaacacagtctggagtgtaatcactgtgggaaatttagaaagaatactcgcttcatttgcactcggtattgcaagggggaaaagtgttacaagtatattaaatattcgaaagtgttcaatcatccatccaccttaagatctcacgtgtccatacacattggcgaaaaaacccttgaattcaccgactgtcgtaaagcattcaatcaagaatcatccctgcgtaaacatctgcggaccccaactggccagaagtttcaggagtacgagcaatgcgacatgtctttctcgctgcattcttcttgttcagtacgcgaacagatcccaaccggagagaagggtgacgaatgctcagattacggcaagatttctcccttgtcagtgcatacgaaaacgggtagtgtggaagagggtcttgagtgtaacgagcatgagaaaacctttactgatccactcagtttgcaaaattgcgtgcgcactcactcaggggagatgccttacgagtgctccgattgcggtaaggcattcattttccagtccagcttaaaaaagcacatgcgctcccacacaggtgagaagccctatgaatgtgaccattgtggtaagtcattctcacaatcatcacacttgaatgtacataagcgtacgcacacgggcgaaaagccctacgactgcaaggagtgtggaaaagctttcaccgttcctagttcattgcagaaacatgtgcggactcacaccggggaaaagccctacgagtgtagtgattgtggaaaagctttcatcgatcaaagctctcttaaaaaacacactcggtcccacaccggagagaagccgtatgaatgtaaccagtgcggaaagtccttctctacaggcagttacctgatcgtacacaaacggacacatacaggggagaaaacatacgagtgcaaggagtgtggcaaggcctttcggaattcctcttgtctgcgggtccatgtccgaacgcacactggtgaaaaaccttacaaatgcatccagtgcgagaaggctttctcaacgtctactaatctgatcatgcacaaaaggatccataatggccagaaactgcatgagtag

SEQ ID NO: 68245 - DNA, 1446 bp, Artificial Sequence
  derived and/or modified sequence
atggccgctggctggctgaccacttggtcccagaactctgtgaccttccaggaggtcgccgttgatttctcccaagaggagtgggccctgttggacccagcacagaaaaacctgtacaaagatgtgatgctggaaaacttcaggaatcttgcctcagtcggatatcagctatgtaggcattctctgatctctaaggttgaccaggaacagttgaaaactgacgagcgcggaatcctgcagggcgactgtgccgattgggaaacccagctgaagcctaaggatacgatcgccatgcagaatataccagggggaaagacttcaaacggtatcaacacggcggaaaatcaacccggagagcatagcctggaatgcaatcactgtggcaagttccgaaagaacacccgatttatttgcacgaggtattgcaagggcgaaaagtgttacaaatatatcaaatactctaaagtgtttaatcatccaagtacactgcggtctcacgtgtctatccatatcggagagaagaccttagagtttacggattgtcggaaagcctttaatcaagagagctcactccgtaaacatttacgcactcccactggccagaagtttcaggagtacgagcaatgtgacatgagctttagccttcactctagctgcagtgttcgggaacaaataccaaccggcgaaaaaggcgatgagtgttcagattacggaaaaatctccccgctgagcgtccacactaaaactgggtccgttgaggaggggctcgaatgcaacgaacacgaaaagacttttacagatccgctttccctccagaactgtgttaggactcattcaggcgagatgccatatgaatgcagtgactgcggtaaagcttttatcttccaaagctcactgaagaaacacatgagatcgcatactggggaaaaaccatacgagtgcgaccactgcggaaaatccttttctcagtcatcccacctgaacgttcacaagaggacccacaccggggaaaagccctacgattgcaaagaatgcggcaaggccttcacggtgcctagtagcctgcagaaacacgtgcgtacccacactggagaaaaaccatatgagtgcagtgattgcggaaaagccttcatcgatcagtcctctttgaagaagcacaccaggtctcataccggggagaaaccttatgagtgcaaccagtgtggaaaatccttctccactggaagctatctcattgtgcacaagaggacccataccggtgaaaagacttacgaatgtaaggagtgtgggaaggcctttcgcaactcctcatgtctcagggtgcacgttcggacacacaccggtgagaagccctataagtgcatccagtgtgagaaggctttttctaccagcactaaccttattatgcataaaaggattcacaatggtcagaagttgcacgagtag

SEQ ID NO: 68246 - DNA, 2340 bp, Artificial Sequence
  derived and/or modified sequence
tagctctgcctgcttaggactctgcccagccaggaaggaaacctacaggaggaagaatggctgcagggtggctgacaacctggtcacagaactcagtaaccttccaggaagtggcagtggacttttcccaggaggagtgggcattgctggaccctgctcaaaaaaatctatacaaagatgtgatgctggagaactttaggaacctggcctcagtagggtatcagctctgcagacacagtctgatctccaaggtggatcaagaacagctgaagacagatgaaagaggaattttacaaggtgactgtgcagactgggaaactcaacttaaaccaaaagatacaattgctatgcagaacattcctgggggaaaaacatccaatggcataaacacggcagaaaatcaacctggtgagcactccctggagtgtaaccattgtgggaaattcagaaagaacactcgctttatttgtacaagatattgcaagggagagaaatgctataaatatataaagtatagcaaagtcttcaaccatccctcaactcttaggagtcatgtgagcattcacattggagagaaaactcttgaatttactgattgtagaaaagctttcaatcaagagtcatccctcaggaaacacttaagaactcccacaggacagaagtttcaggagtatgagcaatgtgatatgtccttcagcctacactcttcctgctcagtacgtgagcaaatacctactggagagaaaggtgatgaatgcagtgactatggcaaaatatctccccttagtgtccacacaaaaactggtagtgtggaggagggtttggaatgtaatgaacatgagaaaactttcactgaccctttgtcccttcagaactgtgtcagaactcactctggagagatgccctatgaatgcagtgactgtgggaaagccttcatttttcagtcttcccttaagaaacacatgagatctcatactggagagaagccttatgagtgtgatcactgtggaaaatcctttagccagagctctcatctgaatgtgcacaaaagaactcacactggagagaaaccctatgactgtaaggaatgtgggaaggctttcactgttccttcatcccttcagaaacatgtgagaacccacactggagagaaaccctatgaatgcagtgactgtggaaaagccttcatcgatcagtcatcccttaagaaacacacacgctctcacactggagagaagccttatgagtgtaaccagtgtggaaagtccttcagcacaggctcttaccttattgtgcacaagagaactcacactggtgagaaaacctatgagtgtaaagaatgtgggaaggcctttaggaattcctcttgcctgagggtacacgtgagaactcacactggagagaagccttataaatgtattcagtgtgaaaaagcctttagcacaagcactaaccttataatgcacaagcgaatccacaatggccagaaactccatgaatgaaatgactcagggaagtgtttgttgcccctcatgcctcctttctcactttagaacatatattggagagaagccctgttatggtcacctggaaacagccttctggcccaactctggatgcctgttatactgggacaaaccttataaatgttatagctatgattgtttttatcagtgagtatttcattcttatatgtgtcacaactgtagatcctatgaatattttagttatcttttcagtttaattgcattgtgaacagaacacatggtcttcaatatgtagattctgtgtgacatagatttgaacataattgctggacactgactgatgtactgtggcagacagaactagttgctgtctcaatatccattcctcccttctttcttaaagtaataaaatttaccatttagttcaagctggcaatgtggacagttttcacccagcttcccttacagctgtgagcggccaaatatgttcacatccctagcccatgcaaagtaggcagaagtcactggatacagctgctaaggaagctcatggaaatgggaatatctcatctggtgtttttttcttaactatttgccctttgtcttgtcccttatttcctagaaaatatatacaccaagaggaggacagagaaaggatactaaatgaaacaacaggggagatacaatattatctggttgcactaatcctgtgctgcttatctctggatttcatgttacatgagaaaaattaactgccatgtggtttaaaccactcttgtgggaagttcctctttcagctgatttcagtcccaactgttacatctaataaatggtcaagttttaggaatcgttc

SEQ ID NO: 68247 - DNA, 2383 bp, Artificial Sequence
  derived and/or modified sequence
gaccttcgcttggtgtcctcctggcctcagcaacctgacaattctgtcgtgtcccgggctgggtataagtaagcaagaagagggcctgggagaagagtctgacgagcaaggggaaggtagccaaggatggagtgaaatacagggtgacctgtgtttttcccctggctgctttggaaattatgggaaaaaatcaaataccaaggaagaaaaatctataatgaaattagatgtggatttctttttatgtattcagcttgggggcttatgatacttctagtacccaaagagatgcggtcttgctgtgttgcctaggctggtctcaaactcctgctctcaagtgatcctcctgcctcagcctcctgagtacatttatatttaaagtaattattgatggctctgcctgcttaggactctgcccagccaggaaggaaacctacaggaggaagaatggctgcagggtggctgacaacctggtcacagaactcagtaaccttccaggaagtggcagtggacttttcccaggaggagtgggcattgctggaccctgctcaaaaaaatctatacaaagatgtgatgctggagaactttaggaacctggcctcagtagggtatcagctctgcagacacagtctgatctccaaggtggatcaagaacagctgaagacagatgaaagaggaattttacaaggtgactgtgcagactgggaaactcaacttaaaccaaaagatacaattgctatgcagaacattcctgggggaaaaacatccaatggcataaacacgaatcctcatggaagagaattcctgtgaataaggtgaaagtgaaaaagcctctagtcaccacttactcccttttcaacaggcagaaaatcaacctggtgagcactccctggagtgtaaccattgtgggaaattcagaaagaacactcgctttatttgtacaagatattgcaagggagagaaatgctataaatatataaagtatagcaaagtcttcaaccatccctcaactcttaggagtcatgtgagcattcacattggagagaaaactcttgaatttactgattgtagaaaagctttcaatcaagagtcatccctcaggaaacacttaagaactcccacaggacagaagtttcaggagtatgagcaatgtgatatgtccttcagcctacactcttcctgctcagtacgtgagcaaatacctactggagagaaaggtgatgaatgcagtgactatggcaaaatatctccccttagtgtccacacaaaaactggtagtgtggaggagggtttggaatgtaatgaacatgagaaaactttcactgaccctttgtcccttcagaactgtgtcagaactcactctggagagatgccctatgaatgcagtgactgtgggaaagccttcatttttcagtcttcccttaagaaacacatgagatctcatactggagagaagccttatgagtgtgatcactgtggaaaatcctttagccagagctctcatctgaatgtgcacaaaagaactcacactggagagaaaccctatgactgtaaggaatgtgggaaggctttcactgttccttcatcccttcagaaacatgtgagaacccacactggagagaaaccctatgaatgcagtgactgtggaaaagccttcatcgatcagtcatcccttaagaaacacacacgctctcacactggagagaagccttatgagtgtaaccagtgtggaaagtccttcagcacaggctcttaccttattgtgcacaagagaactcacactggtgagaaaacctatgagtgtaaagaatgtgggaaggcctttaggaattcctcttgcctgagggtacacgtgagaactcacactggagagaagccttataaatgtattcagtgtgaaaaagcctttagcacaagcactaaccttataatgcacaagcgaatccacaatggccagaaactccatgaatgaaatgactcagggaagtgtttgttgcccctcatgcctcctttctcactttagaacatatattggagagaagccctgttatggtcacctggaaacagccttctggcccaactctggatgcctgttatactgggacaaaccttataaatgttatagctatgattgtttttatcagtgagtatttcattcttatatgtgtcacaactgtagatcctatgaatattttagttatcttttcagtttaattgcattgtgaacagaacacatggtcttcaatatgtagattctgtgtgacatagatttgaacataattgctggacactgactgatgtactgtggcagacagaactagttgctgtctcaatatccattcctcccttctttcttaaagtaataaaatttaccatttagttc

SEQ ID NO: 68248 - protein, 375 aa, Artificial Sequence
  derived and/or modified sequence
MTPILTVLICLGLSLDPRTHVQAGPLPKPTLWAEPGSVITQGSPVTLRCQGSLETQEYHLYREKKTALWITRIPQELVKKGQFPILSITWEHAGRYCCIYGSHTAGLSESSDPLELVVTGAYSKPTLSALPSPVVTSGGNVTIQCDSQVAFDGFILCVSKKPSLSVQPGPVVAPGEKLTFQCGSDAGYDRFVLYKEWGRDFLQRPGRQPQAGLSQANFTLGPVSRSYGGQYTCSGAYNLSSEWSAPSDPLDILITGQIRARPFLSVRPGPTVASGENVTLLCQSQGGMHTFLLTKEGAADSPLRLKSKRQSHKYQAEFPMSPVTSAHAGTYRCYGSLSSNPYLLTHPSDPLELVVSGAAETLSPPQNKSDSKAGE

SEQ ID NO: 68249 - DNA, 1128 bp, Artificial Sequence
  derived and/or modified sequence
atgactccaatactgactgtgctgatctgtctgggcctgtcactggaccctaggacccacgtccaggccggtccacttcctaaaccaacgttgtgggcagagcccggctcagtgattacacaaggctctccggtaacattacgatgccaagggtccctggaaacccaggagtaccacctataccgtgaaaaaaagaccgctttgtggattacccgtatcccgcaggaactggtaaagaagggccagtttcctatcctcagtattacttgggaacacgctggcaggtactgttgcatttacggatctcataccgctgggctaagtgagtcgagtgacccactcgagcttgttgtcaccggtgcatattcaaagcccaccctatctgccttacccagcccagtggtcacctcaggcgggaatgtgactatccaatgtgatagccaagtggccttcgatgggtttatcctgtgcgttagcaaaaaacctagcctgagcgttcaaccgggcccggtggtggcacctggggagaagctgacatttcagtgtggttcagacgcaggttatgacagatttgtcttgtataaggaatggggaagagattttttgcagcggcccgggcgccaacctcaggctgggctgagccaggcaaattttactcttggccccgtgtcaagaagctacggcggccaatacacatgttcaggtgcctacaatctgtcttcagaatggagcgccccctcagaccccttagatatcctgattacaggacagatacgggcaagaccgttcctgtcagtacgaccagggccaaccgtcgcaagcggagaaaacgtgacactgctatgccagagccaaggcgggatgcatacatttctcctgactaaggagggggctgctgattctcccctgagattaaagtctaagcgacagagccacaagtatcaagccgagttccctatgtctccggttacttctgcacacgctgggacatataggtgttacggttctttgtcaagcaatccctacttattgacacacccatcagatcccctggaacttgttgtgtcaggagcagcagagacactcagcccaccacaaaataaatccgatagtaaggccggggagtag

SEQ ID NO: 68250 - DNA, 1128 bp, Artificial Sequence
  derived and/or modified sequence
atgacccccatcctgactgtgctgatctgcctgggcctgagcctggaccccaggacccacgtgcaggccggccccctgcccaagcccaccctgtgggccgagcccggcagcgtcatcacccagggcagccctgtgaccctgcgctgccagggcagcctggagacccaggagtaccacctgtaccgggagaagaagacagccctgtggatcacccgcatcccccaggagctggtgaagaagggccagttccccatcctgagcatcacctgggagcacgccggccgctactgctgcatctacggcagccacacagctggcctgtctgagagcagtgaccccctggagctggtggtgactggagcctacagcaagcccaccctgagcgccctgcccagccctgtggtgaccagcggcggcaatgtgaccatccagtgtgacagccaggtggcctttgatggcttcatcctgtgtgtgtccaagaagcccagcctgtctgtgcagcccggccctgtggtggcccctggagagaagctgaccttccagtgtggcagtgatgctggctatgacagatttgtgctgtacaaggagtggggccgggacttcctgcagaggcctggccggcagccccaggccggcctgagccaggccaacttcaccctgggccctgtgagccgctcctatggaggccagtacacctgcagcggggcctacaacctgagcagcgagtggagcgcccccagcgaccccctggacatcctgatcaccggccagatccgggcccggcccttcctgtctgtgcggcccggccccaccgtggccagcggggagaatgtgaccctgctgtgccagagccagggcggcatgcacaccttcctgctgaccaaggagggcgctgctgacagccccctgcggctgaagagcaagaggcagagccacaagtaccaggccgagttccccatgagccctgtgaccagcgcccacgccggcacctaccgctgctacggcagcctgagcagcaacccctacctgctgacccaccccagcgaccccctggagctggtggtgtctggagctgctgagaccctgagccccccccagaacaagagtgacagcaaggccggggagtag

SEQ ID NO: 68251 - DNA, 1320 bp, Artificial Sequence
  derived and/or modified sequence
atgacccccatcctcacggtcctgatctgtctcgggctgagcctggaccccaggacccacgtgcaggcagggcccctccccaagcccaccctctgggctgagccaggctctgtgatcacccaagggagtcctgtgaccctcaggtgtcaggggagcctggagacgcaggagtaccatctatatagagaaaagaaaacagcactctggattacacggatcccacaggagcttgtgaagaagggccagttccccatcctatccatcacctgggaacatgcagggcggtattgctgtatctatggcagccacactgcaggcctctcagagagcagtgaccccctggagctggtggtgacaggagcctacagcaaacccaccctctcagctctgcccagccctgtggtgacctcaggagggaatgtgaccatccagtgtgactcacaggtggcatttgatggcttcattctgtgtgtttctaagaagccatcactctcagtgcagccgggtcctgtcgtggcccctggggagaagctgaccttccagtgtggctctgatgccggctacgacagatttgttctgtacaaggagtggggacgtgacttcctccagcgccctggccggcagccccaggctgggctctcccaggccaacttcaccctgggccctgtgagccgctcctacgggggccagtacacatgctccggtgcatacaacctctcctccgagtggtcggcccccagcgaccccctggacatcctgatcacaggacagatccgtgccagacccttcctctccgtgcggccgggccccacagtggcctcaggagagaacgtgaccctgctgtgtcagtcacagggagggatgcacactttccttttgaccaaggagggggcagctgattccccgctgcgtctaaaatcaaagcgccaatctcataagtaccaggctgaattccccatgagtcctgtgacctcggcccacgcggggacctacaggtgctacggctcactcagctccaacccctacctgctgactcaccccagtgaccccctggagctcgtggtctcaggagcagctgagaccctcagcccaccacaaaacaagtccgactccaaggctggtgagtgaggagatgcttgccgtgatgacgctgggcacagagggtcaggtcctgtcaagaggagctgggtgtcctgggtggacatttgaagaattatattcattccaacttgaagaattattcaacacctttaacaatgtatatgtgaagtactttattctttcatattttaaaaataaaagataattatccatgagaaa

SEQ ID NO: 68252 - DNA, 1128 bp, Artificial Sequence
  derived and/or modified sequence
atgacccccatcctgaccgtgctgatctgcctgggcctgagcctggatcctcgcactcacgtgcaagcagggccactccccaagcccaccctttgggctgaaccggggtctgttatcactcaaggcagtcccgtaaccctgagatgtcagggatctcttgagacccaagagtatcacctctaccgcgaaaaaaagactgccctatggattacacgcatccctcaagagcttgttaaaaaaggccagttcccgattctctcaatcacatgggagcacgcggggagatactgttgcatctacggatcccatacagctggcttgagcgagtcttctgaccccctcgagctggttgtgaccggcgcttatagcaaaccaacattgtccgctctgccgagcccggtggtcacttctggtgggaatgtgacaattcagtgcgattctcaggtagcttttgacgggttcatcctttgtgtgagcaaaaaacccagtcttagcgtgcagcctgggccagtggttgctcctggggaaaagctgacgttccagtgcgggtcagacgcagggtatgaccgattcgtcctgtacaaggaatgggggagggactttttacaacgccccggaagacagccacaggcggggctatctcaggccaattttacactggggcctgtctcgcgctcctatggtggtcagtatacatgtagtggcgcctacaatctgagctcagagtggagcgctccgtccgaccctttggacatcctaatcactggccagatcagagcacggcccttcctgtctgtgaggcctggaccaacagtagcttcaggagaaaacgtcacactcctctgccagtcacagggcgggatgcacacttttctgctgaccaaggagggtgcagccgactcgcctttgcgcctcaagtccaaacgccagagccataaatatcaggccgagtttcccatgtctcctgtgactagcgctcacgcaggtacgtatcgctgttatgggtcactcagctcaaatccttatttactgacacatccttctgacccgctggaactggttgtttctggggccgcagaaacactcagccccccccaaaataagtccgactccaaagccggggagtag

SEQ ID NO: 68253 - DNA, 1128 bp, Artificial Sequence
  derived and/or modified sequence
atgacccctatcctgacggtcctgatctgtcttggtctcagtctggatcctcgtacgcatgtgcaagctggcccactgcctaagcctaccctatgggccgaaccgggttccgtgattacccagggttcacccgtgaccctccgctgccagggatcgcttgaaactcaagagtatcacctgtacagagaaaagaagaccgctctgtggattactcgaatcccccaggagctggtgaaaaagggacaatttcctatcctaagtattacatgggaacacgcgggaaggtactgctgtatctatggctcacatactgcgggtctgtctgagtctagcgatccactggaactcgtggtgaccggcgcttacagcaagcccaccctgagtgccttaccgagcccggtggtcacatcagggggaaacgttaccatccagtgtgattcccaagtagccttcgatggcttcatactctgcgtgtccaagaaaccgtcacttagtgtgcagcctgggccagtggtggctcctggcgaaaagttaaccttccagtgtggtagcgacgctggttacgaccgcttcgtcctttacaaggaatggggcagagactttctccagaggcccggacggcagcctcaggcgggtctttcccaagctaacttcacccttggtcccgtctcgaggtcctacggaggacagtatacctgcagcggcgcttataacctcagctcggaatggtcggctccctctgatccattagatatcctgattaccgggcagatcagagcgagaccattccttagtgtgcgccctggaccaactgtagctagtggggagaatgtcacgctgctatgtcagagtcaggggggtatgcatacatttctccttactaaggagggagccgctgattctcctctgagattgaaatctaagaggcagtcccacaagtaccaggccgagtttcccatgtctcctgtcacatcagcccatgcagggacctatcgttgctatgggagcctgtcttccaacccctatctcctgactcatccctccgaccccctggaactggttgttagcggcgcagctgaaacattgtctccaccacagaacaagtcagactccaaggcaggagaatag

SEQ ID NO: 68254 - DNA, 1128 bp, Artificial Sequence
  derived and/or modified sequence
atgacccccatcctgaccgtgctgatctgcctgggcctgagcctggaccccagaacccacgtgcaggccggccccctgcccaagcccaccctgtgggccgagcccggcagcgtgatcacccagggcagccccgtgaccctgagatgccagggcagcctggagacccaggagtaccacctgtacagagagaagaagaccgccctgtggatcaccagaatcccccaggagctggtgaagaagggccagttccccatcctgagcatcacctgggagcacgccggcagatactgctgcatctacggcagccacaccgccggcctgagcgagagcagcgaccccctggagctggtggtgaccggcgcctacagcaagcccaccctgagcgccctgcccagccccgtggtgaccagcggcggcaacgtgaccatccagtgcgacagccaggtggccttcgacggcttcatcctgtgcgtgagcaagaagcccagcctgagcgtgcagcccggccccgtggtggcccccggcgagaagctgaccttccagtgcggcagcgacgccggctacgacagattcgtgctgtacaaggagtggggcagagacttcctgcagagacccggcagacagccccaggccggcctgagccaggccaacttcaccctgggccccgtgagcagaagctacggcggccagtacacctgcagcggcgcctacaacctgagcagcgagtggagcgcccccagcgaccccctggacatcctgatcaccggccagatcagagccagacccttcctgagcgtgagacccggccccaccgtggccagcggcgagaacgtgaccctgctgtgccagagccagggcggcatgcacaccttcctgctgaccaaggagggcgccgccgacagccccctgagactgaagagcaagagacagagccacaagtaccaggccgagttccccatgagccccgtgaccagcgcccacgccggcacctacagatgctacggcagcctgagcagcaacccctacctgctgacccaccccagcgaccccctggagctggtggtgagcggcgccgccgagaccctgagccccccccagaacaagagcgacagcaaggccggcgagtag

SEQ ID NO: 68255 - protein, 857 aa, Artificial Sequence
  derived and/or modified sequence
MMNRFRKWLYKPKRSDPQLLARFYYADEELNQVAAELDSLDGRKDPQRCTLLVSQFRSCQDNVLNIINQIMDECIPQDRAPRDFCVKFPEEIRHDNLAGQLWFGAECLAAGSIIMNRELESMAMRPLAKELTRSLEDVRGALRDQALRDLNTYTEKMREALRHFDVLFAEFELSYVSAMVPVKSPREYYVQQEVIVLFCETVESGLVVYADGPLNLDRKVEDMSELFRPFHTLLRKIRDLLQTLTEEELHTLERNLCISQDVEFPIRADVQGPAALAPALSAPLPPEGPLSAKAKDPDAELACSMQYDDQELEQLSRMVHRAGDEMSSLLSPPIACQSPAHRPGAEGSPGGEASPGRPRLRSGSDEEERVFFMDDVEGTAEALARPESPAGPFGWAGSTWADPQEKGQGGPGGAAGISLPASEKEEDLSNNNLEAEGTDGASLAGTSSCSCLDSRLHLDGWEVGADDAETAEMIAHRTGGMKLSATVIFNPKSPTSLDSAVATQEAASEPVAEGMDGGPHKLSTGATNCLLHSCVCCGSCGDSREDVVERLREKCSPGGVIGASYAAGLAKASDRAPERQEEAPPPSEDASNGREPKAPTSDKCLPHTSGSQVDTASGLQGEAGVAGQQEPEARELHAGSPSAHEAPQALSGSSSSTAGSCSSDKMGPEAAPAATHAAPQATREKIRSRFHGSHDLIHRLFVCISGVADQLQTNYASDLRSILKTLFEVMATKPETDDKEKLRKVTQTLRSAALEDCALCQETLSSSELAAKTRDGDFEDPPEWVPDEACGFCTACKAPFTVIRRKHHCRSCGKIFCSRCSSHSAPLPRYGQVKPVRVCTHCYMFHVTPFYSDKAGL

SEQ ID NO: 68256 - DNA, 2574 bp, Artificial Sequence
  derived and/or modified sequence
atgatgaacagattcagaaagtggctgtacaagcccaagagaagcgacccccagctgctggccagattctactacgccgacgaggagctgaaccaggtggccgccgagctggacagcctggacggcagaaaggacccccagagatgcaccctgctggtgagccagttcagaagctgccaggacaacgtgctgaacatcatcaaccagatcatggacgagtgcatcccccaggacagagcccccagagacttctgcgtgaagttccccgaggagatcagacacgacaacctggccggccagctgtggttcggcgccgagtgcctggccgccggcagcatcatcatgaacagagagctggagagcatggccatgagacccctggccaaggagctgaccagaagcctggaggacgtgagaggcgccctgagagaccaggccctgagagacctgaacacctacaccgagaagatgagagaggccctgagacacttcgacgtgctgttcgccgagttcgagctgagctacgtgagcgccatggtgcccgtgaagagccccagagagtactacgtgcagcaggaggtgatcgtgctgttctgcgagaccgtggagagcggcctggtggtgtacgccgacggccccctgaacctggacagaaaggtggaggacatgagcgagctgttcagacccttccacaccctgctgagaaagatcagagacctgctgcagaccctgaccgaggaggagctgcacaccctggagagaaacctgtgcatcagccaggacgtggagttccccatcagagccgacgtgcagggccccgccgccctggcccccgccctgagcgcccccctgccccccgagggccccctgagcgccaaggccaaggaccccgacgccgagctggcctgcagcatgcagtacgacgaccaggagctggagcagctgagcagaatggtgcacagagccggcgacgagatgagcagcctgctgagcccccccatcgcctgccagagccccgcccacagacccggcgccgagggcagccccggcggcgaggccagccccggcagacccagactgagaagcggcagcgacgaggaggagagagtgttcttcatggacgacgtggagggcaccgccgaggccctggccagacccgagagccccgccggccccttcggctgggccggcagcacctgggccgacccccaggagaagggccagggcggccccggcggcgccgccggcatcagcctgcccgccagcgagaaggaggaggacctgagcaacaacaacctggaggccgagggcaccgacggcgccagcctggccggcaccagcagctgcagctgcctggacagcagactgcacctggacggctgggaggtgggcgccgacgacgccgagaccgccgagatgatcgcccacagaaccggcggcatgaagctgagcgccaccgtgatcttcaaccccaagagccccaccagcctggacagcgccgtggccacccaggaggccgccagcgagcccgtggccgagggcatggacggcggcccccacaagctgagcaccggcgccaccaactgcctgctgcacagctgcgtgtgctgcggcagctgcggcgacagcagagaggacgtggtggagagactgagagagaagtgcagccccggcggcgtgatcggcgccagctacgccgccggcctggccaaggccagcgacagagcccccgagagacaggaggaggcccccccccccagcgaggacgccagcaacggcagagagcccaaggcccccaccagcgacaagtgcctgccccacaccagcggcagccaggtggacaccgccagcggcctgcagggcgaggccggcgtggccggccagcaggagcccgaggccagagagctgcacgccggcagccccagcgcccacgaggccccccaggccctgagcggcagcagcagcagcaccgccggcagctgcagcagcgacaagatgggccccgaggccgcccccgccgccacccacgccgccccccaggccaccagagagaagatcagaagcagattccacggcagccacgacctgatccacagactgttcgtgtgcatcagcggcgtggccgaccagctgcagaccaactacgccagcgacctgagaagcatcctgaagaccctgttcgaggtgatggccaccaagcccgagaccgacgacaaggagaagctgagaaaggtgacccagaccctgagaagcgccgccctggaggactgcgccctgtgccaggagaccctgagcagcagcgagctggccgccaagaccagagacggcgacttcgaggacccccccgagtgggtgcccgacgaggcctgcggcttctgcaccgcctgcaaggcccccttcaccgtgatcagaagaaagcaccactgcagaagctgcggcaagatcttctgcagcagatgcagcagccacagcgcccccctgcccagatacggccaggtgaagcccgtgagagtgtgcacccactgctacatgttccacgtgacccccttctacagcgacaaggccggcctgtag

SEQ ID NO: 68257 - DNA, 2574 bp, Artificial Sequence
  derived and/or modified sequence
atgatgaaccgctttcgaaaatggctatacaaacctaagagatctgatccacagttgctcgcacggttctactatgctgatgaggaactcaatcaggttgcagccgaactcgactctcttgatgggcgaaaggatccacagagatgtacgctcttggtcagccaattccgaagttgtcaggataatgtactaaatatcatcaaccagataatggatgagtgcattccacaagatcgagcccctcgagatttctgcgtgaaatttcccgaggaaatccgccacgataacctcgctggacagttatggttcggcgccgaatgtctggccgctggaagcatcattatgaaccgagagctggagagcatggccatgcggcctctggccaaggagctcacacgctcactagaggatgtgcgcggagcgttgagagatcaggcactgagggatcttaatacatacaccgaaaaaatgcgcgaggctctcaggcatttcgatgttctgtttgcagaattcgagctgagttacgtgagcgcgatggttccagtgaaaagtcctcgcgagtattacgtgcaacaggaagtcatcgtgctcttctgcgaaactgtcgaatcaggactggtggtctacgccgacggaccgctgaacttggataggaaagtcgaagatatgagcgaactgttccggccttttcacacattgctgagaaagattcgggatctcctgcagactctgactgaggaggaacttcacaccctggaacgcaatctgtgtatctcacaagacgtggagtttccaatccgagctgatgttcagggtccggctgcactggcccctgctctttcagctcctttgccccctgaagggccactgagtgctaaggcaaaggacccagatgcggaactggcttgtagtatgcagtacgatgaccaggaactggagcaactcagtagaatggtccaccgcgcaggggacgagatgtcaagcctgcttagtcctcctatcgcatgtcagtctccagcccaccgacccggggccgaggggtcccctggcggcgaggctagccccggccggcctagattgagaagtggtagtgacgaagaggagcgcgtgttctttatggatgacgtggagggcaccgcagaagcactcgctaggcctgagtctccggctggaccttttgggtgggcgggctccacctgggcggacccccaggagaaaggccagggggggccaggcggtgctgccggcatctcgcttcctgctagtgagaaagaagaagatttgagcaataacaaccttgaggccgagggaaccgacggcgcatcactggccggcaccagcagctgttcttgcttggattcacggctgcatcttgatgggtgggaggtaggggcagatgacgcagaaacagcggaaatgatcgcgcaccggacgggaggtatgaagttgagcgcaactgtgattttcaacccgaagagccctacatctcttgacagcgcggtggctactcaagaagctgcctccgagccagtggctgaaggcatggatggtggccctcacaaactgtcaaccggggcgactaactgcctcctgcacagttgcgtgtgttgtggaagctgtggtgatagtcgagaggatgtcgttgagaggctgcgagagaaatgcagcccagggggcgttataggagctagttatgccgccggattggctaaggccagcgacagggctccagaacggcaggaggaggcacctcccccatctgaagacgcaagcaatggtcgcgaaccaaaagccccaactagcgataaatgtctgccgcacacctccggcagtcaagtagacactgccagtggattacaaggtgaggctggcgtggcaggtcagcaggagcctgaggcacgcgagctgcatgccggctcccctagcgctcatgaggctcctcaagcactgtccggaagttcgagctccactgcaggatcctgtagctcagataaaatgggtcccgaggccgcccccgctgcaacccatgccgccccccaggccactagagagaaaataaggagcagatttcacggatctcacgacctgattcaccgactcttcgtctgcatttccggcgtcgcagaccagctgcagaccaattatgcttctgatttacggagcattcttaagacactgtttgaggtgatggcgacgaagccagaaacagacgataaagagaagctgaggaaggttacccagaccttacgctcagccgccctcgaggattgtgccctgtgccaagaaaccctcagttcttcggaacttgccgccaaaacccgcgacggcgattttgaagatcctcctgaatgggtgccagatgaagcctgtgggttttgcaccgcatgtaaagcacctttcacagtgatcaggcggaaacaccattgcaggagttgtgggaaaattttctgtagcaggtgcagtagccactcagctcctttgcctcgttacggtcaggtcaaacccgtgagggtttgcactcactgctatatgttccacgtgacacccttctacagcgacaaagctggcttgtag

SEQ ID NO: 68258 - DNA, 2574 bp, Artificial Sequence
  derived and/or modified sequence
atgatgaaccgcttcaggaagtggctgtacaagcccaagagaagtgacccccagctgctggcccgcttctactatgcagatgaggagctgaaccaggtggccgctgagctggacagcctggatggcaggaaggacccccagcgctgcaccctgctggtgtcccagttccgcagctgccaggacaacgtgctgaacatcatcaaccagatcatggatgagtgcatcccccaggaccgggccccccgggacttctgtgtgaagtttcctgaggagatcagacatgacaacctggccggccagctgtggtttggagctgagtgcctggccgccggcagcatcatcatgaaccgggagctggagagcatggccatgaggcccctggccaaggagctgaccaggagcctggaggatgtgcggggggccctgcgggaccaggccctgcgggacctgaacacctacacagagaagatgagggaggccctgcggcactttgatgtgctgtttgctgagtttgagctgtcctatgtgtctgccatggtgcctgtgaagagcccccgggagtactacgtgcagcaggaggtgattgtgctcttctgtgaaacagtggagagcggcctggtggtgtatgcagatggccccctgaacctggacaggaaggtggaggacatgtctgagctgttccggcccttccacaccctgctgaggaagatccgggacctgctgcagaccctgacagaggaggagctgcacaccctggagaggaacctgtgcatcagccaggatgtggagttccccatccgggcagatgtgcagggccctgctgccctggccccagccctgagcgcccccctgcccccagagggccccctgagcgccaaggccaaggaccctgatgctgagctggcctgcagcatgcagtatgatgaccaggagctggagcagctgagcaggatggtgcacagagctggagatgagatgagcagcctgctgagcccccccatcgcctgccagagccctgcccacaggcctggagctgagggcagccctggaggagaggccagccctggccggccccggctgcggagcggcagtgatgaggaggagagggtcttcttcatggatgatgtggagggcacagctgaggccctggcccggcctgagagccctgctggccccttcggctgggccggcagcacctgggccgacccccaggagaagggccagggcggccctggaggagctgctggcatcagcctgcctgccagcgagaaggaggaggacctgagcaacaacaacctggaggccgagggcacagatggagccagcctggccggcaccagcagctgcagctgcctggacagccggctgcacctggatggctgggaggtgggcgcagatgatgctgagacagctgagatgattgcccacaggactggaggcatgaagctgagcgccaccgtcatcttcaaccccaagagccccaccagcctggacagcgctgtggccacccaggaggccgccagcgagcctgtggccgagggcatggatggcggcccccacaagctgagcactggagccaccaactgcctgctgcacagctgtgtgtgctgcggcagctgtggggacagcagagaagatgtggtggagcggctgcgggagaagtgcagccctggaggagtgattggagccagctatgctgctggcctggccaaggccagtgaccgggcccctgagcggcaggaggaggcccctcctccttctgaagatgccagcaatggccgggagcccaaggcccccaccagtgacaagtgcctgccccacaccagcggcagccaggtggacacagccagcggcctgcagggcgaggccggcgtggccggccagcaggagcctgaggcccgggagctgcacgccggcagccccagcgcccacgaggccccccaggccctgagcggcagcagcagcagcacagctggcagctgcagcagtgacaagatgggccctgaggccgccccagctgccacccatgctgccccccaggccacccgggagaagatccgcagccgcttccacggcagccatgacctgatccaccggctgtttgtgtgcatctctggagtggccgaccagctgcagaccaactatgccagtgacctgcggagcatcctgaagaccctgtttgaggtgatggccaccaagccagagacagatgacaaggagaagctgaggaaggtgacccagaccctgcggtctgctgccctggaggactgtgccctgtgccaggagaccctgagcagcagcgagctggccgccaagaccagagatggagactttgaagatcctcctgagtgggtgcctgatgaggcctgtggcttctgcacagcctgcaaggcccccttcaccgtcatccggaggaagcaccactgccgcagctgtgggaagatcttctgcagccgctgcagcagccacagcgcccccctgcccaggtatggccaggtgaagcctgtgcgggtgtgcacccactgctacatgttccacgtgacccccttctacagcgacaaggccggcctgtag

SEQ ID NO: 68259 - DNA, 2574 bp, Artificial Sequence
  derived and/or modified sequence
atgatgaaccggttccggaagtggctgtacaagcccaagcggagcgacccccaattgctagcacgcttctactatgcagatgaggaacttaatcaggtagccgctgaattggattctcttgatggccgtaaagaccctcaaaggtgtactctactggtctcgcagtttagaagctgtcaggataatgtgctcaacatcatcaaccaaattatggacgagtgtatcccccaggatcgggcccctcgggacttctgcgtaaagtttcctgaagaaattcggcacgataacttggccggacagctgtggttcggggcggagtgcctggcggctggatctatcatcatgaatagagaactggagagtatggcaatgcgacccttggccaaggagctcacaagaagtcttgaggatgttagaggagctctaagagatcaagcgctacgagatcttaacacctacacagagaaaatgagggaggccctgaggcattttgacgtgttgttcgcggagttcgaattgagttacgttagcgcaatggttcctgtcaagtctcctagggagtactacgtccagcaggaagtgatcgtgttattttgcgagaccgtcgagagtgggctcgttgtgtacgctgatgggcctctgaatctggacaggaaggttgaggacatgagtgagttatttagacctttccatacactactgaggaagattagggatctcctgcaaacactcactgaggaagagttgcacacactagagaggaacctctgtatcagccaggacgttgagtttccaatccgagccgacgttcaggggcccgccgcattagctcctgcattgtctgccccacttccgccagaagggcccctgagcgcaaaggccaaggatcccgacgctgagctcgcatgttctatgcagtacgacgaccaggagctcgaacaattgtcccgcatggtgcatcgagccggcgatgagatgtccagcctgctcagtcctcctatagcctgtcaatcacccgctcacagacccggcgccgaaggatcgccagggggcgaagcaagccctggccgacccaggttgcgcagtggctccgatgaggaggagagagtattctttatggatgatgtcgagggtacagcggaggctttggctaggccagaatctcccgcagggccatttggttgggcgggttcaacttgggccgacccacaagagaaaggtcagggggggcccgggggtgccgccggaatctcgcttccagccagtgagaaggaggaggacctctcaaataataacctggaggcggaaggtaccgatggtgcgagccttgcaggcactagctcctgttcttgtctcgactccaggctccatctcgacggctgggaagtgggcgccgacgacgcagagacagcagagatgattgcccacaggacaggtgggatgaaactctccgccaccgtcatttttaaccctaaatccccgacctcactcgattcagccgtggcgactcaggaggccgcctcagagccagtagcagagggtatggacggaggcccccacaagctgtcgacgggggcaaccaactgcctactccattcatgcgtgtgctgtggtagctgtggcgatagtagggaggacgtagtggaaaggttgcgggaaaagtgctcaccggggggagtgatcggggccagctatgctgctggcttagctaaggcttcggaccgcgcacctgaacggcaagaggaggctccccctccaagtgaagatgcctcaaatggcagggaaccgaaggccccgacaagtgacaagtgtctgcctcataccagcgggtcacaagtggacactgcctcaggtctgcaaggagaggctggggtcgctggtcaacaggaaccagaagcccgagaactacatgctgggagtcccagcgcgcatgaggcccctcaagccctgagtggatcgagttcttctactgcagggtcctgctctagtgacaaaatgggaccagaggctgcacctgctgccacgcacgctgctccacaggcaaccagagaaaaaattaggtcgcgcttccatgggtcccacgacctgatccaccggttattcgtatgtatttccggtgtggccgatcagctgcagaccaattatgcttccgacctcaggtccatcctgaagacgctgtttgaggttatggccaccaagcccgagacagacgacaaggaaaagttacgtaaggttacacagaccttacggtctgctgctctcgaggactgtgcgttatgtcaggaaacactgtcttcttccgagcttgccgcgaaaacccgggacggcgatttcgaagatccacctgagtgggtgcctgatgaggcctgtggattctgtacagcctgtaaggcaccattcaccgtgatccggcggaaacaccactgccggtcctgtggaaagatcttttgctcccgttgcagttcccatagtgctcctcttccccgatatggtcaagtaaagccagtcagggtatgcacccactgttacatgtttcatgttacacctttttattcggacaaggcgggcctctag

SEQ ID NO: 68260 - DNA, 2574 bp, Artificial Sequence
  derived and/or modified sequence
atgatgaatcgctttaggaagtggctgtacaagcctaaaaggtcggacccacagcttttggccaggttctactacgccgatgaggagcttaatcaggtggccgcagagctggattccttggacgggaggaaagatcctcagcgatgtaccctgctggtgtctcagttccgctcatgccaggacaacgtccttaatatcatcaatcagataatggacgagtgtatcccacaggaccgggcaccgcgagatttttgcgtcaagttccctgaagagatcagacatgacaatctggccggacagttatggttcggagccgagtgcctcgccgctggctccattattatgaatcgagagctggagtccatggctatgcggcctttggccaaagagttgactcggagcctggaagatgttcgtggagcactaagagaccaggccctccgcgaccttaacacatataccgaaaaaatgagggaggccctccgccatttcgacgtgctttttgccgagttcgagctatcttacgtatcggcaatggtcccagtcaagtcccctagggaatactacgtccagcaggaggtgattgttctcttttgtgaaacggtggaatccggcctggtggtctatgccgacggccctctcaacttggatcgtaaggtggaagacatgagcgaactgttccgtccttttcacaccctcctgcgcaagattagggatctgctgcagacactgaccgaggaggaactgcacaccctggagcgcaacttgtgtattagccaagacgtggagttcccgattagggccgacgtgcaggggcctgccgctcttgcccctgcccttagcgcgcctctgcctcctgagggaccactgtccgctaaggctaaggacccggacgctgagctcgcctgctctatgcagtatgacgaccaagagctggagcagttgagtcgtatggttcatcgtgccggtgatgagatgtcttctctccttagcccaccaatagcatgccagagtcccgctcataggcctggggcagagggtagccctggaggtgaagctagccccggaagaccccgtctaaggtccggctcagacgaggaggagcgagtcttcttcatggatgatgtggaggggacggccgaggcactggccagaccagaatctccagccggaccttttggttgggccggttcaacttgggctgatccacaggagaagggtcaggggggacccggtggcgctgcaggcatcagcctccccgctagcgaaaaggaggaggatctgtcgaataacaacctagaggccgagggcaccgatggcgctagccttgccggaacgtccagctgttcatgcctagactccagattgcacttagacgggtgggaagtgggggctgacgacgccgaaaccgcagagatgatcgctcacagaacagggggtatgaagctcagtgctacagtgatcttcaacccaaaatccccaacttccctggactccgccgtggcaactcaagaggctgcctccgagcccgttgcggaaggcatggatggtggtccacataagctgtctactggagcaacaaactgtctgctccattcctgcgtgtgttgtggtagttgtggggacagtagagaggatgtagtggagaggctgcgggagaagtgttcaccgggaggggtcattggggcatcctacgccgcaggactggccaaagcatccgaccgcgcaccagaacgacaggaggaggcaccccctccttccgaggacgcctccaacggacgagaaccaaaggctccaaccagcgataagtgcctgccacatacatctggcagtcaggtagatacagcctccgggctacagggcgaagcaggtgtcgctgggcaacaggaaccggaggccagagagctacatgcaggtagcccaagtgcgcatgaagcaccacaggctctgagcgggtccagctcttccactgccggttcatgctcaagcgataagatgggacccgaggcagctcccgcagcgacacatgcagccccacaggcaacaagagaaaaaattagatccagatttcatggatcacatgatcttatccaccgtctctttgtgtgcatcagcggcgtggccgaccagctccaaactaactacgcttcagacctccgttctattctgaagacactctttgaggtaatggccacgaagccagaaacggatgataaagagaaactgcgcaaggtcacacaaactcttaggtccgctgctcttgaagactgcgcactgtgccaggagaccctatcgagcagcgagttagccgctaaaacacgggacggcgatttcgaggacccgccagaatgggtgcccgacgaagcgtgcggattttgcaccgcgtgcaaggccccattcactgtgatacgcagaaaacaccattgccggtcttgtgggaaaatcttttgctcccgttgttcaagccattccgctccattgcctagatacgggcaggttaagcccgtgagagtctgcactcattgctacatgttccatgttacacctttttacagcgacaaggccggtctctag

SEQ ID NO: 68261 - DNA, 3273 bp, Artificial Sequence
  derived and/or modified sequence
ggagcgctgggtgtcagtgagcagcgaggagccgcgcgcccccgtgcccgcgtctgtccgtgcgcccgagcgcccactcccgggtctgaggtctgcccggcgcgccgcttgcagagcatactcagggccgcgcacctgccccgcgcacctgcccgccgcccgctcggcgctccgggcttcgctagccagcctccctgcgacagcgcgggggctccggccgtgcctccgcgtccgccccgcgcctcagccgggcccgggcgcagcgctgcggagggcgagggccgcccggagtccggccagggccggcgcggcgatgatgaacaggttccgaaagtggctctacaaacccaagaggtcggatccgcagctgcttgcccggttctactatgccgacgaggagctgaaccaggtggccgcggagctggacagcctggatgggcggaaggacccccagcggtgcacgctgctggtcagccagttccgctcctgtcaggacaatgtgttgaacatcattaaccagatcatggatgagtgcatcccccaggaccgcgcccccagagatttctgcgtcaagttccctgaggagatccggcacgacaacctggccggccagctgtggttcggtgccgagtgcctggccgccggctccatcatcatgaaccgggagctggagagcatggccatgcgcccgctggccaaggagctgacgcgcagcctggaggacgtgcggggcgccctccgtgaccaggcgctgcgggacctgaacacctacacagagaagatgagggaagcgctgaggcacttcgacgtcctgttcgcagagtttgagctcagctacgtctcggccatggtgcctgtgaagtcccccagggagtactacgtgcagcaggaggtcatcgtgctcttctgcgagacggtggagagtggcctcgtggtctatgcggacggacctctgaacttggaccgcaaggtggaagacatgtccgagctgttccggcccttccacacgttgctgcggaaaataagggatttgctgcagacgctgacggaggaggagctgcacacgctggaacggaacctctgcatttcccaagacgtggagttccccatccgcgcagacgtgcagggacccgctgccctggcgcctgccctctctgcccctctcccccctgaggggccactctcagctaaggccaaagacccggatgcagagctggcctgctccatgcagtacgacgaccaggagctggagcagctcagccgcatggtccacagggcgggggacgagatgtcctctttgctttcaccgcccattgcctgccagtccccagctcacaggccaggagcggagggcagcccaggcggggaggcctctccaggtagaccgcgcctgcggtcaggcagtgacgaggaggagcgcgtgttcttcatggatgacgtggaggggacggcagaagccctggccaggcccgagtccccagctggcccatttgggtgggcaggcagtacctgggccgacccccaggagaaagggcagggtgggccaggcggagcggcggggatcagcttgcccgcctcggaaaaggaggaggacttgagcaacaacaatctcgaggccgagggcacagatggggccagcctcgcgggcaccagctcctgcagctgcctggactcgcggctgcacctggacggctgggaggtgggtgcggatgacgcagagacggctgagatgatcgcccaccggacagggggcatgaagctctcagccacggtcatcttcaaccccaaatcgcccacttccctggactctgcggtcgccacccaggaggccgcctcggagcccgtggccgaggggatggatggcggcccccacaagcttagcactggggccaccaactgccttctgcattcctgcgtgtgctgtgggagctgcggggacagcagggaggacgtggtggagcgtctgcgggagaagtgcagcccgggaggcgtcattggtgcctcgtacgctgccggcttagccaaggccagcgacagggcccctgagagacaggaggaggcgcccccaccctcagaagatgcctccaacgggcgggagcccaaagcccccacttccgacaagtgcctgcctcacacctcaggttcccaggtggacacagcgagtgggctgcaaggagaggctggggttgcaggtcagcaggagccagaggccagagagctgcatgctgggagcccctcggctcacgaggcgcctcaggccctgtcgggctccagcagctccacagctgggtcctgctcctcagacaagatggggccagaggcggccccagcagccacgcatgctgccccacaggccacaagagagaagatccggtccaggttccacggcagccacgacctcatccaccgcctgttcgtctgcatttcaggtgtggctgaccagctgcagacgaactatgccagtgacctgagaagtattcttaaaacactgtttgaggtcatggccaccaagcctgaaacagacgacaaggaaaagttaaggaaggtcacccagactctgcggagtgcggccttggaggactgtgcactgtgccaggagaccctgtcatcctctgaactggcagccaagacccgcgatggggactttgaagaccccccggagtgggtgccagacgaggcctgtggcttctgcacggcgtgcaaagcacccttcaccgtcatccgccggaagcaccactgccgcagctgtgggaagatcttctgctcgcgctgctcctcgcactcagcaccgctgccccgctacgggcaggtgaagccggtccgagtgtgcacccactgctacatgttccatgtcacgcccttctacagcgacaaggccggcctgtgacgtggtgccaggggcagccccaacccacccgggccaggaacccccaggaaggtggggccacgctgcaggcaggtctcactgcgtctcatgaggccgctgccgctgctgcaggggcacccagacctccagagcatccagagcctctgtcctgcccacgctagcctccctgcagggaccccgggccggctgcaggggccaacaagaggtcagctttgcccagcaggggacccggaggagcctggtggctgcctcagggcagggtgcctggcggagaaggcctgggccctcccactggtccctcggagatctgctggggctatgggaatcggggcgggtgatggaggtggacaagagtggggccactctgcgcctctgctgttgcggtg

SEQ ID NO: 68262 - protein, 287 aa, Artificial Sequence
  derived and/or modified sequence
MMNRFRKWLYKPKRSDPQLLARFYYADEELNQVAAELDSLDGRKDPQRCTLLVSQFRSCQDNVLNIINQIMDECIPQDRAPRDFCVKFPEEIRHDNLAGQLWFGAECLAAGSIIMNRELESMAMRPLAKELTRSLEDVRGALRDQALRDLNTYTEKMREALRHFDVLFAEFELSYVSAMVPVKSPREYYVQQEVIVLFCETVERALDFGYLTQDMIDDYEPALMFSIPRLAIVCPLLPAHPRTRAGATAHVACRMVAGSSSGALTHPPVSKQGVISALLRPLPELPP

SEQ ID NO: 68263 - DNA, 864 bp, Artificial Sequence
  derived and/or modified sequence
atgatgaacagattcagaaagtggctgtacaagcccaagagaagcgacccccagctgctggccagattctactacgccgacgaggagctgaaccaggtggccgccgagctggacagcctggacggcagaaaggacccccagagatgcaccctgctggtgagccagttcagaagctgccaggacaacgtgctgaacatcatcaaccagatcatggacgagtgcatcccccaggacagagcccccagagacttctgcgtgaagttccccgaggagatcagacacgacaacctggccggccagctgtggttcggcgccgagtgcctggccgccggcagcatcatcatgaacagagagctggagagcatggccatgagacccctggccaaggagctgaccagaagcctggaggacgtgagaggcgccctgagagaccaggccctgagagacctgaacacctacaccgagaagatgagagaggccctgagacacttcgacgtgctgttcgccgagttcgagctgagctacgtgagcgccatggtgcccgtgaagagccccagagagtactacgtgcagcaggaggtgatcgtgctgttctgcgagaccgtggagagagccctggacttcggctacctgacccaggacatgatcgacgactacgagcccgccctgatgttcagcatccccagactggccatcgtgtgccccctgctgcccgcccaccccagaaccagagccggcgccaccgcccacgtggcctgcagaatggtggccggcagcagcagcggcgccctgacccacccccccgtgagcaagcagggcgtgatcagcgccctgctgagacccctgcccgagctgcccccctag

SEQ ID NO: 68264 - DNA, 864 bp, Artificial Sequence
  derived and/or modified sequence
atgatgaaccggtttcggaaatggctgtacaagcccaaacggagtgaccctcagcttctggctcgcttttattatgccgatgaagaactgaaccaggtggcggccgaattggattcactggatgggcggaaagacccccagaggtgcaccttgctcgtcagccagttccgttcttgccaggataacgtcctcaacatcataaatcagatcatggatgagtgtatcccccaggatagggctccaagggacttctgtgtcaaatttcctgaggagatcaggcatgataacctggctggacagttgtggtttggggctgaatgtcttgccgctggatcaattataatgaacagagagcttgaaagcatggccatgaggccgctcgccaaagaactcacgagatccctggaggatgtgagaggggcactgagagaccaggcgcttagagatctgaatacatataccgaaaaaatgcgggaagctctgcggcatttcgatgtgttattcgctgagtttgagttaagctacgtgagcgctatggtacctgtaaagtccccgcgggagtactacgttcaacaggaagtgatagtactgttttgtgaaacagttgagcgggctctggattttggctatctgacccaggatatgattgacgattatgaaccagccctgatgttctctattccacgtctcgcaatcgtttgcccacttctgccggctcacccccgcacacgagctggcgctactgcgcatgttgcctgtcgcatggtagcgggatcatcttcaggcgcattgacacatccccccgtctctaaacaaggagtcatctccgcattgcttcgccccctgccggagcttcccccctag

SEQ ID NO: 68265 - DNA, 864 bp, Artificial Sequence
  derived and/or modified sequence
atgatgaaccgcttcaggaagtggctgtacaagcccaagagaagtgacccccagctgctggcccgcttctactatgcagatgaggagctgaaccaggtggccgctgagctggacagcctggatggcaggaaggacccccagcgctgcaccctgctggtgtcccagttccgcagctgccaggacaacgtgctgaacatcatcaaccagatcatggatgagtgcatcccccaggaccgggccccccgggacttctgtgtgaagtttcctgaggagatcagacatgacaacctggccggccagctgtggtttggagctgagtgcctggccgccggcagcatcatcatgaaccgggagctggagagcatggccatgaggcccctggccaaggagctgaccaggagcctggaggatgtgcggggggccctgcgggaccaggccctgcgggacctgaacacctacacagagaagatgagggaggccctgcggcactttgatgtgctgtttgctgagtttgagctgtcctatgtgtctgccatggtgcctgtgaagagcccccgggagtactacgtgcagcaggaggtgattgtgctcttctgtgaaacagtggagcgggccctggactttggctacctgacccaggacatgattgatgattatgagcccgccctgatgttcagcatcccccggctggccatcgtgtgccccctgctgcctgcccaccccaggaccagggctggggccacagcccacgtggcctgcaggatggtggccggcagcagcagcggggccctgacccacccccctgtgtccaagcagggcgtcatcagcgccctgctgcggcccctgcctgagctgcccccatag

SEQ ID NO: 68266 - DNA, 864 bp, Artificial Sequence
  derived and/or modified sequence
atgatgaaccggttccggaagtggctgtacaagcccaagcggagcgatccccagcttctggcaaggttttattatgcagatgaggagctaaaccaggtggctgccgaactggatagcttggatggcagaaaagaccctcagcgatgtacactgcttgtgtcccagttccgtagctgccaggataatgttcttaatattatcaaccagattatggatgagtgtattccccaggatagggccccccgggatttttgcgttaagtttccggaggaaattagacacgacaatctcgccgggcagctctggtttggtgcggagtgtttggccgccggaagtatcattatgaaccgcgagctggagtcaatggccatgcggcccctcgcaaaggagctaacacgctcactggaggatgtgcgtggcgccttacgtgaccaggccttacgggacttgaatacctatacggaaaaaatgcgcgaagctctgagacacttcgatgtcttgttcgccgagttcgaactgtcctacgtcagcgctatggtgcccgtgaagtcccctcgagagtattacgtacagcaggaagtgatagttctattctgcgagaccgtggagcgggccctggactttggatatctgacacaggatatgatcgacgattacgaacccgcactcatgttctctatacctcgcctagctattgtttgccctctgttgccggcccatccccgcacccgggctggggctacagctcatgtcgcatgtcggatggtggccggcagctccagtggcgctctcacgcacccaccggtcagcaaacagggagtgatcagcgcattgttacgtcccctgccggaactaccgccatag

SEQ ID NO: 68267 - DNA, 864 bp, Artificial Sequence
  derived and/or modified sequence
atgatgaatcggttccgaaagtggctttataaaccaaagaggagcgatccgcagttgctcgcgaggttctactacgccgatgaagaactcaatcaggttgccgctgagcttgatagtcttgacggaaggaaggacccacagaggtgtacactgctggtgtcccagttccgaagctgtcaggataatgtgctgaatataattaatcaaatcatggacgagtgcatcccccaagatagggccccacgcgacttttgtgtgaagttccctgaggaaatccgacacgacaacttggccggacaactgtggtttggtgcagagtgcctggccgcaggttccattataatgaacagggaactcgagtctatggcaatgcgccctctggcaaaggagctcactcgcagccttgaggacgtcaggggcgcactgcgcgatcaagctctccgagacttaaatacctatacggaaaagatgagagaggccttacggcatttcgacgttctgttcgcagaattcgaactttcgtatgtgtcagccatggtgccagtgaaatcccctagggaatactacgtgcagcaggaggtgatcgtactgttctgtgagaccgtggagcgcgcactggatttcggttacctcactcaagacatgattgatgactacgaaccagccctaatgtttagcatacctcggctggccattgtgtgtcctttgctcccagcgcacccacggactcgagcaggggctaccgcccacgtcgcctgtaggatggtggctggctccagcagcggcgctttgacccatccgccagtgtcaaagcagggcgtcatttccgccctccttcgaccgctgcccgagttgcccccatag

SEQ ID NO: 68268 - DNA, 1874 bp, Artificial Sequence
  derived and/or modified sequence
ggagccgcgcgcccccgtgcccgcgtctgtccgtgcgcccgagcgcccactcccgggtctgaggtctgcccggcgcgccgcttgcagagcatactcagggccgcgcacctgccccgcgcacctgcccgccgcccgctcggcgctccgggcttcgctagccagcctccctgcgacagcgcgggggctccggccgtgcctccgcgtccgccccgcgcctcagccgggcccgggcgcagcgctgcggagggcgagggccgcccggagtccggccagggccggcgcggcgatgatgaacaggttccgaaagtggctctacaaacccaagaggtcggatccgcagctgcttgcccggttctactatgccgacgaggagctgaaccaggtggccgcggagctggacagcctggatgggcggaaggacccccagcggtgcacgctgctggtcagccagttccgctcctgtcaggacaatgtgttgaacatcattaaccagatcatggatgagtgcatcccccaggaccgcgcccccagagatttctgcgtcaagttccctgaggagatccggcacgacaacctggccggccagctgtggttcggtgccgagtgcctggccgccggctccatcatcatgaaccgggagctggagagcatggccatgcgcccgctggccaaggagctgacgcgcagcctggaggacgtgcggggcgccctccgtgaccaggcgctgcgggacctgaacacctacacagagaagatgagggaagcgctgaggcacttcgacgtcctgttcgcagagtttgagctcagctacgtctcggccatggtgcctgtgaagtcccccagggagtactacgtgcagcaggaggtcatcgtgctcttctgcgagacggtggagagggccctggacttcgggtacctgactcaggacatgattgatgactacgagccggccctcatgttcagcatccccaggctggccatcgtgtgccccctccttccagcccatcccagaacacgtgcaggagccaccgcccacgtggcctgcaggatggttgccggatcctcttcaggggccctcacccatccacctgtgtcaaaacaaggtgtcatctctgccctgctcagacccttgccggagctcccaccgtgatctgcctgcaccgtgcccacaccagtcctctctccccagtccccacgcacccgctgccctgggtctccaccatgctgtccccttcgctcagggtccccttgactgtcctatccctactgccacactgtcccctcccccgcactgtccccttttccatgatgtttcctcctccacgctgtcccctctgctccagtgtcctcttggccatgctgtcctctccatggtgctggcccctccactacactgtcccctcctctatgctgtccccttgtctatgctgttccctcctctatgctatcccattctccatgctatcccattctccatgctgtcccctcctccatgctgtcccttcctctgcaatgtcctctcccctgtgctcctctgcactgtcccctcctccatgctgtcccctcctttatgatgttccctcctccgtgctgtcccctccatgatgtcccctcttccgtgctgtcctctcctctgcactgtcccctactccctgctgtacctccctctgcgatgtccccaccactgcaccgctcacccaagccctctcccaccagcaggttgcgtgacttactctgttatttatttttccatgttactgagataaaattcattaccctatgactcacccatctacagtgcacagtcgtttttggtacattcagaattgtgcagccatcaccacaaatttcataacattttcattactcacaaa

SEQ ID NO: 68269 - protein, 172 aa, Artificial Sequence
  derived and/or modified sequence
MMNRFRKWLYKPKDNVLNIINQIMDECIPQDRAPRDFCVKFPEEIRHDNLAGQLWFGAECLAAGSIIMNRELESMAMRPLAKELTRSLEDVRGALRDQALRDLNTYTEKMREALRHFDVLFAEFELSYVSAMVPVKSPREYYVQQEVIVLFCETVERNGKGVLKFMWNCNGP

SEQ ID NO: 68270 - DNA, 519 bp, Artificial Sequence
  derived and/or modified sequence
atgatgaacagattcagaaagtggctgtacaagcccaaggacaacgtgctgaacatcatcaaccagatcatggacgagtgcatcccccaggacagagcccccagagacttctgcgtgaagttccccgaggagatcagacacgacaacctggccggccagctgtggttcggcgccgagtgcctggccgccggcagcatcatcatgaacagagagctggagagcatggccatgagacccctggccaaggagctgaccagaagcctggaggacgtgagaggcgccctgagagaccaggccctgagagacctgaacacctacaccgagaagatgagagaggccctgagacacttcgacgtgctgttcgccgagttcgagctgagctacgtgagcgccatggtgcccgtgaagagccccagagagtactacgtgcagcaggaggtgatcgtgctgttctgcgagaccgtggagagaaacggcaagggcgtgctgaagttcatgtggaactgcaacggcccctag

SEQ ID NO: 68271 - DNA, 519 bp, Artificial Sequence
  derived and/or modified sequence
atgatgaacagattccgcaaatggctttacaagcctaaggacaacgtgttaaacattatcaaccagataatggacgagtgtataccacaggaccgagccccccgagatttctgtgttaagttcccagaggagatccgacacgataatctcgccggacagttgtggttcggggctgaatgtttagctgctggaagtattattatgaatagagaactggagtccatggccatgcggcccttggcaaaggaacttacccgctcattggaggatgtgcgaggcgcgctaagagatcaggctcttcgggatctcaatacatacaccgagaaaatgagagaagccctgcgtcacttcgacgtgttgtttgctgagtttgaactcagctatgtgtccgctatggtgcccgtgaagtccccccgggagtactacgtccagcaggaagtcatcgtcctgttttgtgagaccgtggaaagaaatgggaagggagtcctcaaatttatgtggaattgtaacggaccatag

SEQ ID NO: 68272 - DNA, 519 bp, Artificial Sequence
  derived and/or modified sequence
atgatgaaccgcttcaggaagtggctgtacaagcccaaggacaacgtgctgaacatcatcaaccagatcatggatgagtgcatcccccaggaccgggccccccgggacttctgtgtgaagtttcctgaggagatcagacatgacaacctggccggccagctgtggtttggagcagaatgtctggccgccggcagcatcatcatgaaccgggagctggagagcatggccatgaggcccctggccaaggagctgaccaggagcctggaggatgtgcggggggccctgcgggaccaggccctgcgggacctgaacacctacacagagaagatgagggaggccctgcggcactttgatgtgctgtttgctgagtttgagctgtcctatgtgtctgccatggtgcctgtgaagagcccccgggagtactacgtgcagcaggaggtgattgtgctcttctgtgagaccgtggagagaaatggcaagggcgtgctgaagttcatgtggaactgcaatggcccctag

SEQ ID NO: 68273 - DNA, 519 bp, Artificial Sequence
  derived and/or modified sequence
atgatgaaccggttccggaagtggctgtacaagcccaaggacaacgtgctgaatatcatcaatcaaattatggatgagtgtatcccccaggaccgcgcaccgcgcgacttttgtgtgaagttccctgaggagattcgacacgataatctggcgggccagttgtggttcggtgccgaatgtctggccgccgggtctatcatcatgaacagagagctggaaagtatggcgatgcggccattggccaaggaactaacccgctccctggaggacgtgcggggtgccttgcgggaccaggcattgagggacctaaatacctacactgaaaaaatgcgagaggccctgcggcatttcgacgtgctgttcgccgagtttgagctttcgtatgtgagtgctatggtgcctgtcaagtctccaagagaatactatgtgcagcaggaggtgatagtcctattttgtgaaaccgtggaaaggaatggaaagggtgtccttaagtttatgtggaattgcaatggcccctag

SEQ ID NO: 68274 - DNA, 519 bp, Artificial Sequence
  derived and/or modified sequence
atgatgaatcgctttagaaaatggctgtacaaaccaaaggacaacgtattgaacataatcaaccaaatcatggacgagtgcatcccacaagatagagctccgagagacttttgcgttaagttccctgaagagatacgccacgacaatctggcagggcagctttggtttggtgctgagtgcttagccgcagggtccatcattatgaacagagagttggagtctatggccatgaggcccctcgcaaaggaactgacccgctcccttgaggacgtgcgtggggcactccgtgatcaagctttgcgggacctgaacacctacaccgagaaaatgcgcgaagccctgagacacttcgacgttctctttgcagaatttgaactgagctacgtgtcagcaatggttcctgtcaaatcccctcgcgaatattatgtgcagcaggaggtgattgttctgttttgcgagacggttgaaagaaacggcaagggcgttcttaagtttatgtggaactgcaacggcccttag

SEQ ID NO: 68275 - DNA, 1135 bp, Artificial Sequence
  derived and/or modified sequence
gcggccgtgaccagcggagcgctgggtgtcagtgagcagcgaggagccgcgcgcccccgtgcccgcgtctgtccgtgcgcccgagcgcccactcccgggtctgaggtctgcccggcgcgccgcttgcagagcatactcagggccgcgcacctgccccgcgcacctgcccgccgcccgctcggcgctccgggcttcgctagccagcctccctgcgacagcgcgggggctccggccgtgcctccgcgtccgccccgcgcctcagccgggcccgggcgcagcgctgcggagggcgagggccgcccggagtccggccagggccggcgcggcgatgatgaacaggttccgaaagtggctctacaaacccaaggacaatgtgttgaacatcattaaccagatcatggatgagtgcatcccccaggaccgcgcccccagagatttctgcgtcaagttccctgaggagatccggcacgacaacctggccggccagctgtggttcggtgccgagtgcctggccgccggctccatcatcatgaaccgggagctggagagcatggccatgcgcccgctggccaaggagctgacgcgcagcctggaggacgtgcggggcgccctccgtgaccaggcgctgcgggacctgaacacctacacagagaagatgagggaagcgctgaggcacttcgacgtcctgttcgcagagtttgagctcagctacgtctcggccatggtgcctgtgaagtcccccagggagtactacgtgcagcaggaggtcatcgtgctcttctgcgagacggtggagagaaatggaaaaggtgttctaaaattcatgtggaactgcaatgggccctaaatagccaaaacaatattgaaaaacaaaaacaaaattggaagattcatacgtcctgatttcaaaacttactacaagtcaaaaccttatggtactggcataaagatagatgtatagaccaatggaataaaattgagaagccataaataaacccaaacatctatggtgaactgattattgacaagggggccaagatcattcaataaggaaagaacagtctcttcagtgaatgttcctggagcaactggataaccacatgcaaaagaacaaagttggaaaaaaaaaaaaaaa

SEQ ID NO: 68276 - DNA, 2454 bp, Artificial Sequence
  derived and/or modified sequence
atggacgagtgcatcccccaggacagagcccccagagacttctgcgtgaagttccccgaggagatcagacacgacaacctggccggccagctgtggttcggcgccgagtgcctggccgccggcagcatcatcatgaacagagagctggagagcatggccatgagacccctggccaaggagctgaccagaagcctggaggacgtgagaggcgccctgagagaccaggccctgagagacctgaacacctacaccgagaagatgagagaggccctgagacacttcgacgtgctgttcgccgagttcgagctgagctacgtgagcgccatggtgcccgtgaagagccccagagagtactacgtgcagcaggaggtgatcgtgctgttctgcgagaccgtggagagagccctggacttcggctacctgacccaggacatgatcgacgactacgagcccgccctgatgttcagcatccccagactggccatcgtgtgcggcctggtggtgtacgccgacggccccctgaacctggacagaaaggtggaggacatgagcgagctgttcagacccttccacaccctgctgagaaagatcagagacctgctgcagaccctgaccgaggaggagctgcacaccctggagagaaacctgtgcatcagccaggacgtggagttccccatcagagccgacgtgcagggccccgccgccctggcccccgccctgagcgcccccctgccccccgagggccccctgagcgccaaggccaaggaccccgacgccgagctggcctgcagcatgcagtacgacgaccaggagctggagcagctgagcagaatggtgcacagagccggcgacgagatgagcagcctgctgagcccccccatcgcctgccagagccccgcccacagacccggcgccgagggcagccccggcggcgaggccagccccggcagacccagactgagaagcggcagcgacgaggaggagagagtgttcttcatggacgacgtggagggcaccgccgaggccctggccagacccgagagccccgccggccccttcggctgggccggcagcacctgggccgacccccaggagaagggccagggcggccccggcggcgccgccggcatcagcctgcccgccagcgagaaggaggaggacctgagcaacaacaacctggaggccgagggcaccgacggcgccagcctggccggcaccagcagctgcagctgcctggacagcagactgcacctggacggctgggaggtgggcgccgacgacgccgagaccgccgagatgatcgcccacagaaccggcggcatgaagctgagcgccaccgtgatcttcaaccccaagagccccaccagcctggacagcgccgtggccacccaggaggccgccagcgagcccgtggccgagggcatggacggcggcccccacaagctgagcaccggcgccaccaactgcctgctgcacagctgcgtgtgctgcggcagctgcggcgacagcagagaggacgtggtggagagactgagagagaagtgcagccccggcggcgtgatcggcgccagctacgccgccggcctggccaaggccagcgacagagcccccgagagacaggaggaggcccccccccccagcgaggacgccagcaacggcagagagcccaaggcccccaccagcgacaagtgcctgccccacaccagcggcagccaggtggacaccgccagcggcctgcagggcgaggccggcgtggccggccagcaggagcccgaggccagagagctgcacgccggcagccccagcgcccacgaggccccccaggccctgagcggcagcagcagcagcaccgccggcagctgcagcagcgacaagatgggccccgaggccgcccccgccgccacccacgccgccccccaggccaccagagagaagatcagaagcagattccacggcagccacgacctgatccacagactgttcgtgtgcatcagcggcgtggccgaccagctgcagaccaactacgccagcgacctgagaagcatcctgaagaccctgttcgaggtgatggccaccaagcccgagaccgacgacaaggagaagctgagaaaggtgacccagaccctgagaagcgccgccctggaggactgcgccctgtgccaggagaccctgagcagcagcgagctggccgccaagaccagagacggcgacttcgaggacccccccgagtgggtgcccgacgaggcctgcggcttctgcaccgcctgcaaggcccccttcaccgtgatcagaagaaagcaccactgcagaagctgcggcaagatcttctgcagcagatgcagcagccacagcgcccccctgcccagatacggccaggtgaagcccgtgagagtgtgcacccactgctacatgttccacgtgacccccttctacagcgacaaggccggcctgtag

SEQ ID NO: 68277 - DNA, 2454 bp, Artificial Sequence
  derived and/or modified sequence
atggatgaatgcataccccaagaccgcgcgcccagggacttctgcgtgaaatttcctgaggaaattaggcatgacaatttggcgggtcagctgtggttcggcgccgaatgcctggctgctggctcaatcatcatgaatagggaactggagtccatggctatgagaccacttgccaaagagctcacccgttcactggaggacgttaggggggcactacgcgatcaggccctcagggatctgaatacctatactgagaaaatgcgggaggcgcttcgacattttgacgtgcttttcgccgaattcgagttgtcctacgtttccgctatggtcccggtgaagtctccgcgagagtattatgtccagcaggaagtgattgtactattctgcgaaaccgtggaacgggcccttgactttggttatctcacgcaagatatgatagatgattacgaaccggcactaatgttcagtatccctcgcctggcaatcgtgtgcggcctcgtcgtgtacgccgatgggccgctgaatctggaccggaaagtcgaagacatgtcagagctctttcgaccatttcatacattactccgaaagattcgcgatcttctgcagaccctcacagaggaggagctgcacacactcgagagaaatctgtgtatcagtcaggacgtagagttcccaatccgagccgacgtgcaaggaccagccgcccttgcccccgctctgtccgccccgctgccccccgaggggcccttgtctgccaaagcaaaagaccctgatgcggaactcgcgtgctccatgcagtacgacgaccaggagctggaacaactcagcagaatggtgcaccgcgccggagacgagatgagcagcctgctgtctcccccaatagcgtgtcagagccccgcccaccgccctggagccgaggggtcaccgggtggagaggccagcccaggtcggccgaggctgcgctccggctccgatgaggaagagcgggttttctttatggatgatgtggagggcacagcggaagcactggcacggccagaaagtcctgccggccctttcggatgggccggttcaacctgggccgacccacaggaaaagggtcaaggcggccctggcggcgccgccggaataagcctgcccgcaagtgaaaaggaggaggatctgagcaataataatctcgaggcagagggaactgacggggcatctctcgctggtacctcgtcatgtagctgtctcgattcacgtctgcacctggacggctgggaggtaggagctgacgatgcggaaacggccgagatgattgcacaccgaacgggcggcatgaagttgagcgccacagtgatctttaatcccaaatcacctacatccctggatagtgcagtcgcaacccaggaggctgcttccgagcccgtggctgagggcatggacggtgggccacacaagctctcgaccggtgcaacgaattgtctgctgcacagctgtgtgtgttgcggctcgtgcggagattccagagaagacgttgtcgaaaggctgcgcgaaaaatgctcgcccggtggagttattggtgcatcatacgctgctggacttgcgaaagcctccgatcgcgccccagaaagacaagaggaagcgcctccccctagcgaggatgcaagcaatggccgggagcccaaggctcctacctccgataaatgcctaccacacacctctggcagccaggtcgatactgcttccggattacagggcgaggcgggggtcgctggccagcaagaaccagaggccagggaactgcacgctggcagcccaagcgcacacgaggcacctcaggctctgtcaggctcaagttcttccacagccgggagctgcagcagcgacaaaatgggacctgaggctgccccagcagccacccacgctgcaccacaagccacaagagaaaagatcagaagtcgattccacggttcccacgaccttatccatcggttgttcgtctgcatcagcggggtcgccgaccagctgcagaccaattatgcttccgatctcaggtcaatattaaaaacattattcgaagtgatggcaaccaagcctgaaacagatgacaaggagaagctgcgtaaggtgactcagactttgcggtcagccgccctcgaggattgtgccttgtgccaggagaccctgtcgagcagcgagttagccgccaagacacgggatggggattttgaagatcctcccgagtgggtacctgacgaagcttgcggattttgcacagcatgcaaggcgcccttcactgtcatccgccggaagcaccattgtagatcttgtggaaagatcttctgcagcaggtgttcatcacattccgcccccctgccaagatatggacaggttaagccagtccgcgtttgcacacattgctatatgtttcatgtcacacccttctattcggataaggcaggcctctag

SEQ ID NO: 68278 - DNA, 2454 bp, Artificial Sequence
  derived and/or modified sequence
atggatgagtgcatcccccaggaccgggccccccgggacttctgtgtgaagtttcctgaggagatcagacatgacaacctggccggccagctgtggtttggagctgagtgcctggccgccggcagcatcatcatgaaccgggagctggagagcatggccatgaggcccctggccaaggagctgaccaggagcctggaggatgtgcggggggccctgcgggaccaggccctgcgggacctgaacacctacacagagaagatgagggaggccctgcggcactttgatgtgctgtttgctgagtttgagctgtcctatgtgtctgccatggtgcctgtgaagagcccccgggagtactacgtgcagcaggaggtgattgtgctcttctgtgaaacagtggagcgggccctggactttggctacctgacccaggacatgattgatgattatgagcccgccctgatgttcagcatcccccggctggccatcgtgtgtggcctggtggtgtatgcagatggccccctgaacctggacaggaaggtggaggacatgtctgagctgttccggcccttccacaccctgctgaggaagatccgggacctgctgcagaccctgacagaggaggagctgcacaccctggagaggaacctgtgcatcagccaggatgtggagttccccatccgggcagatgtgcagggccctgctgccctggccccagccctgagcgcccccctgcccccagagggccccctgagcgccaaggccaaggaccctgatgctgagctggcctgcagcatgcagtatgatgaccaggagctggagcagctgagcaggatggtgcacagagctggagatgagatgagcagcctgctgagcccccccatcgcctgccagagccctgcccacaggcctggagctgagggcagccctggaggagaggccagccctggccggccccggctgcggagcggcagtgatgaggaggagagggtcttcttcatggatgatgtggagggcacagctgaggccctggcccggcctgagagccctgctggccccttcggctgggccggcagcacctgggccgacccccaggagaagggccagggcggccctggaggagctgctggcatcagcctgcctgccagcgagaaggaggaggacctgagcaacaacaacctggaggccgagggcacagatggagccagcctggccggcaccagcagctgcagctgcctggacagccggctgcacctggatggctgggaggtgggcgcagatgatgctgagacagctgagatgattgcccacaggactggaggcatgaagctgagcgccaccgtcatcttcaaccccaagagccccaccagcctggacagcgctgtggccacccaggaggccgccagcgagcctgtggccgagggcatggatggcggcccccacaagctgagcactggagccaccaactgcctgctgcacagctgtgtgtgctgcggcagctgtggggacagcagagaagatgtggtggagcggctgcgggagaagtgcagccctggaggagtgattggagccagctatgctgctggcctggccaaggccagtgaccgggcccctgagcggcaggaggaggcccctcctccttctgaagatgccagcaatggccgggagcccaaggcccccaccagtgacaagtgcctgccccacaccagcggcagccaggtggacacagccagcggcctgcagggcgaggccggcgtggccggccagcaggagcctgaggcccgggagctgcacgccggcagccccagcgcccacgaggccccccaggccctgagcggcagcagcagcagcacagctggcagctgcagcagtgacaagatgggccctgaggccgccccagctgccacccatgctgccccccaggccacccgggagaagatccgcagccgcttccacggcagccatgacctgatccaccggctgtttgtgtgcatctctggagtggccgaccagctgcagaccaactatgccagtgacctgcggagcatcctgaagaccctgtttgaggtgatggccaccaagccagagacagatgacaaggagaagctgaggaaggtgacccagaccctgcggtctgctgccctggaggactgtgccctgtgccaggagaccctgagcagcagcgagctggccgccaagaccagagatggagactttgaagatcctcctgagtgggtgcctgatgaggcctgtggcttctgcacagcctgcaaggcccccttcaccgtcatccggaggaagcaccactgccgcagctgtgggaagatcttctgcagccgctgcagcagccacagcgcccccctgcccaggtatggccaggtgaagcctgtgcgggtgtgcacccactgctacatgttccacgtgacccccttctacagcgacaaggccggcctgtag

SEQ ID NO: 68279 - DNA, 2454 bp, Artificial Sequence
  derived and/or modified sequence
atggacgagtgcatcccccaggaccgggccccccgggacttctgcgttaagttcccagaggaaattcggcatgataaccttgcgggacagttgtggtttggagccgagtgcttggccgcgggcagtattatcatgaatagggaacttgagagcatggccatgcgcccactggccaaagagctcacacggagcctggaagatgtcaggggggctcttcgcgaccaagccttacgggacctcaacacctataccgagaaaatgagagaagcacttcggcattttgacgtgctgttcgccgaattcgagctgtcttatgtgtcagcgatggtacccgtcaaaagccctagagaatattacgtccagcaggaagtcatcgttctcttttgcgagacggtggagcgagcgctggactttgggtacctgacacaggacatgattgatgattacgaacccgccttaatgttcagtatccccaggctcgccatcgtgtgtggactggtggtctacgcagacggccctctgaatctggacaggaaagtggaagatatgtctgaactctttagaccgttccatacactgcttaggaagatccgcgacctgctgcagacccttacagaagaggaattacataccttggagcggaacttatgtatctcacaggacgtggaattccccattagggccgatgttcagggtcctgccgcgctagcccctgctctctccgcccccttgccacctgaaggaccgttatcagccaaagccaaggaccccgacgccgagctggcctgttccatgcagtatgatgaccaggagcttgaacagttgtccaggatggtccatagagctggggacgagatgtctagtttgctgtccccaccaatcgcctgccaatcaccagcccacagaccgggagccgaagggtcacccggcggtgaagcttccccaggacgcccccggttgcgctcaggctccgacgaggaggaacgggtattcttcatggatgacgttgagggtacagctgaggctctcgcccgccctgaatcaccagctggtcccttcggctgggcggggtctacgtgggccgacccccaggagaagggacagggaggccccggcggagctgctggtatctccctgcccgcgagcgaaaaggaagaggacctgtcaaacaataacctcgaggccgaggggacagatggagcgagcctggccgggacttcgagttgtagttgtttggacagccgcttgcacctggatgggtgggaagtgggagctgacgatgctgagactgcggaaatgattgcgcatcggacaggtgggatgaagctgtctgctacagtgatttttaaccccaagagtcccacttcactggattccgccgtggccacacaggaggccgcaagtgagccagttgctgaggggatggatggcgggcctcataaactgtctactggggcaacaaactgcctgctgcactcctgtgtctgctgcggatcctgcggcgatagccgagaggacgtcgtggagcgtttgagagaaaaatgttcccctggtggcgttattggggcctcctacgccgctggtctcgctaaggcgtcggatagagctcctgaaagacaggaggaagctccccctcctagcgaagacgcctccaacggcagagagccaaaagcgccgacaagtgataaatgcctgccccacacctccggctcacaagtggataccgcaagcgggcttcagggggaggccggtgtcgccgggcagcaagaacctgaggctagagagctgcatgctggatctcccagtgcccatgaagctccgcaggcactgtcgggatcctctagcagcacagccgggtcctgtagcagtgacaaaatgggccccgaggctgcccctgccgctacccacgcggctccccaggcaacccgagaaaagatccgctcccgattccacggcagccatgacctgattcaccgcttgtttgtatgcattagcggggtggccgatcagctgcagacaaactacgcatcagacttaaggtccatccttaagacactcttcgaggtgatggcaactaaacccgaaactgacgacaaagagaaactgcggaaggtgacacagaccctacgctctgccgcgctagaagattgcgcactatgtcaagagacactgtcgtcttccgagctggcagctaagacaagggacggagatttcgaggatccgcccgagtgggtcccagacgaagcctgtggtttttgcaccgcatgtaaagcacctttcaccgtgattcgacgaaaacatcactgccgatcctgtgggaagatattctgcagccgctgcagcagccacagcgccccgctcccccgctatgggcaggttaagccagtgcgggtttgcacacactgctatatgtttcatgtgaccccattctatagcgataaagctggtctgtag

SEQ ID NO: 68280 - DNA, 2454 bp, Artificial Sequence
  derived and/or modified sequence
atggacgagtgcatcccccaggatagggcgcctcgcgacttctgcgtgaaattccctgaagagataagacatgataacctggctgggcagctgtggttcggggctgagtgtctggccgctggttccattatcatgaaccgtgaactggagagtatggctatgcgcccactggcgaaggagctcactcgcagtctagaagacgtacgtggcgcattgcgtgatcaagcccttcgcgatctgaatacttacactgagaagatgagagaagcactgcggcatttcgatgtgctgtttgccgaatttgaattgagctacgtaagcgctatggtccctgtaaaatccccaagagagtattatgttcagcaggaagttattgtcttattctgtgaaaccgtggagagagctttagactttggttacctgactcaagacatgatcgacgattatgagcccgctctgatgttttcaattcctcgtctcgccattgtgtgcgggctggtggtgtacgccgacgggcctttgaacctggaccgcaaggtagaggacatgagtgaactgttccgtcctttccatacactgctcagaaagattcgtgatttactgcagacccttactgaagaagaactgcatacattggagaggaatctgtgcatctctcaagatgttgagttccccataagggcagatgtacaggggccagctgcactagcgcctgcactgtccgcaccgctgccacctgaaggccctctctcagccaaggccaaggacccagacgccgagctcgcttgcagtatgcaatatgatgatcaagagttggagcagctgagtcgtatggtccacagagctggagacgaaatgtcttccctgttatcaccgccaattgcttgtcagagccccgctcacaggcccggtgctgagggatcacctggcggagaagcaagccccggtcgaccgcgattgcggagtggatcagatgaagaggagagggtctttttcatggatgacgtcgagggaaccgccgaagccctcgcccgacctgaatctcctgccggtccatttggttgggctggctccacgtgggcagatcctcaggaaaaaggtcagggaggaccaggaggcgcagccggtatttctctgcccgcttcagagaaggaagaagatctgagcaataacaacctggaagcagaagggacagacggggcaagcctggctggtaccagttcctgttcatgtctcgattctagactccacctggacggctgggaagttggggctgacgatgctgaaacagctgaaatgatcgctcatcgaaccgggggaatgaaactctcagcaaccgtcatatttaaccccaagagtcctacgagcctcgacagcgccgtggcaacgcaagaggctgcgtccgaacctgtcgccgaggggatggatgggggtccccataaactcagtaccggcgcaactaattgtctactccactcatgtgtgtgttgcgggtcttgtggcgacagcagagaggacgtcgtcgagcgtttgagagagaagtgctcccctgggggagtgatcggagcttcatacgccgcaggactggcaaaggcgtccgatagagcccctgaacggcaagaagaggctcccccaccgagtgaggatgccagcaatggaagagagcctaaggctcctactagcgacaaatgtttaccccatacctccggctcgcaggttgataccgcgtccggactgcagggagaagcaggggtggcaggccagcaggaacccgaagccagggaactccacgcgggttcacccagcgctcacgaagcccctcaggccctgtccggtagcagcagcagtaccgcgggaagctgttctagcgataagatggggcctgaggcggcacctgccgcaactcatgcggctccacaggctactcgggagaagatccgatcacgattccacgggtcccacgacttaattcacaggctgttcgtttgcatttcaggcgtggccgaccagttacagactaattacgcgtcggatttgaggtcaatccttaagaccctgtttgaggtcatggcgaccaagcctgagacagatgacaaggaaaaactacgcaaggtgacccagacactaagaagtgctgcattagaggactgtgccctgtgtcaggaaactctctcttctagcgaacttgcagccaaaacacgagatggagatttcgaggacccccctgagtgggttcccgacgaggcttgtggattttgtacggcgtgcaaggctccttttacagtcatccgcaggaagcaccattgcaggagttgtggcaaaatcttctgcagccgttgcagtagccactccgcccctctcccccgatatgggcaggtgaagcccgtccgggtctgtacccactgttacatgtttcacgtcacccccttctattccgataaggcgggtctatag

SEQ ID NO: 68281 - DNA, 492 bp, Artificial Sequence
  derived and/or modified sequence
atggacgagtgcatcccccaggacagagcccccagagacttctgcgtgaagttccccgaggagatcagacacgacaacctggccggccagctgtggttcggcgccgagtgcctggccgccggcagcatcatcatgaacagagagctggagagcatggccatgagacccctggccaaggagctgaccagaagcctggaggacgtgagaggcgccctgagagaccaggccctgagagacctgaacacctacaccgagaagatgagagaggccctgagacacttcgacgtgctgttcgccgagttcgagctgagctacgtgagcgccatggtgcccgtgaagagccccagagagtactacgtgcagcaggaggtgatcgtgctgttctgcgagaccgtggagagagccctggacttcggctacctgacccaggacatgatcgacgactacgagcccgccctgatgttcagcatccccagactggccatcgtgtag

SEQ ID NO: 68282 - DNA, 492 bp, Artificial Sequence
  derived and/or modified sequence
atggatgaatgcatccctcaggacagggcgcctcgcgacttctgcgttaagtttccagaggagatcagacacgacaacctggcaggacagttgtggtttggtgccgaatgtcttgccgcaggctccattatcatgaaccgcgagctcgaatccatggccatgcgccccttggccaaagagctaacacgcagccttgaggacgtacgaggcgctcttagagaccaggcccttcgcgatctgaatacctacacggagaagatgagagaggcccttagacatttcgatgttctgttcgccgagtttgagctcagttatgttagcgcaatggtgcccgttaagtctccacgagagtactatgtacagcaagaagtaattgtgctgttttgcgagacggtggaacgggctctggacttcggctacctgactcaggatatgatagatgactacgaaccagcgctcatgttttccatccctagattggccattgtctag

SEQ ID NO: 68283 - DNA, 492 bp, Artificial Sequence
  derived and/or modified sequence
atggatgagtgcatcccccaggaccgggccccccgggacttctgtgtgaagtttcctgaggagatcagacatgacaacctggccggccagctgtggtttggagctgagtgcctggccgccggcagcatcatcatgaaccgggagctggagagcatggccatgaggcccctggccaaggagctgaccaggagcctggaggatgtgcggggggccctgcgggaccaggccctgcgggacctgaacacctacacagagaagatgagggaggccctgcggcactttgatgtgctgtttgctgagtttgagctgtcctatgtgtctgccatggtgcctgtgaagagcccccgggagtactacgtgcagcaggaggtgattgtgctcttctgtgaaacagtggagcgggccctggactttggctacctgacccaggacatgattgatgattatgagcccgccctgatgttcagcatcccccggctggccatcgtgtag

SEQ ID NO: 68284 - DNA, 492 bp, Artificial Sequence
  derived and/or modified sequence
atggacgagtgcatcccccaggaccgggccccccgggacttctgcgtgaaattccccgaggagatacgccacgataaccttgctggacagctttggttcggcgcagaatgcctcgccgctggctctatcattatgaatcgcgagttggaaagcatggccatgaggcccctcgccaaggagttgacgaggagcttagaggacgtgaggggagcactacgggatcaagcactgagggatttaaatacgtatactgaaaagatgcgcgaggccctgcggcacttcgacgtgctgtttgccgagtttgagctgtcatatgtctccgctatggttcctgtcaaaagcccccgtgagtactacgtgcagcaagaggtgattgtcttgttttgtgagaccgtcgaaagggccttggacttcgggtatctcactcaggacatgatcgacgattacgagccggctctgatgttcagtataccccgcctagccatagtctag

SEQ ID NO: 68285 - DNA, 492 bp, Artificial Sequence
  derived and/or modified sequence
atggacgagtgcattcctcaagacagggctccaagggatttctgcgtcaagtttccagaggagatcaggcacgataatcttgcgggtcagctgtggtttggggctgaatgcctagcggctgggtccattatcatgaaccgcgaactggagtctatggccatgagacccctggccaaagaattgacgagatcccttgaggacgttagaggggcactgagagaccaggcgctgagggacctgaatacatacacagaaaaaatgcgcgaagcactccgacattttgatgtgttgtttgccgagttcgaattgtcctatgtgtcagctatggtgcctgtcaagtcaccacgcgagtactatgtccaacaggaggtcatcgtcctgttctgtgagacggtggagcgagcactcgacttcggctacctaacacaggacatgatcgacgattatgagccggctctaatgttcagcattcctcgtcttgcaatagtgtag

SEQ ID NO: 68286 - protein, 281 aa, Artificial Sequence
  derived and/or modified sequence
MGSQGSPVKSYDYLLKFLLVGDSDVGKGEILESLQDGAAESPYAYSNGIDYKTTTILLDGRRVKLELWDTSGQGRFCTIFRSYSRGAQGILLVYDITNRWSFDGIDRWIKEIDEHAPGVPRILVGNRLHLAFKRQVPTEQARAYAEKNCMTFFEVSPLCNFNVIESFTELSRIVLMRHGMEKIWRPNRVFSLQDLCCRAIVSCTPVHLIDKLPLPVTIKSHLKSFSMANGMNAVMMHGRSYSLASGAGGGGSKGNSLKRSKSIRPPQSPPQNCSRSNCKIS

SEQ ID NO: 68287 - DNA, 846 bp, Artificial Sequence
  derived and/or modified sequence
atgggcagccagggcagccccgtgaagagctacgactacctgctgaagttcctgctggtgggcgacagcgacgtgggcaagggcgagatcctggagagcctgcaggacggcgccgccgagagcccctacgcctacagcaacggcatcgactacaagaccaccaccatcctgctggacggcagaagagtgaagctggagctgtgggacaccagcggccagggcagattctgcaccatcttcagaagctacagcagaggcgcccagggcatcctgctggtgtacgacatcaccaacagatggagcttcgacggcatcgacagatggatcaaggagatcgacgagcacgcccccggcgtgcccagaatcctggtgggcaacagactgcacctggccttcaagagacaggtgcccaccgagcaggccagagcctacgccgagaagaactgcatgaccttcttcgaggtgagccccctgtgcaacttcaacgtgatcgagagcttcaccgagctgagcagaatcgtgctgatgagacacggcatggagaagatctggagacccaacagagtgttcagcctgcaggacctgtgctgcagagccatcgtgagctgcacccccgtgcacctgatcgacaagctgcccctgcccgtgaccatcaagagccacctgaagagcttcagcatggccaacggcatgaacgccgtgatgatgcacggcagaagctacagcctggccagcggcgccggcggcggcggcagcaagggcaacagcctgaagagaagcaagagcatcagacccccccagagccccccccagaactgcagcagaagcaactgcaagatcagctag

SEQ ID NO: 68288 - DNA, 846 bp, Artificial Sequence
  derived and/or modified sequence
atgggctcacaaggctctccagtaaagtcctacgattatttgcttaagtttttgttggtaggagattcggacgttggcaagggtgaaattctggagagcttgcaggatggcgccgctgaatctccctacgcgtacagtaacgggatcgactacaagactaccacgatcttgctggatggccggagagttaaactggaactgtgggatacatcgggccagggacggttttgtaccatcttcagaagctatagcaggggtgctcagggtatactgctggtctatgacatcaccaatcgctggtcttttgatggaatcgaccgctggataaaagagatcgatgaacacgcacccggggtgccacgcatattagtcggcaaccggctccatctagccttcaaacggcaagtgccaacagaacaggcaagggcttatgcggaaaaaaactgcatgaccttcttcgaggtttcccctttgtgcaatttcaacgtcatagagagtttcacagagctttctcgcattgtcctgatgagacacggaatggaaaagatttggagaccaaaccgggtgttctctctccaagacctgtgctgtagggccatagttagctgcacccctgtccacctgattgacaagctacctcttcctgtgactataaaaagccatctgaagagcttcagcatggctaatggaatgaacgccgtgatgatgcatggtcgctcctactctctcgcttcgggtgctggcggcggaggaagcaaagggaatagcctgaagaggtctaaaagcataagacccccccagtcaccgcctcagaattgttccaggagtaattgcaagatatcctag

SEQ ID NO: 68289 - DNA, 846 bp, Artificial Sequence
  derived and/or modified sequence
atggggtcacagggaagtcctgtcaaatcatatgactacctactcaagttcttactcgtgggcgactccgacgtggggaaaggagaaatcctggagagtctgcaggacggcgcggcggagtcaccttatgcatattccaatgggatcgactacaaaactactactatcctgctggatggccgcagggttaagctagagctgtgggacacctcgggccagggtaggttttgtacaatctttagaagttacagccggggcgcccagggtattttactggtctatgacatcacgaacagatggagcttcgacggtatcgacagatggattaaagagatagatgagcatgcaccgggcgtgccacgcatcctggttgggaacagacttcatcttgcatttaaaaggcaggttcccacagaacaggcaagagcatacgcagagaagaactgcatgacttttttcgaggtgtccccactgtgcaacttcaatgtgattgagagcttcaccgaactgtcaaggatagtgctgatgcgccatggaatggagaagatatggagacctaaccgggtgttcagccttcaagacttatgttgtcgtgcaattgtgtcatgcaccccggtgcacctcatagacaagcttccgctgcccgtgacaatcaaatcccacctgaaatcattttcaatggcaaacgggatgaacgccgtgatgatgcatggcagatcctactccctggcctctggtgctggaggtggcggttccaagggaaattcccttaaacgcagcaagagtataagacctccccagtctcccccgcaaaattgctccagatccaattgtaagatcagttag

SEQ ID NO: 68290 - DNA, 846 bp, Artificial Sequence
  derived and/or modified sequence
atgggctcacagggaagcccagtcaagtcatacgattacctccttaaattcctcctggtcggggacagcgacgtgggaaaaggtgagatactggagtctctgcaggacggcgccgcagaaagtccatatgcatatagcaatgggattgattataagacaacgactatattgcttgacggacgcagggtcaaactcgagctgtgggacacctccggacaggggcgtttctgtacgatttttcggtcatactccaggggggctcagggcatattgctcgtgtacgacatcacaaatcgatggtccttcgacgggatcgaccggtggatcaaagagatcgacgaacacgcccctggggtcccgcggattttggttgggaaccgactgcatttagctttcaagaggcaggtgccaaccgaacaggccagagcgtatgctgagaaaaattgcatgacattcttcgaagtttctccactatgcaattttaacgttattgaatcatttactgagctgagccgaattgtcctcatgcggcacgggatggaaaagatctggaggcctaacagagtcttctctctgcaagatctgtgttgccgcgccatagtaagctgtaccccggtccaccttatcgataagctgcccctgcctgtcaccattaagtcccacctaaagtcattctcaatggcaaacggcatgaacgctgtgatgatgcacggccggtcatacagccttgcaagcggggccggtggtggtgggtcaaaagggaactccctcaaacgatcaaagtccataaggcccccccagtctccccctcaaaactgcagcagaagtaattgcaagatcagctag

SEQ ID NO: 68291 - DNA, 846 bp, Artificial Sequence
  derived and/or modified sequence
atgggaagtcagggctctcccgttaaatcctatgattacttgctgaagtttcttttagtcggggacagcgatgttggaaagggagaaatactcgaatcactacaggacggggccgctgaatcgccttacgcctacagcaatggtatagactacaagacaactaccatactgttagatggaagacgggtgaaactggagctgtgggatacatcaggtcaggggagattctgcactatattccggagttactcgagaggcgctcagggtattctcttggtgtatgacattaccaaccggtggtcattcgatggaattgatagatggattaaagaaattgacgaacacgcccccggcgtccctcggatactggtgggcaatcgtctccacctggcgtttaaacggcaggttccaacagaacaggcgcgcgcctacgctgaaaagaattgcatgacattcttcgaagtcagcccattatgcaactttaatgtgatcgagtccttcaccgagttaagccgtatagtgctgatgaggcacggcatggagaagatttggaggccaaatcgggtcttctcgttacaggacctgtgttgccgcgccatcgtctcctgtacacctgtccacctaattgataaactgcctctgcccgttactatcaaatctcatttgaaaagcttttcaatggccaatgggatgaacgccgtgatgatgcacggccggagctactccctggccagtggagccggcggaggagggtcaaaaggcaatagcctgaagcggagcaagagcatacgcccccctcagtcacccccacagaattgctcccgtagtaactgcaagatatcttag

SEQ ID NO: 68292 - DNA, 846 bp, Artificial Sequence
  derived and/or modified sequence
atgggcagccagggcagccctgtgaagagctatgactacctgctgaagttcctgctggtgggggacagtgatgtgggcaaaggagagatcctggagagcctgcaggatggagctgctgagagcccctatgcctacagcaatggaattgactacaagaccaccaccatcctgctggatggaagaagagtgaagctggagctgtgggacaccagcggccagggccgcttctgcaccatcttccgcagctacagcagaggagcccagggcatcctgctggtgtatgacatcaccaaccgctggagctttgatggcatcgaccgctggatcaaggagattgatgaacatgcccctggggtgccccgcatcctggtgggcaaccggctgcacctggccttcaagaggcaggtgcccacagagcaggcccgggcctatgcagagaagaactgcatgaccttctttgaggtgagccccctgtgcaacttcaacgtcatcgagagcttcacagagctgagcagaattgtgctgatgagacatggcatggagaagatctggaggcccaacagagtcttcagcctgcaggacctgtgctgccgggccatcgtgtcctgcacccctgtgcacctgattgacaagctgcccctgcctgtgaccatcaagagccacctgaagagcttctccatggccaacggcatgaatgctgtgatgatgcacggccgcagctacagcctggccagcggggccggcggcggcggcagcaaaggaaacagcctgaagaggagcaagagcatccggcccccccagagccccccccagaactgcagccgcagcaactgcaagatctcctag

SEQ ID NO: 68293 - DNA, 846 bp, Artificial Sequence
  derived and/or modified sequence
atgggcagccagggcagccccgtgaagagctacgactacctgctgaagtttttactggtgggggatagcgatgtaggtaagggcgaaatactcgagtccctgcaggatggggccgccgaatctccatatgcgtatagtaacggtattgactacaagactaccacaatcctactggatggccgcagagtaaagctggaactctgggacacaagcggacaggggcgcttttgcacgatttttaggtcctacagccgcggcgcccagggaattctcctggtttatgatattacaaatcgttggagctttgacggtatcgacaggtggattaaggagatcgacgagcacgccccaggggtcccgaggatcctcgtgggcaacagattgcatctcgcattcaaaagacaggttcccaccgagcaggcaagagcatacgccgaaaaaaactgcatgacattctttgaagtctctccactctgcaattttaacgtgatcgaaagttttaccgagctctccaggattgtcctgatgcggcacggtatggagaaaatttggcgccctaacagggtattctctctgcaggatctgtgttgcagggcaattgttagttgcaccccagttcatttgatagacaagctgcccttgccagtgaccatcaagtcacatttaaagtcatttagcatggccaatggaatgaatgcggtgatgatgcatgggcggtcctacagcttggcgtccggcgccggcgggggggggtccaagggcaactccctcaaacggtcaaaaagcattcgacctccacagtcacccccacagaattgtagtaggagcaattgcaagatttcgtag

SEQ ID NO: 68294 - DNA, 846 bp, Artificial Sequence
  derived and/or modified sequence
atgggcagccagggcagccccgtgaagagctacgactacctgctgaagttccttctagtgggggatagcgacgtcggtaaaggcgagattctagagtctttacaggacggggctgccgaaagcccctatgcttattccaacggaatcgactataaaacgaccaccatcttattggacggtaggcgagtgaaactagaactctgggatacttctggacaagggcgcttttgtacaatatttcggagttattctaggggagcccaaggaattctgctggtgtatgatattacaaatcgctggagtttcgatggcatcgataggtggataaaagaaatcgacgagcatgctcctggcgtgccaagaattctggtggggaatcgcctccacctggcttttaagcgacaggttcccactgagcaagctcgagcttacgccgaaaaaaactgcatgaccttcttcgaggtctctccactgtgcaacttcaacgtgatcgaaagctttactgagttaagccggatcgtgctgatgcggcacggtatggagaagatttggcgccccaaccgcgtgttcagcctccaggatctgtgttgccgagccatcgtaagttgcactcctgtgcacctaatcgacaagctcccgctgcccgttactattaagagccatctgaaatccttttccatggctaatggtatgaacgcagtgatgatgcacgggcgatcctactccctggcttcaggtgcaggcggaggaggatccaaaggcaacagcctcaagcgatctaagtcaatccggcctccccagtctccaccccaaaattgctctagatctaattgcaagattagctag

SEQ ID NO: 68295 - DNA, 846 bp, Artificial Sequence
  derived and/or modified sequence
atgggcagccagggcagccccgtgaagagctacgactacctgctgaagttcctcctagtcggagattccgacgttggcaagggagagatcctggaaagcttacaggatggcgccgccgagtccccatacgcatattcaaatggtattgactataagactactacaatcttgctagacggacgccgcgtaaagctggaattatgggacacttctggccagggtcggttttgtactatctttcgatcttactcccgcggtgcacagggaattctgctggtgtacgacataaccaatcggtggtctttcgacggcattgatcggtggatcaaggagatcgacgagcacgctcctggtgtccccaggattctggtgggtaaccgccttcacctggcgtttaagcgtcaggtgcctacggaacaggcgagggcctatgcagagaaaaactgtatgacttttttcgaagtcagccccctgtgtaattttaatgtcattgagtcatttactgagctctccagaatcgtgttgatgagacatgggatggaaaaaatttggagaccaaaccgggtgttctctcttcaagacctgtgctgtcgtgcaattgtgtcttgcacccccgtgcacttgatagataagctgccactccccgtgaccatcaagtcccacttgaaatctttttctatggctaacggaatgaatgcagtcatgatgcatggcaggtcctattctcttgcctcaggagcaggcgggggggggagtaaaggcaactccctgaaaagaagcaaaagtatcaggcctccgcagtcacccccccagaattgttcacgctcaaactgtaaaattagttag

SEQ ID NO: 68296 - DNA, 846 bp, Artificial Sequence
  derived and/or modified sequence
atgggcagccagggcagccccgtgaagagctacgactacctgctgaaatttctcctcgtgggcgatagcgatgtgggcaagggagagatcctggagtcattgcaggatggcgccgctgagtctccctatgcctattctaatggaattgactacaagacaaccacaatcctgctcgacggtcggcgcgtgaagctggagctctgggatacgtctggtcaggggcgattctgtacaatcttccggagctacagccgcggcgcccagggaatcctgttggtctacgatattacgaataggtggtcttttgacgggattgacagatggatcaaggaaatcgacgagcacgcccccggggtgcctcgcatcctggtgggaaaccgtttacatctcgcatttaaacggcaagttccgaccgaacaggcacgcgcatatgccgagaaaaattgtatgaccttttttgaggtatcccctctatgcaattttaacgtgattgagtcattcacagagctgtctcgaatcgtcttaatgcgccacggaatggagaagatttggcgcccaaacagagtgtttagcttgcaggatctatgctgccgggccattgtttcttgtactcccgtccacttgatcgacaagctgcctctgccagtcactattaagtctcacctcaaaagtttctccatggctaatggaatgaacgccgtcatgatgcacgggaggtcgtattccctggcctctggggccggaggaggcgggagcaagggcaactccctgaaacggtctaaaagcattaggcctccacaaagccccccccaaaattgctcgcggagcaactgcaaaatctcttag

SEQ ID NO: 68297 - DNA, 846 bp, Artificial Sequence
  derived and/or modified sequence
atggggtcccaagggagcccagtgaagtcttatgattacctcctgaagttccttttggttggcgatagcgatgtcggaaaaggcgagatcctcgaatcgctgcaggacggcgcagcggagagcccatatgcctactccaacggtatcgactataagactaccacaatcctcctcgacggcagacgggtgaagttggaactgtgggacactagtggccaggggagattttgtacgatctttaggtcttatagcaggggagcccagggtattctgctcgtgtatgacattacaaacagatggtcattcgatggaatcgatcggtggatcaaagagatagacgagcacgctccgggtgtccccaggatcctcgtcggaaaccgcttacatttggcattcaaaaggcaagtcccgaccgagcaggccagggcttacgccgagaagaattgtatgaccttcttcgaggtgtcacctctctgtaattttaatgtaattgagtctttcactgagctcagccggattgtcctgatgaggcacggaatggaaaagatatggaggcccaaccgtgtattttcactgcaggatctgtgttgtagggctatagtatcttgcacgcctgtccacctgattgataagttgcctctgcctgtgaccatcaaatctcacttaaagtctttttctatggccaatgggatgaacgctgtcatgatgcacggcaggagctatagtctggcaagtggcgctggcggtgggggaagtaaaggaaatagtctgaagcggtctaagtcgattcgacctcctcagtcgccaccccaaaattgcagccgctccaactgcaagatctcttag

SEQ ID NO: 68298 - DNA, 846 bp, Artificial Sequence
  derived and/or modified sequence
atgggaagccaaggctccccagtcaaaagctacgattacctgctgaaatttctattagtgggagattccgatgtgggcaaaggcgaaatccttgagtctctccaggatggtgccgctgaatcaccttacgcatattctaacggaatcgattacaagacaaccactatcttactggatggacgccgtgtcaagctcgaactgtgggacaccagcgggcaaggacgattctgcaccatctttcgctcctactctcgcggagcccaaggaattctgctggtgtacgacatcactaaccgatggtcgttcgacggtattgatagatggataaaggagatcgacgagcatgctcctggggtgccgagaatcttggtcggaaaccggttgcatttagccttcaagaggcaggtgcccaccgagcaggccagggcatatgctgagaagaactgcatgactttctttgaggtgagccccctgtgtaacttcaacgtgatagagtcctttactgagttgtcgcggattgtgctcatgagacacgggatggagaaaatatggcgcccaaaccgcgtgttcagtctccaggacctctgttgccgggctattgtaagctgcacccccgtgcacctcatcgacaagcttcctttgcccgtgaccatcaaaagtcatctcaaaagcttcagcatggcaaacggcatgaatgccgtgatgatgcatggaagaagctatagcctagcatccggcgcaggtggcggaggcagcaaggggaacagtctcaagagatctaagtctatccggcctccacagtcaccacctcaaaactgtagccgatccaattgcaagatcagctag

SEQ ID NO: 68299 - DNA, 846 bp, Artificial Sequence
  derived and/or modified sequence
atgggttctcaaggaagccctgtaaaatcttatgactacctgttaaagtttttgctggttggggacagcgacgttgggaagggcgagatcctcgagtctttgcaggatggcgcagcagagtccccgtacgcctatagtaatggtattgactacaaaacaacaaccattctacttgacggtcggagggtcaaacttgagctatgggatacatctggacaagggcgtttctgcacaatttttagatcttattccagaggggctcaggggatccttctggtgtacgacatcacaaacaggtggagcttcgatgggatcgaccgctggatcaaagaaatcgatgagcatgctccaggcgttccgagaatcctcgtgggcaacagactccacctcgcctttaagcggcaggttcccacggaacaggcacgcgcatacgccgagaaaaactgcatgaccttttttgaagtcagtccactgtgcaacttcaatgttatcgagtccttcacggagttgagcagaattgtcctgatgagacatggcatggagaagatatggcgtccaaacagagttttctcactccaggatttatgctgccgagctattgtcagttgcactcctgttcacttgattgacaagctgcccctcccagtgactattaagagccaccttaaatctttttcaatggccaacggcatgaacgcagtgatgatgcacgggcgaagctactccttggccagtggcgctggagggggagggtctaagggcaacagcttgaagaggtccaaaagcattcggccaccacagagcccacctcagaactgcagcagatctaactgcaaaatcagctag

SEQ ID NO: 68300 - DNA, 846 bp, Artificial Sequence
  derived and/or modified sequence
atgggcagtcaagggtctccggtgaagtcttatgattacctccttaaattcctgctagtcggggacagtgatgtgggaaagggagaaatcttggaatcactgcaagatggcgctgccgagtctccatacgcttatagtaatggcattgactacaagaccaccactatccttctggacggtcgaagggtcaagctggaactttgggatacttctggacaaggcagattctgcaccattttccggtcttactctcggggagctcagggcatacttttagtgtatgatattactaatcggtggagctttgacgggatcgaccggtggataaaagagatcgacgaacacgccccaggcgtgcctcggatcctggtgggcaatagactccatctggcgttcaaacgccaggtccccactgagcaggctcgcgcttacgccgagaagaattgtatgacatttttcgaggtaagccctctgtgtaattttaacgtgatcgagtcatttactgaactatcccgaattgtgctgatgagacatggcatggaaaagatttggaggccaaatagggtgttttctctacaggacctgtgttgtcgggcaatcgttagttgcactcccgtgcacttgatcgacaagttgcccctccccgtaaccataaaatcacaccttaagtccttttctatggctaacggcatgaacgcagtcatgatgcacggtcgcagctattctcttgcctctggagccggaggcggtgggtcaaaaggaaattcactgaagaggtcaaaaagtattcggcctccccagtcccctccccagaattgcagtcggtctaactgtaagattagctag

SEQ ID NO: 68301 - DNA, 2699 bp, Artificial Sequence
  derived and/or modified sequence
cgggaagcggcggggcggcggcgaggctgaggtgcgcccgggcgcgggcggggcggggccggcgctgggcttcgggcgcgcccactcggccgccgtggggcggacgcaacgggcgcaggtgcggggcgcgggctctctcacgccgcggcctcacccggcggtgcttcggcaggcggccggcgcggggcgcaggcggcgcggccatgggctcgcagggcagtccggtgaagagctacgactacctgctcaagttcctgctggtgggcgacagcgacgtgggcaagggcgagatcctggagagcctgcaggacggcgcggcagagtccccgtacgcctacagtaacgggatcgactacaagaccaccaccatcctgctggacggccggcgcgtgaagctggagctctgggacacgtcgggccagggccggttctgcaccatcttcaggtcctactccaggggcgctcaggggatcctcttggtgtatgacatcaccaaccgctggtcctttgacggcatcgaccgctggatcaaggagatcgatgagcatgcacccggagtcccccggatcttggttggaaaccggctgcacctggccttcaagcggcaggtcccgacggagcaggcccgcgcgtacgcagagaagaactgcatgaccttctttgaggtcagccccctgtgcaacttcaacgtcatcgagtccttcacggagctatcccgcatcgtgctcatgcggcacggcatggagaagatctggaggcccaaccgagtgttcagcctgcaggacctctgctgccgggccatcgtctcctgcacccccgtgcacctcatcgacaagcttccactgcccgtcaccatcaagagccacctcaagtccttctcgatggccaacggcatgaacgcggtcatgatgcacggccgttcctactccctggccagcggggccgggggcggcggcagcaagggcaacagcctcaagaggtccaagtccatccgtccaccccagagccccccccagaactgctcgcggagtaactgcaagatctcctagcggggatgggcggggccgcctgtgcagatgccaggagggctcgagctggacactcctggctggacgccaggccagtgccgcctacgtggagactgtccacacagctgcctcagaagcgccgggctttcctcacacctgagccgggtgcgaggaggagcatgcacggaccaagcgcggcaggcgggaggagggggcgcggctgggctgctggtgcttccgggaatcttggtcggaaacaagccgggcctccccagctgcctgggcttgaccggcggggagcctggttggcctttcttatttatatagagaacacttcacttttttgtacatttttaaggggccttcagggaagcctgggtgtggcccggtggtggtgcactggtgacttcatggccacgccagctgcggggacgcacttgggactcctcgagaggggactcgcggccgcgatggcaaggcatcctgtgaattcatgcgctgcgagtggcggggctgcccagaggccgggggagcagacagggccggtgctccctctggaagcttgggtgaccggggccctggctcccacgggatggagggtgtggtcctgtggtcagagcccaagcagcactcaggagaggggagaaaggaggtgcacctggcagcccacatttttgttgctccccaaatccctccccacgtggggatgagaaccttcctgctgtgatgtgacaccttcggggacattgaccactcaaaactcagatcatctcgcccaccctggagagtgcagagctatctgtagacttaggaatacttgatgggcagcggtgcagaccccgggcacctgcgtgcagcctcctgttctcggcagcttctgtcgctggccctggggtccccacagctgcagctctcctgtgaggttgcacggcatcagaaccatcctgaccttcttagggacgtgcctggaaccacctcgtccacgtccacgtccacctgggggcctcgggaggctaggcccctcctcaaaggcccaccagcccggcgctcatgctgagccccaggcacgcagggccggccacctctctcctgaagccattggccgctcctccacccagtgcttctgcccatgcctgccccagcagcccctctgcacggtcaccatcgcctgggcctgcccacagcactggtgctcacctctacctcctgtcctcaggccgtgcggcacgacatggccagcacgcagaaggagccctcccgggacccaggaccccccgtggtggactccgcggcacatgcttcccaaggtggtcccacggagggtgttactgggcaccagtggactcgccccatggcccgttcctgggagatgagggccgtggcctgcatgaactaccagatgagtaagggaaccccaggcaggcggccctgccacagcccccaaagacactggcctcctgctccagcttccctgtcctggccccacctgtcctgttgctgccagcagggcccttgtttgggattatgaacaaacctcacagactttgaggacctggatggtcctgcattcacggcatcaacactacccgcgctgctgttagacactccgccattcctggttctctccgaaccgttctttgtacagtaaatgtaattcagctgtggtcccca

SEQ ID NO: 68302 - DNA, 2717 bp, Artificial Sequence
  derived and/or modified sequence
cgcccggggccaccccgccgctccctccgagggttctgcggaagcaggcggcacagcctgcgaggggctttcgtttcccggactcagccgcatcgcctcggctcgggcgcgcctgcatcctgccgcccgtccgcgcgttgaaggggcggatacaaacaacgtggacttccgagcccctgattggcgagcgtgcggccggcgcggggcgcaggcggcgcggccatgggctcgcagggcagtccggtgaagagctacgactacctgctcaagttcctgctggtgggcgacagcgacgtgggcaagggcgagatcctggagagcctgcaggacggcgcggcagagtccccgtacgcctacagtaacgggatcgactacaagaccaccaccatcctgctggacggccggcgcgtgaagctggagctctgggacacgtcgggccagggccggttctgcaccatcttcaggtcctactccaggggcgctcaggggatcctcttggtgtatgacatcaccaaccgctggtcctttgacggcatcgaccgctggatcaaggagatcgatgagcatgcacccggagtcccccggatcttggttggaaaccggctgcacctggccttcaagcggcaggtcccgacggagcaggcccgcgcgtacgcagagaagaactgcatgaccttctttgaggtcagccccctgtgcaacttcaacgtcatcgagtccttcacggagctatcccgcatcgtgctcatgcggcacggcatggagaagatctggaggcccaaccgagtgttcagcctgcaggacctctgctgccgggccatcgtctcctgcacccccgtgcacctcatcgacaagcttccactgcccgtcaccatcaagagccacctcaagtccttctcgatggccaacggcatgaacgcggtcatgatgcacggccgttcctactccctggccagcggggccgggggcggcggcagcaagggcaacagcctcaagaggtccaagtccatccgtccaccccagagccccccccagaactgctcgcggagtaactgcaagatctcctagcggggatgggcggggccgcctgtgcagatgccaggagggctcgagctggacactcctggctggacgccaggccagtgccgcctacgtggagactgtccacacagctgcctcagaagcgccgggctttcctcacacctgagccgggtgcgaggaggagcatgcacggaccaagcgcggcaggcgggaggagggggcgcggctgggctgctggtgcttccgggaatcttggtcggaaacaagccgggcctccccagctgcctgggcttgaccggcggggagcctggttggcctttcttatttatatagagaacacttcacttttttgtacatttttaaggggccttcagggaagcctgggtgtggcccggtggtggtgcactggtgacttcatggccacgccagctgcggggacgcacttgggactcctcgagaggggactcgcggccgcgatggcaaggcatcctgtgaattcatgcgctgcgagtggcggggctgcccagaggccgggggagcagacagggccggtgctccctctggaagcttgggtgaccggggccctggctcccacgggatggagggtgtggtcctgtggtcagagcccaagcagcactcaggagaggggagaaaggaggtgcacctggcagcccacatttttgttgctccccaaatccctccccacgtggggatgagaaccttcctgctgtgatgtgacaccttcggggacattgaccactcaaaactcagatcatctcgcccaccctggagagtgcagagctatctgtagacttaggaatacttgatgggcagcggtgcagaccccgggcacctgcgtgcagcctcctgttctcggcagcttctgtcgctggccctggggtccccacagctgcagctctcctgtgaggttgcacggcatcagaaccatcctgaccttcttagggacgtgcctggaaccacctcgtccacgtccacgtccacctgggggcctcgggaggctaggcccctcctcaaaggcccaccagcccggcgctcatgctgagccccaggcacgcagggccggccacctctctcctgaagccattggccgctcctccacccagtgcttctgcccatgcctgccccagcagcccctctgcacggtcaccatcgcctgggcctgcccacagcactggtgctcacctctacctcctgtcctcaggccgtgcggcacgacatggccagcacgcagaaggagccctcccgggacccaggaccccccgtggtggactccgcggcacatgcttcccaaggtggtcccacggagggtgttactgggcaccagtggactcgccccatggcccgttcctgggagatgagggccgtggcctgcatgaactaccagatgagtaagggaaccccaggcaggcggccctgccacagcccccaaagacactggcctcctgctccagcttccctgtcctggccccacctgtcctgttgctgccagcagggcccttgtttgggattatgaacaaacctcacagactttgaggacctggatggtcctgcattcacggcatcaacactacccgcgctgctgttagacactccgccattcctggttctctccgaaccgttctttgtacagtaaatgtaattcagctgtggtcccc

SEQ ID NO: 68303 - DNA, 2569 bp, Artificial Sequence
  derived and/or modified sequence
gccctggtggtgcgggaagcggcggggcggcggcgaggctgaggcggccggcgcggggcgcaggcggcgcggccatgggctcgcagggcagtccggtgaagagctacgactacctgctcaagttcctgctggtgggcgacagcgacgtgggcaagggcgagatcctggagagcctgcaggacggcgcggcagagtccccgtacgcctacagtaacgggatcgactacaagaccaccaccatcctgctggacggccggcgcgtgaagctggagctctgggacacgtcgggccagggccggttctgcaccatcttcaggtcctactccaggggcgctcaggggatcctcttggtgtatgacatcaccaaccgctggtcctttgacggcatcgaccgctggatcaaggagatcgatgagcatgcacccggagtcccccggatcttggttggaaaccggctgcacctggccttcaagcggcaggtcccgacggagcaggcccgcgcgtacgcagagaagaactgcatgaccttctttgaggtcagccccctgtgcaacttcaacgtcatcgagtccttcacggagctatcccgcatcgtgctcatgcggcacggcatggagaagatctggaggcccaaccgagtgttcagcctgcaggacctctgctgccgggccatcgtctcctgcacccccgtgcacctcatcgacaagcttccactgcccgtcaccatcaagagccacctcaagtccttctcgatggccaacggcatgaacgcggtcatgatgcacggccgttcctactccctggccagcggggccgggggcggcggcagcaagggcaacagcctcaagaggtccaagtccatccgtccaccccagagccccccccagaactgctcgcggagtaactgcaagatctcctagcggggatgggcggggccgcctgtgcagatgccaggagggctcgagctggacactcctggctggacgccaggccagtgccgcctacgtggagactgtccacacagctgcctcagaagcgccgggctttcctcacacctgagccgggtgcgaggaggagcatgcacggaccaagcgcggcaggcgggaggagggggcgcggctgggctgctggtgcttccgggaatcttggtcggaaacaagccgggcctccccagctgcctgggcttgaccggcggggagcctggttggcctttcttatttatatagagaacacttcacttttttgtacatttttaaggggccttcagggaagcctgggtgtggcccggtggtggtgcactggtgacttcatggccacgccagctgcggggacgcacttgggactcctcgagaggggactcgcggccgcgatggcaaggcatcctgtgaattcatgcgctgcgagtggcggggctgcccagaggccgggggagcagacagggccggtgctccctctggaagcttgggtgaccggggccctggctcccacgggatggagggtgtggtcctgtggtcagagcccaagcagcactcaggagaggggagaaaggaggtgcacctggcagcccacatttttgttgctccccaaatccctccccacgtggggatgagaaccttcctgctgtgatgtgacaccttcggggacattgaccactcaaaactcagatcatctcgcccaccctggagagtgcagagctatctgtagacttaggaatacttgatgggcagcggtgcagaccccgggcacctgcgtgcagcctcctgttctcggcagcttctgtcgctggccctggggtccccacagctgcagctctcctgtgaggttgcacggcatcagaaccatcctgaccttcttagggacgtgcctggaaccacctcgtccacgtccacgtccacctgggggcctcgggaggctaggcccctcctcaaaggcccaccagcccggcgctcatgctgagccccaggcacgcagggccggccacctctctcctgaagccattggccgctcctccacccagtgcttctgcccatgcctgccccagcagcccctctgcacggtcaccatcgcctgggcctgcccacagcactggtgctcacctctacctcctgtcctcaggccgtgcggcacgacatggccagcacgcagaaggagccctcccgggacccaggaccccccgtggtggactccgcggcacatgcttcccaaggtggtcccacggagggtgttactgggcaccagtggactcgccccatggcccgttcctgggagatgagggccgtggcctgcatgaactaccagatgagtaagggaaccccaggcaggcggccctgccacagcccccaaagacactggcctcctgctccagcttccctgtcctggccccacctgtcctgttgctgccagcagggcccttgtttgggattatgaacaaacctcacagactttgaggacctggatggtcctgcattcacggcatcaacactacccgcgctgctgttagacactccgccattcctggttctctccgaaccgttctttgtacagtaaatgtaattcagctgtggtcccc

SEQ ID NO: 68304 - DNA, 2609 bp, Artificial Sequence
  derived and/or modified sequence
ggatttctctgggaggcagccgcagggaagggaatgatcttggtgaacttataatcgaaccaatggttccgggaaagcaggaggcggccggcgcggggcgcaggcggcgcggccatgggctcgcagggcagtccggtgaagagctacgactacctgctcaagttcctgctggtgggcgacagcgacgtgggcaagggcgagatcctggagagcctgcaggacggcgcggcagagtccccgtacgcctacagtaacgggatcgactacaagaccaccaccatcctgctggacggccggcgcgtgaagctggagctctgggacacgtcgggccagggccggttctgcaccatcttcaggtcctactccaggggcgctcaggggatcctcttggtgtatgacatcaccaaccgctggtcctttgacggcatcgaccgctggatcaaggagatcgatgagcatgcacccggagtcccccggatcttggttggaaaccggctgcacctggccttcaagcggcaggtcccgacggagcaggcccgcgcgtacgcagagaagaactgcatgaccttctttgaggtcagccccctgtgcaacttcaacgtcatcgagtccttcacggagctatcccgcatcgtgctcatgcggcacggcatggagaagatctggaggcccaaccgagtgttcagcctgcaggacctctgctgccgggccatcgtctcctgcacccccgtgcacctcatcgacaagcttccactgcccgtcaccatcaagagccacctcaagtccttctcgatggccaacggcatgaacgcggtcatgatgcacggccgttcctactccctggccagcggggccgggggcggcggcagcaagggcaacagcctcaagaggtccaagtccatccgtccaccccagagccccccccagaactgctcgcggagtaactgcaagatctcctagcggggatgggcggggccgcctgtgcagatgccaggagggctcgagctggacactcctggctggacgccaggccagtgccgcctacgtggagactgtccacacagctgcctcagaagcgccgggctttcctcacacctgagccgggtgcgaggaggagcatgcacggaccaagcgcggcaggcgggaggagggggcgcggctgggctgctggtgcttccgggaatcttggtcggaaacaagccgggcctccccagctgcctgggcttgaccggcggggagcctggttggcctttcttatttatatagagaacacttcacttttttgtacatttttaaggggccttcagggaagcctgggtgtggcccggtggtggtgcactggtgacttcatggccacgccagctgcggggacgcacttgggactcctcgagaggggactcgcggccgcgatggcaaggcatcctgtgaattcatgcgctgcgagtggcggggctgcccagaggccgggggagcagacagggccggtgctccctctggaagcttgggtgaccggggccctggctcccacgggatggagggtgtggtcctgtggtcagagcccaagcagcactcaggagaggggagaaaggaggtgcacctggcagcccacatttttgttgctccccaaatccctccccacgtggggatgagaaccttcctgctgtgatgtgacaccttcggggacattgaccactcaaaactcagatcatctcgcccaccctggagagtgcagagctatctgtagacttaggaatacttgatgggcagcggtgcagaccccgggcacctgcgtgcagcctcctgttctcggcagcttctgtcgctggccctggggtccccacagctgcagctctcctgtgaggttgcacggcatcagaaccatcctgaccttcttagggacgtgcctggaaccacctcgtccacgtccacgtccacctgggggcctcgggaggctaggcccctcctcaaaggcccaccagcccggcgctcatgctgagccccaggcacgcagggccggccacctctctcctgaagccattggccgctcctccacccagtgcttctgcccatgcctgccccagcagcccctctgcacggtcaccatcgcctgggcctgcccacagcactggtgctcacctctacctcctgtcctcaggccgtgcggcacgacatggccagcacgcagaaggagccctcccgggacccaggaccccccgtggtggactccgcggcacatgcttcccaaggtggtcccacggagggtgttactgggcaccagtggactcgccccatggcccgttcctgggagatgagggccgtggcctgcatgaactaccagatgagtaagggaaccccaggcaggcggccctgccacagcccccaaagacactggcctcctgctccagcttccctgtcctggccccacctgtcctgttgctgccagcagggcccttgtttgggattatgaacaaacctcacagactttgaggacctggatggtcctgcattcacggcatcaacactacccgcgctgctgttagacactccgccattcctggttctctccgaaccgttctttgtacagtaaatgtaattcagctgtggtcccc

SEQ ID NO: 68305 - protein, 137 aa, Artificial Sequence
  derived and/or modified sequence
MDDLRYGVYPVKGASGYPGAERNLLEYSYFEKGPLTFRDVVIEFSQEEWQCLDTAQQDLYRKVMLENFRNLVFLGIDVSKPDLITCLEQGKDPWNMKRHSMVATPPESGVLKFPTIIILLSRCFFQSVNICFIYLEP

SEQ ID NO: 68306 - protein, 117 aa, Artificial Sequence
  derived and/or modified sequence
MDDLRYGVYPVKGASGYPGAERNLLEYSYFEKGPLTFRDVVIEFSQEEWQCLDTAQQDLYRKVMLENFRNLVFLGIDVSKPDLITCLEQGKDPWNMKRHSMVATPPDGVSLLFPRPE

SEQ ID NO: 68307 - DNA, 414 bp, Artificial Sequence
  derived and/or modified sequence
atggacgacctgagatacggcgtgtaccccgtgaagggcgccagcggctaccccggcgccgagagaaacctgctggagtacagctacttcgagaagggccccctgaccttcagagacgtggtgatcgagttcagccaggaggagtggcagtgcctggacaccgcccagcaggacctgtacagaaaggtgatgctggagaacttcagaaacctggtgttcctgggcatcgacgtgagcaagcccgacctgatcacctgcctggagcagggcaaggacccctggaacatgaagagacacagcatggtggccaccccccccgagagcggcgtgctgaagttccccaccatcatcatcctgctgagcagatgcttcttccagagcgtgaacatctgcttcatctacctggagccctag

SEQ ID NO: 68308 - DNA, 354 bp, Artificial Sequence
  derived and/or modified sequence
atggacgacctgagatacggcgtgtaccccgtgaagggcgccagcggctaccccggcgccgagagaaacctgctggagtacagctacttcgagaagggccccctgaccttcagagacgtggtgatcgagttcagccaggaggagtggcagtgcctggacaccgcccagcaggacctgtacagaaaggtgatgctggagaacttcagaaacctggtgttcctgggcatcgacgtgagcaagcccgacctgatcacctgcctggagcagggcaaggacccctggaacatgaagagacacagcatggtggccaccccccccgacggcgtgagcctgctgttccccagacccgagtag

SEQ ID NO: 68309 - DNA, 414 bp, Artificial Sequence
  derived and/or modified sequence
atggatgatctgaggtatggcgtctacccagtaaaaggcgccagcgggtatcctggcgcagagaggaatttgctggaatacagttattttgaaaagggcccgcttacctttagggacgtcgtaattgaattctctcaggaggagtggcagtgcttagacacagctcagcaggacctgtacaggaaggttatgctagagaacttcaggaacctcgtcttcctggggattgacgtgtccaaacccgatttaatcacttgtctggaacagggaaaggatccatggaacatgaaacggcatagtatggtcgcgaccccacctgagtccggcgtgctgaagttccctaccattatcatactgctgagccgctgctttttccagtcagttaatatctgttttatttatctggaaccatag

SEQ ID NO: 68310 - DNA, 354 bp, Artificial Sequence
  derived and/or modified sequence
atggacgacctgagatacggcgtctacccagtcaagggcgccagcgggtatcccggcgctgaaaggaacctcttagaatactcctattttgaaaagggccccttgacattccgggacgtggttattgaattctcacaggaggagtggcagtgcttggataccgcccagcaggatctctataggaaggtgatgctagagaatttcagaaatctcgtgttcctgggaattgatgtctcaaagcctgatctgatcacatgcttggaacagggaaaagatccttggaacatgaagcgacatagcatggtggccactcctcccgacggtgtatcccttttatttcctaggcccgaatag

SEQ ID NO: 68311 - DNA, 414 bp, Artificial Sequence
  derived and/or modified sequence
atggatgacctgcgctatggagtgtaccctgtgaagggggccagcggctacccaggagctgagaggaacctgctggagtacagctactttgagaagggccccctgaccttcagagatgtggtgattgagttcagccaggaggagtggcagtgcctggacacagcccagcaggacctgtacaggaaggtgatgctggagaacttcaggaacctggtgttcctgggcattgatgtgtccaagccagacctgatcacctgcctggagcagggcaaggacccctggaacatgaagaggcacagcatggtggccaccccacctgagagcggcgtgctgaagttccccaccatcatcatcctgctgagccgctgcttcttccagagcgtgaacatctgcttcatctacctggagccctag

SEQ ID NO: 68312 - DNA, 354 bp, Artificial Sequence
  derived and/or modified sequence
atggatgacctgcgctatggagtgtaccctgtgaagggggccagcggctacccaggagctgagaggaacctgctggagtacagctactttgagaagggccccctgaccttcagagatgtggtgattgagttcagccaggaggagtggcagtgcctggacacagcccagcaggacctgtacaggaaggtgatgctggagaacttcaggaacctggtgttcctgggcattgatgtgtccaagccagacctgatcacctgcctggagcagggcaaggacccctggaacatgaagaggcacagcatggtggccaccccaccagatggagtgtccctgctcttccccaggcctgagtag

SEQ ID NO: 68313 - DNA, 414 bp, Artificial Sequence
  derived and/or modified sequence
atggacgacctgcggtacggcgtgtaccccgtgaagggcgccagcggataccctggagccgaacggaacctactggagtatagctacttcgagaagggtcctctgactttccgcgacgtggtgattgagtttagccaggaggagtggcagtgcctcgacaccgctcagcaggacctttaccgcaaagtgatgctagaaaattttcgtaacctggtttttctcggcatcgacgtttcaaaacctgatttgattacctgccttgagcaagggaaagatccctggaatatgaaacgtcattctatggtagcaactcctcccgaaagcggtgtgttgaaattccctactattatcatactgctgtctcggtgcttcttccagtctgtgaatatttgtttcatatatctagaaccttag

SEQ ID NO: 68314 - DNA, 354 bp, Artificial Sequence
  derived and/or modified sequence
atggacgacctgcggtacggcgtgtaccccgtgaagggcgccagcggctaccccggggccgaaagaaacctgctggaatacagctatttcgagaaggggccgctgactttcagggacgtggtgattgaattttcgcaggaagagtggcaatgccttgataccgctcagcaggacctgtaccggaaggttatgctagaaaactttaggaatctagtcttcctgggcattgatgtctccaaacctgaccttatcacgtgtctggagcagggaaaagacccctggaacatgaagcggcattcaatggtggccacccctcccgatggggtgagccttctgtttcctaggcccgagtag

SEQ ID NO: 68315 - DNA, 414 bp, Artificial Sequence
  derived and/or modified sequence
atggacgacctgaggtacggggtgtacccggttaagggagcatctgggtaccctggggctgagagaaacctccttgaatactcatatttcgagaaaggccctctgacattccgcgatgttgttatcgaattttctcaggaggaatggcagtgtctcgacaccgcgcaacaggacctctaccggaaagtcatgcttgaaaatttccggaacctggtctttctaggcattgatgtttccaagcctgatctcatcacctgcctcgaacaggggaaggacccatggaatatgaagcgtcacagcatggtggctactccacccgaaagcggggtgcttaaattccccacaatcattatccttttgagtaggtgttttttccagagcgttaacatatgctttatttaccttgagccatag

SEQ ID NO: 68316 - DNA, 354 bp, Artificial Sequence
  derived and/or modified sequence
atggatgatttgaggtatggggtttatcctgtgaagggggcaagcggttaccccggtgcagagcggaacctcttggaatactcctactttgaaaagggtccactaacgttcagagacgttgttatagaattcagtcaggaggagtggcagtgcctggacactgctcagcaggacttgtacaggaaggtgatgttagaaaattttagaaacctggtgtttcttggaatcgacgtgtccaagccagacctcatcacctgcctggagcagggcaaagacccctggaacatgaagcgacatagcatggtggcaaccccgccagacggcgtttcgctgctctttcctcgcccagaatag

SEQ ID NO: 68317 - DNA, 2442 bp, Artificial Sequence
  derived and/or modified sequence
gtccaatcaggcacgcagcttgagcggagaggacggcttccgggatgtggcgggatttgtccgcttctttgtctttggctgccgctggaactccgggtctcgtcttcactgctctgtgtcctctgctcctagaggcccagcctctggtcctgtgacctgcaggtattgggaatccacagctaagacgccgggacaccctggaagcctagaaatggacgacctgaggtatggagtgtatcctgtcaagggggcaagtggataccctggggctgagaggaatcttctggagtactcttattttgaaaaggggccgttgacatttagggatgtggtcatagaattctctcaggaggagtggcaatgcctggacactgctcagcaagatttgtataggaaagtgatgttagagaacttcagaaacctggtgttcttgggtattgatgtctctaagccagatctgatcacctgtctggagcaaggaaaagatccctggaatatgaagagacacagtatggtagccacacccccagaaagtggggtattgaaatttcctactataattatattgctgtctaggtgtttcttccagtctgtcaatatttgctttatatatttggaaccttagtgtgacatacacacagacacacagacgtgcacacacacacacacacacacaaaatttgtcataggttcccagttaataaatctattattgtttaatgtctttctttgtctctttgcagttttgacttaaagtactttatgtaagatatgacagtttttgacttaagatgtggcttttgtaatactattttgacctcttctgctctcatttggttaatatttgcatgcaatgtctaaatctatcttgccaccttcagtatgtttttaatcattagatgtcagctgacccttgtagaaaggcaaattggatcttggtttttaataattttaaataaatttctttattgaaagtatgtctcttgattggaaagttttctgaaacaaagagacttactaattttttttgttgttctatttgattcttgcatctttgtcccacattttctctctttgtttctctctgtggctgttttatttttactttgatatgcttttacttctttcttatgttgttttctgtgtctatacaggcatattctttgtggtacgtgggggattacataaaacctttaagagatacaatgtatttcagtctagttaaaaatgaacttttgttgcatgcaaaaattttttctcattacatatgttctcagatttgttcttgatgttgctaattatatttttatatgtatatttattaacatgtttataatgatttctatgcctttatctttcaaattttggggaataattaaaaatttcttctgtgccattatgataatgctaagaaatgtatttttgtgtatgtgcgtatctttcccagaaaataatgtgttttaatatgattttgtgttgctttgttaaatcatcttattttcattggaagcaactgttttcagcaccttttatatgtaaggaagtaccaatatactttttaaaatttggttatttttgaagtttgttttctttttatttagcaggacagatttggtgatggtattatactcacttgataactattttcttcagatttcactatatcacacagttttcttctgtcctgaaaaatttttgttgagaatccactggctatctcataagagtattcttgcaaataatatcactttttttttttttttttttgagatggagtttcactgttgttccccaggccggagtgaaatggcgcgatttcacctcgctgtgtcccaggttcaagcagttctcctacctcagcctcccgagtagctgggattacgggcatatgccaccacacccagctaagtttgtatttttagtagagacagggtttctccatgttggtcaggctagtctcgatctcctgacctcaggtgattcacccacctcagcttcccaaagtgccgggattacaagcttgagctaccgcgcccagccaacacatcacttttatcttgcagctcccgagattctcttttctgtgacttttaaaattgtgcttacatatgtgtttgatataaatatctttgtattctagtttgtttgttcagcttcttcatttttacatcactttttaaaagatttctgttattttttatatttttttacctccataatttctgtttttccaatattttaaatatttctgttcttatttccagttttctgattttctgtagttctctgtgttcatattttactcattgagtattcaatttattttgtttttaaaattaatgtatacattttttatttctttctgaaaaatttataataattttgttggtactacattgccctgttttgtatatattctaatcttttattaaaatttgcaca

SEQ ID NO: 68318 - DNA, 1142 bp, Artificial Sequence
  derived and/or modified sequence
gcttctttgtctttggctgccgctggaactccgggtctcgtcttcactgctctgtgtcctctgctcctagaggcccagcctctggtcctgtgacctgcaggtattgggaatccacagctaagacgccgggacaccctggaagcctagaaatggacgacctgaggtatggagtgtatcctgtcaagggggcaagtggataccctggggctgagaggaatcttctggagtactcttattttgaaaaggggccgttgacatttagggatgtggtcatagaattctctcaggaggagtggcaatgcctggacactgctcagcaagatttgtataggaaagtgatgttagagaacttcagaaacctggtgttcttgggtattgatgtctctaagccagatctgatcacctgtctggagcaaggaaaagatccctggaatatgaagagacacagtatggtagccacacccccagatggagtttcactgttgttccccaggccggagtgaaatggcgcgatttcacctcgctgtgtcccaggttcaagcagttctcctacctcagcctcccgagtagctgggattacgggcatatgccaccacacccagctaagtttgtatttttagtagagacagggtttctccatgttggtcaggctagtctcgatctcctgacctcaggtgattcacccacctcagcttcccaaagtgccgggattacaagcttgagctaccgcgcccagccaacacatcacttttatcttgcagctcccgagattctcttttctgtgacttttaaaattgtgcttacatatgtgtttgatataaatatctttgtattctagtttgtttgttcagcttcttcatttttacatcactttttaaaagatttctgttattttttatatttttttacctccataatttctgtttttccaatattttaaatatttctgttcttatttccagttttctgattttctgtagttctctgtgttcatattttactcattgagtattcaatttattttgtttttaaaattaatgtatacattttttatttctttctgaaaaatttataataattttgttggtactacattgccctgttttgtatatattctaatcttttattaaaatttgcacatt

SEQ ID NO: 68319 - DNA, 501 bp, Artificial Sequence
  derived and/or modified sequence
atggccagactgagaagcggcatggagagcatcctgccccccagcgcccacgagctggcccagaacagactgcacgtgagcatcaccaacgccaagaccagagagaaccacctggtgagcaccttcagcagcagagaggacctgatcaaggtgctgctggccagcagcttcgtgcccatctacgccggcctgaagctggtggagtacaagggccagaagtgggtggacggcggcctgaccaacgccctgcccatcctgcccgtgggcagaaccgtgaccatcagccccttcagcggcagactggacatcagcccccaggacaagggccagctggacctgtacgtgaacatcgccaagcaggacatcatgctgagcctggccaacctggtgagactgaaccaggccctgttcccccccagcaagagaaagatggagagcctgtaccagtgcggcttcgacgacaccgtgaagttcctgctgaaggagaactggttcgagtag

SEQ ID NO: 68320 - DNA, 501 bp, Artificial Sequence
  derived and/or modified sequence
atggcgcgccttagaagcggaatggagtccattcttccgcccagcgcccacgagctggctcagaacaggctgcatgttagcatcacaaacgctaaaactcgagagaaccacctagtgagcaccttctcatcccgcgaggacctcattaaagtcttgctggctagcagtttcgttcccatctatgctggcctgaagctagtggagtacaagggccaaaaatgggttgacggaggtttgacaaacgccctgcccatcctgccggttgggcgtaccgtgacaatctcccctttttcaggccgccttgacatctccccacaagacaaagggcagctggacctttacgtgaatatcgcaaagcaggacatcatgctcagcctggcgaacttggtgcgcctgaaccaagcacttttccccccaagcaaacgaaaaatggaaagcctctaccaatgtgggtttgacgatactgtaaagtttttgctgaaagagaactggtttgagtag

SEQ ID NO: 68321 - DNA, 501 bp, Artificial Sequence
  derived and/or modified sequence
atggcccggctgcggagcggcatggagagcatcctgcccccatctgcccacgagctggcccagaaccggctgcacgtgtccatcaccaatgccaagacccgggagaaccacctggtgtccaccttcagcagccgggaggacctgatcaaggtgctgctggccagcagctttgtgcccatctatgccggcctgaagctggtggagtacaagggccagaagtgggtggatggcggcctgaccaatgccctgcccatcctgcctgtgggccgcacagtgaccatcagccccttcagcggccgcctggacatcagcccccaggacaagggccagctggacctgtatgtgaacatcgccaagcaggacatcatgctgagcctggccaacctggtgcggctgaaccaggccctcttcccccccagcaagaggaagatggagagcctgtaccagtgtggctttgatgacacagtgaagttcctgctgaaggagaactggtttgaatag

SEQ ID NO: 68322 - DNA, 501 bp, Artificial Sequence
  derived and/or modified sequence
atggcccggctgcggagcggcatggagagcatcctgccccccagcgcccatgagctcgcgcagaatcgcctgcacgtttcaatcacgaatgcaaagacaagagagaatcacctggtgagcactttttcctctcgcgaagacctaatcaaggtgttgttggctagttccttcgtccctatttatgcaggcttgaaattggtggagtacaaaggtcagaagtgggtggacggcggcctcactaacgctctgcccatcctcccggtcggccggaccgtgactatctctccattctccgggcggctcgatattagtccccaggacaaaggccagttggatttgtacgtgaatattgctaagcaagacattatgctgtccctggcaaatctggtgcggttgaaccaggccctgttcccccccagtaaacgcaaaatggagtctctgtatcagtgcggtttcgatgacacagtcaagttcctgctcaaggagaactggttcgagtag

SEQ ID NO: 68323 - DNA, 501 bp, Artificial Sequence
  derived and/or modified sequence
atggccaggctcaggtcgggcatggagtccatcctccccccttccgcccatgagctggcccaaaatagactccatgtcagtattacgaacgcaaagacacgtgagaatcatttggtatcaacattcagttccagagaggatcttatcaaagttctgttagcaagctccttcgtacctatctatgcaggcctgaaactggtcgagtacaaaggacagaaatgggtggatggaggcttgacaaacgccctgccaatacttcctgtgggcagaactgtgaccatttctcccttcagtggtaggctggacatatccccacaagacaaggggcaattggacctttatgtgaatatagccaagcaagacataatgctgtctctggcgaacttggtgcgtctcaaccaggcactattcccaccttctaaacggaaaatggagagcctctatcagtgtgggtttgacgacactgtgaaatttttgctgaaagaaaactggtttgagtag

SEQ ID NO: 68324 - protein, 320 aa, Artificial Sequence
  derived and/or modified sequence
MARPIQVKPADSESRGGRDRKLFVGMLNKQQSEEDVLRLFQPFGVIDECTVLRGPDGSSKGCAFVKFSSHTEAQAAIHALHGSQTMPGASSSLVVKFADTDKERTLRRMQQMVGQLGILTPSLTLPFSPYSAYAQALMQQQTTVLSTSGSYLSPGVAFSPCHIQQIGAVSLNGLPATPIAPASGLHSPPLLGTTAVPGLVAPITNGFAGVVPFPGGHPALETVYANGLVPYPAQSPTVAETLHPAFSGVQQYTAMYPTAAITPIAHSVPQPPPLLQQQQREGVWRHGADADVPTLRQYHFLQGVYGSSYQPEQVFRLREL

SEQ ID NO: 68325 - protein, 409 aa, Artificial Sequence
  derived and/or modified sequence
MARLTESEARRQQQQLLQPRPSPVGSSGPEPPGGQPDGMKDLDAIKLFVGQIPRHLDEKDLKPLFEQFGRIYELTVLKDPYTGMHKGCAFLTYCARDSAIKAQTALHEQKTLPGMARPIQVKPADSESRGGRDRKLFVGMLNKQQSEEDVLRLFQPFGVIDECTVLRGPDGSSKGCAFVKFSSHTEAQAAIHALHGSQTMPGASSSLVVKFADTDKERTLRRMQQMVGQLGILTPSLTLPFSPYSAYAQALMQQQTTVLSTSGSYLSPGVAFSPCHIQQIGAVSLNGLPATPIAPASGVVPFPGGHPALETVYANGLVPYPAQSPTVAETLHPAFSGVQQYTAMYPTAAITPIAHSVPQPPPLLQQQQREGVWRHGADADVPTLRQYHFLQGVYGSSYQPEQVFRLREL

SEQ ID NO: 68326 - DNA, 186 bp, Artificial Sequence
  derived and/or modified sequence
atgggcagagccgacacccccagacacccccccccccccgccgccggcttcggcgtgcacagaggcgccttcctgatccccgtggccctgagagtgctgctggccggcagaacccccagacccttcacccccggcctggccgaccccagaagactgggccccagaagagtgcaggccgcccagtag

SEQ ID NO: 68327 - DNA, 963 bp, Artificial Sequence
  derived and/or modified sequence
atggcacggcctatacaggtgaagccagcagacagcgagagcaggggaggccgcgacaggaaacttttcgtgggcatgcttaacaagcagcaatcagaagaggatgtactccgcctctttcagcccttcggcgttattgacgaatgtacagttctacgagggccggacggcagctccaaggggtgcgcatttgtaaaattcagttcccatacggaggctcaagctgcaattcatgccttgcatgggagccagaccatgccaggggcatctagttcgcttgtggttaaatttgccgatactgacaaagagcgaacactgagaagaatgcaacagatggtgggccagctcggaattctgactccgtctctgacactgcctttctctccttacagtgcctacgctcaagccctgatgcagcagcagactactgttctcagtacctccggctcttatctctccccaggggtcgcattcagtccatgccatatccagcagatcggtgccgtgagcctgaatggcctgccagcaacacctatcgccccagcttccgggctgcattctcccccactgttggggactactgccgtgccgggactagtggcccccattacaaacgggtttgccggggtggttccgtttcctggtgggcacccagccctagaaacagtgtacgcaaacggcttggtgccataccccgcgcagagtccaacggtcgccgaaaccctacacccagcttttagcggcgtgcagcagtacactgcaatgtaccctactgcagcaattaccccaatagcacacagcgtaccccagcctcctccattactccaacagcagcaacgggagggggtttggcggcacggggccgatgctgatgtccctactttgcgacaatatcacttccttcagggcgtgtacggaagttcatatcagcctgagcaggtgttcaggctgcgggagctctag

SEQ ID NO: 68328 - DNA, 1230 bp, Artificial Sequence
  derived and/or modified sequence
atggccagactcacagagagtgaagccaggaggcagcagcagcagttgctgcagcctaggccttcccccgtgggctcctctggacccgaaccaccaggtgggcagcccgatggcatgaaggacttggatgcaattaagctgtttgtgggccagatccccaggcacctggacgagaaagacctgaagccgctgttcgagcagttcggacggatttacgaactcacagtgctgaaggatccttacaccggcatgcacaaaggatgcgcctttctcacttattgtgcacgcgactctgccatcaaggcccagacagccctccatgagcaaaagacgttgccaggaatggcacggcccatccaagttaaacctgctgactctgagagccggggcggcagagaccggaaattatttgtggggatgctgaataagcagcagtctgaggaagacgtgctaagacttttccagccattcggagtcattgacgaatgcacggtattgagggggccagatggatcttcaaaaggctgtgccttcgttaaattcagtagtcatactgaagcccaggccgcaatacatgcactgcacggtagtcagacaatgcctggagctagctcgtctttggtggtcaagtttgcggacacagacaaggagcgtactctgcgacggatgcagcaaatggtggggcagctgggcattctgacacctagcctcaccttgcccttctcaccctactcggcatacgctcaggcattgatgcaacagcaaacgaccgtactaagcacaagcggatcctatctgagccccggagttgctttctctccatgtcacattcagcaaatcggagcggtctccctcaatggtctcccggccactccgattgctcccgcatctggcgttgtgccctttcctggggggcatcccgccctggaaaccgtttacgcaaacggcttggttccataccctgctcagagcccaactgtggctgagaccctgcacccagcattcagcggcgtgcagcagtataccgctatgtaccctacagcagcgataacacccatcgcgcatagtgttcctcaaccacctcccctgctccagcagcagcagagagaaggagtatggaggcacggtgcagacgccgacgtcccaaccctaaggcagtaccattttttgcaaggggtgtatggatctagctatcaacccgagcaggtctttaggctgcgcgaactgtag

SEQ ID NO: 68329 - DNA, 963 bp, Artificial Sequence
  derived and/or modified sequence
atggcccggcccatccaggtgaagccagctgacagcgagagccggggcggccgggacaggaagctgtttgtgggcatgctgaacaagcagcagagcgaggaggatgtgctgcggctcttccagccctttggagtgattgatgagtgcaccgtgctgcggggcccagatggcagcagcaagggctgtgcctttgtgaagttcagcagccacacagaggcccaggccgccatccacgccctgcacggcagccagaccatgcctggggccagcagcagcctggtggtgaagtttgctgacacagacaaggagaggaccctgcggaggatgcagcagatggtgggccagctgggcatcctgacccccagcctgaccctgcccttcagcccctacagcgcctatgcccaggccctgatgcagcagcagaccaccgtgctgagcaccagcggcagctacctgagccctggggtggccttcagcccctgccacatccagcagatcggggctgtgtccctgaatggcctgcctgccacccccatcgccccagccagcggcctgcacagcccccccctgctgggcaccacagctgtgcccggcctggtggcccccatcaccaatggatttgctggggtggtgcccttccctgggggccacccagccctggagaccgtgtatgccaacggcctggtgccctacccagcccagagccccaccgtggccgagaccctgcacccagccttctctggagtgcagcagtacacagccatgtaccccacagctgccatcacccccatcgcccacagcgtgccccagcccccacccctgctgcagcagcagcagcgggagggcgtgtggaggcatggagcagatgctgatgtgcccaccctgcggcagtaccacttcctgcagggcgtgtatggcagcagctaccagcctgagcaggtgttccggctgcgggagctgtag

SEQ ID NO: 68330 - DNA, 1230 bp, Artificial Sequence
  derived and/or modified sequence
atggcccggctgacagaaagtgaggcccggcggcagcagcagcagctgctgcagccccggcccagccctgtgggcagcagcggccctgagcccccaggcggccagccagatggcatgaaggacctggatgccatcaagctgtttgtgggccagatccccaggcacctggatgagaaggacctgaagcccctgtttgagcagtttggccgcatctatgagctgactgtgctgaaggacccctacacaggcatgcacaagggctgtgccttcctgacctactgtgcccgggacagcgccatcaaggcccagacagccctgcacgagcagaagaccctgcccggcatggcccggcccatccaggtgaagccagctgacagcgagagccggggcggccgggacaggaagctgtttgtgggcatgctgaacaagcagcagagcgaggaggatgtgctgcggctcttccagccctttggagtgattgatgagtgcaccgtgctgcggggcccagatggcagcagcaagggctgtgcctttgtgaagttcagcagccacacagaggcccaggccgccatccacgccctgcacggcagccagaccatgcctggggccagcagcagcctggtggtgaagtttgctgacacagacaaggagaggaccctgcggaggatgcagcagatggtgggccagctgggcatcctgacccccagcctgaccctgcccttcagcccctacagcgcctatgcccaggccctgatgcagcagcagaccaccgtgctgagcaccagcggcagctacctgagccctggggtggccttcagcccctgccacatccagcagatcggggctgtgtccctgaatggcctgcctgccacccccatcgccccagccagcggcgtggtgcccttccctgggggccacccagccctggagaccgtgtatgccaacggcctggtgccctacccagcccagagccccaccgtggccgagaccctgcacccagccttcagcggcgtgcagcagtacacagccatgtaccccacagctgccatcacccccatcgcccacagcgtgccccagcccccacccctgctgcagcagcagcagcgggagggcgtgtggaggcatggagcagatgctgatgtgcccaccctgcggcagtaccacttcctgcagggcgtgtatggcagcagctaccagcctgagcaggtgttccggctgcgggagctgtag

SEQ ID NO: 68331 - DNA, 963 bp, Artificial Sequence
  derived and/or modified sequence
atggcccggcccatccaggtgaagcccgccgacagcgagagccggggaggcagagacaggaaactctttgtaggcatgcttaacaagcagcaatcggaagaggatgtactgcggttattccagccgttcggggtgattgacgagtgcacagtcctcagaggtcccgacgggtctagcaagggatgtgcatttgtaaaattttcaagccacacggaggctcaggccgccatccacgctctgcatggcagccaaacaatgccaggcgcctccagttctctcgtcgtgaaattcgcggacactgacaaggaaagaacattgcggagaatgcaacaaatggttggacagctgggcatcctgaccccctccctcactctgccctttagcccgtactccgcctacgcgcaggctcttatgcaacagcaaactaccgttctgtcaacatctggctcgtatctgtcaccgggcgtggcattcagcccctgccatattcagcagatcggtgcagtgagtctgaatggcctgccggctacacccatcgccccagcgtctgggttgcactcaccaccactcctcgggaccaccgctgtgcccgggctggtggcaccaataacgaacggcttcgcaggcgtggtgccctttcccggaggtcacccagctctggagacagtctacgcgaacggtctggtgccctatcctgcgcagtcccccactgtggccgagactctccatccggcgttctcgggggttcagcaatataccgctatgtatcccactgctgcaattacacccattgcccattctgtaccgcagcccccacctctcctgcagcagcagcagagggaaggagtttggaggcatggagccgacgccgatgtgcctaccttacggcaataccatttcctgcagggggtgtacgggtcatcgtatcaacctgaacaggtgtttcgtttgagggaactctag

SEQ ID NO: 68332 - DNA, 1230 bp, Artificial Sequence
  derived and/or modified sequence
atggcccggctgaccgagagcgaggcccggcggcagcagcagcagttgctgcagccacgcccatctcccgtgggttctagtggccccgagcccccaggcggtcaaccagacggcatgaaggacctagatgcaatcaagctgttcgtgggacagatccctcgacatcttgacgagaaggatctgaagccacttttcgaacagttcgggaggatatacgagctaactgtgttgaaggatccttatactggcatgcataagggctgtgcattcctgacatattgtgcccgcgattccgcaatcaaggctcaaaccgcactacacgagcaaaagacgctgcctggaatggcccgcccgattcaagtgaaacccgcagatagcgagagccgcggcggacgagacagaaaactcttcgtcggtatgctcaacaaacagcaaagcgaagaggacgtgcttaggttgttccagcctttcggggtgattgacgagtgcacagtcctccgtggacccgatggctcatccaaggggtgcgcctttgtcaagttttctagtcacacggaggcgcaggcagctatacatgccctccacggcagtcagacgatgcccggcgcttcctcttctctcgtagtgaagtttgctgatacagataaagagcggaccctacggagaatgcagcagatggttggacagctcggcatactaaccccaagcctgaccctgccatttagcccctatagcgcctatgcccaggccctgatgcagcagcaaaccaccgtgctgagcaccagcggatcctatctgtcaccaggggtagctttctccccttgccatatccaacagattggagccgtcagcttgaacggtcttccagctacccccattgcccctgcctccggtgtggtgccttttcccgggggacatccagctctcgagactgtgtacgctaacgggctggtgccttacccagctcaatctccgacggtggctgagacactgcatcccgccttctccggcgttcaacaatacaccgcgatgtatcctacagcagcgatcacgcctattgcccactccgtgccccagccacctccattactgcagcagcagcaacgcgaaggagtgtggagacacggagcagacgctgacgtcccaactcttcgacagtaccacttcctgcagggcgtgtatgggtctagttatcagcccgaacaagtttttcggctgagagagctttag

SEQ ID NO: 68333 - DNA, 963 bp, Artificial Sequence
  derived and/or modified sequence
atggctagacctatccaagtgaaacctgctgactccgagagtagaggcggaagagaccgaaagctgtttgtgggcatgttgaacaagcagcagtcagaagaagacgtcctgaggctgtttcagccctttggcgtcattgatgagtgcacagtgctccggggaccagacggcagctcaaaaggatgtgctttcgttaaattttcctcccacaccgaagcgcaggcggctatccacgccctacatggatctcagacaatgccaggtgcttcctccagtttagtggtaaagttcgcagacacagacaaagaacgaactctgcgcagaatgcagcagatggtgggtcagcttggaatcctgaccccttctttgacattgcccttctcaccatacagtgcttacgcacaggctctcatgcagcagcagactaccgtgctgtcaaccagtgggagttatcttagccccggagtggcattctccccctgtcacatccaacagattggcgctgtcagcttaaacggactaccggcaacaccaatcgctccagcttccgggctacattctcccccattgcttgggaccaccgcagtccccggactcgtggctcccataacaaatggctttgccggagtggtcccttttcccggagggcaccctgcccttgagacggtgtacgcgaatgggctggtgccgtaccccgctcagtccccaacagttgctgagacattacaccccgcattttcaggagtccagcagtataccgccatgtatcccaccgccgctatcactcctatagcccactccgtgccacaacctccccctctgcttcaacagcagcaaagagagggcgtgtggcggcatggcgctgatgccgatgtgccaactctgagacagtaccattttttgcagggggtttacggttcatcataccagcccgagcaggtctttcggctgagagagttgtag

SEQ ID NO: 68334 - DNA, 1230 bp, Artificial Sequence
  derived and/or modified sequence
atggcacgtctaacagaatccgaggctcgccgacagcaacagcagctcctgcagccccgtccctcccccgtcggttcttctggtcctgagccccctggtgggcagcccgatggcatgaaggatctggatgccatcaagctctttgttggacagataccacggcacctcgacgaaaaagacctcaaacccctcttcgagcagttcggccgtatctatgagctgaccgtgctgaaggacccgtacaccggaatgcacaagggttgtgctttcctcacttattgtgccagggacagcgctattaaggctcaaaccgctctgcacgaacaaaaaactctgcccggtatggccaggcctatccaagtcaagccagccgattctgagagtcggggaggaagagaccgcaagctgttcgtcggtatgctgaacaaacagcagtcggaggaggacgtgcttagacttttccagccgttcggcgttattgatgagtgcaccgtgctccgtggccctgatggaagctcaaagggctgtgcctttgtcaaatttagcagccacactgaggcccaggccgcaatccacgccttgcacggcagccagaccatgcctggtgcctcatcgtcactcgttgtgaagtttgccgacacagataaagaacgcactttgagaagaatgcaacagatggtgggacagttagggatcctgactccctccctaacactgccttttagtccatattcagcatacgctcaagctctgatgcagcagcaaaccaccgtactgtctaccagcggttcatatttgagtcccggagtggcctttagcccgtgtcatatacagcaaattggagccgtgtctctgaacggcctacctgccacgcccatagctccggcttcaggagtggtcccttttccgggagggcaccccgctctagaaaccgtctatgccaacggactagttccctacccagctcagagcccgacagtcgcagagaccctacatcccgcattctcgggagtgcaacagtataccgccatgtatccaaccgccgctatcacccctattgctcactcagtcccccagccacccccactgctccagcaacagcagagagaaggagtgtggcgtcatggtgccgatgccgacgtacctacactgcgacaatatcacttcctgcaaggagtctatggctcctcctatcagcctgagcaggtctttagactcagagaactgtag

SEQ ID NO: 68335 - DNA, 1591 bp, Artificial Sequence
  derived and/or modified sequence
attcagcctccccaggccccgtcggggaagtttgcacctgcggactccattgctttggttattttcacaaagccaggccggcggggcaggtccggccgcgggggacacggatgcccaggaccccaggctaatcggctgtgccttcctcacctactgtgccagggattccgccatcaaagctcagactgccctgcacgagcagaagaccttgcccggaatggcgcggccaatccaggtgaagcctgcggacagtgaaagccgcggaggtagggaccggaagctgttcgtggggatgctgaacaagcagcagtcggaggaggacgtgctgcggctgttccagcccttcggggtcattgacgagtgcaccgtgctccgggggcctgacggcagcagcaaaggctgtgctttcgtgaagttctcctcccacacggaggcgcaggcggccatccacgccttgcatgggagccagaccatgccgggagcctcctccagcctggtggtcaagttcgccgacacggacaaggagcggacgctccggcgcatgcagcagatggtgggccagctgggcatcctgacgccgtccctcacattgcccttcagcccctacagtgcctacgcccaggctctcatgcaacagcagacaacagtcctgtccacctcgggcagctacctgagtcccggcgtggccttctcaccctgtcacatccagcagataggcgccgtcagcctcaacgggctgcctgccacacccatcgctcctgcctctgggctgcactcacccccgctgctgggcaccaccgctgtgcctggcctcgtggctcccatcaccaatggctttgcaggtgtcgtgccctttccaggtgggcaccctgccctggaaaccgtctatgccaatggccttgtgccctacccagctcagagcccgactgtggccgagacactgcatcctgccttctccggagtccagcagtacacagccatgtaccccaccgcggccatcacgcccatcgcgcacagcgtcccccagccgccgcccctcctgcagcagcagcagcgagaaggagtttggagacacggagctgacgcagatgttcctacccttcggcaatatcatttcctccaaggtgtttatggatcgagctaccaaccagagcaagtgtttcggcttcgtgagctttgataacccggccagcgcccaggcagccatccaggccatgaacggcttccagatcggcatgaagaggctcaaagtccagctgaagcggcccaaagacccgggacacccctactgaccgcgcccacagccgccctgaggctgtaggcatggcccagacctgcgtgatttgtacaatgtactttatttctgctacgagtaatttcatgaagtttcaacttgcaaactgacttttgggacaaaccaacacacacacagaagagaaagcaaagaacttggaactttgggttgactcggtttgagttttgtgtcaaagaagatttcccgcggctgaagaggttggtgttcctgttacgtgtttcaggtgagaagcagcaaagcgtcttaatgttcaaaacgcctctctttggtctggag

SEQ ID NO: 68336 - DNA, 5008 bp, Artificial Sequence
  derived and/or modified sequence
cgccgccgccgccgccggctcggtcccgcgcccgccatggcccgcctgacggagagcgaggcgcgccggcagcagcagcagctcctgcagccgcggccctcgcccgtgggcagcagcgggcccgagccccccggggggcagcccgacggcatgaaggacctggacgccatcaaactcttcgtgggccagatcccgcggcacctggacgagaaggacctcaagccgctcttcgagcagttcggccgcatctacgagctcacggtgctcaaagacccctacacggggatgcacaaaggctgtgccttcctcacctactgtgccagggattccgccatcaaagctcagactgccctgcacgagcagaagaccttgcccggaatggcgcggccaatccaggtgaagcctgcggacagtgaaagccgcggaggtagggaccggaagctgttcgtggggatgctgaacaagcagcagtcggaggaggacgtgctgcggctgttccagcccttcggggtcattgacgagtgcaccgtgctccgggggcctgacggcagcagcaaaggctgtgctttcgtgaagttctcctcccacacggaggcgcaggcggccatccacgccttgcatgggagccagaccatgccgggagcctcctccagcctggtggtcaagttcgccgacacggacaaggagcggacgctccggcgcatgcagcagatggtgggccagctgggcatcctgacgccgtccctcacattgcccttcagcccctacagtgcctacgcccaggctctcatgcaacagcagacaacagtcctgtccacctcgggcagctacctgagtcccggcgtggccttctcaccctgtcacatccagcagataggcgccgtcagcctcaacgggctgcctgccacacccatcgctcctgcctctggtgtcgtgccctttccaggtgggcaccctgccctggaaaccgtctatgccaatggccttgtgccctacccagctcagagcccgactgtggccgagacactgcatcctgccttctccggagtccagcagtacacagccatgtaccccaccgcggccatcacgcccatcgcgcacagcgtcccccagccgccgcccctcctgcagcagcagcagcgagaaggagtttggagacacggagctgacgcagatgttcctacccttcggcaatatcatttcctccaaggtgtttatggatcgagctaccaaccagagcaagtgtttcggcttcgtgagctttgataacccggccagcgcccaggcagccatccaggccatgaacggcttccagatcggcatgaagaggctcaaagtccagctgaagcggcccaaagacccgggacacccctactgaccgcgcccacagccgccctgaggctgtaggcatggcccaggtgagccgccaggcggccccacccccgcccaagccccccgtcttgtctgaaaccccctcccgcggcccacttcatgctccaaaccctccccaggtggggtgatgcttcaagaggctacaagaaacctccgggttgggttggcggggacagagctggatgtagacacccccgatccccctgtggttggggctggagcagagggtgggaatggggtagggactgaggtgagccagggcccagtgaggtcggttagggaatccttcccggagaaggctttgagggctgaatagaagttcacctgagaggccaggtttgctctgggggtgggggtgcggtggggagggggttctgtcctgtcctatgagtctgttttccctgctgaaaacccaacaccagacggaaatgccaagtgcccaccccagaccccaaaccctaaggttggaccccaactcggaaccaggagtggagcgtggaaggtggggacagtgctcagggcccagtccagttggcactgacagcttccagtgtccccgctccatttccactagttcccctgggacaagcggcccctcactgggtgtcattcctacccaatgagttgatggaaaagtgggattcgtgccccacccaccatcatgcaagaaaaacaagcaaaacgaaacccagactgtagtttgccatcagggcaaaccactttctcaacatttttttgtggggggatgaacagtaaaccttgtggggccactgtggaaacttaaccgtgggtctcaaaccttgatgagcctcatctgtaaaatgggttcaagaaagtcatctccccagagacggcggaaacggtccacctagggaacagagtggggcatcttttcgcagccgagcccagaacccatcacctaaagagttctggatgattcgttttgattttttttttttttaaatcaccatcgctgtcgtcatcagagtctcgcctagggcctggcacagagtagacgctcagttagaagctgtctggccttttcaccttctcccgggtcagcacacacagatttgggagtatttacctgcacagaacgcaccttcaggaactgccaaccagaagcaaaatccaaagctgctctctgcgatcccttcacttttaactctcagtctgcactttttttttttaactgagcatctattatgtgctaggcactgttccagtgctcggggacgcagctgtgaatgaacagaaacgggggatggaggacaggggagaaacccccttcacgggccttagatggcagggggtagggaaggagagacagaaaataaacagaaatatctgtccccagctgccagaggaggaggaaatgggcttggtgatggtgacattaagttctttgaaagctgggtttgttggcctctgaactctggcctttgtgggatctgttcttttggaaaagatgggagcccctgtgttcctagatcccagcctggccgggtggagtagggtggggaggtggtgtccacctgtgtggccccgttctcactccctaacgcccgtcccttctcccccaggtgaggggccttcccatcccaggagggttttctgcttccaaccgatccaggacttacccataaattccaaccgttctttggacaccagccctttcctcccctcttctccccttgccctgcccctctactggaggccacctggagtggcgaggggcctttggggtctgtcctggggcaggggcgggggtgggggaggctcctgaatcgtgggcagaagtgttcacacgccccccctgctttgggaaacgctctcgcttcttccccacaaaacttggtgacttccccaaactaaatcacaccttttcctatatatatatatatgcatatatatatagatctatagacagtatatatatattttgagtacggatcatgggaccaaacttttccgacttccttccatccgagtagagtgaccctgggccggtcactcagcgggggacacaggaagggctgaggttggcgggaccccgcgcaacacataccaggtgccccacccccacccccaccacctcctggctggcacatcccaccaggaacccgccaacacaacatacctccaggacttttggcaccccccaccaccaattctccagggccgttgggctctgccagcttcagtgtccctggtcccagctgcagcctccagaccccacctcgccccttcgtcccagagccctgccctccgggatggatataggtacaacagagacgctctggcctgcctcagcccttctctgctcccctgcccgagtcatagccttactcatgtgaccaatagcccttagctttccgtcggagggggggggcggacagggttggggggagcccccctgcccctcaccaccccctcccaaggccaggcagccattgtccctgccttcgaatcaccagcctcgaatttaaggtcttgtaaccaggattgccaagcgtagcggaagaccctacccggaccggccaagcacccctttaactggagacgaacttgataatgaccttcatacctctacagagatttttttttttttccggtctttctgagcaggtacaaagaagaaaagagaagaaaaagatggggggaaaaaatcaaaccacaatggatttttgtttcctagttgggagtggggtggggtggggtgtctttgtgagggtgcctctgtacagctgcccaatccgcgacacccacgtcaaagcacagcatcaagttcgtttggacatccggcaaggcctcttaccaaatgaggcgccagataacttaataagctcaaaagaaaaaaacatttaaaaagaaagaaaaaaaaaaaaaaaaaaaccaagcatttccttttctttctaccaaaatgtgttgactgacccggagggggggcggtagggtgggggaaaccacacagaaaaaaaaaaaaaaaaaaaaaagaaaagaaaaaagaaaaaaaaatagaaaagaaaaaaaaaaatcttctgaaccaacttgtttcgatattccagagtttgataattgtttcgagactctcctctagcgtgcctgtgttccgtgtgtccccgtgtgcaagcgtgtgccatgccaatctgcctcgagggggcctcacccgtgtccgcggcgcccgccgaggcccccgagggcctgcttgggagtgtgtgccggtgtgcagttgtacgtgtctttctggtccatgtttactggctgtaaataccatttttatactccacatcgcagacctgcgtgatttgtacaatgtactttatttctgctacgagtaatttcatgaagtttcaacttgcaaactgacttttgggacaaaccaacacacacacagaagagaaagcaaagaacttggaactttgggttgactcggtttgagttttgtgtcaaagaagatttcccgcggctgaagaggttggtgttcctgttacgtgtttcaggtgagaagcagcaaagcgtcttaatgttcaaaacgcctctctttggtctggagaaaaaaaaaaaaaaaaaaaaacaactaaaaatttatttaataaaagttttacttgctaaa

SEQ ID NO: 68337 - DNA, 963 bp, Artificial Sequence
  derived and/or modified sequence
atggccagacccatccaggtgaagcccgccgacagcgagagcagaggcggcagagacagaaagctgttcgtgggcatgctgaacaagcagcagagcgaggaggacgtgctgagactgttccagcccttcggcgtgatcgacgagtgcaccgtgctgagaggccccgacggcagcagcaagggctgcgccttcgtgaagttcagcagccacaccgaggcccaggccgccatccacgccctgcacggcagccagaccatgcccggcgccagcagcagcctggtggtgaagttcgccgacaccgacaaggagagaaccctgagaagaatgcagcagatggtgggccagctgggcatcctgacccccagcctgaccctgcccttcagcccctacagcgcctacgcccaggccctgatgcagcagcagaccaccgtgctgagcaccagcggcagctacctgagccccggcgtggccttcagcccctgccacatccagcagatcggcgccgtgagcctgaacggcctgcccgccacccccatcgcccccgccagcggcctgcacagcccccccctgctgggcaccaccgccgtgcccggcctggtggcccccatcaccaacggcttcgccggcgtggtgcccttccccggcggccaccccgccctggagaccgtgtacgccaacggcctggtgccctaccccgcccagagccccaccgtggccgagaccctgcaccccgccttcagcggcgtgcagcagtacaccgccatgtaccccaccgccgccatcacccccatcgcccacagcgtgccccagcccccccccctgctgcagcagcagcagagagagggcgtgtggagacacggcgccgacgccgacgtgcccaccctgagacagtaccacttcctgcagggcgtgtacggcagcagctaccagcccgagcaggtgttcagactgagagagctgtag

SEQ ID NO: 68338 - DNA, 1230 bp, Artificial Sequence
  derived and/or modified sequence
atggccagactgaccgagagcgaggccagaagacagcagcagcagctgctgcagcccagacccagccccgtgggcagcagcggccccgagccccccggcggccagcccgacggcatgaaggacctggacgccatcaagctgttcgtgggccagatccccagacacctggacgagaaggacctgaagcccctgttcgagcagttcggcagaatctacgagctgaccgtgctgaaggacccctacaccggcatgcacaagggctgcgccttcctgacctactgcgccagagacagcgccatcaaggcccagaccgccctgcacgagcagaagaccctgcccggcatggccagacccatccaggtgaagcccgccgacagcgagagcagaggcggcagagacagaaagctgttcgtgggcatgctgaacaagcagcagagcgaggaggacgtgctgagactgttccagcccttcggcgtgatcgacgagtgcaccgtgctgagaggccccgacggcagcagcaagggctgcgccttcgtgaagttcagcagccacaccgaggcccaggccgccatccacgccctgcacggcagccagaccatgcccggcgccagcagcagcctggtggtgaagttcgccgacaccgacaaggagagaaccctgagaagaatgcagcagatggtgggccagctgggcatcctgacccccagcctgaccctgcccttcagcccctacagcgcctacgcccaggccctgatgcagcagcagaccaccgtgctgagcaccagcggcagctacctgagccccggcgtggccttcagcccctgccacatccagcagatcggcgccgtgagcctgaacggcctgcccgccacccccatcgcccccgccagcggcgtggtgcccttccccggcggccaccccgccctggagaccgtgtacgccaacggcctggtgccctaccccgcccagagccccaccgtggccgagaccctgcaccccgccttcagcggcgtgcagcagtacaccgccatgtaccccaccgccgccatcacccccatcgcccacagcgtgccccagcccccccccctgctgcagcagcagcagagagagggcgtgtggagacacggcgccgacgccgacgtgcccaccctgagacagtaccacttcctgcagggcgtgtacggcagcagctaccagcccgagcaggtgttcagactgagagagctgtag

SEQ ID NO: 68339 - protein, 695 aa, Artificial Sequence
  derived and/or modified sequence
MSYGSITFGDVAIDFSHQEWEYLSLVQKTLYQEVMMENYDNLVSLGHSVSKPDLITLLEQGKEPWMIVREETRGECTDLDSRCEIISDGKMQLYRKHSCVTLHQRIHNGQKPYECKQCQKSFSHLTELMVHQTIHTSEEPDQCEKFRKAFSHLTDLRKHQKINAREKPYECEECGKVFSYPANLAQHGKVHVEKPYECKECGEAFRTSRQLTVHHRFHYGEKPYECKECGKAFSVYGRLSRHQSIHTGEKPFECNKCGKSFRLKAGLKVHQSIHTGEKPHECKECGKAFRQFSHLVGHKRIHTGEKPYECKECGKGFTCRYQLTMHQRIYSGEKHYECKENGEAFSSGHQLTAPHTFESVEKPYKCEECGKAFSVHGRLTRHQGIHSGKKPYECNKCGKSFRLNSSLKIHQNIHTGEKPYKCKECGKAFSQRAHLAHHNRIHTGYKPFECKECGKSFRCASYLVIHERIHTGEKPYVCQECGKGFSYSHKLTIHRRVHTGEKPYECKECGKAFSVSGQLTQHLSIHSGKKPFECNKCGKSFRFISVLKAHQNIHSAEKPYECKECGKAFRHATSLIYHDRTHAGEKSYECKECGETFSHASHLIIHERIHTSDKPYECKRCGKAFHCASYLVRHESVHADGNPYMCEECGKAFNSSHELSIHHRVHTGEKPFKCNKCRRSFRLRSILEVHQRIHI

SEQ ID NO: 68340 - DNA, 2088 bp, Artificial Sequence
  derived and/or modified sequence
atgagctacggcagcatcaccttcggcgacgtggccatcgacttcagccaccaggagtgggagtacctgagcctggtgcagaagaccctgtaccaggaggtgatgatggagaactacgacaacctggtgagcctgggccacagcgtgagcaagcccgacctgatcaccctgctggagcagggcaaggagccctggatgatcgtgagagaggagaccagaggcgagtgcaccgacctggacagcagatgcgagatcatcagcgacggcaagatgcagctgtacagaaagcacagctgcgtgaccctgcaccagagaatccacaacggccagaagccctacgagtgcaagcagtgccagaagagcttcagccacctgaccgagctgatggtgcaccagaccatccacaccagcgaggagcccgaccagtgcgagaagttcagaaaggccttcagccacctgaccgacctgagaaagcaccagaagatcaacgccagagagaagccctacgagtgcgaggagtgcggcaaggtgttcagctaccccgccaacctggcccagcacggcaaggtgcacgtggagaagccctacgagtgcaaggagtgcggcgaggccttcagaaccagcagacagctgaccgtgcaccacagattccactacggcgagaagccctacgagtgcaaggagtgcggcaaggccttcagcgtgtacggcagactgagcagacaccagagcatccacaccggcgagaagcccttcgagtgcaacaagtgcggcaagagcttcagactgaaggccggcctgaaggtgcaccagagcatccacaccggcgagaagccccacgagtgcaaggagtgcggcaaggccttcagacagttcagccacctggtgggccacaagagaatccacaccggcgagaagccctacgagtgcaaggagtgcggcaagggcttcacctgcagataccagctgaccatgcaccagagaatctacagcggcgagaagcactacgagtgcaaggagaacggcgaggccttcagcagcggccaccagctgaccgccccccacaccttcgagagcgtggagaagccctacaagtgcgaggagtgcggcaaggccttcagcgtgcacggcagactgaccagacaccagggcatccacagcggcaagaagccctacgagtgcaacaagtgcggcaagagcttcagactgaacagcagcctgaagatccaccagaacatccacaccggcgagaagccctacaagtgcaaggagtgcggcaaggccttcagccagagagcccacctggcccaccacaacagaatccacaccggctacaagcccttcgagtgcaaggagtgcggcaagagcttcagatgcgccagctacctggtgatccacgagagaatccacaccggcgagaagccctacgtgtgccaggagtgcggcaagggcttcagctacagccacaagctgaccatccacagaagagtgcacaccggcgagaagccctacgagtgcaaggagtgcggcaaggccttcagcgtgagcggccagctgacccagcacctgagcatccacagcggcaagaagcccttcgagtgcaacaagtgcggcaagagcttcagattcatcagcgtgctgaaggcccaccagaacatccacagcgccgagaagccctacgagtgcaaggagtgcggcaaggccttcagacacgccaccagcctgatctaccacgacagaacccacgccggcgagaagagctacgagtgcaaggagtgcggcgagaccttcagccacgccagccacctgatcatccacgagagaatccacaccagcgacaagccctacgagtgcaagagatgcggcaaggccttccactgcgccagctacctggtgagacacgagagcgtgcacgccgacggcaacccctacatgtgcgaggagtgcggcaaggccttcaacagcagccacgagctgagcatccaccacagagtgcacaccggcgagaagcccttcaagtgcaacaagtgcagaagaagcttcagactgagaagcatcctggaggtgcaccagagaatccacatctag

SEQ ID NO: 68341 - DNA, 2088 bp, Artificial Sequence
  derived and/or modified sequence
atgtcctacggtagtatcacctttggggatgtggctatcgatttttctcaccaggaatgggagtacttgagccttgtacagaagactctctaccaggaggtgatgatggagaattatgataatctggtctctctggggcactcagtgtcgaaacccgatctgataaccctactggagcagggaaaggagccctggatgatcgtgagagaagaaacacggggggaatgtacggacctcgatagccgatgtgagataatctccgatgggaaaatgcagctttatagaaagcacagctgcgtaacactgcatcaacgaatacacaatggccaaaaaccctacgagtgtaaacagtgccaaaagtcttttagccaccttacggagcttatggtgcaccaaacaatccacacctccgaagagcctgatcagtgcgagaagtttcggaaggccttctcacatctgacagatctgcggaaacaccaaaagatcaacgctcgggaaaaaccctacgagtgtgaggagtgcggcaaggtcttttcctatccagcgaacctggctcagcacgggaaggtgcacgtggaaaagccatacgagtgtaaggagtgtggagaggccttccgcacttctcgacagctgacagtgcatcaccggttccattacggagagaagccttatgaatgcaaagaatgtgggaaggcatttagtgtttacgggaggctgtccagacaccagtccatacacactggcgagaagcctttcgagtgcaacaagtgcggcaaatccttccgtctcaaggccggtctgaaagttcaccagtctatccacaccggagagaagccacacgaatgcaaagaatgcggaaaagcattccggcagttctcccatctggttgggcacaagcggattcacacaggcgaaaagccgtacgaatgcaaggaatgcgggaaaggcttcacttgccggtaccagttgacaatgcatcaacggatctatagtggagagaaacactatgagtgtaaagaaaacggtgaggcattctcttcagggcatcagctcactgccccacatacgtttgaatctgtggaaaagccttacaaatgtgaggagtgtgggaaggcctttagcgtacatggacgtctgaccaggcatcagggcatacacagcggcaagaagccctacgagtgcaacaaatgcggaaagtcttttcggttaaatagctcccttaagattcatcaaaatatccacacaggagagaaaccctataaatgcaaagaatgcggtaaggctttctcacagagggctcaccttgcccatcacaatcgcatccataccgggtataagccgttcgaatgcaaagaatgtggcaagtcgtttcgctgtgcatcttacctcgtgatccacgagagaatccacaccggcgagaaaccatatgtatgccaggaatgcgggaagggcttctcatacagtcacaagctcacaatccatcggagagtacacactggcgaaaagccttacgagtgcaaagagtgcgggaaagcattctctgtgtccgggcagctcacccaacacttgtccatccactctggtaagaagcccttcgaatgtaataagtgtggtaaatccttccggtttataagcgtgcttaaggcacatcagaacatacattcggcagaaaagccgtacgagtgcaaggagtgtggtaaggccttccggcatgccactagccttatctaccacgacaggacacacgccggagagaagagctatgagtgtaaggagtgcggagagacctttagtcatgcatctcacctgatcatccacgagagaattcatactagcgacaaaccctacgaatgcaaacgatgtgggaaagcctttcattgcgcctcttacctagtcaggcatgagtccgtacatgcggatggtaacccctatatgtgcgaagagtgcggcaaagcttttaatagctcacatgagctgtcaatccatcaccgggtgcataccggcgaaaagcctttcaagtgtaacaagtgtcgcaggtcttttagactccggagcattctcgaggtacatcagcggatccatatttag

SEQ ID NO: 68342 - DNA, 2088 bp, Artificial Sequence
  derived and/or modified sequence
atgtcctatggcagcatcacctttggagatgtggccatcgacttcagccaccaggagtgggagtacctgagcctggtgcagaagaccctgtaccaggaggtgatgatggagaactatgacaacctggtgtccctgggccacagcgtgtccaagccagacctgatcaccctgctggagcagggcaaggagccctggatgattgtgcgggaggagaccagaggagaatgtacagacctggacagccgctgtgagatcatcagtgatggcaagatgcagctgtacaggaagcacagctgtgtgaccctgcaccagaggatccacaacggccagaagccctatgagtgcaagcagtgccagaagagcttcagccacctgacagagctgatggtgcaccagaccatccacaccagcgaggagccagaccagtgtgagaagttcaggaaggccttcagccacctgacagacctgaggaagcaccagaagatcaatgcccgggagaagccctatgaatgtgaagaatgtgggaaggtgttctcctacccagccaacctggcccagcacggcaaggtgcacgtggagaagccctatgagtgcaaggaatgtggggaggccttccgcaccagccggcagctgactgtgcaccaccgcttccactatggagagaagccctatgagtgcaaggaatgtgggaaggccttctctgtgtatggccgcctgagccgccaccagagcatccacactggagagaagccctttgagtgcaacaagtgtgggaagagcttccggctgaaggccggcctgaaggtgcaccagagcatccacactggagagaagccccatgagtgcaaggaatgtgggaaggccttccggcagttcagccacctggtgggccacaagaggatccacactggagagaagccctatgagtgcaaggaatgtgggaagggcttcacctgccgctaccagctgaccatgcaccagaggatctacagcggggagaagcactatgagtgcaaggaaaatggagaggccttcagcagcggccaccagctgacagccccccacacctttgaatctgtggagaagccctacaagtgtgaggagtgtgggaaggccttctctgtgcacggccgcctgaccaggcaccagggcatccacagcggcaagaagccctatgagtgcaacaagtgtgggaagagcttccggctgaacagcagcctgaagatccaccagaacatccacactggagagaagccctacaagtgcaaggaatgtgggaaggccttcagccagagggcccacctggcccaccacaaccgcatccacacaggctacaagccctttgagtgcaaggaatgtgggaagagcttccgctgtgccagctacctggtgatccacgagcgcatccacactggagagaagccctacgtgtgccaggagtgtgggaagggcttctcctacagccacaagctgaccatccacagaagagtgcacactggagagaagccctatgagtgcaaggaatgtgggaaggccttctctgtgtctggccagctgacccagcacctgagcatccacagcggcaagaagccctttgagtgcaacaagtgtgggaagagcttccgcttcatctctgtgctgaaggcccaccagaacatccacagcgctgagaagccctatgagtgcaaggaatgtgggaaggccttcagacatgccaccagcctcatctaccatgacaggacccatgctggggagaagagctatgagtgcaaggaatgtggggagaccttcagccacgccagccacctgatcatccacgagcgcatccacaccagtgacaagccctatgagtgcaagagatgtgggaaggccttccactgtgccagctacctggtgagacatgagagcgtgcatgctgatggcaacccctacatgtgtgaggagtgtgggaaggccttcaacagcagccatgagctgagcatccaccaccgggtgcacactggagagaagcccttcaagtgcaacaagtgccgccgctccttccggctgcggagcatcctggaggtgcaccagaggatccacatctag

SEQ ID NO: 68343 - DNA, 2088 bp, Artificial Sequence
  derived and/or modified sequence
atgagctacggcagcatcaccttcggcgacgtggccatcgacttcagtcaccaggagtgggaatacctctcgttagtgcagaagaccctgtatcaggaggtgatgatggagaattatgataacttggtgtccctcggccactcagtaagcaagcctgacctcatcacccttctggaacagggaaaggaaccgtggatgatcgtgcgtgaggaaacacgaggagaatgtaccgacctagacagtcgatgcgaaatcatctccgatggtaagatgcagttataccggaaacatagctgtgtaaccttgcaccaaagaatccataacggccagaagccttatgagtgtaagcagtgtcagaaatccttttctcatttaactgagttgatggtgcaccagaccattcacacttcagaggagcccgaccaatgtgagaagttccgcaaagcttttagtcaccttactgacctcagaaaacaccaaaagattaacgcacgggaaaagccttatgagtgtgaggaatgtggcaaagtgttttcttatcctgcaaacttggcgcagcatggcaaggtgcatgtggagaagccctacgagtgcaaggaatgcggtgaagcttttcgaacatcacgccaactcacagtgcaccataggtttcactacggggagaagccctacgagtgcaaggaatgcggtaaagcattttccgtgtatgggcggctgtcacgccatcagagcattcacacgggggagaaaccttttgaatgtaataagtgcggaaaaagtttcaggcttaaggctggtctgaaagtgcaccagtctatccacacaggtgaaaaaccgcacgagtgcaaggagtgtggcaaggccttcagacagttttcacacctcgtgggacataagcgtatccacacgggcgaaaagccttacgagtgcaaggagtgcggcaaagggtttacctgccgctatcagctgaccatgcatcagcggatctattcaggcgagaagcattacgaatgcaaggaaaacggtgaggcattcagtagtggccaccagctaaccgcacctcacacctttgagtccgtggaaaagccttacaaatgcgaggaatgtggcaaggctttctccgttcatgggcgcttgactcggcaccagggtatacactctgggaagaagccatatgaatgcaataaatgcgggaagtcatttagacttaactcttcgttgaagattcaccaaaatatccatacaggcgaaaagccgtataaatgtaaggaatgcggcaaggcctttagtcagagggcccacttggctcaccataatagaattcataccggatacaaacccttcgaatgtaaggagtgcgggaagagcttccgctgtgccagttatttagtgatccacgaaagaatccataccggggagaagccttatgtttgccaagagtgcggaaagggcttcagctactcccataaacttacgatccaccgcagagtgcataccggggaaaagccatacgagtgcaaggagtgcgggaaagccttcagcgtgagcggccaactgactcagcatctctccatccacagtggaaagaagccattcgaatgtaataagtgtggcaagagctttaggttcatttccgtgctgaaggcacaccagaatatccattccgctgagaagccctatgaatgcaaggagtgtgggaaggcttttcggcacgccacatcacttatttaccacgatcggacccacgctggagagaagtcctatgagtgcaaggaatgtggtgaaactttcagtcatgctagccacctgattatacacgagcggattcacacatccgataaaccatatgagtgcaaacggtgcgggaaggcctttcattgtgcatcatacctggttcgtcacgagtctgtgcatgcggacggcaacccttacatgtgcgaagaatgcggcaaggcattcaactcctcccacgagctctcaatccaccatcgggtgcacaccggcgagaaaccttttaagtgtaacaagtgtagacgaagtttccggctgagaagtatactggaagtgcaccagcggatacacatctag

SEQ ID NO: 68344 - DNA, 2088 bp, Artificial Sequence
  derived and/or modified sequence
atgtcttacggcagcatcacctttggcgatgttgctatcgacttctcacatcaagaatgggaataccttagtctagtgcagaaaaccttgtatcaggaggtaatgatggagaattatgacaacttggtctctctgggccatagtgtctcgaagcccgacttaattacgctgttagagcaagggaaggaaccatggatgatcgtgcgcgaggaaactcgtggagagtgcactgatctggactcacgctgcgagatcatctctgacggcaagatgcagctctatcgcaaacatagctgcgtgactctccatcagagaatccacaacgggcagaagccctacgaatgcaaacagtgccagaaaagctttagtcaccttaccgaactaatggtgcatcaaaccatccatacaagcgaggagcccgaccagtgtgagaagtttcggaaagctttttctcatctgacagacctcagaaagcatcagaaaataaatgcgagggaaaaaccttacgaatgtgaggagtgtggcaaggtattctcatacccagctaacctagcccaacacggcaaggtgcacgtggaaaagccttatgagtgtaaggagtgcggagaggcctttagaacttccagacaactcaccgttcatcaccgttttcattacggggaaaagccatacgaatgcaaggagtgtggaaaggccttctcagtctatgggaggctcagtagacaccagtctattcacactggtgaaaagcctttcgaatgcaacaagtgtggcaagagtttccgtcttaaagctggtctgaaagtgcaccagagcatccataccggggaaaagcctcatgagtgcaaggaatgtggtaaagctttccgccagttcagccatcttgttggtcataaacggatccatacaggggaaaagccctacgagtgcaaagaatgtgggaagggtttcacatgccggtatcagctaactatgcatcaacggatctatagcggcgaaaagcactacgagtgtaaagaaaatggcgaggctttttcctccgggcaccagctgactgccccacacacgttcgaaagtgtggaaaagccatataagtgcgaggaatgtggcaaggctttttcagtgcacggcagactgactcgccaccagggtatccactcgggcaaaaagccatatgagtgcaacaagtgcggcaagagttttagactgaacagctcccttaaaatccaccagaatattcacaccggcgagaagccatataagtgcaaagagtgcgggaaggccttctctcagcgcgcacatcttgctcaccataaccggatacatacggggtataagcccttcgagtgcaaggagtgtggaaagtcatttcgctgcgccagctacctggtgattcacgagcgcatccataccggcgagaagccgtatgtgtgtcaggaatgtggcaagggcttctcatactctcataagttgaccatccacagaagggtacacacgggcgaaaaaccatacgagtgcaaggaatgtggaaaggcattcagtgttagcggacagctcacgcaacatctatcaatccactctggcaaaaagccgttcgagtgtaacaagtgcgggaagtcatttcgtttcatctcagtcctaaaggctcaccaaaacatacatagtgccgaaaaaccttacgaatgtaaagaatgcggtaaagctttccgccacgctacttcactgatataccacgatcgaacccacgcgggtgaaaaaagttacgagtgcaaagaatgcggagaaacattttctcacgcctctcacctgattatccacgaaaggatccacacctctgataagccttacgagtgcaaaagatgtggaaaggccttccactgcgcatcatatctagttaggcacgaaagcgtgcacgctgacggcaatccttacatgtgtgaggagtgcggcaaggcatttaactccagtcacgagctgagtatacaccaccgagttcacaccggagagaaacccttcaagtgcaataagtgccggcgttccttcagactcagaagcatcttggaggtgcaccaacgaatacatatctag

SEQ ID NO: 68345 - DNA, 4013 bp, Artificial Sequence
  derived and/or modified sequence
attgacccttggctccaggttccctgctgcttcctgtgccttcctcagcctagtacgactacaacagagaaatggtcccaatgggaaatcagatactgagtcttagatgaagatttccagtgagaagaaacagataggatgagaagcttagaagagtaattgcccttaagaaaggtcttggttcttttgactttgctcttctggtagagaaacgccaaggactgatcaactcttgccagtctcaaaccatgtcctatggatcaataacattcggggatgtggccatagacttctctcatcaggagtgggaatatctcagcctggttcagaagaccttgtaccaggaggtgatgatggagaactatgacaacttagtctcattgggacattccgtatctaagccagatttaatcaccttattggagcaaggaaaagagccatggatgattgtgagggaagaaacaagaggagagtgtacagatttggattcaagatgtgaaataatcagcgatgggaaaatgcagctttataggaaacactcatgtgttactctccatcagagaattcataatggacagaaaccatatgagtgtaagcaatgtcagaagtcctttagtcatcttacagaactcatggtacatcaaacaattcatactagtgaggaacctgatcaatgtgaaaagtttaggaaggcatttagccatcttacagaccttagaaagcatcagaaaattaatgctcgtgagaaaccttatgaatgtgaagaatgtgggaaggtcttcagttatcctgcaaaccttgctcaacatgggaaagttcatgttgagaaaccctatgaatgtaaagagtgtggggaagcttttaggactagccgtcaacttactgtacatcatagatttcattatggtgagaaaccctacgaatgtaaggaatgtggcaaggcctttagtgtgtatggacgacttagtcgacatcagagtattcacactggtgagaagccctttgaatgtaacaaatgtgggaagtcctttaggctcaaagcaggccttaaagtacatcagagtattcatactggagagaagccacatgaatgtaaggaatgtggaaaggcctttcgtcagttttcccaccttgtgggtcataaaagaattcatactggagaaaaaccctatgaatgcaaggaatgcgggaagggctttacatgtaggtatcaacttaccatgcatcagagaatttattcaggggagaaacactatgaatgtaaagaaaatggggaggcttttagtagtggccatcaacttactgcacctcatacatttgaaagtgttgagaaaccttataagtgtgaggaatgtgggaaagcctttagtgtgcatggacgacttactcgacatcagggtattcatagtggtaagaaaccctatgaatgtaacaaatgtgggaagtcctttaggctcaattcatcccttaaaatacatcaaaatattcataccggtgagaaaccctacaaatgtaaggaatgtgggaaggccttcagtcagcgtgcacaccttgcccatcataacagaattcatactggttacaaaccctttgaatgtaaagaatgtgggaagtcctttcgttgtgcctcatatcttgttatacatgagagaattcatacaggagagaaaccctatgtatgtcaagagtgtgggaagggttttagttatagccataaactcactatacatcgcagagttcatactggtgagaaaccttatgaatgtaaggaatgtgggaaggcctttagtgtatctggacaacttactcagcatctgagtattcacagtggtaagaaaccctttgaatgcaacaaatgcgggaagtcttttaggttcatttctgtacttaaagcccatcagaatattcatagcgctgagaaaccctacgaatgtaaggaatgtggcaaggcctttcgtcatgccacaagcctcatatatcatgaccgaactcatgctggtgaaaagtcctatgaatgtaaagaatgtggggaaacttttagtcatgcttcacatcttattattcatgagagaattcataccagtgataaaccctatgaatgtaaaagatgtgggaaggcatttcactgtgcctcatatcttgttagacatgaaagcgttcatgctgatggaaatccctatatgtgtgaagagtgtgggaaagcttttaatagtagccatgaacttagtatacatcatagagttcatactggtgagaaaccctttaaatgtaacaaatgcagaaggtcctttaggcttagatccatccttgaagtacatcagagaattcatatttgatagagaaattgtggcatatacaggtagtaaagaaagcacattgtgtcaatggatttatcccactgaacaatttgaatgaagacaatgtggaatggctttgagatacagttcagtttttattaggcatcaatttgtattggtgtgaacttttcaaaatgtaaatcatatatgcagtttctttggtatgacctgtgttaactcagattcagagaatttataatgtatttttttaataacataagaaaacttttctgatattcctctagttttggattgccaaaatattcacagtagaggaaaactgagaaaacgtaggaaaccattctttatacttgcatgtaaacatcttccagcaacaatcatttattgttaaacctggaaaaagccattacacaggaaacctctgttgatataagcgatgatgggaaaggctatttagccactctgcatatttaatgctcatgatcaacatctgcttcctatagctgggatgatatgggggaagatatttatcccttctggggatcatatataaatgatgatagtagtacctacagtatagtgctgttagaattacatgagttagatgtggaggtcagagtggaagcaggtgtgagagggtcccgcagaagaaaacatggctgccaaagtgtttgagtccatcggcaagtttggcctggccttagctgttgcaggaggcatggtgaactctgccttatgtaatgtggatgctgggcacagagctgccatctttgaccaattccgtggagtacagaacattgtggtaggggaagggactcactttctcatcccatgtgtacaaaaaccaattatctttgactgctgttctcaaccacgtagtgcgccagtcatcactggtagcaaagatttacagaatgtcaacatcacactgtgcatcctcttccggcccatcactagccagcttcctcgcatcttcaccagcattggagaggactacgatgagtgtgtgctgccgttcattaccacggagatcctcaagtcactggtggctcgctttgatgctggagaactaatcacccagagggagctggtctccagccaggtgagcaacaaccttatggagtgagcagccacctttgggctcattctggacgacgtgtctttgacacatctgaccttcttgaaggagttaacagacaggtggccccccaggaagcagagagcgccagatttgtggtggaaaaggcggccatcatctctgctgagggtgactccaaggcagctgagctgatcgccaactcactggccactgcaggggacggccagagcgagctgtgcaagctggaagctgcagaagacattgcataccagctctcatgctctcggaacatcacctgcctgccggcagggcagtccgtgctcctccagctgccctagtgaggccccagcctacctgcacctccgtgaggcaactgggccacagccccgatgattcgtaacaccacctttcgccctcaccccagaaatcactgaaatttcatgattggcttaaagtgaaggaagtaaaggtaaaatcacttcagatctctaaaaaacaaagaattacatgagttagtacatgaaaaaattatgggaaactacatgaaatatactgttacgttcaataaacattagcttctgtatataataatatca

SEQ ID NO: 68346 - protein, 407 aa, Artificial Sequence
  derived and/or modified sequence
MAPPLAPLPPRDPNGAGPEWREPGAVSFADVAVYFCREEWGCLRPAQRALYRDVMRETYGHLSALGIGGNKPALISWVEEEAELWGPAAQDPEVAKCQTQTDPDSRNKKKERQREGTGALEKPDPVAAGSPGLKSPQAPSAGPPYGWEQLSKAPHRGRPSLCAHPPVPRADQRHGCYVCGKSFAWRSTLVEHVYSHTGEKPFHCTDCGKGFGHASSLSKHRAIHRGERPHRCLECGRAFTQRSALTSHLRVHTGEKPYGCADCGRRFSQSSALYQHRRVHSGETPFPCPDCGRAFAYPSDLRRHVRTHTGEKPYPCPDCGRCFRQSSEMAAHRRTHSGEKPYPCPQCGRRFGQKSAVAKHQWVHRPGAGGHRGRVAGRLSVTLTPGHGDLDPPVGFQLYPEIFQECG

SEQ ID NO: 68347 - DNA, 1224 bp, Artificial Sequence
  derived and/or modified sequence
atggccccccccctggcccccctgccccccagagaccccaacggcgccggccccgagtggagagagcccggcgccgtgagcttcgccgacgtggccgtgtacttctgcagagaggagtggggctgcctgagacccgcccagagagccctgtacagagacgtgatgagagagacctacggccacctgagcgccctgggcatcggcggcaacaagcccgccctgatcagctgggtggaggaggaggccgagctgtggggccccgccgcccaggaccccgaggtggccaagtgccagacccagaccgaccccgacagcagaaacaagaagaaggagagacagagagagggcaccggcgccctggagaagcccgaccccgtggccgccggcagccccggcctgaagagcccccaggcccccagcgccggccccccctacggctgggagcagctgagcaaggccccccacagaggcagacccagcctgtgcgcccacccccccgtgcccagagccgaccagagacacggctgctacgtgtgcggcaagagcttcgcctggagaagcaccctggtggagcacgtgtacagccacaccggcgagaagcccttccactgcaccgactgcggcaagggcttcggccacgccagcagcctgagcaagcacagagccatccacagaggcgagagaccccacagatgcctggagtgcggcagagccttcacccagagaagcgccctgaccagccacctgagagtgcacaccggcgagaagccctacggctgcgccgactgcggcagaagattcagccagagcagcgccctgtaccagcacagaagagtgcacagcggcgagacccccttcccctgccccgactgcggcagagccttcgcctaccccagcgacctgagaagacacgtgagaacccacaccggcgagaagccctacccctgccccgactgcggcagatgcttcagacagagcagcgagatggccgcccacagaagaacccacagcggcgagaagccctacccctgcccccagtgcggcagaagattcggccagaagagcgccgtggccaagcaccagtgggtgcacagacccggcgccggcggccacagaggcagagtggccggcagactgagcgtgaccctgacccccggccacggcgacctggacccccccgtgggcttccagctgtaccccgagatcttccaggagtgcggctag

SEQ ID NO: 68348 - DNA, 1224 bp, Artificial Sequence
  derived and/or modified sequence
atggcgccccctctcgctcccttacctccccgcgatccaaacggggcaggacctgaatggagggagccaggcgctgtctcttttgctgatgtggcagtctacttctgccgcgaagaatggggctgtctcagacctgcccagagggcgctatatagggatgtgatgcgcgagacatatggccacctctccgcacttgggatcggcgggaacaagcctgcgctcatcagttgggtcgaggaagaggcggagctttggggacccgccgcgcaggatccagaggtcgccaaatgtcagacccagactgatcccgactcccgaaacaaaaaaaaagaacgtcagcgggagggcactggggcacttgaaaaacccgatccagtcgcagcaggcagtccaggattgaagtcgccccaagcaccgagtgcaggtccaccatacggatgggagcagctgagcaaagcaccccacagaggtaggccttctttgtgcgcgcatcctcctgtgcctcgggccgatcagcgccacggatgctatgtgtgcggaaaaagctttgcctggagatccacactagtggaacatgtatactctcatacgggcgagaagccattccactgcacagactgcgggaagggatttgggcatgcatcgagcctctccaaacaccgagcaattcatcggggtgagaggcctcaccgatgcttggagtgcggtcgagctttcacacagcggtcagctctcacaagtcatctgagagtgcacaccggagagaagccatacggttgcgccgactgtggccgacgctttagtcagtcttcagccctgtaccaacataggcgggttcacagtggcgagacaccatttccttgtcccgattgtggccgggcctttgcatatccgtctgacctccggcgacacgtgcgcacacacacaggcgaaaagccatacccgtgcccagactgtggtcgctgttttcggcagtcatcagagatggcagcacacaggcggacacattccggcgaaaaaccatacccatgtccacaatgtggcagacggttcggccagaaaagcgcagtggcgaaacaccaatgggtgcatagacctggtgctggaggacataggggcagagtggccggcagactgtcagtgaccctgacccccggccatggcgaccttgacccaccggtgggatttcaactgtatccagaaatcttccaggagtgcggctag

SEQ ID NO: 68349 - DNA, 1224 bp, Artificial Sequence
  derived and/or modified sequence
atggccccacccctggcccccctgcccccccgggaccccaacggggccggccctgagtggagggagcctggagctgtgtcctttgctgatgtggccgtgtacttctgccgggaggagtggggctgcctgcggcctgcccagagggccctgtacagagatgtgatgagggagacctacggccacctgagcgccctgggcattggaggcaacaagccagccctgatctcctgggtggaggaggaggccgagctgtggggccctgctgcccaggaccctgaggtggccaagtgccagacccagacagatcctgacagcaggaacaagaagaaggagcggcagcgggagggcactggagccctggagaagccagaccctgtggccgccggcagccctggcctgaagagcccccaggcccccagcgctggccccccctacggctgggagcagctgagcaaggccccccaccggggccggcccagcctgtgtgcccacccccctgtgcccagggctgaccagagacatggctgctacgtgtgtgggaagagctttgcctggaggagcaccctggtggagcacgtgtacagccacactggagagaagcccttccactgcacagactgtgggaaaggatttggacatgccagcagcctgagcaagcaccgggccatccacagaggagagcggccccaccgctgcctggagtgtggccgggccttcacccagaggtctgccctgaccagccacctgcgggtgcacactggagagaagccctacggctgtgccgactgtggccgccgcttcagccagagcagcgccctgtaccagcacagaagagtgcacagcggggagacccccttcccctgcccagactgtggccgggcctttgcctaccccagcgacctgcggcggcacgtgaggacccacactggagagaagccctacccctgcccagactgtggccgctgcttccggcagagcagcgagatggccgcccacaggaggacccacagcggggagaagccctacccctgcccccagtgtggcagaagatttggccagaagtctgctgtggccaagcaccagtgggtgcacaggcctggggccggcggccaccggggccgggtggccggccgcctgtctgtgaccctgaccccaggccatggagacctggacccccctgtgggcttccagctgtacccagagatcttccaggagtgtggctag

SEQ ID NO: 68350 - DNA, 1224 bp, Artificial Sequence
  derived and/or modified sequence
atggccccccccctggcccccctgcccccccgggaccccaacggcgccggaccagaatggcgtgaaccgggggcagtgagtttcgccgacgtggccgtctacttctgccgtgaggaatggggctgcctgcgaccagcccagcgcgcactgtaccgggacgtcatgcgagaaacgtacggccacctcagcgcactcgggatcggcggaaacaaacctgcccttataagttgggtcgaggaggaggctgaactgtggggcccagctgcacaggatcccgaggtggctaagtgtcaaactcagaccgaccctgattccagaaacaagaagaaggagaggcaacgagagggcacaggagcgctggagaagccagacccagttgccgcaggctcccccggcctgaagagtccacaggctccgtcagccggtccaccttatggttgggagcaattgtctaaagccccccacaggggaagaccaagtctgtgcgcgcatcctcccgttcccagagccgatcagcgccatggctgttacgtctgtggtaagagctttgcttggaggtcgacacttgtcgaacatgtttatagccataccggcgagaaaccattccactgcacagattgcggtaagggcttcgggcacgcatcctctttaagcaaacaccgggctatccaccgcggggaaagaccccacagatgtcttgagtgcggaagagcttttactcagcgttccgctttaacctcacacttgcgggttcacacgggggaaaaaccctatggatgcgcggattgtggaaggaggttcagtcagtcatctgcattgtaccagcacagaagagtgcatagcggtgagactccattcccgtgtcccgattgtggtcgtgccttcgcatatccctccgatctccggagacacgtgcggactcataccggtgaaaagccttacccgtgccccgattgtggaaggtgtttccgccagagtagtgaaatggcggctcaccgtcgaacacacagcggagaaaaaccttatccgtgcccccagtgtgggaggaggttcgggcagaagagcgcagtggctaaacaccagtgggtccatcggccaggtgcggggggtcatcggggtagggtcgcgggacgactttcggtgactctaactcctggccacggagatctcgatccgcccgttggcttccaactctatccggagatttttcaggagtgtgggtag

SEQ ID NO: 68351 - DNA, 1224 bp, Artificial Sequence
  derived and/or modified sequence
atggccccacctctggcaccattgccaccaagagatccaaacggagctggaccagagtggcgagagccaggagccgtgtccttcgccgacgtagccgtctatttctgtcgagaagaatggggttgtctacgccctgcacaacgagctttatatcgcgacgtgatgcgggagacatacggacatctgtctgctttgggcatcgggggaaataagcctgcactaataagttgggtcgaggaagaggcggaactgtgggggcctgcggctcaagacccagaggtggccaagtgccagactcagactgatcccgactcgcgcaataagaagaaagaacgccagagagaaggtaccggagccctagagaaacctgaccccgttgcagccggatcccctggccttaaatctcctcaggcccctagtgccggacctccctacgggtgggagcaacttagtaaggcaccccacagaggcaggccctccctatgcgcacacccacctgtcccaagggccgaccagcgtcacggctgttacgtatgcgggaaaagctttgcatggagatccacccttgtcgagcatgtgtactctcatactggagaaaaacccttccactgcacagattgtggcaaggggttcgggcatgcctcatccctgagcaaacaccgtgccatccatcgcggagagcggcctcatagatgccttgagtgcggtcgagccttcacccagcggagcgccttgacgagccacctgcgagtccacaccggagaaaagccctacgggtgcgctgattgcggtcggagattcagtcaatctagcgctctgtaccagcacaggcgtgtgcacagtggagagacaccttttccctgccctgattgtgggagggcctttgcctatccctccgatcttcgcaggcacgtgcgcacccatacaggggagaagccatacccctgcccggactgcggaaggtgcttcaggcagtcctccgagatggcggcacatcgcaggactcacagcggcgagaagccctatccttgtccacagtgcggccgtcgtttcgggcagaagagtgcagtggccaaacaccaatgggtgcacagacctggggcaggcggacatagggggagggttgccggtaggttatcggttacgttgacgcccggacacggcgacctggatccacccgtcggatttcagttgtatccagaaatctttcaggagtgcgggtag

SEQ ID NO: 68352 - DNA, 2825 bp, Artificial Sequence
  derived and/or modified sequence
gccatcggcaccgttagtttccacgccctctagtgcgccctcgggggccctagtaacctccctccttcccttgggcccgggccggggaggctttctcgggcgcaggaggttccgcaggcccaggccaggccaggggaggcagccgatccgtcgtcggggttgacagttaccatggcgccgcctctggccccgctccctccccgggacccaaacggggccggacccgagtggagggagccgggggctgtgagcttcgcggacgtggccgtgtacttctgccgggaggagtggggctgcttgcggccagcgcagagggccctgtaccgggacgtgatgcgggagacctacggccacctgagcgctctcggaatcggaggcaacaagccagctctcatctcctgggtggaggaggaggccgaactgtggggtccggctgcccaggatccggaggtggcgaaatgtcagacacaaacggacccagattccagaaacaagaaaaaggaaagacaaagggaagggacgggagccctggagaagcccgaccctgtggccgccgggtctcctgggctgaagtctccccaagccccctcggccgggcccccttatggttgggagcagctgtccaaggcaccgcaccggggacgcccctccctctgtgcccacccccctgtcccccgagctgaccagcgtcatggctgctacgtgtgcgggaagagctttgcctggcgctccacactggtggagcacgtctacagtcacactggcgagaagcccttccactgcactgactgcggcaagggcttcggccacgcttcctccctgagcaaacaccgggccatccatcgtggggagcggccccaccgctgtctggagtgtggccgggccttcacgcagcgctcggcgctgacttcgcacctgcgcgtccacaccggcgagaaaccctatggctgcgccgactgtggccgccgcttcagccagagctctgccctctaccagcaccggcgcgtgcacagcggcgagacccccttcccctgcccggactgtggccgcgccttcgcctacccctcggacctgcggcgccacgtgcgcacccacaccggcgagaagccctacccgtgcccggactgcgggcgctgcttccgccagagctcggagatggcagcccacaggcgcacccacagcggcgagaagccctacccctgcccgcagtgcggccgccgctttggccagaagtcagccgtggccaaacaccagtgggttcatcggcccggggccgggggccacaggggccgggtcgccgggcgtctgtctgtgaccctgacccctggccacggagacctggacccgcccgtgggcttccagctgtacccggagatattccaggagtgtgggtgacggccttaaaagtgactatctagacattacgggaggcccgagatgggctcaggggcccgaacctctgcggcggcctgcagggaggtcccagaatctagggcaagagctggccctggggtgcggacagtctgatcttgggcccttagcagcctcctctgccagcaccttgctccccactgcccagggctctccaaggccccctctactgaggcagggctgagttgagaacccccagacctacataaggggaaccaaaagctgtttctcagcccagaggtgctaagaggactgaggtagaggagaaccttgttttacccattgtctttttaaattttttatcattatttttattcttgtgaccctcccagaacacaatactcattgtctttttatttatttatttatttatttctgagacagcttcctgctctgtcacccaggctggagtgcagtggtgtgaacagggctaactgcagcctcaacctgcagtgctcaaggaatcctctcccatcagccttccaaatatctgagactacaggcgggcaacactacggccagctaatttttaaattttacatagagatgaggttctcactgttgtccaggctggtctcaaactccttggctgaagtgatcctgtcgtctcggcttccgcaagtgctgggattacaggcgtgagctaccaccatgcctggcttccattgtctttgtgtgtgtgtgtgtgtgatggggttttgctcttgttgcccaggctggagtgcaatagcgcaatctcagctcactgcaacctctgcctccagagttcaagcaattctccttcctcagcctcccaagtagctgggactacaggcacccaccacctccattgtctttttactgcccaagttaaaatcctgtgactgtgtactggatctggcctgcggttgtcatatttattgatctgagtccaggcagtgtttttaagtgatatgagttagtagtgaaaattgaaaaggatattttacaaccaaatacaggttttctggtgtcttttgaaaaatccaaagatttggcaactcgacctaggctccgacaaaaccacagttgttgggagctgagccggagccagaactcacaattcaccgtggcccggccacccatccccaccactcccgtgggctcctgaccaagcaccacgtgccattcatcatggcttgcttttagtgtttttggtgtttatcttaaagtacagcgaagaagaaagggaagtatttcttagacccatgtctctgtccaaataggcctttccatctggcatttcccgctcatttatatgacttgctgagttcctatggtcatttgagtttgcaaacagtggtctgtagcactcaggttttctggagttggagagaaagggtggcaagagagaagtaaaagttggttttatttta

SEQ ID NO: 68353 - protein, 454 aa, Artificial Sequence
  derived and/or modified sequence
MAAAPGGSAQPAGPGPRLGFSTADSGVGMSGLNPGPAVPMKDHDAIKLFVGQIPRGLDEQDLKPLFEEFGRIYELTVLKDRLTGLHKGCAFLTYCARDSALKAQSALHEQKTLPGMNRPIQVKPAASEGRGEDRKLFVGMLGKQQGEEDVRRLFQPFGHIEECTVLRSPDGTSKGCAFVKFGSQGEAQAAIRGLHGSRTMAGASSSLVVKLADTDRERALRRMQQMAGHLGAFHPAPLPLGACGAYTTAILQHQAALLAAAQGPGLGPVAAVAAQMQHVAAFSLVAAPLLPAAAANSPPGSGPGTLPGLPAPIGVNGFGPLTPQTNGQPGSDTLYNNGLSPYPAQSPGVADPLQQAYAGMHHYAGPEGCNLFIYHLPQEFGDAELIQTFLPFGAVVSAKVFVDRATNQSKCFGFVSFDNPTSAQTAIQAMNGFQIGMKRLKVQLKRPKDANRPY

SEQ ID NO: 68354 - protein, 305 aa, Artificial Sequence
  derived and/or modified sequence
SQLPVRAEERTESCLWGCWASSRVRRTSDACSSPLATSRSARSCGVLTAPVKGASSSLVVKLADTDRERALRRMQQMAGHLGAFHPAPLPLGACGAYTTAILQHQAALLAAAQGPGLGPVAAVAAQMQHVAAFSLVAAPLLPAAAANSPPGSGPGTLPGLPAPIGVNGFGPLTPQTNGQPGSDTLYNNGLSPYPAQSPGVADPLQQAYAGMHHYAGPEGCNLFIYHLPQEFGDAELIQTFLPFGAVVSAKVFVDRATNQSKCFGFVSFDNPTSAQTAIQAMNGFQIGMKRLKVQLKRPKDANRPY

SEQ ID NO: 68355 - DNA, 1365 bp, Artificial Sequence
  derived and/or modified sequence
atggctgctgccccaggagggtccgctcagcccgccgggcccggaccacgcctggggttcagtacagctgacagcggggtggggatgtcaggcctgaaccctgggccagccgtccccatgaaggaccatgacgccatcaagctgtttgtcggccagattcccaggggcctcgacgagcaggatctgaaaccactcttcgaggagttcggcagaatttacgagctgacagtacttaaggaccgcctcacaggcctgcataagggctgtgctttcctgacatattgcgcacgggattcagcactgaaggctcagtcagccctccatgagcagaaaactttacctggtatgaacaggcccattcaagtgaagccagcggcctcagaaggacgcggagaggaccgaaaactgttcgtcggaatgctgggcaagcagcagggagaggaggacgtgaggagattatttcagcctttcggacacattgaggaatgcactgtgctccgctcgccagatggaacaagcaaaggctgtgccttcgtgaagttcggatcgcagggtgaggctcaagcagcaatacggggtctccatgggtctcgcaccatggccggggccagttcctcactggttgttaagttggcggatacagatcgcgagcgagcattaagacgaatgcagcagatggccggacatctgggcgctttccaccctgcacctctgcctttgggcgcctgcggcgcttatacaacggcaatcctgcaacaccaggccgccctccttgctgccgcccaaggtccaggactcggacccgtggctgcagttgctgcacagatgcagcacgtcgccgcctttagcttggtggccgctcccctgttgcctgctgcagccgccaacagtcctcctggcagcggccccggtactttgcctggtttacctgcccctatcggcgtgaacggattcgggccactgactccccagacaaacggtcaacccggttcagacaccctgtacaacaacgggctgagtccctacccggcgcagtcaccaggcgtggccgacccattacagcaggcgtatgcaggaatgcatcattacgcaggtcccgaagggtgtaacctgtttatctatcatctgccccaggaattcggcgacgctgaactcatccagacttttctcccatttggggccgtcgtgtccgcgaaagtgttcgtcgaccgcgcaactaatcagtcaaaatgcttcggtttcgtatcctttgataatccaacctccgcccagaccgccatacaggccatgaatgggttccagatcgggatgaagcgcctgaaggttcagctgaaacggcccaaggacgccaacaggccctattag

SEQ ID NO: 68356 - DNA, 1365 bp, Artificial Sequence
  derived and/or modified sequence
atggctgctgccccggggggcagcgctcagccagcagggccaggcccccggctggggttcagtacggcagacagtggagtaggaatgtcgggcctgaacccaggcccggcggtccccatgaaggatcacgatgctatcaaactgttcgtggggcaaattccccgcggactggatgaacaggacctcaaaccccttttcgaagaattcggccggatttacgagttgaccgtactcaaggacagactcaccggactgcacaaggggtgtgcttttttgacttactgtgccagagacagtgccctgaaagctcaatcggccctccacgaacaaaagactctgcccggaatgaaccggcctatacaagtcaagcccgcggcatccgagggccgcggagaggaccgcaagctgtttgtggggatgctcggaaagcagcagggagaagaggacgtcagaaggctattccaacctttcggccacatcgaggagtgcacagtgcttaggagcccagatgggacaagtaaagggtgcgcctttgtgaagttcggatcccaaggggaggcccaggcggccatccgtggcctccacgggagcaggaccatggccggggcctccagctcactggtcgtgaagttggccgatacagatcgcgaaagggctctccgacggatgcagcaaatggctgggcatctgggtgcttttcatcccgcccctctcccactgggagcttgtggagcctacactactgctatcctgcaacaccaagcggctctgctggctgccgcacaaggcccaggactgggtccggttgctgcagtggcagctcaaatgcagcatgttgctgccttctccttagtcgctgccccccttctacctgcagcagcagccaattccccccctgggtccggtccaggaaccctacccggtctccctgcccccatcggcgtaaacggcttcggacccttgacccctcagaccaacggtcagccagggtcagatacattatataacaacggccttagtccttatccagcccagtctcctggcgtggcagacccacttcagcaggcgtacgccggcatgcatcattacgcaggccccgaaggctgcaatttgttcatttatcacttacctcaggagtttggagatgcagagcttattcaaacctttctccccttcggcgccgttgtgagcgcaaaggtgttcgttgatagggccactaaccaaagcaaatgctttggttttgtctctttcgacaatccaacgtcagctcagaccgccatccaagcaatgaatggattccagattggcatgaaaagactcaaagtgcagctgaaaaggccaaaggatgcaaaccggccctactag

SEQ ID NO: 68357 - DNA, 918 bp, Artificial Sequence
  derived and/or modified sequence
tctcaactccccgttcgcgctgaggagcggactgaaagttgtctctggggctgctgggcttcgagccgagtgcggcgcacctctgacgcctgctcctcccctttggccaccagcagatccgcccggagctgcggtgtcctcaccgctcccgtcaaaggcgccagtagctccctagtggttaagctcgccgacacggaccgagaaagggcactccgtcgaatgcagcaaatggctggccatctgggggcgtttcatccggctccactgccattgggggcctgtggggcatataccactgctattctgcaacatcaagctgcacttctggcggcagcacaggggccgggtctggggccagtcgcggctgttgcagcccaaatgcagcacgtggcggctttttccttggtggcagcccctcttcttccggcagcagcagcaaactcacccccaggttccggccctggcacgttaccagggctgccagctcctattggtgtgaatgggttcggtcccttgacaccacaaacaaatggccagcccggaagtgacaccctgtacaataatgggctttctccctacccagcacagagccctggtgtggctgaccctctccagcaagcctatgctggtatgcaccactacgccggtccagagggctgcaatctcttcatctatcatctgccacaggagttcggggacgccgaactaattcaaaccttcctgccattcggtgctgtcgtctctgctaaagtatttgtggacagggctaccaaccagtctaaatgctttggctttgtttctttcgacaatcccacgtccgcccagaccgccattcaggctatgaatggctttcagatcgggatgaagaggttaaaggtccagctgaagaggccaaaggacgccaaccgcccttactag

SEQ ID NO: 68358 - DNA, 1365 bp, Artificial Sequence
  derived and/or modified sequence
atggctgctgcccctgggggcagcgcccagcctgctggccctggcccccggctgggcttcagcacagctgacagcggcgtgggcatgagcggcctgaaccctggccctgctgtgcccatgaaggaccatgatgccatcaagctgtttgtgggccagatcccccggggcctggatgagcaggacctgaagcccctgtttgaggagtttggccgcatctatgagctgactgtgctgaaggaccggctgaccggcctgcacaagggctgtgccttcctgacctactgtgcccgggacagcgccctgaaggcccagagcgccctgcacgagcagaagaccctgcccggcatgaaccggcccatccaggtgaagccagctgccagcgagggccgcggggaggacaggaagctgtttgtgggcatgctgggcaagcagcagggcgaggaggatgtgagaagactcttccagcccttcggccacatcgaggagtgcaccgtgctgcggagcccagatggcaccagcaagggctgtgcctttgtgaagtttggcagccagggcgaggcccaggccgccatccggggcctgcacggcagcaggaccatggccggggccagcagcagcctggtggtgaagctggccgacacagaccgggagcgggccctgcggaggatgcagcagatggccggccacctgggcgccttccacccagcccccctgcccctgggcgcctgtggggcctacaccacagccatcctgcagcaccaggccgccctgctggccgccgcccagggccctggcctgggccctgtggccgctgtggccgcccagatgcagcacgtggccgccttcagcctggtggccgcccccctgctgcctgctgctgctgccaacagccccccaggcagcggccctggcaccctgcccggcctgcctgcccccatcggcgtgaatggcttcggccccctgaccccccagaccaacggccagcccggcagtgacaccctgtacaacaacggcctgagcccctacccagcccagagccctggggtggccgaccccctgcagcaggcctatgccggcatgcaccactacgccggccctgagggctgcaacctcttcatctaccacctgccccaggagtttggagatgctgagctgatccagaccttcctgccctttggagctgtggtgtctgccaaggtgtttgtggaccgggccaccaaccagagcaagtgcttcggctttgtgtcctttgacaaccccaccagcgcccagacagccatccaggccatgaatggcttccagatcggcatgaagaggctgaaggtgcagctgaagaggcccaaggatgccaaccggccctactag

SEQ ID NO: 68359 - DNA, 918 bp, Artificial Sequence
  derived and/or modified sequence
agccagctgcctgtgcgggcagaggagaggacagagagctgcctgtggggctgctgggccagcagccgggtgcggaggaccagtgatgcctgcagcagccccctggccaccagccgcagcgcccggagctgtggggtgctgacagcccctgtgaagggggccagcagcagcctggtggtgaagctggccgacacagaccgggagcgggccctgcggaggatgcagcagatggccggccacctgggcgccttccacccagcccccctgcccctgggcgcctgtggggcctacaccacagccatcctgcagcaccaggccgccctgctggccgccgcccagggccctggcctgggccctgtggccgctgtggccgcccagatgcagcacgtggccgccttcagcctggtggccgcccccctgctgcctgctgctgctgccaacagccccccaggcagcggccctggcaccctgcccggcctgcctgcccccatcggcgtgaatggatttggccccctgaccccccagaccaacggccagcccggcagtgacaccctgtacaacaacggcctgagcccctacccagcccagagccctggggtggccgaccccctgcagcaggcctatgccggcatgcaccactacgccggccctgagggctgcaacctcttcatctaccacctgccccaggagtttggagatgctgagctgatccagaccttcctgccctttggagctgtggtgtctgccaaggtgtttgtggaccgggccaccaaccagagcaaatgttttggatttgtgtcctttgacaaccccaccagcgcccagacagccatccaggccatgaatggcttccagatcggcatgaagaggctgaaggtgcagctgaagaggcccaaggatgccaaccggccctactag

SEQ ID NO: 68360 - DNA, 1365 bp, Artificial Sequence
  derived and/or modified sequence
atggccgccgcccccggcggcagcgcccagcccgccggccccggcccaaggcttggcttcagcacagcagattccggggtggggatgagcggattgaatcctggccccgccgtcccgatgaaagaccacgacgccattaagctgttcgtgggacagatacccaggggtcttgacgagcaggatctgaagcctctcttcgaagaatttggccgtatttatgaactgacagtcctgaaggatcgccttacgggccttcataagggctgtgcctttttgacctattgtgctagggattctgccctgaaggcacagagcgcacttcatgagcagaagacactgccaggcatgaacaggccgattcaggtgaagcctgccgcctcagaggggcgcggcgaggacagaaagctgttcgtgggcatgctggggaagcagcagggagaagaggacgtgagacggctcttccagcccttcggccatatcgaagagtgcacagtcctccggagccctgacggcacctctaaaggttgtgcttttgtgaagtttggcagccagggagaggcccaggctgctattcggggccttcatgggagccggacaatggccggcgccagcagtagcctggttgtcaaactggcagataccgaccgtgagcgggccctgaggagaatgcagcaaatggccggacatctcggggcattccacccagctccactgccccttggagcatgcggggcctatacgacagctatcctgcagcaccaagctgccctactggccgctgctcagggaccaggcttggggcccgtcgcggccgtcgccgcacagatgcagcacgtggcagccttctctctggtggccgcgccgctgttacctgcagctgcagccaactcacccccgggctcgggccccgggacacttcctggtctgcccgcccccatcggcgtaaatggcttcgggccattgaccccccagacaaacggacagcctggcagtgacacactatacaataacggcttgagcccttaccccgcccagagtcctggcgtggccgaccctctacagcaggcctatgccgggatgcaccattacgctgggcccgaggggtgcaacctgttcatctatcacctcccgcaggagtttggagatgccgagttgatccaaactttcctccccttcggcgctgtggtcagcgctaaagtgtttgtcgatagggcaactaatcagagcaaatgctttgggttcgtctcttttgataaccctacttcagcacaaacggccatacaggctatgaacggtttccaaatcggcatgaagcgtctgaaagtgcagctcaagagacccaaggacgctaatagaccatattag

SEQ ID NO: 68361 - DNA, 1365 bp, Artificial Sequence
  derived and/or modified sequence
atggccgccgcccccggcggcagcgcccagcccgccggccccggcccgcgcctgggtttctccaccgcggattccggggtggggatgtcaggcctgaatcccgggcctgcagtgccaatgaaagatcacgacgccatcaagttattcgtggggcagattccacgcgggctggatgaacaggatctgaagccacttttcgaggaattcggacggatctacgaactcaccgtgttgaaggaccggttaaccggactccataagggctgtgcttttctcacctattgcgcacgcgattcagcgctgaaagctcagtcagccctgcatgagcagaagacccttcctggcatgaataggcctatccaggtgaagccggccgcatctgaggggaggggtgaggataggaagctcttcgtcgggatgcttggcaagcagcagggcgaggaagatgtgcgcagactttttcagcctttcggacacatcgaagaatgtactgtgctgcggagccccgatggcacatcaaaaggctgcgcattcgtcaaatttggatcccagggagaggcccaagctgccataaggggactgcacggaagcagaaccatggccggagcctcctcatctctggtggtcaaacttgcagatactgaccgagagcgggccctccgtagaatgcagcagatggccggccatttgggcgcttttcacccagcccctctgccattaggtgcatgtggtgcctacacgaccgctatccttcagcaccaagcagcattgctagctgctgcccagggtcctggattgggccctgtcgcagcagtcgcggcccagatgcagcacgtggcagcattttccttggttgccgcgcccctgctgcctgcggcagctgcaaattcccctccagggtcgggcccgggaacactgcccgggctgcctgctcccattggcgtaaacgggtttggccccctgaccccacagaccaacggccaacccggctctgatacattgtataacaacggcttgagtccatatcccgcgcaaagccccggggtcgccgatcccctacaacaggcttacgccggcatgcaccattacgcaggccccgagggctgcaatctgttcatctaccatctgccgcaggaattcggggacgccgagttaatccagacatttctcccttttggggctgtcgtgtcagcaaaggtgtttgtggacagggcgacaaaccaatctaagtgcttcggttttgtttccttcgataacccaacaagcgcccagactgccattcaagcaatgaatgggtttcagatcggcatgaaaaggctgaaagttcagctcaagcgaccgaaagatgctaatcgtccctattag

SEQ ID NO: 68362 - DNA, 918 bp, Artificial Sequence
  derived and/or modified sequence
agccagctgcccgtgcgggccgaggagcggaccgagagctgcctgtggggctgctgggcttcttccagagtaaggcggacttcagacgcctgtagttcacctttagcaacatcccgctcagccaggtcctgcggagtgctcacagctccggtgaaaggggcctcctctagtctggtggtgaaacttgctgataccgaccgagagcgggctttaagaaggatgcagcagatggccggccatctgggcgccttccacccagccccgctgccactgggtgcctgcggtgcctatacaacagcaattctgcaacaccaagcagctctgctcgccgcagcgcagggcccagggctcgggcccgtggctgctgtagccgcccaaatgcaacacgtggcagccttttccctagtggccgcccctctgctgcccgcagccgcagccaacagtccaccagggtcaggtcccggaactttacccggcctccctgccccgataggggtgaacggcttcggcccactgactcctcagacaaatggacaacccggatcagataccctgtataataatgggctgagcccctacccagcgcaatctccaggcgtagccgatccactgcagcaagcatacgcaggaatgcatcactacgcaggccccgagggctgtaacttgttcatttaccacctgccccaggaatttggggatgccgagttaatccagacctttctgccatttggggccgtggtgagcgccaaagtttttgttgaccgagccaccaatcagagcaagtgtttcggattcgtaagcttcgataatcccacaagtgctcagaccgctatccaggccatgaacgggtttcagatcggaatgaaacggttgaaagtgcagttgaagaggcccaaggatgctaaccgcccttactag

SEQ ID NO: 68363 - DNA, 1365 bp, Artificial Sequence
  derived and/or modified sequence
atggccgctgctccaggtgggtcagcccagccggcaggtcctgggccacgcctggggttttccaccgccgactcaggggtgggaatgtcgggcctcaatccaggaccagctgttccaatgaaggaccacgacgctattaagctgttcgtgggtcagatcccgcgtggcctcgacgaacaggatttaaagcccttattcgaagaatttggcagaatctacgaactcacggtcctgaaggatcggttaacaggtctgcacaagggttgcgcttttctaacttactgtgcaagagattccgcactgaaagcacagagcgcgctgcatgaacaaaaaaccctccccggaatgaacagacccattcaggtaaaacctgcagctagcgaaggcagaggagaagaccgcaagttgtttgtgggcatgttgggcaagcagcagggcgaagaagacgtcagacggctctttcagccatttggccacattgaggagtgtactgttttgcgttcaccggacggtacatctaaagggtgcgcattcgtgaaattcggctcacagggtgaggcacaggctgctatcaggggacttcacgggtcacggaccatggccggtgcttcctcgtcgctggtggtcaagttagccgacaccgaccgagagcgcgcactgcgcagaatgcagcagatggcaggccatctgggcgcattccatccagcgcctctgcccctgggcgcttgtggagcatacactacggcaatcctgcagcatcaagccgctctcctggctgcagcccagggtcctggcctcgggcctgttgctgctgtggctgctcaaatgcagcatgtggccgcattctcattggtggctgccccactgcttcctgctgccgctgccaacagtccccctgggagcgggcctggcacgcttcccggacttccggctccaataggggtcaacggctttggacctcttacgcctcagacgaacggacagccaggaagcgacaccctttataataatggactctctccctacccagcccagtcgcccggagtggccgacccgcttcagcaggcgtatgctggcatgcatcactatgccggacccgaaggatgtaatctgtttatttatcacctgcctcaggagtttggcgatgccgaactgatccagacgtttttacccttcggagctgtggtttccgctaaagtttttgtggaccgcgctactaatcagagcaaatgcttcggtttcgtatcgtttgacaaccctacctctgctcaaaccgccattcaagccatgaacggctttcagattggaatgaaaaggctgaaggtccagctgaaaagacccaaagatgcaaatcggccttactag

SEQ ID NO: 68364 - DNA, 1365 bp, Artificial Sequence
  derived and/or modified sequence
atggccgcagcccctgggggatctgcgcagcccgcagggccaggtccaaggctggggtttagcacagcagacagcggcgtggggatgagtggtcttaaccccggtccagcagtgcctatgaaggatcacgatgccattaagctgttcgttggacagatccccagaggtcttgacgaacaagacctcaagccactctttgaagaattcggccgaatatatgagttgactgtactgaaggatcggctaactggtcttcataaaggctgtgcctttctgacatactgtgcccgtgactcagcactgaaagctcagagtgctttacacgagcagaagaccctccccggtatgaaccgccctatccaagtcaaacctgccgcaagtgaaggcaggggggaggatcggaagctgttcgttggaatgttgggaaagcaacagggcgaagaagatgtgcgaaggttgtttcagcccttcgggcacattgaggaatgtactgtactgaggagccctgatggaacctccaaaggctgcgcctttgttaaattcggatcgcagggggaagcacaggctgcaattagagggttacacggatctcgcaccatggcaggtgctagtagctcgctcgtcgtaaagttggccgatacagatcgtgagcgagccctccgaagaatgcagcagatggctggccatctaggagcatttcatcctgcccctcttcctctaggagcttgcggcgcatacacaacagctatccttcagcatcaagcagctttgttggcagctgctcaggggccaggtttgggaccagtagctgctgtggccgctcagatgcagcacgttgcagcttttagtcttgtggccgctccgttactacccgcagccgcagccaacagtcctcctggttcaggccctgggacactccccggtttacccgcacccattggagtgaacggtttcggcccactaacccctcagacaaacggccagcctggatctgatacgttgtacaacaacggcctgagcccctacccagcacaatcccctggagtcgccgacccacttcagcaagcctacgcgggaatgcaccactacgcaggcccagaaggttgcaacctgttcatctatcacctacctcaggagttcggtgacgctgaactgatccagacgtttttacctttcggcgctgtcgtttcggcaaaagtgttcgtggacagggcaacaaaccagtcaaagtgtttcggattcgtatcgtttgacaacccaacgtccgcacagacagccatccaggccatgaatggcttccaaataggaatgaaacgcctgaaggttcagctcaagagacccaaggatgcaaataggccttattag

SEQ ID NO: 68365 - DNA, 918 bp, Artificial Sequence
  derived and/or modified sequence
tctcagctgcctgtgcgtgccgaggagcgtaccgaatcatgtctttggggatgttgggcatcctctcgggtaagaaggacgtcggacgcttgttcctcacctctggctacttctcgctcagcacgatcctgtggagtgctgaccgcacctgtcaagggtgcctcctcatcactggttgttaagctcgccgacacggaccgggagcgtgctttgcggagaatgcaacaaatggctggacacctaggggcatttcatccagcacctttacctctcggagcttgcggggcttacaccacggctatactgcaacaccaggccgctctactggccgctgcacagggcccaggcctcggtcccgtggcggctgtcgccgcacagatgcagcatgtagccgcattctcattggtggctgccccactactacccgcagcggcagctaattcgccacctgggtctggtcccggaacgctccctggcttgccagctcctatcggcgttaatggctttggacctctgacaccacagactaatggacagcccggatcggataccctgtataacaacggcctgtccccttaccctgctcagagtcctggcgtagcagacccactccagcaggcgtacgcgggtatgcatcactacgcaggacccgaggggtgcaatctgtttatctatcacctcccgcaggagttcggcgacgcagaattgattcagacctttctgcctttcggcgctgtggtctctgcaaaggtgttcgttgatcgggctactaaccagtccaagtgctttggcttcgtgtcctttgacaaccccacttctgcgcagacagccattcaggccatgaacggattccagattggaatgaagagacttaaagttcagttgaaacgcccaaaagatgctaaccgcccatattag

SEQ ID NO: 68366 - DNA, 3239 bp, Artificial Sequence
  derived and/or modified sequence
gctggggctcggggctcggctctgggagagctcgggcgggagcccagagagagccgcacggggacctcaagccagaccccagcgttcagccgccacctcggcccgggcccgccccgccccggccccgcccctttcctgcccgccccaccccctctacgcccctccacccggaccccgccccctgggcagccccccgccctctccgcccgggctccgccccctccccctggccctcgccaccggtccagggaggggacggcgggacaggcgggaccagtgggaccggcgggagggctgacagggcggggacatggccgcggcgccgggagggtcagcgcagcccgctggccccggcccgcgcctgggtttcagcaccgcggacagcggcgtcggcatgagcgggctaaaccccggtcccgccgtacccatgaaggaccacgacgccatcaagctcttcgtggggcagatcccgcggggcttggacgagcaggacctcaagccgctgttcgaggagttcggccgcatctacgagctgacggtgctgaaggaccggctcaccggcctccacaaaggctgtgccttcctcacctactgcgcccgggactctgctctcaaggcccagagtgcactgcacgagcagaagaccctgccagggatgaatcgtccgatccaagtgaagccagctgccagtgagggccgaggagaggaccgaaagctgtttgtggggatgctgggcaagcagcagggtgaggaggacgtcagacgcctgttccagccctttggccacatcgaggagtgcacggtcctgcggagtcctgacggcaccagtaaagggcgcctcgtccagcctcgtggtcaagctggcggacaccgaccgggagcgcgcgctgcggcggatgcagcagatggccggccacctgggcgccttccaccccgcgccactgccgctaggggcctgcggcgcctacaccacggcgatcctgcagcaccaggcggccctgctggcggcggcacagggcccaggcctaggcccggtggcggcagtggcggcccagatgcaacacgtggcggcctttagcctggtagctgcgcctctgttgcccgcggcagcagccaactccccgcctggcagcggccctggcaccctcccaggtcttccggcgcccatcggggtcaatggattcggccctctgaccccccagaccaatggccagccgggctccgacacgctctacaataacgggctctccccttatccagcccagagccccggcgtggctgaccccctgcagcaggcctacgctgggatgcaccactacgcaggccccgaaggctgtaacctcttcatctatcacctgcctcaggagtttggtgatgcggaactcatacagacattcctgccctttggagccgttgtctctgctaaagtctttgtggatcgagccaccaaccagagcaagtgttttgggtttgttagttttgacaatccaactagtgcccagactgctattcaggcgatgaatggctttcaaattggcatgaagaggctcaaggtccagctaaagcggcccaaggatgccaaccggccttactgacctgctttcactgaccagccacagaaagaaacagaagagtgagaagaaaggagaggaaaagcacagaaacgcttgagcagcccttcccgaaggagcagctgcggacggaggtggatcggacccaaggctggtgcctggggctaaggccactctaaggattgtttttatcaagtgggttgttctgtgcctgcagcatagagcgcaggctggcagagcaaatagggctggtgaggagtgactgtccaggggaaccagcagagggcgttgggggtgccaagggcttctccgcaagggaagcccagatttacttctttcaaaatcatatcattccttagagtttagggaccaaaggactattgcttttttaagaatatatatatctatataaattaaaacaaagaaacaaacaaacaaaaaacaagacaaacaactacaaaaaaagacagtatagagtctcataaaagctgcctttaaatatccctaggagacagggtgaaggagacccttgacagccccagcctaggcagatgggggctgtggaaagattgttctgtgtctcattccctcttaagccactcccccaccctgcccttttaaaaataattaaggatttgaggtctaggctcacatgcaggtaatgagaacgttatggaagcagtgaacccacaatccacaatccccaaactcagagtgcatcccagaagaggccccaggcagagctcaggttggccctggcctttgccatcccgggaggccccctagccagcaagagtgggattgcctttcctgtggaaccactgcttccccaggcgggaagaaagagggagttctggccacctgagcctttcccttgccaatccaggtagacagaggccctgcctttggctgagctgagacacctcctgtttcccttccccttgaaccagtcccagtgtccccttgctccaggctaccttctgtctcttagtctaagtttgcccacctgtaaagtagattcaggatatctgtagagggctgtgacaacagacttggaaggtttgctactgtatatactgccattgagaaggggaaatttttcaatatgtagaagcttcagaattagaggtccctctttaccccagacctgggagggaagtagatgttttgccaaaatacttcttcattcctttaaaaactacatctttcctatgcaagagtgtctcacatgtgcttaaccgaggtgcttctagttggtgagcagtgttgagcttagaagtggtgtgtgctctgtctgtctgtctttgtctgtctgttgtatacagtgggtgccatataaagctgatcaatggtggtgcttcctgcctgcttctgtgagatgggcaaaagattcagcttagaacaccatgactcaccttgccttggtcagcctttcctgggcctgtagggccttgcacatatttttcccaggaggatttcccctccaccccacaggcatggatcagcttggtctgaggccccagctgtgtggggtccctctaatccccagatgttgctgaggctgaaggcctctgatctgataacatgtcagatagtaaaagatgtgggggtgggggtggagggctcctccttcataacagtttctaagaaaacttgttcccacctgtt

SEQ ID NO: 68367 - DNA, 1496 bp, Artificial Sequence
  derived and/or modified sequence
gcggggacatggccgcggcgccgggagggtcagcgcagcccgctggccccggcccgcgcctgggtttcagcaccgcggacagcggcgtcggcatgagcgggctaaaccccggtcccgccgtacccatgaaggaccacgacgccatcaagctcttcgtggggcagatcccgcggggcttggacgagcaggacctcaagccgctgttcgaggagttcggccgcatctacgagctgacggtgctgaaggaccggctcaccggcctccacaaaggctgtgccttcctcacctactgcgcccgggactctgctctcaaggcccagagtgcactgcacgagcagaagaccctgccagggatgaatcgtccgatccaagtgaagccagctgccagtgagggccgaggagaggaccgaaagctgtttgtggggatgctgggcaagcagcagggtgaggaggacgtcagacgcctgttccagccctttggccacatcgaggagtgcacggtcctgcggagtcctgacggcaccagtaaaggctgtgcctttgtgaagttcgggagtcaaggggaagctcaggcggccatccggggtctgcacggcagccggaccatggcgggcgcctcgtccagcctcgtggtcaagctggcggacaccgaccgggagcgcgcgctgcggcggatgcagcagatggccggccacctgggcgccttccaccccgcgccactgccgctaggggcctgcggcgcctacaccacggcgatcctgcagcaccaggcggccctgctggcggcggcacagggcccaggcctaggcccggtggcggcagtggcggcccagatgcaacacgtggcggcctttagcctggtagctgcgcctctgttgcccgcggcagcagccaactccccgcctggcagcggccctggcaccctcccaggtcttccggcgcccatcggggtcaatggattcggccctctgaccccccagaccaatggccagccgggctccgacacgctctacaataacgggctctccccttatccagcccagagccccggcgtggctgaccccctgcagcaggcctacgctgggatgcaccactacgcaggccccgaaggctgtaacctcttcatctatcacctgcctcaggagtttggtgatgcggaactcatacagacattcctgccctttggagccgttgtctctgctaaagtctttgtggatcgagccaccaaccagagcaagtgttttgggtttgttagttttgacaatccaactagtgcccagactgctattcaggcgatgaatggctttcaaattggcatgaagaggctcaaggtccagctaaagcggcccaaggatgccaaccggccttactgacctgctttcactgaccagccacagaaagaaacagaagagtgagaagaaaggagaggaaaagcacagaaacgcttgagcagcccttcccgaaggagcagctgcggacggaggtggatcggaccc

SEQ ID NO: 68368 - DNA, 3081 bp, Artificial Sequence
  derived and/or modified sequence
accggtccagggaggggacggcgggacaggcgggaccagtgggaccggcgggagggctgacagggcggggacatggccgcggcgccgggagggtcagcgcagcccgctggccccggcccgcgcctgggtttcagcaccgcggacagcggcgtcggcatgagcgggctaaaccccggtcccgccgtacccatgaaggaccacgacgccatcaagctcttcgtggggcagatcccgcggggcttggacgagcaggacctcaagccgctgttcgaggagttcggccgcatctacgagctgacggtgctgaaggaccggctcaccggcctccacaaaggctgtgccttcctcacctactgcgcccgggactctgctctcaaggcccagagtgcactgcacgagcagaagaccctgccagggatgaatcgtccgatccaagtgaagccagctgccagtgagggccgaggagaggaccgaaagctgtttgtggggatgctgggcaagcagcagggtgaggaggacgtcagacgcctgttccagccctttggccacatcgaggagtgcacggtcctgcggagtcctgacggcaccagtaaaggctgtgcctttgtgaagttcgggagtcaaggggaagctcaggcggccatccggggtctgcacggcagccggaccatggcgggcgcctcgtccagcctcgtggtcaagctggcggacaccgaccgggagcgcgcgctgcggcggatgcagcagatggccggccacctgggcgccttccaccccgcgccactgccgctaggggcctgcggcgcctacaccacggcgatcctgcagcaccaggcggccctgctggcggcggcacagggcccaggcctaggcccggtggcggcagtggcggcccagatgcaacacgtggcggcctttagcctggtagctgcgcctctgttgcccgcggcagcagccaactccccgcctggcagcggccctggcaccctcccaggtcttccggcgcccatcggggtcaatggattcggccctctgaccccccagaccaatggccagccgggctccgacacgctctacaataacgggctctccccttatccagcccagagccccggcgtggctgaccccctgcagcaggcctacgctgggatgcaccactacgcaggccccgaaggctgtaacctcttcatctatcacctgcctcaggagtttggtgatgcggaactcatacagacattcctgccctttggagccgttgtctctgctaaagtctttgtggatcgagccaccaaccagagcaagtgttttgggtttgttagttttgacaatccaactagtgcccagactgctattcaggcgatgaatggctttcaaattggcatgaagaggctcaaggtccagctaaagcggcccaaggatgccaaccggccttactgacctgctttcactgaccagccacagaaagaaacagaagagtgagaagaaaggagaggaaaagcacagaaacgcttgagcagcccttcccgaaggagcagctgcggacggaggtggatcggacccaaggctggtgcctggggctaaggccactctaaggattgtttttatcaagtgggttgttctgtgcctgcagcatagagcgcaggctggcagagcaaatagggctggtgaggagtgactgtccaggggaaccagcagagggcgttgggggtgccaagggcttctccgcaagggaagcccagatttacttctttcaaaatcatatcattccttagagtttagggaccaaaggactattgcttttttaagaatatatatatctatataaattaaaacaaagaaacaaacaaacaaaaaacaagacaaacaactacaaaaaaagacagtatagagtctcataaaagctgcctttaaatatccctaggagacagggtgaaggagacccttgacagccccagcctaggcagatgggggctgtggaaagattgttctgtgtctcattccctcttaagccactcccccaccctgcccttttaaaaataattaaggatttgaggtctaggctcacatgcaggtaatgagaacgttatggaagcagtgaacccacaatccacaatccccaaactcagagtgcatcccagaagaggccccaggcagagctcaggttggccctggcctttgccatcccgggaggccccctagccagcaagagtgggattgcctttcctgtggaaccactgcttccccaggcgggaagaaagagggagttctggccacctgagcctttcccttgccaatccaggtagacagaggccctgcctttggctgagctgagacacctcctgtttcccttccccttgaaccagtcccagtgtccccttgctccaggctaccttctgtctcttagtctaagtttgcccacctgtaaagtagattcaggatatctgtagagggctgtgacaacagacttggaaggtttgctactgtatatactgccattgagaaggggaaatttttcaatatgtagaagcttcagaattagaggtccctctttaccccagacctgggagggaagtagatgttttgccaaaatacttcttcattcctttaaaaactacatctttcctatgcaagagtgtctcacatgtgcttaaccgaggtgcttctagttggtgagcagtgttgagcttagaagtggtgtgtgctctgtctgtctgtctttgtctgtctgttgtatacagtgggtgccatataaagctgatcaatggtggtgcttcctgcctgcttctgtgagatgggcaaaagattcagcttagaacaccatgactcaccttgccttggtcagcctttcctgggcctgtagggccttgcacatatttttcccaggaggatttcccctccaccccacaggcatggatcagcttggtctgaggccccagctgtgtggggtccctctaatccccagatgttgctgaggctgaaggcctctgatctgataacatgtcagatagtaaaagatgtgggggtgggggtggagggctcctccttcataacagtttctaagaaaacttgttcccacctgtt

SEQ ID NO: 68369 - DNA, 1365 bp, Artificial Sequence
  derived and/or modified sequence
atggccgccgcccccggcggcagcgcccagcccgccggccccggccccagactgggcttcagcaccgccgacagcggcgtgggcatgagcggcctgaaccccggccccgccgtgcccatgaaggaccacgacgccatcaagctgttcgtgggccagatccccagaggcctggacgagcaggacctgaagcccctgttcgaggagttcggcagaatctacgagctgaccgtgctgaaggacagactgaccggcctgcacaagggctgcgccttcctgacctactgcgccagagacagcgccctgaaggcccagagcgccctgcacgagcagaagaccctgcccggcatgaacagacccatccaggtgaagcccgccgccagcgagggcagaggcgaggacagaaagctgttcgtgggcatgctgggcaagcagcagggcgaggaggacgtgagaagactgttccagcccttcggccacatcgaggagtgcaccgtgctgagaagccccgacggcaccagcaagggctgcgccttcgtgaagttcggcagccagggcgaggcccaggccgccatcagaggcctgcacggcagcagaaccatggccggcgccagcagcagcctggtggtgaagctggccgacaccgacagagagagagccctgagaagaatgcagcagatggccggccacctgggcgccttccaccccgcccccctgcccctgggcgcctgcggcgcctacaccaccgccatcctgcagcaccaggccgccctgctggccgccgcccagggccccggcctgggccccgtggccgccgtggccgcccagatgcagcacgtggccgccttcagcctggtggccgcccccctgctgcccgccgccgccgccaacagcccccccggcagcggccccggcaccctgcccggcctgcccgcccccatcggcgtgaacggcttcggccccctgaccccccagaccaacggccagcccggcagcgacaccctgtacaacaacggcctgagcccctaccccgcccagagccccggcgtggccgaccccctgcagcaggcctacgccggcatgcaccactacgccggccccgagggctgcaacctgttcatctaccacctgccccaggagttcggcgacgccgagctgatccagaccttcctgcccttcggcgccgtggtgagcgccaaggtgttcgtggacagagccaccaaccagagcaagtgcttcggcttcgtgagcttcgacaaccccaccagcgcccagaccgccatccaggccatgaacggcttccagatcggcatgaagagactgaaggtgcagctgaagagacccaaggacgccaacagaccctactag

SEQ ID NO: 68370 - DNA, 918 bp, Artificial Sequence
  derived and/or modified sequence
agccagctgcccgtgagagccgaggagagaaccgagagctgcctgtggggctgctgggccagcagcagagtgagaagaaccagcgacgcctgcagcagccccctggccaccagcagaagcgccagaagctgcggcgtgctgaccgcccccgtgaagggcgccagcagcagcctggtggtgaagctggccgacaccgacagagagagagccctgagaagaatgcagcagatggccggccacctgggcgccttccaccccgcccccctgcccctgggcgcctgcggcgcctacaccaccgccatcctgcagcaccaggccgccctgctggccgccgcccagggccccggcctgggccccgtggccgccgtggccgcccagatgcagcacgtggccgccttcagcctggtggccgcccccctgctgcccgccgccgccgccaacagcccccccggcagcggccccggcaccctgcccggcctgcccgcccccatcggcgtgaacggcttcggccccctgaccccccagaccaacggccagcccggcagcgacaccctgtacaacaacggcctgagcccctaccccgcccagagccccggcgtggccgaccccctgcagcaggcctacgccggcatgcaccactacgccggccccgagggctgcaacctgttcatctaccacctgccccaggagttcggcgacgccgagctgatccagaccttcctgcccttcggcgccgtggtgagcgccaaggtgttcgtggacagagccaccaaccagagcaagtgcttcggcttcgtgagcttcgacaaccccaccagcgcccagaccgccatccaggccatgaacggcttccagatcggcatgaagagactgaaggtgcagctgaagagacccaaggacgccaacagaccctactag

SEQ ID NO: 68371 - protein, 344 aa, Artificial Sequence
  derived and/or modified sequence
MNRPIQVKPAASEGRGEDRKLFVGMLGKQQGEEDVRRLFQPFGHIEECTVLRSPDGTSKGCAFVKFGSQGEAQAAIRGLHGSRTMAGASSSLVVKLADTDRERALRRMQQMAGHLGAFHPAPLPLGACGAYTTAILQHQAALLAAAQGPGLGPVAAVAAQMQHVAAFSLVAAPLLPAAANSPPGSGPGTLPGLPAPIGVNGFGPLTPQTNGQPGSDTLYNNGLSPYPAAYPSAYAPVSTAFPQQPSALPQQQREGPEGCNLFIYHLPQEFGDAELIQTFLPFGAVVSAKVFVDRATNQSKCFGFVSFDNPTSAQTAIQAMNGFQIGMKRLKVQLKRPKDANRPY

SEQ ID NO: 68372 - DNA, 1035 bp, Artificial Sequence
  derived and/or modified sequence
atgaatcgacctatacaggttaagccagccgccagtgagggacggggcgaagataggaaactcttcgtcgggatgcttggcaagcagcagggagaggaggacgtgcgccgcctgttccaaccctttgggcatatcgaggaatgtactgtgctgcgctcacccgacggtacctcaaaggggtgcgcctttgtgaaattcgggagccagggagaggcccaagctgcaatccggggcctgcacgggtcacgcaccatggcaggagcatcctctagtctggtcgtcaaacttgcggacaccgaccgagagcgtgccctgcgcagaatgcagcagatggccgggcacctgggtgcattccacccagctcccctgccattgggcgcctgtggagcctacactacagccattctccagcatcaggcagctctgttagctgctgcacaggggcctggcctgggccccgtagcggccgtcgccgcccaaatgcagcatgtggctgccttcagcctagtggctgcacctcttcttcccgcagctgctaacagcccacctgggtcgggccccggcaccctgccaggcctgcctgctcctatcggtgttaacggattcggtcccctcaccccacagacaaatgggcagccaggctccgataccctgtacaataacgggttgtcaccttaccctgcagcatacccatcagcttacgcacccgtgagcacggcatttccccagcaacccagcgcactaccgcagcagcagcgagagggcccagagggctgtaatctgtttatttaccacctgccccaagaatttggcgatgcagaactgatacagacattcttgcctttcggggcggttgtgtcagccaaagtctttgtcgatcgagcaaccaaccaatctaagtgtttcggatttgttagctttgacaatccgacttccgcacagaccgccattcaggcgatgaacggattccaaattggaatgaagagactaaaggtgcagctgaaacgtcctaaggatgccaacagaccgtattag

SEQ ID NO: 68373 - DNA, 1035 bp, Artificial Sequence
  derived and/or modified sequence
atgaaccggcccatccaggtgaagccagctgccagcgagggcagaggagaggacaggaagctgtttgtgggcatgctgggcaagcagcagggcgaggaggatgtgcggcggctcttccagcccttcggccacattgaagaatgtactgtgctgcggagcccagatggcaccagcaagggctgtgcctttgtgaagtttggcagccagggcgaggcccaggccgccatccggggcctgcacggcagcaggaccatggccggggccagcagcagcctggtggtgaagctggccgacacagaccgggagcgggccctgcggaggatgcagcagatggccggccacctgggcgccttccacccagcccccctgcccctgggcgcctgtggggcctacaccacagccatcctgcagcaccaggccgccctgctggccgccgcccagggccctggcctgggccctgtggccgctgtggccgcccagatgcagcacgtggccgccttcagcctggtggccgcccccctgctgcctgctgctgccaacagccccccaggcagcggccctggcaccctgcccggcctgcctgcccccatcggcgtgaatggcttcggccccctgaccccccagaccaacggccagcccggcagtgacaccctgtacaacaacggcctgagcccctacccagctgcctaccccagcgcctatgcccctgtgtccacagccttcccccagcagcccagcgccctgccccagcagcagcgggagggccctgagggctgcaacctcttcatctaccacctgccccaggagtttggagatgctgagctgatccagaccttcctgccctttggagctgtggtgtctgccaaggtgtttgtggaccgggccaccaaccagagcaagtgcttcggctttgtgtcctttgacaaccccaccagcgcccagacagccatccaggccatgaatggcttccagatcggcatgaagaggctgaaggtgcagctgaagaggcccaaggatgccaaccggccctactag

SEQ ID NO: 68374 - DNA, 1035 bp, Artificial Sequence
  derived and/or modified sequence
atgaaccggcccatccaggtgaagcccgccgccagcgagggccggggagaagatcggaaactgtttgtagggatgcttggcaagcagcaaggcgaggaagacgtgagacggctgtttcagcctttcggacatattgaggaatgcacagttctacggagccctgacggaacatctaaagggtgcgcttttgtaaaatttggctcccagggcgaagcccaggcggctatcagaggccttcacggctctcgcaccatggccggagcttcatccagtctggtcgtgaagctggcagacactgatagagaacgggccctgcgacgcatgcagcagatggccgggcacctcggggccttccatcccgcacctcttccactgggggcatgtggtgcctatacaacagcgatactgcagcatcaggcggcgctcctggccgcagcccaaggccccgggcttgggcccgtagcagcggtggccgctcagatgcagcatgttgctgctttttccctcgtcgcggcgcctcttcttcctgctgcagctaattcgcctccaggcagcggtccaggtacacttcccggactgcctgcacctattggcgtgaacgggtttggccctctgacaccccaaaccaatggccaacccgggagtgacaccttatacaataatggattatcaccatatcccgctgcatatcctagcgcttatgcccctgtgtctaccgcattccctcaacagcctagcgctctcccacagcagcagcgtgaaggtcctgaagggtgcaacctgttcatataccacctcccccaggagttcggggacgccgagctgatccaaacatttttgcctttcggcgcagtggtgagtgctaaggtcttcgtcgacagggctaccaaccagagcaagtgctttggctttgtgtccttcgataatcccacctctgctcagaccgcaattcaggcgatgaatggcttccagatcgggatgaaaagattgaaggtacagctaaagagaccgaaagacgccaatagaccctattag

SEQ ID NO: 68375 - DNA, 1035 bp, Artificial Sequence
  derived and/or modified sequence
atgaaccgcccaattcaagtcaagcccgctgcttcggaaggcaggggggaggaccggaagcttttcgtggggatgctgggcaagcagcagggcgaggaagatgtaagacggctatttcagccgttcgggcacatcgaagagtgtaccgtcctcagatccccagatggtacatccaagggctgcgcatttgtaaagttcggaagtcaaggagaggcccaggctgctattcggggactacacggctccagaacgatggctggcgcttcttcgtcattagttgtcaagttagctgataccgatagagagagggcactgcgcagaatgcagcagatggctggtcatctcggcgcattccaccccgctccgttgccccttggagcatgcggtgcctacactacagccatcttacaacaccaggccgctctgctcgccgctgcgcagggacccggactgggacccgttgcggctgtcgccgcacagatgcagcatgttgctgccttttcactggtagccgctccactccttccggcagccgcaaattcccctcctggctccgggcctggcactctgccagggctgcctgccccaatcggtgttaacgggtttggaccactcaccccacagacaaatggacagcccggtagcgataccttatacaacaacggcctctctccgtacccggctgcatatccatccgcctatgctccagtctccaccgccttcccccagcagccatctgcgctcccgcagcagcagcgcgaaggtccagaagggtgtaacctcttcatttatcacctgccacaggaattcggtgacgcggagcttatccagacatttctccctttcggagccgttgtatcagcgaaagtgtttgtggacagagccaccaaccagagtaaatgctttggcttcgtgagcttcgacaacccaacaagtgcccaaacggctatccaggccatgaatggcttccagatcggcatgaaaagactgaaggtacagctgaagcgtcctaaggatgccaaccgcccttattag

SEQ ID NO: 68376 - DNA, 2854 bp, Artificial Sequence
  derived and/or modified sequence
atcagtaccccttcctccatgaacgggaaggccgctgtttttccctcctggcactcagctgcctgccccccaacaataattcctcacctcccacgcacccagctcttggcagtttacaaagaccttttgcgtccccattacctcatgtgatccccacaacacccatgagaggaagatgaatcgtccgatccaagtgaagccagctgccagtgagggccgaggagaggaccgaaagctgtttgtggggatgctgggcaagcagcagggtgaggaggacgtcagacgcctgttccagccctttggccacatcgaggagtgcacggtcctgcggagtcctgacggcaccagtaaaggctgtgcctttgtgaagttcgggagtcaaggggaagctcaggcggccatccggggtctgcacggcagccggaccatggcgggcgcctcgtccagcctcgtggtcaagctggcggacaccgaccgggagcgcgcgctgcggcggatgcagcagatggccggccacctgggcgccttccaccccgcgccactgccgctaggggcctgcggcgcctacaccacggcgatcctgcagcaccaggcggccctgctggcggcggcacagggcccaggcctaggcccggtggcggcagtggcggcccagatgcaacacgtggcggcctttagcctggtagctgcgcctctgttgcccgcggcagccaactccccgcctggcagcggccctggcaccctcccaggtcttccggcgcccatcggggtcaatggattcggccctctgaccccccagaccaatggccagccgggctccgacacgctctacaataacgggctctccccttatccagcagcctatccgtcggcctatgccccagtgagcacagcttttccccagcagccttcagccctgccccagcagcagagagaaggccccgaaggctgtaacctcttcatctatcacctgcctcaggagtttggtgatgcggaactcatacagacattcctgccctttggagccgttgtctctgctaaagtctttgtggatcgagccaccaaccagagcaagtgttttgggtttgttagttttgacaatccaactagtgcccagactgctattcaggcgatgaatggctttcaaattggcatgaagaggctcaaggtccagctaaagcggcccaaggatgccaaccggccttactgacctgctttcactgaccagccacagaaagaaacagaagagtgagaagaaaggagaggaaaagcacagaaacgcttgagcagcccttcccgaaggagcagctgcggacggaggtggatcggacccaaggctggtgcctggggctaaggccactctaaggattgtttttatcaagtgggttgttctgtgcctgcagcatagagcgcaggctggcagagcaaatagggctggtgaggagtgactgtccaggggaaccagcagagggcgttgggggtgccaagggcttctccgcaagggaagcccagatttacttctttcaaaatcatatcattccttagagtttagggaccaaaggactattgcttttttaagaatatatatatctatataaattaaaacaaagaaacaaacaaacaaaaaacaagacaaacaactacaaaaaaagacagtatagagtctcataaaagctgcctttaaatatccctaggagacagggtgaaggagacccttgacagccccagcctaggcagatgggggctgtggaaagattgttctgtgtctcattccctcttaagccactcccccaccctgcccttttaaaaataattaaggatttgaggtctaggctcacatgcaggtaatgagaacgttatggaagcagtgaacccacaatccacaatccccaaactcagagtgcatcccagaagaggccccaggcagagctcaggttggccctggcctttgccatcccgggaggccccctagccagcaagagtgggattgcctttcctgtggaaccactgcttccccaggcgggaagaaagagggagttctggccacctgagcctttcccttgccaatccaggtagacagaggccctgcctttggctgagctgagacacctcctgtttcccttccccttgaaccagtcccagtgtccccttgctccaggctaccttctgtctcttagtctaagtttgcccacctgtaaagtagattcaggatatctgtagagggctgtgacaacagacttggaaggtttgctactgtatatactgccattgagaaggggaaatttttcaatatgtagaagcttcagaattagaggtccctctttaccccagacctgggagggaagtagatgttttgccaaaatacttcttcattcctttaaaaactacatctttcctatgcaagagtgtctcacatgtgcttaaccgaggtgcttctagttggtgagcagtgttgagcttagaagtggtgtgtgctctgtctgtctgtctttgtctgtctgttgtatacagtgggtgccatataaagctgatcaatggtggtgcttcctgcctgcttctgtgagatgggcaaaagattcagcttagaacaccatgactcaccttgccttggtcagcctttcctgggcctgtagggccttgcacatatttttcccaggaggatttcccctccaccccacaggcatggatcagcttggtctgaggccccagctgtgtggggtccctctaatccccagatgttgctgaggctgaaggcctctgatctgataacatgtcagatagtaaaagatgtgggggtgggggtggagggctcctccttcataacagtttctaagaaaacttgttcccacctgtt

SEQ ID NO: 68377 - DNA, 1035 bp, Artificial Sequence
  derived and/or modified sequence
atgaacagacccatccaggtgaagcccgccgccagcgagggcagaggcgaggacagaaagctgttcgtgggcatgctgggcaagcagcagggcgaggaggacgtgagaagactgttccagcccttcggccacatcgaggagtgcaccgtgctgagaagccccgacggcaccagcaagggctgcgccttcgtgaagttcggcagccagggcgaggcccaggccgccatcagaggcctgcacggcagcagaaccatggccggcgccagcagcagcctggtggtgaagctggccgacaccgacagagagagagccctgagaagaatgcagcagatggccggccacctgggcgccttccaccccgcccccctgcccctgggcgcctgcggcgcctacaccaccgccatcctgcagcaccaggccgccctgctggccgccgcccagggccccggcctgggccccgtggccgccgtggccgcccagatgcagcacgtggccgccttcagcctggtggccgcccccctgctgcccgccgccgccaacagcccccccggcagcggccccggcaccctgcccggcctgcccgcccccatcggcgtgaacggcttcggccccctgaccccccagaccaacggccagcccggcagcgacaccctgtacaacaacggcctgagcccctaccccgccgcctaccccagcgcctacgcccccgtgagcaccgccttcccccagcagcccagcgccctgccccagcagcagagagagggccccgagggctgcaacctgttcatctaccacctgccccaggagttcggcgacgccgagctgatccagaccttcctgcccttcggcgccgtggtgagcgccaaggtgttcgtggacagagccaccaaccagagcaagtgcttcggcttcgtgagcttcgacaaccccaccagcgcccagaccgccatccaggccatgaacggcttccagatcggcatgaagagactgaaggtgcagctgaagagacccaaggacgccaacagaccctactag

SEQ ID NO: 68378 - protein, 108 aa, Artificial Sequence
  derived and/or modified sequence
MKSCGKRFHDEVGKFRFLNELIKVVSPKYLGSRTSEKVKNKILELLYSWTVGLPEEVKIAEAYQMLKKQGIVKSDPKLPDDTTFPLPPPRPKNVIFEDEEKSKMLARL

SEQ ID NO: 68379 - protein, 167 aa, Artificial Sequence
  derived and/or modified sequence
MSLLRSLRVFLVARTGSYPAGSLLRQSPQPRHTFYAGPRLSASASSKELLMKLRRKTGYSFVNCKKALETCGGDLKQAEIWLHKEAQKEGWSKAAKLQGRKTKEGLIGLLQEGNTTVLVEVNCETDFVSRNLKFQLLVQQVALGTMMHCQTLKDQPSAYSKENWEKT

SEQ ID NO: 68380 - DNA, 504 bp, Artificial Sequence
  derived and/or modified sequence
atgagcctgctgagaagcctgagagtgttcctggtggccagaaccggcagctaccccgccggcagcctgctgagacagagcccccagcccagacacaccttctacgccggccccagactgagcgccagcgccagcagcaaggagctgctgatgaagctgagaagaaagaccggctacagcttcgtgaactgcaagaaggccctggagacctgcggcggcgacctgaagcaggccgagatctggctgcacaaggaggcccagaaggagggctggagcaaggccgccaagctgcagggcagaaagaccaaggagggcctgatcggcctgctgcaggagggcaacaccaccgtgctggtggaggtgaactgcgagaccgacttcgtgagcagaaacctgaagttccagctgctggtgcagcaggtggccctgggcaccatgatgcactgccagaccctgaaggaccagcccagcgcctacagcaaggagaactgggagaagacctag

SEQ ID NO: 68381 - DNA, 504 bp, Artificial Sequence
  derived and/or modified sequence
atgtcattactgcggtctttgcgcgtctttctagtggctaggacagggtcctatcccgcgggatccctgctgcggcaatctcctcagccccgccatacattctacgcaggcccacggttatcagccagcgctagtagcaaggaactccttatgaaactcagacggaaaacaggatattctttcgtgaattgtaaaaaggcccttgagacatgcgggggcgacctcaagcaagctgaaatctggctccacaaggaggcacagaaggagggctggagtaaggccgcaaaactgcaggggcggaagaccaaagaaggacttataggactgctgcaggagggcaatactaccgtcctggtggaggtgaactgcgagacagatttcgtttcgcggaacttgaaattccagctccttgttcaacaggtcgccttggggacgatgatgcactgccagacactgaaggaccagcctagcgcttactctaaagaaaactgggaaaagacctag

SEQ ID NO: 68382 - DNA, 504 bp, Artificial Sequence
  derived and/or modified sequence
atgagcctgctgcggagcctgcgggtcttcctggtggccaggacaggcagctacccagctggcagcctgctgcggcagagcccccagcccaggcacaccttctacgccggcccccggctgagcgccagcgccagcagcaaggagctgctgatgaagctgcggaggaagacaggctacagctttgtgaactgcaagaaggccctggagacctgtggcggggacctgaagcaggccgagatctggctgcacaaggaggcccagaaggagggctggagcaaggccgccaagctgcagggcaggaagaccaaggagggcctgattggcctgctgcaggagggcaacaccaccgtgctggtggaggtgaactgtgaaacagactttgtgtccaggaacctgaagttccagctgctggtgcagcaggtggccctgggcaccatgatgcactgccagaccctgaaggaccagcccagcgcctacagcaaggagaactgggagaagacctag

SEQ ID NO: 68383 - DNA, 504 bp, Artificial Sequence
  derived and/or modified sequence
atgagcctgctgcggagcctgcgggtgttcctggtggcccggaccggctcctaccccgccggaagtctgttgcggcagtctccacaaccaagacatacattttatgcaggccctcggctgtccgcatcagcatcttcaaaagagctgcttatgaagctcaggagaaagaccgggtacagcttcgtgaattgcaagaaggccttagaaacgtgcgggggagacttaaaacaggcggagatttggttgcacaaggaggctcagaaagagggctggtctaaagccgcaaagctgcagggacgcaagacaaaagagggacttataggattgctccaggagggtaacacaactgtgttggtggaagtcaattgcgaaactgatttcgtgtcgagaaacctcaagttccagttattagttcagcaggtcgccctggggaccatgatgcattgtcaaacactgaaggaccagcctagtgcttattcgaaggagaactgggagaaaacctag

SEQ ID NO: 68384 - DNA, 504 bp, Artificial Sequence
  derived and/or modified sequence
atgtcacttctgaggtccctgcgtgtgtttctggttgcacggactggatcttacccggctggaagtttgttgcggcaaagcccacagcctaggcacactttttatgcagggcctcggctttccgcaagcgcttcgtctaaagagctgttaatgaagcttcgaagaaagacaggctatagcttcgttaattgcaaaaaggcgctagaaacttgtgggggagacttgaaacaggcagagatttggctacacaaagaagctcagaaagagggatggtctaaggccgcaaaactgcagggacggaaaaccaaggaaggactcatcggcctcctgcaagagggaaacacaacagtgctcgtagaagtaaattgcgaaactgacttcgtgtcccgcaacctcaaattccagctgttagtacagcaggtagctctcggcactatgatgcactgtcagacattaaaagaccagcccagcgcttattcaaaagaaaactgggagaagacttag

SEQ ID NO: 68385 - protein, 346 aa, Artificial Sequence
  derived and/or modified sequence
MSLLRSLRVFLVARTGSYPAGSLLRQSPQPRHTFYAGPRLSASASSKELLMKLRRKTGYSFVNCKKALETCGGDLKQAEIWLHKEAQKEGWSKAAKLQGRKTKEGLIGLLQEGNTTVLVEVNCETDFVSRNLKFQLLVQQVALGTMMHCQTLKDQPSAYSKVQWLTPVNLALWEAEAGGSLEGFLNSSELSGLPAGPDREGSLKDQLALAIGKLGENMILKRAAWVKVPSGFYVGSYVHGAMQSPSLHKLVLGKYGALVICETSEQKTNLEDVGRRLGQHVVGMAPLSVGSLDDEPGGEAETKMLSQPYLLDPSITLGQYVQPQGVSVVDFVRFECGEGEEAAETE

SEQ ID NO: 68386 - DNA, 1041 bp, Artificial Sequence
  derived and/or modified sequence
atgagcctgctgagaagcctgagagtgttcctggtggccagaaccggcagctaccccgccggcagcctgctgagacagagcccccagcccagacacaccttctacgccggccccagactgagcgccagcgccagcagcaaggagctgctgatgaagctgagaagaaagaccggctacagcttcgtgaactgcaagaaggccctggagacctgcggcggcgacctgaagcaggccgagatctggctgcacaaggaggcccagaaggagggctggagcaaggccgccaagctgcagggcagaaagaccaaggagggcctgatcggcctgctgcaggagggcaacaccaccgtgctggtggaggtgaactgcgagaccgacttcgtgagcagaaacctgaagttccagctgctggtgcagcaggtggccctgggcaccatgatgcactgccagaccctgaaggaccagcccagcgcctacagcaaggtgcagtggctgacccccgtgaacctggccctgtgggaggccgaggccggcggcagcctggagggcttcctgaacagcagcgagctgagcggcctgcccgccggccccgacagagagggcagcctgaaggaccagctggccctggccatcggcaagctgggcgagaacatgatcctgaagagagccgcctgggtgaaggtgcccagcggcttctacgtgggcagctacgtgcacggcgccatgcagagccccagcctgcacaagctggtgctgggcaagtacggcgccctggtgatctgcgagaccagcgagcagaagaccaacctggaggacgtgggcagaagactgggccagcacgtggtgggcatggcccccctgagcgtgggcagcctggacgacgagcccggcggcgaggccgagaccaagatgctgagccagccctacctgctggaccccagcatcaccctgggccagtacgtgcagccccagggcgtgagcgtggtggacttcgtgagattcgagtgcggcgagggcgaggaggccgccgagaccgagtag

SEQ ID NO: 68387 - DNA, 1041 bp, Artificial Sequence
  derived and/or modified sequence
atgagcttactgcggagcctcagagtctttctcgtcgcccggaccggttcctatccagccgggagccttctgcggcagagtccacagcctaggcatactttttacgcaggcccacgcctctctgcctctgctagttccaaagaactgcttatgaagctcaggagaaagacaggctactcgtttgtgaactgtaagaaagccctggaaacctgcgggggcgacctcaaacaggctgaaatctggctacataaagaggcgcagaaggaggggtggtccaaggctgctaaactgcaggggcggaaaacaaaagagggcctcatcggactcctccaggaaggaaatacgaccgtactggtcgaggtgaattgcgaaactgacttcgtctccaggaacctcaaatttcaactgctagtccagcaagtcgctctgggcactatgatgcactgtcagaccctgaaggatcagccaagcgcatattctaaagtgcagtggctgactccagtcaaccttgccctgtgggaagcagaggcaggagggtctctggagggtttcctgaacagcagtgaactttctggtctgccagccgggcctgatcgagaaggatccctgaaggatcaactggccctggccatcggaaaacttggagagaacatgatactcaagcgtgccgcgtgggttaaggttccaagtggcttctatgtcggcagctatgtacacggtgcaatgcagtccccttcgcttcacaagcttgtcctggggaaatacggtgctttggtgatttgtgaaacgagcgaacagaagacaaacttggaggatgtggggcggaggttagggcagcatgtggttgggatggcgcctctgtccgttgggtcattggacgatgagcctggaggtgaagcggagaccaaaatgctttctcagccttatctgcttgacccaagtatcacactgggccagtatgtgcagccccagggggtgtcggtcgtcgactttgtgagatttgagtgtggcgagggagaggaagccgccgaaactgagtag

SEQ ID NO: 68388 - DNA, 1041 bp, Artificial Sequence
  derived and/or modified sequence
atgagcctgctgcggagcctgcgggtcttcctggtggccaggacaggcagctacccagctggcagcctgctgcggcagagcccccagcccaggcacaccttctacgccggcccccggctgagcgccagcgccagcagcaaggagctgctgatgaagctgcggaggaagacaggctacagctttgtgaactgcaagaaggccctggagacctgtggcggggacctgaagcaggccgagatctggctgcacaaggaggcccagaaggagggctggagcaaggccgccaagctgcagggcaggaagaccaaggagggcctgattggcctgctgcaggagggcaacaccaccgtgctggtggaggtgaactgtgaaacagactttgtgtccaggaacctgaagttccagctgctggtgcagcaggtggccctgggcaccatgatgcactgccagaccctgaaggaccagcccagcgcctacagcaaggtgcagtggctgacccctgtgaacctggccctgtgggaggccgaggccggcggcagcctggagggcttcctgaacagcagcgagctgagcggcctgcctgctggccctgaccgggagggcagcctgaaggaccagctggccctggccatcggcaagctgggggagaacatgatcctgaagagagctgcctgggtgaaggtgcccagcggcttctacgtgggcagctatgtgcatggagccatgcagagccccagcctgcacaagctggtgctgggcaagtatggagccctggtgatctgtgagaccagcgagcagaagaccaacctggaggatgtgggccgccgcctgggccagcacgtggtgggcatggcccccctgtctgtgggcagcctggatgatgagcccggcggggaggccgagaccaagatgctgagccagccctacctgctggaccccagcatcaccctgggccagtatgtgcagccccagggcgtgtctgtggtggactttgtgcgctttgaatgtggggagggggaggaggccgctgagacagaatag

SEQ ID NO: 68389 - DNA, 1041 bp, Artificial Sequence
  derived and/or modified sequence
atgagcctgctgcggagcctgcgggtgttcctggtggcccggaccggaagctaccccgccgggagtctcctccggcagagcccacaaccaagacatacattctatgctggcccacgcctgagcgcgtctgcctcttcaaaggagttgctgatgaagctacgtcgaaagactggttactccttcgtgaattgcaagaaagccttggaaacatgtggcggcgaccttaagcaggcagagatttggctgcacaaagaagcccagaaggagggatggagtaaggccgcaaagctgcaggggcgtaagacaaaagaggggttgattggactgctgcaggagggtaataccacagtgctcgtggaggtgaactgtgaaaccgattttgtttccagaaatctgaagtttcagttgctggtgcagcaggtggctttgggcacgatgatgcattgtcagaccctgaaggatcagccctctgcctactcaaaagttcagtggctgacacctgttaatttggcactgtgggaggccgaagccggaggctctttagaaggatttctaaatagcagcgagctgagcgggctccccgcagggccagaccgggaaggtagcctcaaggaccaacttgcactagcgatcggcaaattgggggaaaacatgattctgaagagagctgcatgggtgaaagtccctagtggtttctacgtgggtagctacgtgcacggggccatgcagtccccatctctacacaaactggtcctcggcaagtatggggcgttggtcatttgcgaaacgtctgagcaaaagacaaatctggaagatgtcgggagacggttgggccagcatgtggtgggtatggccccgctaagtgtagggagcctggatgacgagccagggggcgaggccgaaactaagatgttgtcacagccctacttactggacccgtctattactctgggacagtacgtccaacctcagggggtgtccgttgtcgactttgtgaggtttgagtgcggtgagggagaagaggccgccgaaaccgagtag

SEQ ID NO: 68390 - DNA, 1041 bp, Artificial Sequence
  derived and/or modified sequence
atgtccctgctgaggagcctccgggtgtttctcgtggccagaactgggagttatcctgctggtagccttcttcggcaatccccacaacctcggcataccttttacgcaggacctagactgtcagcttcagccagtagcaaggaactcctcatgaagctgagacgtaaaacaggatactcctttgtcaattgcaaaaaagctttggagacatgcggcggtgacctcaagcaggctgagatttggctgcacaaagaggcacagaaggaaggatggagcaaggctgctaaactccaggggagaaagaccaaggaaggcctcattggcctgctccaagagggcaacacaactgtgctggtggaagtcaattgcgagacggactttgtgagtcggaatctcaagttccagttgttggttcagcaggtggccctggggaccatgatgcattgtcaaacattaaaagatcaaccctccgcatattctaaggtgcagtggttaactcccgtcaacctcgccctgtgggaggcagaggcagggggttccctggaaggatttctgaattcttccgaactctcaggacttcctgccggacctgacagggaaggcagcttaaaggatcagttggccttagcgatcggtaagctgggcgagaatatgattcttaaacgagctgcctgggtgaaagtgccctctgggttctacgtcgggtcctacgttcacggggctatgcaatccccatctctacacaaactcgtcttaggtaagtacggcgctctggtcatttgcgagaccagtgagcagaaaacaaacctggaggatgtgggtaggagattaggccagcatgtggtggggatggcccctctgtccgtgggctccctggatgacgaacctggcggtgaggccgagactaagatgctttcccagccatacctcctcgatcccagtatcacactcggacagtatgtccagccacagggcgtctctgtcgtcgactttgttagattcgagtgcggtgaaggggaagaggcggctgaaactgagtag

SEQ ID NO: 68391 - DNA, 1218 bp, Artificial Sequence
  derived and/or modified sequence
ggagggtgtttatcgcggctagagagatgtcgctgctgcggtcgctgcgcgtgtttctggtcgcgcggaccgggagctacccggctgggtctcttctgcgtcagtcgccccagccaaggcacacattttatgctgggccccgtctgtctgcctcggcctccagcaaggagctcctcatgaagctgcggcggaaaacaggctactcctttgtaaattgcaagaaagctctggagacttgtggcggggacctcaaacaggcagagatctggctccacaaggaggcccagaaggagggctggagcaaagctgccaagctccaagggaggaagaccaaagaaggcctgattgggctgttgcaggaaggaaacacaactgtattagtagaggtaaactgtgagacagattttgtttctagaaatttaaaatttcaactgttggtccagcaagtagcccttggaaccatgatgcattgtcagaccctaaaggatcaaccctctgcatacagtaaagtgcagtggctcacgcctgtaaacctagcactttgggaggctgaagcaggtggatcacttgagggtttcttgaattcctctgagctttctggacttccagctgggcctgacagagaaggctcactcaaggatcagttggctttagcaattggaaaactgggagaaaacatgattcttaaacgagctgcatgggtgaaggtgccatctgggttctacgttggctcttatgtccacggagcaatgcagagtccctcacttcacaagctggtgctggggaagtatggggccctggtcatctgtgagacgtctgaacagaaaacaaaccttgaagacgttggccgccgccttgggcagcatgtggtgggcatggcccccctctctgttggctccctggacgatgagcctgggggagaggcagagactaagatgctgtcccagccgtatttgctggatccctccattaccttggggcagtatgtgcagcctcagggggtgtcggtagtagactttgtgcggtttgaatgtggagaaggtgaagaggcagcagaaactgaataggttccagagacttttggcccaggaggaatatttacttttagctctggacatcattacaaaaaggaatatttcccaaacctcttcagaccgagaatgcatgggtaaaattattaaatagttgtataataaaaataattttttccttgtttgc

SEQ ID NO: 68392 - protein, 215 aa, Artificial Sequence
  derived and/or modified sequence
MSLLRSLRVFLVARTGSYPAGSLLRQSPQPRHTFYAGPRLSASASSKELLMKLRRKTGYSFVNCKKALETCGGDLKQAEIWLHKEAQKEGWSKAAKLQGRKTKEGLIGLLQEGNTTVLVEVNCETDFVSRNLKFQLLVQQVALGTMMHCQTLKDQPSAYSKGFLNSSELSGLPAGPDREGSLKDQLALAIGLPFQIGAVSELQLPESNFLQNTSS

SEQ ID NO: 68393 - DNA, 648 bp, Artificial Sequence
  derived and/or modified sequence
atgagcctgctgagaagcctgagagtgttcctggtggccagaaccggcagctaccccgccggcagcctgctgagacagagcccccagcccagacacaccttctacgccggccccagactgagcgccagcgccagcagcaaggagctgctgatgaagctgagaagaaagaccggctacagcttcgtgaactgcaagaaggccctggagacctgcggcggcgacctgaagcaggccgagatctggctgcacaaggaggcccagaaggagggctggagcaaggccgccaagctgcagggcagaaagaccaaggagggcctgatcggcctgctgcaggagggcaacaccaccgtgctggtggaggtgaactgcgagaccgacttcgtgagcagaaacctgaagttccagctgctggtgcagcaggtggccctgggcaccatgatgcactgccagaccctgaaggaccagcccagcgcctacagcaagggcttcctgaacagcagcgagctgagcggcctgcccgccggccccgacagagagggcagcctgaaggaccagctggccctggccatcggcctgcccttccagatcggcgccgtgagcgagctgcagctgcccgagagcaacttcctgcagaacaccagcagctag

SEQ ID NO: 68394 - DNA, 648 bp, Artificial Sequence
  derived and/or modified sequence
atgagtctgttgagaagccttagagtgttcctggtcgcaagaacagggagttatcccgcaggttctctgctgagacaaagcccgcaaccccgacatacattctacgctggtcccagactgagcgcctcagctagtagcaaagagctgctgatgaagctgaggaggaaaactgggtatagctttgtgaactgcaaaaaagccctcgaaacctgtggcggcgatctcaaacaggctgaaatctggcttcacaaagaagcacaaaaagagggatggtccaaggctgccaagcttcaaggcagaaagactaaagaggggcttattggccttctacaggaggggaatacgactgtgttggttgaagtgaattgcgaaacagatttcgtaagccggaacctgaagtttcagcttcttgtccagcaagttgccctcgggaccatgatgcattgtcagacgctgaaggatcagcctagcgcttactctaagggattcctcaattcttcggagctaagtggactccctgccggccccgacagggaaggatccctgaaggaccaactcgctttagccattggacttccttttcagattggcgccgtctcagaacttcagctcccagaatcaaacttccttcagaatacttcaagttag

SEQ ID NO: 68395 - DNA, 648 bp, Artificial Sequence
  derived and/or modified sequence
atgagcctgctgcggagcctgcgggtcttcctggtggccaggacaggcagctacccagctggcagcctgctgcggcagagcccccagcccaggcacaccttctacgccggcccccggctgagcgccagcgccagcagcaaggagctgctgatgaagctgcggaggaagacaggctacagctttgtgaactgcaagaaggccctggagacctgtggcggggacctgaagcaggccgagatctggctgcacaaggaggcccagaaggagggctggagcaaggccgccaagctgcagggcaggaagaccaaggagggcctgattggcctgctgcaggagggcaacaccaccgtgctggtggaggtgaactgtgaaacagactttgtgtccaggaacctgaagttccagctgctggtgcagcaggtggccctgggcaccatgatgcactgccagaccctgaaggaccagcccagcgcctacagcaagggcttcctgaacagcagcgagctgagcggcctgcctgctggccctgaccgggagggcagcctgaaggaccagctggccctggccatcggcctgcccttccagatcggggctgtgtctgagctgcagctgcctgagagcaacttcctgcagaacaccagcagctag

SEQ ID NO: 68396 - DNA, 648 bp, Artificial Sequence
  derived and/or modified sequence
atgagcctgctgcggagcctgcgggtgttcctggtggcccggaccggtagttatcccgcaggtagcttgcttcgacagtcaccgcaacccaggcatacattttacgctggtcctagactgtccgcctccgcttcaagtaaggagctgttgatgaagctcaggagaaagacagggtattctttcgttaactgcaagaaggctctggagacttgcgggggcgacttgaaacaggctgagatttggctgcataaggaagcacagaaggagggatggagcaaagccgccaagttacaagggaggaagactaaggagggcctcattggcctgctgcaggaaggcaataccactgtcttggttgaggtcaattgtgagaccgattttgtgagtcgaaatctgaagttccagctgctggtgcagcaggtggccctggggacaatgatgcattgtcagactttgaaagaccagccatcggcctattccaagggctttctcaattcctccgagctttctggcttgcctgctgggcctgatagagaagggtccctgaaggaccagctggcactggcaatcggtttaccatttcagatcggggccgtgagtgaactgcagttgcctgagtccaactttctgcagaacacctccagctag

SEQ ID NO: 68397 - DNA, 648 bp, Artificial Sequence
  derived and/or modified sequence
atgtctctgctgcgaagcttaagagtgttcctcgtggcgaggacaggaagctacccagctgggagtcttctacggcagtcacctcagccacgccacactttttatgcaggacctcgcctgtctgcctctgcatcaagcaaggagctgttaatgaagttgcgacggaaaacaggatactcctttgtaaattgcaaaaaggctctggaaacttgtgggggagacctcaaacaggctgagatttggctccacaaggaggcccagaaggagggctggtccaaagccgctaaacttcagggtaggaaaaccaaggagggtctgatcggcttgctgcaggagggcaatacaactgttttggtcgaagtaaattgcgagaccgacttcgtgagccgcaaccttaagttccagctcctcgtgcagcaggttgctctgggcacaatgatgcactgtcaaacactgaaagatcagccaagcgcctactcaaagggctttctcaactcctcagagcttagtggacttccggcagggcctgaccgggagggtagcctgaaagaccagctggcactggctattggtttgcctttccagatcggggcagtatcagaactgcaactgcctgaatccaactttctgcagaatacaagctcttag

SEQ ID NO: 68398 - DNA, 930 bp, Artificial Sequence
  derived and/or modified sequence
gtaggtttgttgcctcaccagtgcgcccgccggagggtgtttatcgcggctagagagatgtcgctgctgcggtcgctgcgcgtgtttctggtcgcgcggaccgggagctacccggctgggtctcttctgcgtcagtcgccccagccaaggcacacattttatgctgggccccgtctgtctgcctcggcctccagcaaggagctcctcatgaagctgcggcggaaaacaggctactcctttgtaaattgcaagaaagctctggagacttgtggcggggacctcaaacaggcagagatctggctccacaaggaggcccagaaggagggctggagcaaagctgccaagctccaagggaggaagaccaaagaaggcctgattgggctgttgcaggaaggaaacacaactgtattagtagaggtaaactgtgagacagattttgtttctagaaatttaaaatttcaactgttggtccagcaagtagcccttggaaccatgatgcattgtcagaccctaaaggatcaaccctctgcatacagtaaaggtttcttgaattcctctgagctttctggacttccagctgggcctgacagagaaggctcactcaaggatcagttggctttagcaattggtctgcctttccaaattggagctgtctctgaacttcagcttcctgaatccaacttcttgcagaacacctcctcttgactgctctaagcaccttaaaaataacaccttcaggatgtagctcttctttactaaacttgtatctgagtctccacttttgataggtggtatctatctagtcacctaaggcagaagcctgagagtttcctagaaaccccccatatccaatgagtcaccagggctgaccaactttacctcctaagcatttgtcaaatctgtcaccatccctccatccctactccactg

SEQ ID NO: 68399 - protein, 984 aa, Artificial Sequence
  derived and/or modified sequence
MAGNDCGALLDEELSSFFLNYLADTQGGGSGEEQLYADFPELDLSQLDASDFDSATCFGELQWCPENSETEPNQYSPDDSELFQIDSENEALLAELTKTLDDIPEDDVGLAAFPALDGGDALSCTSASPAPSSAPPSPAPEKPSAPAPEVDELSLADSTQDKKAPMMQSQSRSCTELHKHLTSAQCCLQDRGLQPPCLQSPRLPAKEDKEPGEDCPSPQPAPASPRDSLALGRADPGAPVSQEDMQAMVQLIRYMHTYCLPQRKLPPQTPEPLPKACSNPSQQVRSRPWSRHHSKASWAEFSILRELLAQDVLCDVSKPYRLATPVYASLTPRSRPRPPKDSQASPGRPSSVEEVRIAASPKSTGPRPSLRPLRLEVKREVRRPARLQQQEEEDEEEEEEEEEEEKEEEEEWGRKRPGRGLPWTKLGRKLESSVCPVRRSRRLNPELGPWLTFADEPLVPSEPQGALPSLCLAPKAYDVERELGSPTDEDSGQDQQLLRGPQIPALESPCESGCGDMDEDPSCPQLPPRDSPRCLMLALSQSDPTFGKKSFEQTLTVELCGTAGLTPPTTPPYKPTEEDPFKPDIKHSLGKEIALSLPSPEGLSLKATPGAAHKLPKKHPERSELLSHLRHATAQPASQAGQKRPFSCSFGDHDYCQVLRPEGVLQRKVLRSWEPSGVHLEDWPQQGAPWAEAQAPGREEDRSCDAGAPPKDSTLLRDHEIRASLTKHFGLLETALEEEDLASCKSPEYDTVFEDSSSSSGESSFLPEEEEEEGEEEEEDDEEEDSGVSPTCSDHCPYQSPPSKANRQLCSRSRSSSGSSPCHSWSPATRRNFRCESRGPCSDRTPSIRHARKRREKAIGEGRVVYIQNLSSDMSSRELKRRFEVFGEIEECEVLTRNRRGEKYGFITYRCSEHAALSLTKGAALRKRNEPSFQLSYGGLRHFCWPRYTDYDSNSEEALPASGKSKYEAMDFDSLLKEAQQSLH

SEQ ID NO: 68400 - DNA, 2955 bp, Artificial Sequence
  derived and/or modified sequence
atggctggaaacgattgcggggccttgctggacgaggaactaagctctttttttctgaactacctggcagacactcaggggggtggttccggggaagagcaactttacgccgacttccctgagttagatttatcccagcttgacgctagtgattttgattcagctacgtgtttcggagaattgcagtggtgtcccgaaaactctgagactgagccaaatcagtacagtcccgacgactccgaactatttcagattgactccgaaaacgaggctttactggccgaactgaccaagacgctggacgacatcccagaagacgacgtgggactggcggcctttcctgctctggatgggggcgacgcattgagttgtaccagtgcgtcaccagcacccagctcggctccaccatcccccgcacctgaaaagcctagtgcaccggctcccgaggtggatgaactttcgctggcagattccacccaggataaaaaggctcccatgatgcagagccagtcccggtcctgcacagagctgcacaaacacctgacatcggcgcagtgctgcctgcaggacagagggctgcagcctccctgccttcaatctccccgcctgccagccaaagaggacaaagagcctggtgaagactgtccatccccgcagcctgctcccgcatcaccccgggactcccttgccctcggccgggccgatcccggagcccccgttagtcaggaggacatgcaggctatggtccagcttatccgatacatgcatacctactgcctgccgcagagaaagttgcctccccagacacctgagcccctgcccaaggcgtgcagtaatccatcccagcaggtacgatcaaggccttggtctcgtcaccactccaaggcaagctgggcagagttttccattcttagagagcttctggcccaggatgtgctctgcgacgtgagcaagccatacaggctggccacaccagtgtacgcatcccttacacctcgttctaggccaagaccccctaaagatagccaggcaagtccaggtaggcctagcagtgttgaggaggtcaggatagcagccagcccgaaaagcacaggcccccgaccctctttgcgcccactccgtctggaagtcaaacgagaggttcgacgcccggcacggctgcagcagcaggaggaagaggatgaggaggaggaggaagaggaggaagaggaggagaaggaggaagaggaagaatgggggagaaagagaccaggtcgtggccttccctggacgaaactggggcggaaactagagtctagcgtgtgtccagtgaggagatcacgtagacttaacccggaacttgggccctggttgacatttgccgacgagccgctcgtcccctccgaaccgcagggcgccctgccttcactctgcctggcccccaaggcttacgacgtcgaacgggaactggggtctcccaccgatgaggacagcgggcaggaccagcagctgctacgcgggcctcagattcccgccctggagtctccgtgcgaaagcggctgcggcgatatggatgaagacccttcttgccctcaactgcctccaagggattccccccgatgcctgatgctggccctgagccagagcgatcctacatttggaaaaaaatcttttgaacaaaccctcaccgttgaactgtgtgggaccgccggcctgaccccccccactacaccgccttacaagcccaccgaagaggatccattcaagcccgatattaagcattcactcggaaaagaaattgcgctttctcttccgtccccagaaggactgtcacttaaagccactccaggcgctgctcataagctgccaaaaaaacatccagaacgatctgaactgttgagccacctgaggcatgccacagcccaacccgccagccaggctggtcagaagcgcccgttcagctgcagctttggggatcatgattattgccaggtgctgaggcctgagggtgtcctgcagcgaaaagtccttcgttcttgggagcccagcggagtgcacttggaggactggccacagcaaggggcaccatgggcggaggcacaggcacccggccgtgaggaagaccgaagttgcgacgctggcgccccaccgaaggattccactctcctgcgtgatcatgagatccgggccagtttgaccaagcattttggccttctggagaccgcattggaggaagaggatttagcatcctgcaagagccctgagtacgacactgtgtttgaagactcttcctcctcctcaggagaatcttcatttttacctgaagaggaggaggaagagggcgaagaagaggaagaagatgatgaagaagaggatagcggcgtgagtcctacctgttccgatcattgtccataccagtctcccccttcgaaagctaataggcaattatgttcgaggtcaagatcgtcctccggcagttcaccctgccactcatggtccccggcaaccagaaggaacttcagatgtgaatctcgaggcccatgcagcgacagaaccccgtctatccgccacgctcgtaaaagaagagagaaggccatcggcgaaggtagggtggtgtatatccagaatctgagctctgatatgtcgtctcgagagctgaagcgccggtttgaggtgtttggcgaaatcgaggagtgtgaggtactcacacgaaatcgtaggggagaaaagtatggttttattacatatcggtgctctgaacacgccgctttgtcacttactaaaggcgccgcactgcggaagagaaacgaaccgtcattccagctgagctacggaggcctgcgacatttttgttggcctcggtataccgattatgattccaactcagaggaagccctgcccgcaagtggcaagtctaaatacgaagcgatggactttgatagcctcctcaaggaggcccaacagtccctgcactag

SEQ ID NO: 68401 - DNA, 2955 bp, Artificial Sequence
  derived and/or modified sequence
atggctggaaatgactgtggggccctgctggatgaggagctgagcagcttcttcctgaactacctggccgacacccagggcggcggcagcggggaggagcagctgtatgctgacttccctgagctggacctgagccagctggatgccagtgactttgacagcgccacctgcttcggggagctgcagtggtgcccagagaacagcgagacagagcccaaccagtacagcccagatgacagcgagctgttccagattgattctgaaaatgaggccctgctggccgagctgaccaagaccctggatgacatcccagaagatgatgtgggcctggccgccttccctgccctggatggaggagatgccctgagctgcaccagcgccagccctgcccccagcagcgccccacccagccctgcccctgagaagcccagcgccccagcccctgaggtggatgagctgagcctggccgacagcacccaggacaagaaggcccccatgatgcagagccagagccgcagctgcacagagctgcacaagcacctgaccagcgcccagtgctgcctgcaggaccggggcctgcagcccccctgcctgcagagcccccggctgcctgccaaggaggacaaggagcctggagaggactgccccagcccccagcctgccccagccagcccccgggacagcctggccctgggccgggctgaccccggggcccctgtgtcccaggaggacatgcaggccatggtgcagctgatccgctacatgcacacctactgcctgccccagaggaagctgcccccccagaccccagagcccctgcccaaggcctgcagcaaccccagccagcaggtgcgcagccggccctggagccgccaccacagcaaggcctcctgggccgagttcagcatcctgcgggagctgctggcccaggatgtgctgtgtgatgtgtccaagccctaccgcctggccacccctgtgtatgccagcctgacccccaggagccggccccggccccccaaggacagccaggccagccctggccggcccagctctgtggaggaggtgagaattgctgccagccccaagagcacaggcccccggcccagcctgcggcccctgcggctggaggtgaagcgggaggtgcggcggcctgcccggctgcagcagcaggaggaggaggatgaggaggaggaggaggaggaggaggaggaggagaaggaggaggaggaggagtggggcaggaagaggcctggccggggcctgccctggaccaagctgggcaggaagctggagagctctgtgtgccctgtgcggcgcagccggcggctgaaccctgagctgggcccctggctgacctttgctgatgagcccctggtgcccagcgagccccagggcgccctgcccagcctgtgcctggcccccaaggcctatgatgtggagcgggagctgggcagccccacagatgaagattctggccaggaccagcagctgctgcggggcccccagatcccagccctggagagcccctgtgagagcggctgtggggacatggatgaggaccccagctgcccccagctgcccccccgggacagcccccgctgcctgatgctggccctgagccagagcgaccccaccttcggcaagaagagctttgagcagaccctgactgtggagctgtgtggcacagctggcctgaccccacccaccaccccaccctacaagcccacagaggaggaccccttcaagccagacatcaagcacagcctgggcaaggagatcgccctgagcctgcccagccctgagggcctgagcctgaaggccaccccaggagctgcccacaagctgcccaagaagcaccctgagaggtctgagctgctgagccacctgcggcatgccacagcccagcctgccagccaggccggccagaagaggcccttcagctgcagctttggagaccatgactactgccaggtgctgcggcctgagggcgtgctgcagaggaaggtgctgcgctcctgggagcccagcggcgtgcacctggaggactggccccagcagggcgccccctgggccgaggcccaggcccctggccgggaggaggacaggagctgtgatgctggggccccacccaaggacagcaccctgctgcgggaccacgagatccgggccagcctgaccaagcacttcggcctgctggagacagccctggaggaggaggacctggccagctgcaagagcccagaatatgacacagtgtttgaggacagcagcagcagcagcggggagagcagcttcctgcctgaggaggaggaggaggagggggaggaggaggaggaggatgatgaggaggaggacagcggcgtgagccccacctgcagcgaccactgcccctaccagagcccccccagcaaggccaaccggcagctgtgcagccgcagccgcagcagcagcggcagcagcccctgccacagctggagccctgccaccaggaggaacttccgctgtgagagccggggcccctgcagcgacaggacccccagcatcagacatgccaggaagaggcgggagaaggccatcggggagggccgggtggtgtacatccagaacctgagcagtgacatgagcagccgggagctgaagagaagatttgaggtgtttggagaaattgaagaatgtgaggtgctgaccaggaacagaagaggagagaagtatggcttcatcacctaccgctgcagcgagcacgccgccctgagcctgaccaagggagctgccctgaggaagagaaatgagcccagcttccagctgtcctatggaggcctgcggcacttctgctggccccgctacacagattatgacagcaacagcgaggaggccctgcctgccagcggcaagagcaaatatgaggccatggactttgacagcctgctgaaggaggcccagcagagcctgcactag

SEQ ID NO: 68402 - DNA, 2955 bp, Artificial Sequence
  derived and/or modified sequence
atggccggcaacgactgcggcgccctgctggacgaggagctgagctcctttttcctcaactatctggccgatacgcagggcgggggatccggtgaagaacagctctacgctgacttccccgaattagacttgtcacaattggacgcctcagatttcgacagcgctacttgttttggggagttacagtggtgccctgaaaattccgagactgaaccgaaccaatacagtcccgatgatagcgaactttttcagattgacagtgagaacgaggcactccttgcagagctgacaaaaactcttgacgatatacccgaagatgacgtgggattggccgccttccctgcattggacgggggggatgccctgtcctgcacttccgcctcaccagcccctagttcagctcctccctcccccgctcctgagaagcccagtgcccccgcgccagaagtggacgaactgtctctggccgattccacacaagataaaaaggcacccatgatgcagagtcagtcgaggtcatgcaccgaactgcacaaacatctgacttctgctcagtgttgcctgcaggataggggattacagccaccatgtctgcagtccccaagattaccggccaaagaggataaagagcccggcgaggactgtccaagcccgcaacctgccccagcctcccctagggactctctggcattgggacgcgccgaccccggcgccccagtcagtcaggaagacatgcaggccatggtgcaactaatcaggtatatgcacacctactgtctgccacagaggaagcttccaccccaaacccctgaacctctgcctaaggcctgttcaaacccctcccagcaggtcaggtccaggccgtggtctcgtcaccattcaaaagccagttgggctgaattcagtatcctgagagagctcctggcccaggatgtattgtgcgacgtatctaagccctatcggctggcaaccccggtgtacgccagtctgactccaaggagccgcccacggcctccaaaagattcccaggccagccccgggcggccatcttccgtcgaggaagtgagaatagctgcatccccaaagtcaaccgggcctaggccttccctcagaccactgcggctcgaagtaaaacgggaggtccggcgcccagccagacttcagcaacaggaggaagaggatgaggaggaggaagaagaagaggaagaggaagagaaggaagaagaggaggaatggggacggaagcggcccggtcggggattgccttggactaaattgggccggaagcttgagtcgtccgtatgccccgtgcgccgaagccgccgcctgaatccagagctgggaccctggttgacatttgcggatgagccactcgtgccttcagaaccccagggtgccctgccctccctgtgtctcgcgcccaaggcctatgacgtcgagcgtgagctcggttcccccaccgacgaggactctgggcaggatcagcagctgctacgcggtccacagattcccgccttagagtccccttgcgagtccgggtgtggagacatggatgaggaccccagctgcccccagctgccgcccagggactcaccaagatgtctcatgctggccctgtcacaatctgaccccaccttcggaaagaaatccttcgaacagacattgacagtagaactgtgcggcactgctggcctaactccccccactacccccccctacaagcccactgaggaagacccctttaagcctgacatcaaacatagtctcggcaaagagatcgcactatccctcccttcacccgagggtctaagcctgaaggccacacctggcgctgcccataagctgcctaagaagcatccggagcgcagtgagctgctgagccatctgagacacgccaccgctcagccggcttcacaggccggacaaaagcgcccattctcctgttcctttggcgatcacgactattgtcaggtgctcagacctgagggcgtgttacagcgcaaggtccttaggtcatgggaaccctctggtgtgcacctagaggactggccacagcagggggcgccttgggcagaagcccaagcacccggccgagaggaagacaggtcctgcgatgctggcgcccctccgaaggatagcaccctgctgcgggaccacgaaatccgcgcatctctgaccaaacacttcgggctccttgaaacggcgcttgaggaggaagatctcgcttcttgtaaaagtccagaatacgacaccgtcttcgaagacagtagttcaagctccggcgaatcctcctttctccctgaagaggaggaggaagaaggggaagaggaggaagaagatgacgaagaggaggactccggtgtttcccccacgtgcagcgatcactgtccataccaatctcccccttccaaggccaatcggcagctgtgcagccgctccagatcgagctccggaagctcaccctgtcactcgtggtctcccgccactcgtaggaatttcagatgtgagtcacgcggaccatgtagcgaccggacacctagtattcggcacgcccgcaaaaggcgtgaaaaggccatcggggaaggacgggttgtttatatccagaacttgtcctctgacatgtccagtcgagaactaaaacgccgttttgaggtctttggggagatcgaggagtgtgaagtgttaacacgcaacagacgaggcgaaaagtatggctttataacttataggtgcagcgagcacgccgccctcagtctgacgaaaggagccgcattgcgaaagaggaacgagcctagtttccagctgagctatggcggactgagacatttttgctggcctcgttacaccgattacgattccaattcagaggaggcactccccgcaagtgggaaatcaaagtatgaggcgatggactttgatagcctactcaaggaagcccagcagagccttcattag

SEQ ID NO: 68403 - DNA, 3004 bp, Artificial Sequence
  derived and/or modified sequence
cggctcggcgttgactccgccgcacgctgcagccgcggctggaagatggcggggaacgactgcggcgcgctgctggacgaagagctctcctccttcttcctcaactatctcgctgacacgcagggtggagggtccggggaggagcaactctatgctgactttccagaacttgacctctcccagctggatgccagcgactttgactcggccacctgctttggggagctgcagtggtgcccagagaactcagagactgaacccaaccagtacagccccgatgactccgagctcttccagattgacagtgagaatgaggccctcctggcagagctcaccaagaccctggatgacatccctgaagatgacgtgggtctggctgccttcccagccctggatggtggagacgctctatcatgcacctcagcttcgcctgccccctcatctgcaccccccagccctgccccggagaagccctcggccccagcccctgaggtggacgagctctcactggcggacagcacccaagacaagaaggctcccatgatgcagtctcagagccgaagttgtacagaactacataagcacctcacctcggcacagtgctgcctgcaggatcggggtctgcagccaccatgcctccagagtccccggctccctgccaaggaggacaaggagccgggtgaggactgcccgagcccccagccagctccagcctctccccgggactccctagctctgggcagggcagaccccggtgccccggtttcccaggaagacatgcaggcgatggtgcaactcatacgctacatgcacacctactgcctcccccagaggaagctgcccccacagacccctgagccactccccaaggcctgcagcaacccctcccagcaggtcagatcccggccctggtcccggcaccactccaaagcctcctgggctgagttctccattctgagggaacttctggctcaagacgtgctctgtgatgtcagcaaaccctaccgtctggccacgcctgtttatgcctccctcacacctcggtcaaggcccaggccccccaaagacagtcaggcctcccctggtcgcccgtcctcggtggaggaggtaaggatcgcagcttcacccaagagcaccgggcccagaccaagcctgcgcccactgcggctggaggtgaaaagggaggtccgccggcctgccagactgcagcagcaggaggaggaagacgaggaagaagaggaggaggaagaggaagaagaaaaagaggaggaggaggagtggggcaggaaaaggccaggccgaggcctgccatggacgaagctggggaggaagctggagagctctgtgtgccccgtgcggcgttctcggagactgaaccctgagctgggcccctggctgacatttgcagatgagccgctggtcccctcggagccccaaggtgctctgccctcactgtgcctggctcccaaggcctacgacgtagagcgggagctgggcagccccacggacgaggacagtggccaagaccagcagctcctacggggaccccagatccctgccctggagagcccctgtgagagtgggtgtggggacatggatgaggaccccagctgcccgcagctccctcccagagactctcccaggtgcctcatgctggccttgtcacaaagcgacccaacttttggcaagaagagctttgagcagaccttgacagtggagctctgtggcacagcaggactcaccccacccaccacaccaccgtacaagcccacagaggaggatcccttcaaaccagacatcaagcatagtctaggcaaagaaatagctctcagcctcccctcccctgagggcctctcactcaaggccaccccaggggctgcccacaagctgccaaagaagcacccagagcgaagtgagctcctgtcccacctgcgacatgccacagcccagccagcctcccaggctggccagaagcgtcccttctcctgttcctttggagaccatgactactgccaggtgctccgaccagaaggcgtcctgcaaaggaaggtgctgaggtcctgggagccgtctggggttcaccttgaggactggccccagcagggtgccccttgggctgaggcacaggcccctggcagggaggaagacagaagctgtgatgctggcgccccacccaaggacagcacgctgctgagagaccatgagatccgtgccagcctcaccaaacactttgggctgctggagaccgccctggaggaggaagacctggcctcctgcaagagccctgagtatgacactgtctttgaagacagcagcagcagcagcggcgagagcagcttcctcccagaggaggaagaggaagaaggggaggaggaggaggaggacgatgaagaagaggactcaggggtcagccccacttgctctgaccactgcccctaccagagcccaccaagcaaggccaaccggcagctctgttcccgcagccgctcaagctctggctcttcaccctgccactcctggtcaccagccactcgaaggaacttcagatgtgagagcagagggccgtgttcagacagaacgccaagcatccggcacgccaggaagcggcgggaaaaggccattggggaaggccgcgtggtgtacattcaaaatctctccagcgacatgagctcccgagagctgaagaggcgctttgaagtgtttggtgagattgaggagtgcgaggtgctgacaagaaataggagaggcgagaagtacggcttcatcacctaccggtgttctgagcacgcggccctctctttgacaaagggcgctgccctgaggaagcgcaacgagccctccttccagctgagctacggagggctccggcacttctgctggcccagatacactgactacgattccaattcagaagaggcccttcctgcgtcagggaaaagcaagtatgaagccatggattttgacagcttactgaaagaggcccagcagagcctgcattgataac

SEQ ID NO: 68404 - DNA, 2955 bp, Artificial Sequence
  derived and/or modified sequence
atggctggcaacgactgcggagcactcctggacgaggagctgtcatcattcttcctgaactacctagctgacacgcagggcggaggcagtggggaagagcagctgtatgccgattttccggagttggacctctctcaactggatgcatcggatttcgactccgcaacctgcttcggagaattacagtggtgccccgagaactccgagacggagcccaatcagtactcccccgacgacagcgagctattccagattgattccgaaaatgaagcccttctcgcagaattgactaaaacgctggacgacatccctgaagacgatgtggggcttgccgcatttcccgcattagatgggggagatgccttgtcatgtacttccgcctcccccgcaccttcatccgcccctccatcccccgctccagaaaagccttccgcacctgccccagaggtggatgaactgagcctcgccgattcgactcaagataaaaaggccccaatgatgcaaagtcagagtcgatcatgtacagaattacacaaacaccttaccagtgcacaatgctgtctccaggatcgcggattgcagcccccttgtctgcagtcaccaagactgcccgctaaagaagataaggagcctggagaggattgtccttccccccagcctgctccggcttcccctcgtgatagtctcgctctggggcgtgccgatcccggtgccccagtgagccaggaagacatgcaggcaatggtccagctaatcagatacatgcacacatattgtcttccacagagaaagctacctcctcagaccccggagcctctgccaaaagcctgcagcaatccatctcagcaggtccggtctaggccttggtcacgccaccattcaaaggcttcttgggccgaattcagcatcctccgcgaattactggcccaggatgtgctgtgcgatgttagcaagccataccgattagccactcctgtgtacgcctctttgactccccgatcgagacctcgcccacccaaagattcgcaggccagcccgggtagaccctctagcgtggaagaggtgcggattgcagcatccccaaagtctactggcccaaggccttccttacggcctctccggctggaagtgaaacgggaggtgcggaggcccgcacgtctgcaacagcaagaagaggaagacgaggaagaagaagaggaggaggaagaggaggaaaaagaagaggaagaagagtggggccgtaagaggccaggccgaggtctgccttggaccaagctaggtcgaaagcttgagagttctgtctgcccagttcggaggagccgaaggttaaaccccgaactcggtccatggttgacatttgccgatgaacctttggtaccaagcgaacctcaaggcgcacttcctagtctgtgcctggccccaaaggcctatgacgtggagcgcgagctaggcagccctacagatgaggactcaggtcaagaccagcagttgctgcgcggtccacaaatacccgcactggaatcaccctgcgaaagcgggtgcggcgacatggacgaggaccctagctgtcctcagctccccccaagagacagcccccgttgtctaatgcttgcactttcacagagcgatccaacattcggcaagaagtcattcgagcaaaccctgacggtcgagctttgcgggactgcagggctcactccccctaccaccccaccgtataaaccgacggaggaagaccccttcaagccagacattaagcatagccttggaaaggagatcgctctttcactgccgagccctgagggcctgtcccttaaggctacccctggcgctgcacataagcttcctaagaagcaccctgagagaagtgagctgctcagccaccttaggcatgccaccgcgcagcccgcaagccaggccggtcaaaagcgccctttctcgtgcagtttcggcgatcacgactattgtcaggtccttagacctgagggcgtcctgcagagaaaggtgctcaggtcgtgggaaccttcaggggtccacttagaagactggccccagcagggagccccttgggcagaggcccaggcccctggcagggaagaagacaggagctgtgatgctggcgctcctcccaaagattcaacactgctgcgggaccacgagatcagggcaagccttaccaagcatttcggactgttagaaaccgctcttgaagaggaagacctcgcctcctgtaaaagtcccgagtatgatactgtatttgaggattcctcgtctagctcaggcgaatcctcctttcttccagaagaagaagaggaagaaggagaggaggaagaagaggacgatgaggaagaagattcgggagtgagtccaacatgtagtgatcactgcccctaccaatccccgccatccaaagccaataggcagttgtgttctcgaagtaggagctcaagcgggtcatctccttgccatagctggagccctgcaacccgccgaaacttcaggtgtgagagtcggggaccctgtagcgatagaaccccttccatcaggcacgccaggaagcgaagagaaaaagccataggcgaagggagagtggtctacattcaaaacctaagcagtgatatgtcctctcgtgaactcaagaggcgattcgaagtcttcggggaaatcgaggagtgtgaggtgctcacacgcaatcgtcggggtgagaaatatggcttcattacctacagatgttccgagcacgccgcactaagcctgactaagggtgcggctctgcgcaaaaggaacgaaccatcctttcaactcagctatggtggtcttagacatttctgctggccgaggtatacagattatgattccaacagcgaggaagcattgcccgcttccggcaagtcaaagtacgaagctatggattttgactctctgctgaaggaggctcagcagagtttgcactag

SEQ ID NO: 68405 - DNA, 2955 bp, Artificial Sequence
  derived and/or modified sequence
atggccggcaacgactgcggcgccctgctggacgaggagctgagcagcttcttcctgaactacctggccgacacccagggcggcggcagcggcgaggagcagctgtacgccgacttccccgagctggacctgagccagctggacgccagcgacttcgacagcgccacctgcttcggcgagctgcagtggtgccccgagaacagcgagaccgagcccaaccagtacagccccgacgacagcgagctgttccagatcgacagcgagaacgaggccctgctggccgagctgaccaagaccctggacgacatccccgaggacgacgtgggcctggccgccttccccgccctggacggcggcgacgccctgagctgcaccagcgccagccccgcccccagcagcgccccccccagccccgcccccgagaagcccagcgcccccgcccccgaggtggacgagctgagcctggccgacagcacccaggacaagaaggcccccatgatgcagagccagagcagaagctgcaccgagctgcacaagcacctgaccagcgcccagtgctgcctgcaggacagaggcctgcagcccccctgcctgcagagccccagactgcccgccaaggaggacaaggagcccggcgaggactgccccagcccccagcccgcccccgccagccccagagacagcctggccctgggcagagccgaccccggcgcccccgtgagccaggaggacatgcaggccatggtgcagctgatcagatacatgcacacctactgcctgccccagagaaagctgcccccccagacccccgagcccctgcccaaggcctgcagcaaccccagccagcaggtgagaagcagaccctggagcagacaccacagcaaggccagctgggccgagttcagcatcctgagagagctgctggcccaggacgtgctgtgcgacgtgagcaagccctacagactggccacccccgtgtacgccagcctgacccccagaagcagacccagaccccccaaggacagccaggccagccccggcagacccagcagcgtggaggaggtgagaatcgccgccagccccaagagcaccggccccagacccagcctgagacccctgagactggaggtgaagagagaggtgagaagacccgccagactgcagcagcaggaggaggaggacgaggaggaggaggaggaggaggaggaggaggagaaggaggaggaggaggagtggggcagaaagagacccggcagaggcctgccctggaccaagctgggcagaaagctggagagcagcgtgtgccccgtgagaagaagcagaagactgaaccccgagctgggcccctggctgaccttcgccgacgagcccctggtgcccagcgagccccagggcgccctgcccagcctgtgcctggcccccaaggcctacgacgtggagagagagctgggcagccccaccgacgaggacagcggccaggaccagcagctgctgagaggcccccagatccccgccctggagagcccctgcgagagcggctgcggcgacatggacgaggaccccagctgcccccagctgccccccagagacagccccagatgcctgatgctggccctgagccagagcgaccccaccttcggcaagaagagcttcgagcagaccctgaccgtggagctgtgcggcaccgccggcctgaccccccccaccacccccccctacaagcccaccgaggaggaccccttcaagcccgacatcaagcacagcctgggcaaggagatcgccctgagcctgcccagccccgagggcctgagcctgaaggccacccccggcgccgcccacaagctgcccaagaagcaccccgagagaagcgagctgctgagccacctgagacacgccaccgcccagcccgccagccaggccggccagaagagacccttcagctgcagcttcggcgaccacgactactgccaggtgctgagacccgagggcgtgctgcagagaaaggtgctgagaagctgggagcccagcggcgtgcacctggaggactggccccagcagggcgccccctgggccgaggcccaggcccccggcagagaggaggacagaagctgcgacgccggcgccccccccaaggacagcaccctgctgagagaccacgagatcagagccagcctgaccaagcacttcggcctgctggagaccgccctggaggaggaggacctggccagctgcaagagccccgagtacgacaccgtgttcgaggacagcagcagcagcagcggcgagagcagcttcctgcccgaggaggaggaggaggagggcgaggaggaggaggaggacgacgaggaggaggacagcggcgtgagccccacctgcagcgaccactgcccctaccagagcccccccagcaaggccaacagacagctgtgcagcagaagcagaagcagcagcggcagcagcccctgccacagctggagccccgccaccagaagaaacttcagatgcgagagcagaggcccctgcagcgacagaacccccagcatcagacacgccagaaagagaagagagaaggccatcggcgagggcagagtggtgtacatccagaacctgagcagcgacatgagcagcagagagctgaagagaagattcgaggtgttcggcgagatcgaggagtgcgaggtgctgaccagaaacagaagaggcgagaagtacggcttcatcacctacagatgcagcgagcacgccgccctgagcctgaccaagggcgccgccctgagaaagagaaacgagcccagcttccagctgagctacggcggcctgagacacttctgctggcccagatacaccgactacgacagcaacagcgaggaggccctgcccgccagcggcaagagcaagtacgaggccatggacttcgacagcctgctgaaggaggcccagcagagcctgcactag

SEQ ID NO: 68406 - protein, 959 aa, Artificial Sequence
  derived and/or modified sequence
MGGGSGEEQLYADFPELDLSQLDASDFDSATCFGELQWCPENSETEPNQYSPDDSELFQIDSENEALLAELTKTLDDIPEDDVGLAAFPALDGGDALSCTSASPAPSSAPPSPAPEKPSAPAPEVDELSLADSTQDKKAPMMQSQSRSCTELHKHLTSAQCCLQDRGLQPPCLQSPRLPAKEDKEPGEDCPSPQPAPASPRDSLALGRADPGAPVSQEDMQAMVQLIRYMHTYCLPQRKLPPQTPEPLPKACSNPSQQVRSRPWSRHHSKASWAEFSILRELLAQDVLCDVSKPYRLATPVYASLTPRSRPRPPKDSQASPGRPSSVEEVRIAASPKSTGPRPSLRPLRLEVKREVRRPARLQQQEEEDEEEEEEEEEEEKEEEEEWGRKRPGRGLPWTKLGRKLESSVCPVRRSRRLNPELGPWLTFADEPLVPSEPQGALPSLCLAPKAYDVERELGSPTDEDSGQDQQLLRGPQIPALESPCESGCGDMDEDPSCPQLPPRDSPRCLMLALSQSDPTFGKKSFEQTLTVELCGTAGLTPPTTPPYKPTEEDPFKPDIKHSLGKEIALSLPSPEGLSLKATPGAAHKLPKKHPERSELLSHLRHATAQPASQAGQKRPFSCSFGDHDYCQVLRPEGVLQRKVLRSWEPSGVHLEDWPQQGAPWAEAQAPGREEDRSCDAGAPPKDSTLLRDHEIRASLTKHFGLLETALEEEDLASCKSPEYDTVFEDSSSSSGESSFLPEEEEEEGEEEEEDDEEEDSGVSPTCSDHCPYQSPPSKANRQLCSRSRSSSGSSPCHSWSPATRRNFRCESRGPCSDRTPSIRHARKRREKAIGEGRVVYIQNLSSDMSSRELKRRFEVFGEIEECEVLTRNRRGEKYGFITYRCSEHAALSLTKGAALRKRNEPSFQLSYGGLRHFCWPRYTDYDSNSEEALPASGKSKYEAMDFDSLLKEAQQSLH

SEQ ID NO: 68407 - DNA, 588 bp, Artificial Sequence
  derived and/or modified sequence
atgaatagcgtctttaggcagccaggttcaaatttctcatttcccatctaccagccatccgcatcagtgacacacggtctctcattcttttgtgaggttagccctcaaatgttgactcctcaagattatcgcgggaaacagcaaggtcataggggttgtcccggctgtatggtggctatggacacctggcctgcggtacttcccgaacttcctggtttctggggagaggggtcaggagggcaagcctggggagcaaggggggagccactgttgcagaaggccaattgtctgcttgaagctgtccgactgtttctcaactacaggcctctgggtgccgaggggggcgaactcacgttcggtaagaggcttctggtgccgacagctgtgtcttgcgcctacgattgcgtctcttctagtgctttcctgggcattcagctgctgggagatcctacccggtcacctggccactgttatcggcaagacttcaatggaactctccggctcagggaggggaagggcttggttcaaagccacactggtacattgtgggctggaccactccaggaaggtacccaggggcaaacatag

SEQ ID NO: 68408 - DNA, 2880 bp, Artificial Sequence
  derived and/or modified sequence
atgggcgggggttccggcgaagaacaattgtacgctgatttccctgaactggacctgtctcagttagacgcatcagattttgactcggccacgtgttttggtgagctacaatggtgccctgagaactctgaaacagaaccaaatcagtactccccagatgacagcgagctctttcagatcgatagtgagaacgaagctttgctggcagaactgaccaagacgttggacgacatccccgaggacgatgtcggcctggctgctttccctgccctagacggaggggatgccctgtcttgcacctccgcttcccccgctcctagctcggccccaccttcccctgccccagaaaagccaagtgctcccgcccctgaggttgatgagctctcactcgccgactccacccaggataagaaggcaccgatgatgcagtcccagagccgatcttgtactgaattgcataagcacctgacatcagcacagtgctgtctgcaagatagagggctgcagccaccgtgcttgcagagccctcgcctgccggctaaggaagataaagaacctggtgaggactgtccaagtccacaacccgcaccagctagtcctagagactctctcgcacttgggcgggcggatcctggagctcccgtgtcgcaggaggatatgcaggccatggtccagctgattagatacatgcacacttactgtcttccacagcgtaagcttcccccccagacacccgagccactccccaaggcctgcagtaacccttctcagcaggtgcggagccggccttggtcaagacaccactctaaggcttcttgggccgaattctcaatattgagggaactgctggcccaagacgttttgtgcgatgtaagcaagccatatcggctggccactcctgtttatgcatcacttacaccccgatcacgcccaaggcctccaaaagacagccaagcgagcccaggccggccctcctcagttgaggaggtacggattgccgctagccccaagagcacaggcccaagaccaagccttcgcccactccgacttgaagtaaagagagaggttcgtcgcccagcgagattacagcaacaggaggaggaagacgaggaagaggaggaagaggaggaggaggaggagaaggaagaggaagaagagtggggacgcaaacgacccggacggggcctcccgtggacaaagctcggacggaagctagagtcctccgtctgtcctgtgagaagatctagacggctcaatcctgagttgggtccctggttgacgttcgccgacgagcctcttgtgccaagtgaaccacagggtgctctgccctccctgtgcctggcccctaaggcatatgatgtagagcgggaactaggctctcctacggatgaggactcagggcaagatcagcaactcctaagagggccacagatccccgctctggagtcaccctgcgaaagcggctgcggagacatggacgaggaccctagctgtccccaacttccaccacgtgattccccgagatgtcttatgttggcattgtcccagagcgaccctacttttggcaagaagtcattcgaacaaaccctgacagttgagttgtgtggcacggcggggcttacccctcctacaacacctccttacaagcctacagaagaggatccatttaagcccgacataaaacattcactgggcaaagaaatagcccttagcctgccctccccggaagggctgagcttaaaggcaacacccggcgcagcccataagttgccgaagaaacatcccgagaggtccgagctgctgagccacctgcggcatgctactgcacaacctgcgtcacaggcaggtcagaagcgtcctttctcctgctcattcggagatcacgactactgtcaggttcttcggccagagggggtcctccagcggaaggtgctgcggtcatgggagccaagcggcgtgcatctagaagactggccacagcagggggccccttgggcagaggctcaggctccgggtcgagaggaagaccgctcttgcgacgccggggctcctcccaaggactcaactctcttacgagaccatgagatacgggcttcactcacgaagcatttcgggctgcttgagacggctctggaagaggaagaccttgcgagttgtaagagccctgaatatgataccgtctttgaggatagttcctcttctagtggtgaatcttcgtttctgcctgaagaagaagaggaggaaggggaggaggaggaagaagacgatgaggaggaagactccggggtgtccccgacttgtagtgatcactgcccttaccagagccccccatcaaaagccaaccgacagctgtgcagcagatcaagatccagtagcggatcttcgccctgtcactcatggtccccggccactcgccgtaatttccgatgcgagtccagaggcccgtgctcagaccgaacaccttctatcaggcacgccaggaagagacgagagaaggcgattggggagggaagggtcgtgtatattcagaacctaagctctgacatgtcttcacgggagttaaagaggcggtttgaagtgtttggggagatagaagaatgcgaagtactgaccaggaacaggaggggcgaaaaatatggctttattacctaccgttgtagcgagcacgccgctctcagccttactaagggggcagcattgcgaaaacgcaatgagcctagttttcaactgagttacggagggctgcgacacttctgttggcctcgctatacagactacgactccaactcagaagaggctctccccgcctccgggaagtccaaatatgaagccatggacttcgattcgctgttgaaggaggcacaacagtctctacattag

SEQ ID NO: 68409 - DNA, 2880 bp, Artificial Sequence
  derived and/or modified sequence
atgggcggcggcagcggggaggagcagctgtatgctgacttccctgagctggacctgagccagctggatgccagtgactttgattctgccacctgctttggagagctgcagtggtgcccagaaaattctgaaacagagcccaaccagtacagcccagatgattctgagctgttccagattgacagtgaaaatgaggccctgctggccgagctgaccaagaccctggatgacatcccagaagatgatgtgggcctggccgccttccctgccctggatggaggagatgccctgagctgcaccagcgccagccctgcccccagcagcgccccacccagccctgcccctgagaagcccagcgccccagcccctgaggtggatgagctgagcctggccgacagcacccaggacaagaaggcccccatgatgcagagccagagccgcagctgcacagagctgcacaagcacctgaccagcgcccagtgctgcctgcaggaccggggcctgcagcccccctgcctgcagagcccccggctgcctgccaaggaggacaaggagcccggggaggactgccccagcccccagcctgccccagccagcccccgggacagcctggccctgggccgggctgaccccggggcccctgtgtcccaggaggacatgcaggccatggtgcagctgatccgctacatgcacacctactgcctgccccagaggaagctgcccccccagaccccagagcccctgcccaaggcctgcagcaaccccagccagcaggtgcgcagccggccctggagccgccaccacagcaaggcctcctgggccgagttcagcatcctgcgggagctgctggcccaggatgtgctgtgtgatgtgtccaagccctaccgcctggccacccctgtgtatgccagcctgacccccaggagccggcccaggcctcccaaggacagccaggccagccctggccggcccagctctgtggaggaggtgagaattgctgccagccccaagagcacaggcccccggcccagcctgcggcccctgcggctggaggtgaagcgggaggtgagaagacctgcccggctgcagcagcaggaggaggaggatgaggaggaggaggaggaggaggaggaggaggagaaggaggaggaggaggagtggggcaggaagaggcctggccggggcctgccctggaccaagctgggcaggaagctggagagctctgtgtgccctgtgagaagaagccggcggctgaaccctgagctgggcccctggctgacctttgctgatgagcccctggtgcccagcgagccccagggcgccctgcccagcctgtgcctggcccccaaggcctatgatgtggagcgggagctgggcagccccacagatgaggacagcggccaggaccagcagctgctgcggggcccccagatcccagccctggagagcccctgtgagagcggctgtggggacatggatgaggaccccagctgcccccagctgcccccccgggacagcccccgctgcctgatgctggccctgagccagagcgaccccaccttcggcaagaagagctttgagcagaccctgactgtggagctgtgtggcacagctggcctgaccccacccaccaccccaccctacaagcccacagaggaggaccccttcaagccagacatcaagcacagcctgggcaaggagatcgccctgagcctgcccagccctgagggcctgagcctgaaggccacccctggggccgcccacaagctgcccaagaagcaccctgagaggtctgagctgctgagccacctgcggcatgccacagcccagcctgccagccaggccggccagaagaggcccttcagctgcagctttggagaccatgactactgccaggtgctgcggcctgagggcgtgctgcagaggaaggtgctgcgctcctgggagcccagcggcgtgcacctggaggactggccccagcagggcgccccctgggccgaggcccaggcccctggccgggaggaggacaggagctgtgatgctggggccccacccaaggacagcaccctgctgcgggaccacgagatccgggccagcctgaccaagcacttcggcctgctggagacagccctggaggaggaggacctggccagctgcaagagcccagaatatgacacagtgtttgaggacagcagcagcagcagtggagagagcagcttcctgcctgaggaggaggaggaggagggggaggaggaggaggaggatgatgaggaggaggacagcggcgtgagccccacctgcagcgaccactgcccctaccagagcccccccagcaaggccaaccggcagctgtgcagccgcagccgcagcagcagcggcagcagcccctgccacagctggagccctgccaccaggaggaacttccgctgtgagagccggggcccctgcagcgacaggacccccagcatcagacatgccaggaagagaagagagaaggccatcggggagggccgggtggtgtacatccagaacctgagcagtgacatgagcagccgggagctgaagagaagatttgaggtgtttggagaaattgaggagtgtgaggtgctgaccaggaacagaagaggagagaagtatggcttcatcacctaccgctgcagcgagcacgccgccctgagcctgaccaagggggccgccctgaggaagagaaatgagcccagcttccagctgtcctatggaggcctgcggcacttctgctggccccgctacacagattatgacagcaacagcgaggaggccctgcctgccagcggcaagagcaaatatgaggccatggactttgacagcctgctgaaggaggcccagcagagcctgcactag

SEQ ID NO: 68410 - DNA, 2880 bp, Artificial Sequence
  derived and/or modified sequence
atgggcggcggcagcggcgaggagcagctgtacgccgacttccccgagctcgatttatctcagcttgatgcgtctgacttcgatagcgccacctgttttggcgagttacagtggtgcccggaaaattccgagacagaaccgaaccagtattccccggacgatagtgaactgtttcaaatcgatagtgagaatgaggcactcctcgccgaattgactaagacgttggatgacattcctgaggatgacgtgggacttgccgcattccctgccctcgacgggggagacgccctctcttgtactagcgccagtcctgccccctcatctgctcctccatccccggcgccagaaaagccatccgctcccgcacctgaagtcgatgaattgtcactcgctgactctacacaggataagaaggcacctatgatgcagtcacaatccagaagttgcaccgagctgcacaagcacctgaccagtgctcagtgttgccttcaagacaggggcctccagcctccgtgtctgcagagtccaagactcccagcaaaggaggataaggagcctggcgaggactgtccgagccctcagcctgcgccggccagtccgagggattcacttgcactagggcgcgcagatcccggggccccagtgagccaggaagatatgcaggccatggtgcagctcattcgttatatgcacacttactgtctcccccaacgcaagctgccgccccaaaccccagaacccctcccaaaggcctgtagcaatccgtcccagcaagtgcgctcgcgcccttggtcccgccaccactcaaaagcctcgtgggccgagttttcaatactgcgagagctcctggcccaggatgtgctgtgcgatgtaagcaagccctatcgtctagccactccagtctacgcttccctgacccccagatccagaccacgaccacctaaggactcacaggcctcacctggccggccatcatctgtggaggaggtcagaatagctgcatcccctaaaagcactgggccacgcccgagcttgagaccgcttcggctggaagtgaagagagaagtgcgcaggcctgcacgcctgcagcagcaggaagaagaggatgaggaggaagaggaagaagaagaagaggaggaaaaagaagaagaggaagagtggggtcgaaagagaccagggcgaggcctcccctggaccaagttgggccgcaagctcgagtcatcggtctgcccagtgaggcgcagcaggagactaaatccagagctcggcccctggctcacattcgccgacgaaccgctcgtaccaagcgagccacagggcgcactgcccagtctgtgtttggccccaaaagcttacgatgtcgagagagaactgggttcacctacagatgaagactccggacaagaccagcagttactcagggggccacagatacccgcgctagagtccccctgcgagagcggctgtggtgacatggacgaagatccaagttgtcctcagctacctcctcgggatagccccagatgtcttatgctcgcactctcccaatccgatcccacttttgggaaaaagtcctttgagcagaccctcaccgttgaactatgtggaaccgctgggcttactccgcccaccacacccccttacaaacctactgaagaggatcccttcaagccagacattaaacacagccttggaaaggaaatcgccttaagcttgccttcccccgagggtctttcactaaaggccactccgggcgccgcccacaagctgcccaagaaacaccccgagagatcggagttgctgtctcacctcaggcacgccactgcccaaccagcaagtcaggccggccagaagagacctttctcatgctcatttggggatcatgattactgtcaggttctgcgaccggagggagtgttgcagcggaaggtcctgagatcctgggagccatcgggtgtacacctagaagactggccccaacaaggggctccgtgggcggaagcacaggcccctggaagggaagaggacagaagctgtgatgcaggtgcgcccccaaaagattcaactctgttacgagatcatgagattcgggccagcctcaccaaacatttcggcttactggagacagcactagaggaggaggatctcgcgtcatgcaagagtcccgagtacgacaccgtttttgaggactcatcctcatctagcggcgagagttccttcctgcctgaagaagaagaagaggaaggcgaggaagaggaggaggatgacgaagaagaagattctggggtaagccctacctgtagcgatcattgcccctaccagagccctccgtcaaaagccaaccgccaattgtgcagcagatctcggtctagtagcggaagttccccatgtcactcttggagccccgcaacacgtcggaatttccggtgtgaatcgcggggcccctgcagtgatagaacaccttccatccgacacgcccgcaagaggcgtgagaaagccataggggaggggcgggttgtatatatccagaacctctccagtgatatgtcttctcgtgagttaaagcgtagattcgaagtgttcggcgagatcgaagaatgtgaggttctgactaggaaccgcaggggcgagaaatatggattcattacgtacaggtgctctgagcacgctgccctttcactgacaaagggcgcggccctcagaaagcgcaacgagccttcttttcaattaagctatgggggacttagacatttttgttggccccgctataccgattacgacagtaattctgaggaagccctccccgcctcagggaaatcaaagtatgaagccatggatttcgatagtcttcttaaagaggcccagcagtccctgcattag

SEQ ID NO: 68411 - DNA, 3146 bp, Artificial Sequence
  derived and/or modified sequence
acattctcattttaatcctcaagcaactctgaattagttgctgttatcccagacttacaggcaggaagcaggctcagagaagtgaaggtttccaacttagacgtgccaggctgtgcacaggtggggacctctgaggggcctgctctgatctgggttggggctgccccaggacccttggaggagccgccaccagagcaatgggtggagggtccggggaggagcaactctatgctgactttccagaacttgacctctcccagctggatgccagcgactttgactcggccacctgctttggggagctgcagtggtgcccagagaactcagagactgaacccaaccagtacagccccgatgactccgagctcttccagattgacagtgagaatgaggccctcctggcagagctcaccaagaccctggatgacatccctgaagatgacgtgggtctggctgccttcccagccctggatggtggagacgctctatcatgcacctcagcttcgcctgccccctcatctgcaccccccagccctgccccggagaagccctcggccccagcccctgaggtggacgagctctcactggcggacagcacccaagacaagaaggctcccatgatgcagtctcagagccgaagttgtacagaactacataagcacctcacctcggcacagtgctgcctgcaggatcggggtctgcagccaccatgcctccagagtccccggctccctgccaaggaggacaaggagccgggtgaggactgcccgagcccccagccagctccagcctctccccgggactccctagctctgggcagggcagaccccggtgccccggtttcccaggaagacatgcaggcgatggtgcaactcatacgctacatgcacacctactgcctcccccagaggaagctgcccccacagacccctgagccactccccaaggcctgcagcaacccctcccagcaggtcagatcccggccctggtcccggcaccactccaaagcctcctgggctgagttctccattctgagggaacttctggctcaagacgtgctctgtgatgtcagcaaaccctaccgtctggccacgcctgtttatgcctccctcacacctcggtcaaggcccaggccccccaaagacagtcaggcctcccctggtcgcccgtcctcggtggaggaggtaaggatcgcagcttcacccaagagcaccgggcccagaccaagcctgcgcccactgcggctggaggtgaaaagggaggtccgccggcctgccagactgcagcagcaggaggaggaagacgaggaagaagaggaggaggaagaggaagaagaaaaagaggaggaggaggagtggggcaggaaaaggccaggccgaggcctgccatggacgaagctggggaggaagctggagagctctgtgtgccccgtgcggcgttctcggagactgaaccctgagctgggcccctggctgacatttgcagatgagccgctggtcccctcggagccccaaggtgctctgccctcactgtgcctggctcccaaggcctacgacgtagagcgggagctgggcagccccacggacgaggacagtggccaagaccagcagctcctacggggaccccagatccctgccctggagagcccctgtgagagtgggtgtggggacatggatgaggaccccagctgcccgcagctccctcccagagactctcccaggtgcctcatgctggccttgtcacaaagcgacccaacttttggcaagaagagctttgagcagaccttgacagtggagctctgtggcacagcaggactcaccccacccaccacaccaccgtacaagcccacagaggaggatcccttcaaaccagacatcaagcatagtctaggcaaagaaatagctctcagcctcccctcccctgagggcctctcactcaaggccaccccaggggctgcccacaagctgccaaagaagcacccagagcgaagtgagctcctgtcccacctgcgacatgccacagcccagccagcctcccaggctggccagaagcgtcccttctcctgttcctttggagaccatgactactgccaggtgctccgaccagaaggcgtcctgcaaaggaaggtgctgaggtcctgggagccgtctggggttcaccttgaggactggccccagcagggtgccccttgggctgaggcacaggcccctggcagggaggaagacagaagctgtgatgctggcgccccacccaaggacagcacgctgctgagagaccatgagatccgtgccagcctcaccaaacactttgggctgctggagaccgccctggaggaggaagacctggcctcctgcaagagccctgagtatgacactgtctttgaagacagcagcagcagcagcggcgagagcagcttcctcccagaggaggaagaggaagaaggggaggaggaggaggaggacgatgaagaagaggactcaggggtcagccccacttgctctgaccactgcccctaccagagcccaccaagcaaggccaaccggcagctctgttcccgcagccgctcaagctctggctcttcaccctgccactcctggtcaccagccactcgaaggaacttcagatgtgagagcagagggccgtgttcagacagaacgccaagcatccggcacgccaggaagcggcgggaaaaggccattggggaaggccgcgtggtgtacattcaaaatctctccagcgacatgagctcccgagagctgaagaggcgctttgaagtgtttggtgagattgaggagtgcgaggtgctgacaagaaataggagaggcgagaagtacggcttcatcacctaccggtgttctgagcacgcggccctctctttgacaaagggcgctgccctgaggaagcgcaacgagccctccttccagctgagctacggagggctccggcacttctgctggcccagatacactgactacgattccaattcagaagaggcccttcctgcgtcagggaaaagcaagtatgaagccatggattttgacagcttactgaaagaggcccagcagagcctgcattgataacagccttaaccctcgaggaatacctcaatacctcagacaaggcccttccaatatgtttacgttttc

SEQ ID NO: 68412 - DNA, 2880 bp, Artificial Sequence
  derived and/or modified sequence
atgggcggaggatccggtgaggaacagctctacgccgattttcccgaattggacctgtcccagctggatgcatcagatttcgacagcgctacgtgctttggtgagctccaatggtgtcccgaaaatagcgagacagagcccaaccaatattctcccgacgattcagagctctttcagatcgattcagaaaacgaagctctgctggccgaattaactaaaactctggatgacatccccgaagatgacgtggggctggccgcattccctgccttggacggtggggacgctctcagctgtaccagcgcaagccctgctccctccagtgcccctccctcacctgcccctgaaaagcctagtgcacccgctcccgaggtggacgaactgtccctcgcggactctactcaagacaagaaggccccaatgatgcagtcccagagccggtcatgcaccgagctccacaaacatcttacatccgcacagtgttgtctacaagacaggggattgcaacctccctgcctgcaatcccccagactgccagccaaagaggacaaggaaccaggcgaagattgtccttccccacagccagcccctgccagtcccagggattcactcgcgctcggcagggcagaccctggtgccccagtgagccaagaggatatgcaggccatggtccaattgatcaggtatatgcatacctactgcttgcctcagcgcaaactgcctcctcagactccagagccgcttcccaaagcctgcagcaacccctcgcaacaggtgaggagcaggccctggtcccggcaccattcaaaggccagctgggccgagttctccatcttacgggaactcctggctcaagacgtgttgtgcgacgtctccaagccctacagattggccacacccgtgtacgcaagcctgacgcctcgttctcggccacgccctcctaaggattcccaagcttcacccggtagaccctccagcgtggaggaagttcggatagcagcaagccctaagtcaacaggtccacggccttccctgcgccctttgagactggaggtgaagagggaggtgcgtcgcccagctagattacagcagcaggaggaagaggatgaagaggaggaagaagaagaggaggaagaggagaaggaagaggaagaagaatggggcaggaagcgccctgggagaggcctgccatggacgaagctcggcaggaagctggagtcatccgtatgcccagtgcgccgatcccggcgtttgaaccctgagttaggcccatggctcacatttgccgatgagccattagttccatctgagcctcagggggctctgccttcactgtgcctggcaccgaaggcttacgacgtggagagagaactggggtcaccaacagacgaggacagtgggcaggatcagcagttactcagaggcccacaaattccagcactcgaatccccttgcgaatctgggtgtggtgatatggatgaagatcctagctgccctcagctgccccctagagacagtccgagatgcctgatgttagcgttgtctcagtcagatcccacttttgggaagaagtcctttgagcagactctaactgtggaattatgtggaacagccggtctgaccccccctaccacccccccttataaacctacagaagaggatccattcaagccagacatcaaacactctctggggaaggaaattgctctgtccctcccctcacccgaagggctgtccctgaaggccactcctggcgctgcacacaagctgcccaagaaacacccggagcggtcggagctactgagccatcttcggcacgctacagctcagcccgctagtcaggcaggccagaagcgccctttttcctgttcctttggagaccacgactattgccaggttctgcgacctgaaggggtgctacaacgaaaagtactcagatcatgggaaccatcaggggtccacttagaagactggcctcagcagggtgccccatgggcagaggcccaggccccaggtcgggaggaggatcgttcttgcgacgctggcgctccaccaaaggattcgacactgctccgggaccacgaaatccgcgcatcactgaccaaacacttcggcctgctggaaacggctcttgaagaggaagatcttgcctcgtgcaagtcaccagaatacgacacagtatttgaggacagcagctcatcgagtggcgagtcctcattcctgcccgaagaggaggaggaggaaggggaggaggaggaagaagatgacgaagaagaggatagcggggtctccccaacctgctccgatcactgcccctatcagtcccctccatcaaaggccaataggcaactctgctctagatctcgtagtagctctggtagttccccatgccattcctggtctcccgctacccgccgtaactttcgctgtgagagccgcggaccttgtagtgaccgaactccgtccattcgccacgccagaaaacgtagagaaaaagccatcggcgagggcagagtcgtgtacatacagaacctgagcagcgacatgtcaagccgcgagctgaaaaggagattcgaagtgtttggagaaatcgaggagtgcgaggtgttgacgagaaatcgacgaggggaaaaatatggatttatcacttatagatgcagcgaacacgcggctctatctctcactaagggagcggctctgcgtaagcgcaatgagccgtccttccagctgagttatggaggtctgcgacatttttgttggcctcggtacaccgattatgattccaactctgaggaagcgctgcctgcttcaggcaagagcaagtatgaggctatggattttgacagtctgttaaaggaggcccaacagagtctgcactag

SEQ ID NO: 68413 - DNA, 2880 bp, Artificial Sequence
  derived and/or modified sequence
atgggcggcggcagcggcgaggagcagctgtacgccgacttccccgagctggacctgagccagctggacgccagcgacttcgacagcgccacctgcttcggcgagctgcagtggtgccccgagaacagcgagaccgagcccaaccagtacagccccgacgacagcgagctgttccagatcgacagcgagaacgaggccctgctggccgagctgaccaagaccctggacgacatccccgaggacgacgtgggcctggccgccttccccgccctggacggcggcgacgccctgagctgcaccagcgccagccccgcccccagcagcgccccccccagccccgcccccgagaagcccagcgcccccgcccccgaggtggacgagctgagcctggccgacagcacccaggacaagaaggcccccatgatgcagagccagagcagaagctgcaccgagctgcacaagcacctgaccagcgcccagtgctgcctgcaggacagaggcctgcagcccccctgcctgcagagccccagactgcccgccaaggaggacaaggagcccggcgaggactgccccagcccccagcccgcccccgccagccccagagacagcctggccctgggcagagccgaccccggcgcccccgtgagccaggaggacatgcaggccatggtgcagctgatcagatacatgcacacctactgcctgccccagagaaagctgcccccccagacccccgagcccctgcccaaggcctgcagcaaccccagccagcaggtgagaagcagaccctggagcagacaccacagcaaggccagctgggccgagttcagcatcctgagagagctgctggcccaggacgtgctgtgcgacgtgagcaagccctacagactggccacccccgtgtacgccagcctgacccccagaagcagacccagaccccccaaggacagccaggccagccccggcagacccagcagcgtggaggaggtgagaatcgccgccagccccaagagcaccggccccagacccagcctgagacccctgagactggaggtgaagagagaggtgagaagacccgccagactgcagcagcaggaggaggaggacgaggaggaggaggaggaggaggaggaggaggagaaggaggaggaggaggagtggggcagaaagagacccggcagaggcctgccctggaccaagctgggcagaaagctggagagcagcgtgtgccccgtgagaagaagcagaagactgaaccccgagctgggcccctggctgaccttcgccgacgagcccctggtgcccagcgagccccagggcgccctgcccagcctgtgcctggcccccaaggcctacgacgtggagagagagctgggcagccccaccgacgaggacagcggccaggaccagcagctgctgagaggcccccagatccccgccctggagagcccctgcgagagcggctgcggcgacatggacgaggaccccagctgcccccagctgccccccagagacagccccagatgcctgatgctggccctgagccagagcgaccccaccttcggcaagaagagcttcgagcagaccctgaccgtggagctgtgcggcaccgccggcctgaccccccccaccacccccccctacaagcccaccgaggaggaccccttcaagcccgacatcaagcacagcctgggcaaggagatcgccctgagcctgcccagccccgagggcctgagcctgaaggccacccccggcgccgcccacaagctgcccaagaagcaccccgagagaagcgagctgctgagccacctgagacacgccaccgcccagcccgccagccaggccggccagaagagacccttcagctgcagcttcggcgaccacgactactgccaggtgctgagacccgagggcgtgctgcagagaaaggtgctgagaagctgggagcccagcggcgtgcacctggaggactggccccagcagggcgccccctgggccgaggcccaggcccccggcagagaggaggacagaagctgcgacgccggcgccccccccaaggacagcaccctgctgagagaccacgagatcagagccagcctgaccaagcacttcggcctgctggagaccgccctggaggaggaggacctggccagctgcaagagccccgagtacgacaccgtgttcgaggacagcagcagcagcagcggcgagagcagcttcctgcccgaggaggaggaggaggagggcgaggaggaggaggaggacgacgaggaggaggacagcggcgtgagccccacctgcagcgaccactgcccctaccagagcccccccagcaaggccaacagacagctgtgcagcagaagcagaagcagcagcggcagcagcccctgccacagctggagccccgccaccagaagaaacttcagatgcgagagcagaggcccctgcagcgacagaacccccagcatcagacacgccagaaagagaagagagaaggccatcggcgagggcagagtggtgtacatccagaacctgagcagcgacatgagcagcagagagctgaagagaagattcgaggtgttcggcgagatcgaggagtgcgaggtgctgaccagaaacagaagaggcgagaagtacggcttcatcacctacagatgcagcgagcacgccgccctgagcctgaccaagggcgccgccctgagaaagagaaacgagcccagcttccagctgagctacggcggcctgagacacttctgctggcccagatacaccgactacgacagcaacagcgaggaggccctgcccgccagcggcaagagcaagtacgaggccatggacttcgacagcctgctgaaggaggcccagcagagcctgcactag

SEQ ID NO: 68414 - protein, 521 aa, Artificial Sequence
  derived and/or modified sequence
MEASWGSFNAERGWYVSVQQPEEAEAEELSPLLSNELHRQRSPGVSFGLSVFNLMNAIMGSGILGLAYVLANTGVFGFSFLLLTVALLASYSVHLLLSMCIQTAVTSYEDLGLFAFGLPGKLVVAGTIIIQNIGAMSSYLLIIKTELPAAIAEFLTGDYSRYWYLDGQTLLIIICVGIVFPLALLPKIGFLGYTSSLSFFFMMFFALVVIIKKWSIPCPLTLNYVEKGFQISNVTDDCKPKLFHFSKESAYALPTMAFSFLCHTSILPIYCELQSPSKKRMQNVTNTAIALSFLIYFISALFGYLTFYDKVESELLKGYSKYLSHDVVVMTVKLCILFAVLLTVPLIHFPARKAVTMMFFSNFPFSWIRHFLITLALNIIIVLLAIYVPDIRNVFGVVGASTSTCLIFIFPGLFYLKLSREDFLSWKKLGGLILSHRLACSGVISAHCNLCLPDSSNPPTSASRVAETTGRDTMEMCTQRKGHARTQQEGNCLQAKGRGLRRTKRVHTLILHFPTSRTVSK

SEQ ID NO: 68415 - protein, 516 aa, Artificial Sequence
  derived and/or modified sequence
GSFNAERGWYVSVQQPEEAEAEELSPLLSNELHRQRSPGVSFGLSVFNLMNAIMGSGILGLAYVLANTGVFGFSFLLLTVALLASYSVHLLLSMCIQTAVTSYEDLGLFAFGLPGKLVVAGTIIIQNIGAMSSYLLIIKTELPAAIAEFLTGDYSRYWYLDGQTLLIIICVGIVFPLALLPKIGFLGYTSSLSFFFMMFFALVVIIKKWSIPCPLTLNYVEKGFQISNVTDDCKPKLFHFSKESAYALPTMAFSFLCHTSILPIYCELQSPSKKRMQNVTNTAIALSFLIYFISALFGYLTFYDKVESELLKGYSKYLSHDVVVMTVKLCILFAVLLTVPLIHFPARKAVTMMFFSNFPFSWIRHFLITLALNIIIVLLAIYVPDIRNVFGVVGASTSTCLIFIFPGLFYLKLSREDFLSWKKLGGLILSHRLACSGVISAHCNLCLPDSSNPPTSASRVAETTGRDTMEMCTQRKGHARTQQEGNCLQAKGRGLRRTKRVHTLILHFPTSRTVSK

SEQ ID NO: 68416 - protein, 487 aa, Artificial Sequence
  derived and/or modified sequence
MSGPRIMYSLLLELHRQRSPGVSFGLSVFNLMNAIMGSGILGLAYVLANTGVFGFSFLLLTVALLASYSVHLLLSMCIQTAVTSYEDLGLFAFGLPGKLVVAGTIIIQNIGAMSSYLLIIKTELPAAIAEFLTGDYSRYWYLDGQTLLIIICVGIVFPLALLPKIGFLGYTSSLSFFFMMFFALVVIIKKWSIPCPLTLNYVEKGFQISNVTDDCKPKLFHFSKESAYALPTMAFSFLCHTSILPIYCELQSPSKKRMQNVTNTAIALSFLIYFISALFGYLTFYDKVESELLKGYSKYLSHDVVVMTVKLCILFAVLLTVPLIHFPARKAVTMMFFSNFPFSWIRHFLITLALNIIIVLLAIYVPDIRNVFGVVGASTSTCLIFIFPGLFYLKLSREDFLSWKKLGGLILSHRLACSGVISAHCNLCLPDSSNPPTSASRVAETTEKEEIPWRCAPRGKATQGHSKKATVYKPREEASGEPNVSTP

SEQ ID NO: 68417 - DNA, 1566 bp, Artificial Sequence
  derived and/or modified sequence
atggaggccagctggggcagcttcaacgccgagagaggctggtacgtgagcgtgcagcagcccgaggaggccgaggccgaggagctgagccccctgctgagcaacgagctgcacagacagagaagccccggcgtgagcttcggcctgagcgtgttcaacctgatgaacgccatcatgggcagcggcatcctgggcctggcctacgtgctggccaacaccggcgtgttcggcttcagcttcctgctgctgaccgtggccctgctggccagctacagcgtgcacctgctgctgagcatgtgcatccagaccgccgtgaccagctacgaggacctgggcctgttcgccttcggcctgcccggcaagctggtggtggccggcaccatcatcatccagaacatcggcgccatgagcagctacctgctgatcatcaagaccgagctgcccgccgccatcgccgagttcctgaccggcgactacagcagatactggtacctggacggccagaccctgctgatcatcatctgcgtgggcatcgtgttccccctggccctgctgcccaagatcggcttcctgggctacaccagcagcctgagcttcttcttcatgatgttcttcgccctggtggtgatcatcaagaagtggagcatcccctgccccctgaccctgaactacgtggagaagggcttccagatcagcaacgtgaccgacgactgcaagcccaagctgttccacttcagcaaggagagcgcctacgccctgcccaccatggccttcagcttcctgtgccacaccagcatcctgcccatctactgcgagctgcagagccccagcaagaagagaatgcagaacgtgaccaacaccgccatcgccctgagcttcctgatctacttcatcagcgccctgttcggctacctgaccttctacgacaaggtggagagcgagctgctgaagggctacagcaagtacctgagccacgacgtggtggtgatgaccgtgaagctgtgcatcctgttcgccgtgctgctgaccgtgcccctgatccacttccccgccagaaaggccgtgaccatgatgttcttcagcaacttccccttcagctggatcagacacttcctgatcaccctggccctgaacatcatcatcgtgctgctggccatctacgtgcccgacatcagaaacgtgttcggcgtggtgggcgccagcaccagcacctgcctgatcttcatcttccccggcctgttctacctgaagctgagcagagaggacttcctgagctggaagaagctgggcggcctgatcctgagccacagactggcctgcagcggcgtgatcagcgcccactgcaacctgtgcctgcccgacagcagcaacccccccaccagcgccagcagagtggccgagaccaccggcagagacaccatggagatgtgcacccagagaaagggccacgccagaacccagcaggagggcaactgcctgcaggccaagggcagaggcctgagaagaaccaagagagtgcacaccctgatcctgcacttccccaccagcagaaccgtgagcaagtag

SEQ ID NO: 68418 - DNA, 1551 bp, Artificial Sequence
  derived and/or modified sequence
ggcagcttcaacgccgagagaggctggtacgtgagcgtgcagcagcccgaggaggccgaggccgaggagctgagccccctgctgagcaacgagctgcacagacagagaagccccggcgtgagcttcggcctgagcgtgttcaacctgatgaacgccatcatgggcagcggcatcctgggcctggcctacgtgctggccaacaccggcgtgttcggcttcagcttcctgctgctgaccgtggccctgctggccagctacagcgtgcacctgctgctgagcatgtgcatccagaccgccgtgaccagctacgaggacctgggcctgttcgccttcggcctgcccggcaagctggtggtggccggcaccatcatcatccagaacatcggcgccatgagcagctacctgctgatcatcaagaccgagctgcccgccgccatcgccgagttcctgaccggcgactacagcagatactggtacctggacggccagaccctgctgatcatcatctgcgtgggcatcgtgttccccctggccctgctgcccaagatcggcttcctgggctacaccagcagcctgagcttcttcttcatgatgttcttcgccctggtggtgatcatcaagaagtggagcatcccctgccccctgaccctgaactacgtggagaagggcttccagatcagcaacgtgaccgacgactgcaagcccaagctgttccacttcagcaaggagagcgcctacgccctgcccaccatggccttcagcttcctgtgccacaccagcatcctgcccatctactgcgagctgcagagccccagcaagaagagaatgcagaacgtgaccaacaccgccatcgccctgagcttcctgatctacttcatcagcgccctgttcggctacctgaccttctacgacaaggtggagagcgagctgctgaagggctacagcaagtacctgagccacgacgtggtggtgatgaccgtgaagctgtgcatcctgttcgccgtgctgctgaccgtgcccctgatccacttccccgccagaaaggccgtgaccatgatgttcttcagcaacttccccttcagctggatcagacacttcctgatcaccctggccctgaacatcatcatcgtgctgctggccatctacgtgcccgacatcagaaacgtgttcggcgtggtgggcgccagcaccagcacctgcctgatcttcatcttccccggcctgttctacctgaagctgagcagagaggacttcctgagctggaagaagctgggcggcctgatcctgagccacagactggcctgcagcggcgtgatcagcgcccactgcaacctgtgcctgcccgacagcagcaacccccccaccagcgccagcagagtggccgagaccaccggcagagacaccatggagatgtgcacccagagaaagggccacgccagaacccagcaggagggcaactgcctgcaggccaagggcagaggcctgagaagaaccaagagagtgcacaccctgatcctgcacttccccaccagcagaaccgtgagcaagtag

SEQ ID NO: 68419 - DNA, 1464 bp, Artificial Sequence
  derived and/or modified sequence
atgagcggccccagaatcatgtacagcctgctgctggagctgcacagacagagaagccccggcgtgagcttcggcctgagcgtgttcaacctgatgaacgccatcatgggcagcggcatcctgggcctggcctacgtgctggccaacaccggcgtgttcggcttcagcttcctgctgctgaccgtggccctgctggccagctacagcgtgcacctgctgctgagcatgtgcatccagaccgccgtgaccagctacgaggacctgggcctgttcgccttcggcctgcccggcaagctggtggtggccggcaccatcatcatccagaacatcggcgccatgagcagctacctgctgatcatcaagaccgagctgcccgccgccatcgccgagttcctgaccggcgactacagcagatactggtacctggacggccagaccctgctgatcatcatctgcgtgggcatcgtgttccccctggccctgctgcccaagatcggcttcctgggctacaccagcagcctgagcttcttcttcatgatgttcttcgccctggtggtgatcatcaagaagtggagcatcccctgccccctgaccctgaactacgtggagaagggcttccagatcagcaacgtgaccgacgactgcaagcccaagctgttccacttcagcaaggagagcgcctacgccctgcccaccatggccttcagcttcctgtgccacaccagcatcctgcccatctactgcgagctgcagagccccagcaagaagagaatgcagaacgtgaccaacaccgccatcgccctgagcttcctgatctacttcatcagcgccctgttcggctacctgaccttctacgacaaggtggagagcgagctgctgaagggctacagcaagtacctgagccacgacgtggtggtgatgaccgtgaagctgtgcatcctgttcgccgtgctgctgaccgtgcccctgatccacttccccgccagaaaggccgtgaccatgatgttcttcagcaacttccccttcagctggatcagacacttcctgatcaccctggccctgaacatcatcatcgtgctgctggccatctacgtgcccgacatcagaaacgtgttcggcgtggtgggcgccagcaccagcacctgcctgatcttcatcttccccggcctgttctacctgaagctgagcagagaggacttcctgagctggaagaagctgggcggcctgatcctgagccacagactggcctgcagcggcgtgatcagcgcccactgcaacctgtgcctgcccgacagcagcaacccccccaccagcgccagcagagtggccgagaccaccgagaaggaggagatcccctggagatgcgcccccagaggcaaggccacccagggccacagcaagaaggccaccgtgtacaagcccagagaggaggccagcggcgagcccaacgtgagcaccccctag

SEQ ID NO: 68420 - DNA, 1566 bp, Artificial Sequence
  derived and/or modified sequence
atggaggccagctgggggtctttcaatgcagagagagggtggtacgtatctgtccaacagccagaagaggctgaggctgaagagttatctccgctgctgtctaatgagctgcaccgacagagatctcccggagtgtctttcggcttgtcagtctttaacctaatgaacgccattatgggttccggcattctgggattggcttacgtgctcgcaaatacaggagtcttcggcttttcctttctcctgctcaccgttgcactccttgcctcctattccgtccatctgcttctctccatgtgcattcagactgccgttacctcctatgaggatctgggactctttgctttcgggctccccgggaagctggtagtcgctgggacgatcattatccagaatatcggtgccatgagttcatacctgctgataattaagaccgaactgccagctgcaattgcggaattcttgactggagactactccaggtactggtacttggacggccagactctcctgattatcatctgtgtggggattgtatttccactggctctcctcccaaagataggtttcttaggatacactagcagtctcagtttctttttcatgatgttttttgcgttggtggtaatcatcaagaagtggagcataccctgccccctgactctcaactacgtggagaagggcttccagatttcaaacgtgaccgacgactgcaaacccaagttatttcacttcagtaaggagtctgcctacgccttacccaccatggcatttagtttcttatgtcataccagcatcctgccgatctactgcgagctgcagagcccatccaagaaacggatgcagaatgtcacaaacactgccattgcgttatcatttctcatctacttcatcagcgcgctgtttggatatcttactttttatgacaaagtggaaagcgaactgttgaagggctacagtaagtacctgtcacacgacgtggtggtgatgactgtcaaactgtgtattctgtttgcagtcctgctcactgtgccacttatacactttccagctcgcaaggcagtcaccatgatgtttttcagtaactttccctttagttggatcaggcattttctcattaccctggccttaaacatcatcatcgttctgctagccatctacgtgccagatatccgcaatgtgtttggggtcgttggcgcctctacgtctacttgcctgatttttattttccccgggctgttctatctgaaacttagccgagaggatttcctctcatggaagaagttaggcgggctcatcctttcacatcgcttggcttgcagcggggtgatcagcgcgcactgtaacctgtgcctccccgatagctccaaccctcccaccagtgctagtagagtggctgaaaccactggcagggatactatggaaatgtgcacacagaggaaaggccatgcgcgaacacagcaagagggaaactgcttgcaagccaagggcagaggactgagacggacgaaacgggtgcataccttgattctgcattttcccacgtcacggactgtgtcaaaatag

SEQ ID NO: 68421 - DNA, 1551 bp, Artificial Sequence
  derived and/or modified sequence
ggatctttcaatgccgagcgcggctggtatgtgtctgtgcaacagccggaagaggccgaggccgaggagttgtctcctctgctgagtaacgaactccaccggcaacgtagtccaggtgtgagttttgggctctctgtgtttaacctgatgaatgctattatggggtcaggcattctgggtctggcctacgtgctcgccaataccggggtgtttgggtttagctttctcctgctgaccgttgccttgcttgcctcatattctgtccatctgcttctgagcatgtgcatacagacagctgtcacatcttacgaggatctaggccttttcgcatttggtctgcctgggaaattagtggtagctggcaccatcattatacagaatattggagccatgagttcgtacctactcattattaagacggagttacccgccgctattgctgagttccttactggggattactcccgttattggtacctcgacgggcagaccctgctgatcataatctgcgttggtatcgtgttccctctagcactcttgcctaaaatcggctttctcggctatacttccagcctgagttttttctttatgatgttctttgcattggtggttataattaagaaatggagcatcccctgccccctgacccttaattacgttgagaaaggattccaaatctctaatgttacagacgactgcaagcccaaactttttcacttcagtaaggaatcggcttatgcactcccaacaatggctttttcattcctttgccacacctcaattctgccaatctactgtgagctccagtccccatccaaaaagagaatgcaaaatgtaaccaataccgcgatcgcactgtcctttctcatatactttatcagcgcgctgttcgggtatttgacattttatgataaggtggagtccgagcttctgaaaggctatagtaagtacctgtctcatgacgtcgtggtgatgactgtgaagttgtgcattctgtttgccgtcctgctgaccgtgcctctgattcatttccctgcgcgaaaagctgtgaccatgatgttcttcagcaacttccccttttcctggattcggcatttcttgataactctggctctgaacataatcatcgtgctactggcaatttacgtgcctgacattcggaacgtgtttggtgtcgtcggagcgagtaccagcacttgcttgatcttcattttcccgggcctcttttacctcaagcttagcagggaagacttcttaagttggaaaaagcttggaggcttgatactcagtcaccgactagcctgttccggagtgatatctgcacactgcaacctctgcctgcccgactcctctaatccccctacctctgcttcgcgggtggccgaaactacagggcgagataccatggaaatgtgtacacagcgaaagggccacgcaagaacccaacaggaagggaattgtctgcaagcaaagggaagagggcttagacgaacgaagcgggtccataccctcatacttcacttccccacaagccggactgtatccaagtag

SEQ ID NO: 68422 - DNA, 1464 bp, Artificial Sequence
  derived and/or modified sequence
atgtccggcccacgcatcatgtactccctgctgctcgagctgcatcgtcaaagatcaccaggagtgagctttgggttgtctgttttcaacctcatgaacgcgattatgggaagtggtatattgggattggcttatgttctggctaatactggcgtctttgggttttccttcctcttattaaccgtggccttgctagctagctactctgtgcatcttcttctgagcatgtgcatacaaaccgccgtaacctcctacgaggacctgggtcttttcgcattcggccttcctggaaaactggtggttgccgggaccatcattattcagaatatcggggctatgagtagttatctcctgattatcaagaccgagctgcccgcagctattgctgagttcctgacaggagattattcccggtattggtacctcgatggacagactctactgattatcatttgtgtgggaatcgtgttccccctcgccctgcttccaaaaatcggatttctggggtatacctccagcttgtccttctttttcatgatgttctttgccctggtagtgattatcaagaaatggtctatcccctgtccactgaccctgaactatgtcgagaaaggattccagatctctaacgtgaccgatgactgcaagccgaagctgtttcattttagcaaggagtctgcttacgcactgccaacaatggcctttagtttcttgtgtcacacatcgattctgcccatctattgcgagcttcagtcaccctcaaagaaaaggatgcagaatgtcacgaatactgctatcgcgttaagttttttgatttacttcattagcgctttgttcggttaccttaccttctacgacaaagtggagtccgagctcttaaagggatatagcaagtatctgtcacatgatgtggtggtcatgactgtgaaactttgtatcctatttgcagtgctgttgaccgtgcccctaatccacttccccgcacggaaggccgtcaccatgatgtttttctcaaatttcccattcagttggattaggcatttccttatcacattagcactgaatatcattatagtgctgcttgccatttatgttccagacattcggaacgtgtttggggttgtaggagcctcaacaagcacatgtctcattttcatttttcccggccttttttatctgaaactatcccgcgaggactttctatcctggaaaaaactgggcggcctcattttgtctcaccgccttgcgtgctccggtgtgatctcagcccactgcaatctgtgcctaccggacagcagtaatccaccaacatccgccagcagggtagctgaaaccacagaaaaggaagagatcccctggaggtgcgcccccagaggaaaggccacccagggccactctaagaaggccactgtctataagcctcgcgaagaggcttcaggcgagccaaatgtgtccaccccctag

SEQ ID NO: 68423 - DNA, 1566 bp, Artificial Sequence
  derived and/or modified sequence
atggaggcctcctggggcagcttcaatgctgagcggggctggtacgtgtctgtgcagcagcctgaggaggccgaggccgaggagctgagccccctgctgagcaatgagctgcaccggcagaggagccctggggtgtcctttggcctgagcgtcttcaacctgatgaatgccatcatgggcagcggcatcctgggcctggcctacgtgctggccaacacaggagtgtttggcttctccttcctgctgctgactgtggccctgctggccagctacagcgtgcacctgctgctgtccatgtgcatccagacagctgtgaccagctatgaggacctgggcctgtttgccttcggcctgcccgggaagctggtggtggccggcaccatcatcatccagaacattggagccatgagcagctacctgctgatcatcaagacagagctgcctgctgccatcgccgagttcctgaccggggactacagccgctactggtacctggatggccagaccctgctgatcatcatctgtgtgggcatcgtgttccccctggccctgctgcccaagattggcttcctgggctacaccagcagcctgtccttcttcttcatgatgttctttgccctggtggtgatcatcaagaagtggagcatcccctgccccctgaccctgaactacgtggagaagggcttccagatcagcaatgtgacagatgactgcaagcccaagctgttccacttcagcaaggagagcgcctatgccctgcccaccatggccttctccttcctgtgccacaccagcatcctgcccatctactgtgagctgcagagccccagcaagaagaggatgcagaatgtgaccaacacagccatcgccctgtccttcctgatctacttcatcagcgccctgtttggctacctgaccttctatgacaaggtggagagcgagctgctgaagggctacagcaagtacctgagccatgatgtggtggtgatgacagtgaagctgtgcatcctgtttgctgtgctgctgactgtgcccctcatccacttccctgccaggaaggctgtgaccatgatgttcttcagcaacttccccttctcctggatccgccacttcctgatcaccctggccctgaacatcatcatcgtgctgctggccatctacgtgcctgacatcagaaatgtgtttggagtggtgggcgccagcaccagcacctgcctgatcttcatcttccctggcctcttctacctgaagctgagccgggaggacttcctgtcctggaagaagctgggcggcctcatcctgagccaccggctggcctgcagcggggtcatcagcgcccactgcaacctgtgcctgcctgacagcagcaacccccccaccagcgccagccgggtggccgagaccaccggccgggacaccatggagatgtgcacccagaggaaaggacatgcccggacccagcaggagggcaactgcctgcaggccaagggccggggcctgcggaggaccaagagggtgcacaccctcatcctgcacttccccaccagcaggacagtgtccaagtag

SEQ ID NO: 68424 - DNA, 1551 bp, Artificial Sequence
  derived and/or modified sequence
ggcagcttcaatgctgagcggggctggtacgtgtctgtgcagcagcctgaggaggccgaggccgaggagctgagccccctgctgagcaatgagctgcaccggcagaggagccctggggtgtcctttggcctgtctgtgttcaacctgatgaatgccatcatgggcagcggcatcctgggcctggcctacgtgctggccaacacaggagtgtttggcttctccttcctgctgctgactgtggccctgctggccagctacagcgtgcacctgctgctgtccatgtgcatccagacagctgtgaccagctatgaggacctgggcctgtttgccttcggcctgcccgggaagctggtggtggccggcaccatcatcatccagaacatcggggccatgagcagctacctgctgatcatcaagacagagctgcctgctgccatcgccgagttcctgactggagactacagccgctactggtacctggatggccagaccctgctgatcatcatctgtgtgggcatcgtgttccccctggccctgctgcccaagattggcttcctgggctacaccagcagcctgtccttcttcttcatgatgttctttgccctggtggtgatcatcaagaagtggagcatcccctgccccctgaccctgaactacgtggagaagggcttccagatcagcaatgtgacagatgactgcaagcccaagctgttccacttcagcaaggagagcgcctatgccctgcccaccatggccttctccttcctgtgccacaccagcatcctgcccatctactgtgagctgcagagccccagcaagaagaggatgcagaatgtgaccaacacagccatcgccctgtccttcctgatctacttcatcagcgccctgtttggctacctgaccttctatgacaaggtggagagcgagctgctgaagggctacagcaagtacctgagccatgatgtggtggtgatgacagtgaagctgtgcatcctgtttgctgtgctgctgactgtgcccctcatccacttccctgccaggaaggctgtgaccatgatgttcttcagcaacttccccttctcctggatccgccacttcctgatcaccctggccctgaacatcatcatcgtgctgctggccatctacgtgcctgacatcagaaatgtgtttggagtggtgggcgccagcaccagcacctgcctgatcttcatcttccctggcctcttctacctgaagctgagccgggaggacttcctgtcctggaagaagctgggcggcctcatcctgagccaccggctggcctgcagcggggtcatcagcgcccactgcaacctgtgcctgcctgacagcagcaacccccccaccagcgccagccgggtggccgagaccaccggccgggacaccatggagatgtgcacccagaggaagggccacgcccggacccagcaggagggcaactgcctgcaggccaagggccggggcctgcggaggaccaagagggtgcacaccctcatcctgcacttccccaccagcaggacagtgtccaagtag

SEQ ID NO: 68425 - DNA, 1464 bp, Artificial Sequence
  derived and/or modified sequence
atgagcggcccccgcatcatgtacagcctgctgctggagctgcaccggcagaggagccctggggtgtcctttggcctgtctgtgttcaacctgatgaatgccatcatgggcagcggcatcctgggcctggcctacgtgctggccaacacaggagtgtttggcttctccttcctgctgctgactgtggccctgctggccagctacagcgtgcacctgctgctgtccatgtgcatccagacagctgtgaccagctatgaggacctgggcctgtttgccttcggcctgcccgggaagctggtggtggccggcaccatcatcatccagaacatcggggccatgagcagctacctgctgatcatcaagacagagctgcctgctgccatcgccgagttcctgactggagactacagccgctactggtacctggatggccagaccctgctgatcatcatctgtgtgggcatcgtgttccccctggccctgctgcccaagattggcttcctgggctacaccagcagcctgtccttcttcttcatgatgttctttgccctggtggtgatcatcaagaagtggagcatcccctgccccctgaccctgaactacgtggagaagggcttccagatcagcaatgtgacagatgactgcaagcccaagctgttccacttcagcaaggagagcgcctatgccctgcccaccatggccttctccttcctgtgccacaccagcatcctgcccatctactgtgagctgcagagccccagcaagaagaggatgcagaatgtgaccaacacagccatcgccctgtccttcctgatctacttcatcagcgccctgtttggctacctgaccttctatgacaaggtggagagcgagctgctgaagggctacagcaagtacctgagccatgatgtggtggtgatgacagtgaagctgtgcatcctgtttgctgtgctgctgactgtgcccctcatccacttccctgccaggaaggctgtgaccatgatgttcttcagcaacttccccttctcctggatccgccacttcctgatcaccctggccctgaacatcatcatcgtgctgctggccatctacgtgcctgacatcagaaatgtgtttggagtggtgggcgccagcaccagcacctgcctgatcttcatcttccctggcctcttctacctgaagctgagccgggaggacttcctgtcctggaagaagctgggcggcctcatcctgagccaccggctggcctgcagcggggtcatcagcgcccactgcaacctgtgcctgcctgacagcagcaacccccccaccagcgccagccgggtggccgagaccacagagaaggaggagatcccctggaggtgtgccccccggggcaaggccacccagggccacagcaagaaggccaccgtgtacaagccccgggaggaggccagcggggagcccaacgtgtccaccccctag

SEQ ID NO: 68426 - DNA, 1566 bp, Artificial Sequence
  derived and/or modified sequence
atggaggccagctggggcagcttcaacgccgagcggggctggtacgtcagcgttcagcagcctgaagaggcggaagccgaagaactttcacccttactgagcaatgagctgcataggcaacggagccccggcgtcagctttggcctgtctgtgtttaacctgatgaatgccataatggggtctggaattctgggcctcgcctacgttctggccaatactggtgtcttcggattctcgttcctgttgctcactgtggccttactcgcttcttattccgtgcacttgctgttgagcatgtgtattcaaacggccgtcacaagctatgaagacctcgggttatttgcttttggccttccagggaaattggtggttgccggcactattatcatccagaatatcggcgccatgtcttcatacctgctgataatcaaaactgaactccctgcggctatcgcggaatttttaacaggagactattcgaggtattggtacctggacggccagaccttgctgattatcatctgtgtggggatcgtgtttccgttagctttgctccctaagattggttttttgggttacacttcctctttgtccttttttttcatgatgttttttgccctagtggtgatcattaaaaagtggagcatcccttgtcctctgaccctgaattacgtcgaaaagggcttccagatctccaacgttacagacgattgtaagcccaaacttttccatttctctaaggaaagcgcctatgccttaccaactatggcgtttagtttcttatgtcacaccagcatactgcctatctattgcgaattacaatccccctctaaaaagaggatgcagaatgtgaccaataccgctatcgctttgtctttcctgatttactttatttcagccttgttcggttacctcaccttttacgacaaagtcgagtcagaactgctgaaaggttactccaagtatctctcacacgacgtcgtggtgatgaccgtgaaactctgcatattatttgccgttttactcaccgtccctctgattcacttccctgcacgcaaagccgtcacaatgatgttcttctcaaattttcctttttcttggatccggcactttttgataacgcttgcgttgaacatcattatcgtgctcttagccatctatgtgcctgacattcgaaacgtgttcggagtggtgggggcctccacctccacctgtttaatctttatctttcccggcctgttttaccttaagctatctcgagaagacttcctgagttggaagaaattgggggggctcattttgtcccataggctcgcatgctccggcgtgatttctgcgcactgcaacttgtgtctgcccgactcctcaaatccccccacctccgcttccagggtggcagaaactaccgggcgcgatactatggaaatgtgcactcagcgcaaggggcacgcacggacccagcaggagggcaactgcctgcaggctaagggccgaggcctgaggagaaccaaacgggtgcacacattaattctgcatttccccacaagcaggaccgtcagcaagtag

SEQ ID NO: 68427 - DNA, 1551 bp, Artificial Sequence
  derived and/or modified sequence
ggcagcttcaacgccgagcggggctggtacgtgagcgtgcagcagccagaggaggcagaagctgaagagctgtcccccctgctcagtaacgagctccaccgccagagatcaccaggtgtgtcattcgggctaagtgtcttcaatctgatgaatgctattatggggtccggtattctgggcctcgcctacgtgttagctaacactggagtgttcggcttctctttcttacttttgaccgtagccctgttagcctcatactcagtccatcttcttttaagcatgtgcatccagacagccgttacatcctatgaggaccttggcttatttgccttcgggctgcccgggaagctggtggtggccggcaccattattatccagaatataggagcaatgagttcatatctgctaatcatcaaaaccgagcttcccgcagccattgcagaatttctgaccggtgattattctaggtattggtatttagacggtcaaaccctgttgattatcatttgcgttggaatagtattcccactcgctcttctgcctaaaattgggtttctgggatacacctcatccctgagcttcttctttatgatgtttttcgccttggttgtgatcattaaaaagtggagcataccttgtccgctgacactcaattacgtggagaaaggctttcagattagcaacgtgaccgacgactgtaagcctaagctctttcatttcagtaaagaaagcgcctacgcattgcctactatggcattcagctttttatgtcataccagcatcctgcccatctactgtgaactgcagagtccctctaagaaaaggatgcaaaacgtaaccaatactgctatcgcactctcgtttctgatatatttcatcagcgcactgttcgggtatctgacattctatgacaaggtggaaagcgaattgctgaagggatactcaaagtacctgagccatgacgtagttgtgatgaccgtgaaactatgcatcttatttgccgttctgttgaccgtgcctcttattcatttccccgcacgcaaggccgtgacaatgatgtttttctcaaacttcccattttcatggattagacatttccttattacactggccttgaatattattatcgttttgcttgccatctatgtaccggatattagaaacgtcttcggcgtggtaggagcctctacatcgacttgcctgatcttcatcttccccgggctcttttacctcaaattgtcgagggaggattttttgtcctggaaaaagctagggggcctcatcttaagccaccgtttagcatgctccggggtgatttccgctcattgtaatctgtgtctcccggactcgtcgaaccctcctacttccgcctctagagtcgctgaaactactgggagggacaccatggaaatgtgcacacagcggaagggccatgccagaacgcagcaagaaggaaattgcctacaagctaagggtcggggactccgtcgaaccaaaagagtgcacaccctgatcctccacttccctactagtaggactgtgtccaagtag

SEQ ID NO: 68428 - DNA, 1464 bp, Artificial Sequence
  derived and/or modified sequence
atgagcggcccccggatcatgtacagcctgctgctggagctgcaccggcagcggagccccggtgtctcctttggattatccgtgttcaatctcatgaatgctatcatgggctctgggattttaggcctcgcttatgtacttgctaacaccggagtattcgggttctcttttctcctgcttacggtagccctccttgccagctatagtgtacacttacttctttccatgtgcattcagacagctgtaacctcgtacgaggacctgggcctgttcgccttcggcctgccaggaaagcttgtggttgcaggaacaattatcatccagaacataggggcaatgtcctcttatttgcttatcatcaagactgaactacccgctgctatcgctgaatttctgaccggcgactattcccgctactggtacctggacggacagacgttactgattattatatgcgtcggcattgtgtttccgttggcccttttacctaagataggctttctcggctacacctcatctctcagttttttctttatgatgttcttcgccctggtggtgatcatcaagaaatggagcatcccatgcccgctgacactgaactacgtcgagaagggttttcagatatcaaatgttacagacgactgcaaacccaaactcttccatttctctaaagaaagtgcctacgccctccctaccatggctttcagcttcctctgccatacttccattctccccatctactgtgagcttcaatccccttcaaagaaacgaatgcagaatgtcacaaataccgccattgccctgtcattcttaatttactttatatcggctctgtttgggtacctgacgttttacgacaaagtggagtccgagctgttgaaaggatacagtaagtacctgtctcacgacgttgtcgtaatgaccgttaaactgtgtattctgttcgctgtcttacttacagtacccctgatacatttccctgctaggaaggcagtgaccatgatgttcttctctaattttccattcagctggattcgccacttcctaatcaccctggcactgaacatcataattgtgctgttagccatttatgtgcctgatatacgcaacgtgtttggagttgtgggggcctcaacctcaacatgtcttattttcatctttccggggctgttctatctgaagctgtcgcgtgaggacttcctgtcctggaaaaagctcggaggactgatactttctcaccgacttgcctgcagcggcgtgatttccgcacactgtaatctttgtctgccggactccagtaaccccccaaccagcgcttctagggtcgcggaaacgactgaaaaggaggaaatcccatggcgctgtgccccacgtgggaaggcaacgcagggccatagcaagaaggccactgtctacaaaccgcgtgaggaggcgtcaggtgagcctaacgtatctaccccctag

SEQ ID NO: 68429 - DNA, 1566 bp, Artificial Sequence
  derived and/or modified sequence
atggaagcaagttgggggtcttttaacgctgagcggggatggtatgtgtctgtgcagcagccagaggaagctgaagcagaggaactatcccctcttctatccaacgagcttcaccggcaaaggagtcctggcgtctccttcgggctctccgtattcaatctcatgaacgcgatcatgggatccggcattctgggcctggcatatgtgctggctaacaccggagtcttcggttttagttttctcctgctaacggtcgcgttgttggctagctattccgtacacctcctgctctctatgtgcatccagactgccgttacatcttatgaagacctcgggctgtttgctttcgggctgcctggaaaactcgtggttgccggaaccatcattatccagaatatcggcgctatgtcctcatacctcttaataattaaaaccgagttgcccgcagccatcgcagagttcctgaccggagattacagccgctactggtacctggatgggcagacactccttatcattatctgcgtgggcattgtgtttcctttagctctgcttccaaaaatcggtttcctcgggtatacctcctccctgagtttcttttttatgatgttctttgcactggtggtaattatcaagaaatggtccatcccttgtcctttaacactgaattacgtggaaaaagggtttcagatttccaatgtgacggatgattgcaaaccaaaactcttccatttttcgaaagagtccgcttatgcactcccaaccatggccttcagctttctctgccacacctcgatcctgcctatctattgtgagttacagagcccttccaaaaaaagaatgcagaatgttacgaacacggcaatcgcactaagtttcttaatctacttcatctcagccttatttggctacttaactttctacgataaggtggaatctgagctgctcaagggctatagtaagtatctgtcacatgacgtagttgtaatgacagtcaagctctgtatcttgttcgctgttctgttgactgtgcctctgatacactttcccgctcgtaaagccgttactatgatgttcttcagtaacttccctttctcttggataagacacttcctcatcacactggcccttaacatcatcatagtgctgctcgcgatctacgtccccgatattcggaacgttttcggcgtcgtgggggctagtacctccacttgcctaattttcatatttcccggtctcttttacctgaaactttcccgggaagacttcctcagttggaagaagctgggaggccttatcctctcacatagactcgcttgttctggcgtcatctcagcccattgcaacctgtgcctgcctgacagctccaaccctcccacctccgcttctcgtgtagctgagaccacaggaagagatactatggagatgtgtacccagcgaaagggacacgcacggacccaacaggaaggaaattgcttacaggccaaagggagaggactgaggcgcactaagcgtgtgcatacgctaatccttcattttccaaccagcagaaccgtgtccaaatag

SEQ ID NO: 68430 - DNA, 1551 bp, Artificial Sequence
  derived and/or modified sequence
ggatccttcaacgcagaacgcggatggtacgtgtccgtacagcagccagaggaagctgaagcagaagaactcagccccctcctgagcaacgaacttcacaggcagcggtcacccggtgtatcatttggactgtcagtgtttaacctgatgaacgctatcatgggctctggaattctggggcttgcatacgtgctcgccaatacaggtgtgttcggctttagtttcctgctgctcaccgtggctttactggcctcatattccgtacacttacttttaagcatgtgcattcagacagctgtgactagctacgaagaccttggactttttgctttcggccttccagggaagctggttgtagccggaaccatcatcattcagaatataggcgcaatgagtagttacctcctcatcattaaaactgaactgcctgctgccattgcagagttcctgacgggtgattattccaggtactggtatctcgatggtcagacactcttgatcattatttgtgttgggatcgttttccccctcgcactgctgccgaaaataggctttctcgggtatacgtcatctctgtcattttttttcatgatgtttttcgctctcgtagttattataaagaagtggtcgatcccatgcccactcacactgaattacgtggagaaggggtttcaaattagcaacgtgacggatgattgcaagccaaagctttttcactttagcaaggaaagtgcctacgcactgccaaccatggctttctcatttctctgtcatacaagcatccttcctatttattgtgaattgcagtcacctagcaaaaagagaatgcagaacgtcactaataccgctatcgctctaagctttctgatctatttcataagcgccctcttcggttacttgactttctatgataaagtcgagagcgaattgcttaagggctactccaaatacctctcccacgacgtcgtcgtgatgacggtgaagctctgtatactgtttgccgtgctgctgaccgttccgctcattcactttcctgccagaaaggctgtgacaatgatgtttttctcaaattttccattttcctggatccgacacttcctcatcacactggctctgaacatcattattgtgctgctggcgatctatgttcccgacattcggaatgtgtttggagtggtcggagcctccacgagcacatgcctaatcttcatttttcccggactcttttatcttaaactttcccgtgaggatttcctgtcctggaagaagttgggcggacttatccttagccataggttggcctgctcgggcgtgatttctgcccactgcaatctgtgtctgccagattcatctaacccacccacatccgccagcagggtcgccgagaccactgggagagacaccatggagatgtgcactcagagaaaagggcatgccaggactcagcaagaaggcaactgcctgcaggccaagggtaggggactgaggaggactaaaagagtgcacactctgattctccacttccctaccagccgaaccgtcagcaaatag

SEQ ID NO: 68431 - DNA, 1464 bp, Artificial Sequence
  derived and/or modified sequence
atgtctgggcctaggatcatgtattccttgcttctagagttgcacaggcagcggagtccgggagtttcttttggtctgagcgtttttaatctgatgaatgccatcatgggcagcgggattctggggctcgcctatgtgctggctaataccggggtgttcggattttcttttcttctgctcacagtggccctgttggccagctatagtgttcatctgctgttgtctatgtgtattcagaccgccgttacctcctacgaagatctgggtctgttcgcctttggcctgcccggaaagttggtcgtagcaggtactatcattatccaaaacataggcgctatgtcttcttaccttctcatcatcaagaccgaactgccggcagctatcgccgaatttctcactggtgactacagcagatactggtatctggatggacagacactcctgattattatttgtgttggaattgtctttccgctagccctccttccaaagataggttttctgggatacacttcttcactgtctttcttttttatgatgtttttcgccctggtggtgatcattaaaaagtggagtattccttgtcccttaaccctgaactacgtggagaaaggatttcaaatttccaacgttactgacgattgtaaacctaaactatttcacttctccaaagaaagcgcctatgccctgccaaccatggcattcagcttcttatgccacacgagcatcctgccgatttattgtgaactccagtcgccctcgaagaaacggatgcagaatgtcactaacactgccattgcgctctcttttctgatttattttatatcggccctcttcggctatttaacgttctacgataaggtagaatccgagctgctgaaggggtatagtaaatatttgagtcacgatgtcgtcgtaatgactgtcaagttatgcattttattcgctgtccttctaaccgtcccgcttatccattttcccgcacgcaaggccgtgaccatgatgtttttctctaatttcccatttagctggatccggcactttctaatcacgctggcccttaatatcatcattgtactgttggccatttatgtgcctgatattagaaacgttttcggagtggtgggggcatctactagcacttgcttgatcttcatatttcctgggctcttttacctgaagctcagtcgggaggatttcctctcctggaagaaactggggggactaatccttagccatcgattggcttgtagcggggtgattagcgcccactgtaacctctgtctgcccgactccagcaacccacccacaagcgcctccagagtggctgagacgaccgagaaagaagagattccttggcgctgcgctcctagaggcaaagccactcagggccatagcaagaaagcgacagtgtataaaccacgcgaagaagcatctggcgagccaaacgtttcaactccttag

SEQ ID NO: 68432 - DNA, 1750 bp, Artificial Sequence
  derived and/or modified sequence
gtcatcagatcaagtcgactcgctcctctccttccaggccctggtgaagtacggaatgccggaagggccgggctcaaagctccgcctctggcgcgaccgacgactggagcgcagggcaggggtagaggctcgtagatggaactggtagtcagctggagagcagcatggaggcgtcctgggggagcttcaacgctgagcggggctggtatgtctctgtccagcagcctgaagaagcggaggccgaagagttgagtccgttgctaagcaacgaacttcacagacagcgatccccaggtgtttcatttggtttatcagtgtttaatttgatgaatgccatcatgggaagtggcatccttggcttagcttatgttttggctaataccggtgtctttggatttagcttcttgctgctgacagttgctctcctggcttcttactcagtccatcttctgcttagtatgtgtattcagacagctgtaacatcttatgaagatcttggactctttgcatttggattacctggaaagttggtggtggcaggcaccataataattcagaatattggagctatgtcatcttatcttttaattattaaaacagagcttcctgctgctattgcagaatttttgactggagactatagtagatattggtatcttgatggacaaacactactaataatcatatgtgttggcattgtgttccctcttgcacttcttcccaaaataggctttcttggctacacaagtagtttatcatttttctttatgatgttctttgctcttgtggtaataattaaaaaatggtccatcccttgtcctctgacattaaattatgtagagaaaggtttccagatttcaaatgttacagatgattgtaagccaaagctctttcatttctccaaagagagtgcttatgccttaccaaccatggctttttcatttctctgccatacctcaatattgcccatatactgtgaacttcaaagtccttcaaagaaaagaatgcagaatgttaccaatacagcaattgctttaagttttctcatttattttatatctgcactctttgggtacctcactttttatgacaaagtggagtcagaattactaaaaggttatagtaaatacttatcacatgatgttgttgtcatgactgtgaagttatgcatactatttgctgtgcttttgacagtccctctaatccacttccctgccagaaaagctgtaacaatgatgtttttctccaattttccattctcatggattcgccattttttgatcactctagcactcaatattatcatcgttttacttgcaatatatgttcctgacattagaaatgtatttggtgtagttggtgccagtacatcaacatgtttgatttttatattcccaggactattttatcttaaacttagcagagaggattttctgtcatggaaaaagcttgggggtctcattctgtcgcacaggttggcgtgcagtggtgtgatctcagctcattgcaacctctgcctcccggactcaagcaatcctcccacctcagcctccagagtagctgagactacaggaagagataccatggagatgtgcacccagaggaaaggccacgcaaggacacagcaagaaggcaactgtttacaagccaagggaagaggcctcaggagaaccaaacgtgtccacaccttgatcttgcacttcccaacctccagaactgtgagcaaataaatgatgttgtttaatcaccc

SEQ ID NO: 68433 - DNA, 1568 bp, Artificial Sequence
  derived and/or modified sequence
gggagcttcaacgctgagcggggctggtatgtctctgtccagcagcctgaagaagcggaggccgaagagttgagtccgttgctaagcaacgaacttcacagacagcgatccccaggtgtttcatttggtttatcagtgtttaatttgatgaatgccatcatgggaagtggcatccttggcttagcttatgttttggctaataccggtgtctttggatttagcttcttgctgctgacagttgctctcctggcttcttactcagtccatcttctgcttagtatgtgtattcagacagctgtaacatcttatgaagatcttggactctttgcatttggattacctggaaagttggtggtggcaggcaccataataattcagaatattggagctatgtcatcttatcttttaattattaaaacagagcttcctgctgctattgcagaatttttgactggagactatagtagatattggtatcttgatggacaaacactactaataatcatatgtgttggcattgtgttccctcttgcacttcttcccaaaataggctttcttggctacacaagtagtttatcatttttctttatgatgttctttgctcttgtggtaataattaaaaaatggtccatcccttgtcctctgacattaaattatgtagagaaaggtttccagatttcaaatgttacagatgattgtaagccaaagctctttcatttctccaaagagagtgcttatgccttaccaaccatggctttttcatttctctgccatacctcaatattgcccatatactgtgaacttcaaagtccttcaaagaaaagaatgcagaatgttaccaatacagcaattgctttaagttttctcatttattttatatctgcactctttgggtacctcactttttatgacaaagtggagtcagaattactaaaaggttatagtaaatacttatcacatgatgttgttgtcatgactgtgaagttatgcatactatttgctgtgcttttgacagtccctctaatccacttccctgccagaaaagctgtaacaatgatgtttttctccaattttccattctcatggattcgccattttttgatcactctagcactcaatattatcatcgttttacttgcaatatatgttcctgacattagaaatgtatttggtgtagttggtgccagtacatcaacatgtttgatttttatattcccaggactattttatcttaaacttagcagagaggattttctgtcatggaaaaagcttgggggtctcattctgtcgcacaggttggcgtgcagtggtgtgatctcagctcattgcaacctctgcctcccggactcaagcaatcctcccacctcagcctccagagtagctgagactacaggaagagataccatggagatgtgcacccagaggaaaggccacgcaaggacacagcaagaaggcaactgtttacaagccaagggaagaggcctcaggagaaccaaacgtgtccacaccttgatcttgcacttcccaacctccagaactgtgagcaaataaatgatgttgtttaatca

SEQ ID NO: 68434 - DNA, 1734 bp, Artificial Sequence
  derived and/or modified sequence
aaataagacccagaaaaggaggaccgcaccgggacaggggagatgctggagcctgaaccctgggggatggggtctgaaggcagccgccgagattcagatgagattggcgcagttatgaacgtgatagcagcctagcatactctagaaagaaaagatgaaaagcgtcgggtggaagagatgcagcgttgagtggaagctgcgaacatgatgggatgagcggccctaggattatgtactcactgctgttagaacttcacagacagcgatccccaggtgtttcatttggtttatcagtgtttaatttgatgaatgccatcatgggaagtggcatccttggcttagcttatgttttggctaataccggtgtctttggatttagcttcttgctgctgacagttgctctcctggcttcttactcagtccatcttctgcttagtatgtgtattcagacagctgtaacatcttatgaagatcttggactctttgcatttggattacctggaaagttggtggtggcaggcaccataataattcagaatattggagctatgtcatcttatcttttaattattaaaacagagcttcctgctgctattgcagaatttttgactggagactatagtagatattggtatcttgatggacaaacactactaataatcatatgtgttggcattgtgttccctcttgcacttcttcccaaaataggctttcttggctacacaagtagtttatcatttttctttatgatgttctttgctcttgtggtaataattaaaaaatggtccatcccttgtcctctgacattaaattatgtagagaaaggtttccagatttcaaatgttacagatgattgtaagccaaagctctttcatttctccaaagagagtgcttatgccttaccaaccatggctttttcatttctctgccatacctcaatattgcccatatactgtgaacttcaaagtccttcaaagaaaagaatgcagaatgttaccaatacagcaattgctttaagttttctcatttattttatatctgcactctttgggtacctcactttttatgacaaagtggagtcagaattactaaaaggttatagtaaatacttatcacatgatgttgttgtcatgactgtgaagttatgcatactatttgctgtgcttttgacagtccctctaatccacttccctgccagaaaagctgtaacaatgatgtttttctccaattttccattctcatggattcgccattttttgatcactctagcactcaatattatcatcgttttacttgcaatatatgttcctgacattagaaatgtatttggtgtagttggtgccagtacatcaacatgtttgatttttatattcccaggactattttatcttaaacttagcagagaggattttctgtcatggaaaaagcttgggggtctcattctgtcgcacaggttggcgtgcagtggtgtgatctcagctcattgcaacctctgcctcccggactcaagcaatcctcccacctcagcctccagagtagctgagactacagaaaaggaagagataccatggagatgtgcacccagaggaaaggccacgcaaggacacagcaagaaggcaactgtttacaagccaagggaagaggcctcaggagaaccaaacgtgtccacaccttgatcttgcacttcccaacctccagaactgtgagcaaataaatgatgttgtttaatcaccc

SEQ ID NO: 68435 - protein, 592 aa, Artificial Sequence
  derived and/or modified sequence
MALPEEAKIKDAYHMLKRQGIVQSDPPIPVDRTLIPSPPPRPKNPVFDDEEKSKLLAKLLKSKNPDDLQEANKLIKSMVKEDEARIQKVTKRLHTLEEVNNNVRLLSEMLLHYSQEDSSDGDRELMKELFDQCENKRRTLFKLASETEDNDNSLGDILQASDNLSRVINSYKTIIEGQVINGEVATLTLPDSEGNSQCSNQGTLIDLAELDTTNSLSSVLAPAPTPPSSGIPILPPPPQASGPPRSRSSSQAEATLGPSSTSNALSWLDEELLCLGLADPAPNVPPKESAGNSQWHLLQREQSDLDFFSPRPGTAACGASDAPLLQPSAPSSSSSQAPLPPPFPAPVVPASVPAPSAGSSLFSTGVAPALAPKVEPAVPGHHGLALGNSALHHLDALDQLLEEAKVTSGLVKPTTSPLIPTTTPARPLLPFSTGPGSPLFQPLSFQSQGSPPKGPELSLASIHVPLESIKPSSALPVTAYDKNGFRILFHFAKECPPGRPDVLVVVVSMLNTAPLPVKSIVLQAAVPKSMKVKLQPPSGTELSPFSPIQPPAAITQVMLLANPLKKQVLSFLGKACLQPWGQAILLTTSCLA

SEQ ID NO: 68436 - DNA, 1779 bp, Artificial Sequence
  derived and/or modified sequence
atggctctccctgaagaggcaaaaattaaggacgcctaccacatgttgaagcggcaaggaatcgtgcagtcagacccacctattccagtcgaccggacactcatcccaagcccacccccgcgcccaaagaatcccgtgttcgatgacgaagagaaatccaaactgctggcaaaactgctgaaatccaagaatcctgacgacctccaagaggcaaacaaattgattaagtcaatggtaaaggaggacgaggcccgcatccaaaaggtgacgaaacgcttgcacactctggaagaggtcaataacaatgtgcgacttttgtctgagatgctgctccattatagccaggaagacagctcagatggagatcgagagttgatgaaggagctcttcgatcagtgcgagaataaacgccggaccctcttcaagcttgcctcagagacagaggataatgacaactctctgggagatattttgcaggcctctgacaacctgtctcgagtgatcaactcttataaaacgattattgaggggcaagtcattaacggcgaggtggctactttgaccctcccagattccgagggaaacagtcagtgcagcaatcaaggaacattaatcgatctcgctgaactcgatacaacaaactcgctatcttccgtacttgctccggcccccaccccccctagttcagggatcccaatcctgcccccaccacctcaggctagtggaccccctaggagccgcagcagctcacaggcggaggccaccctgggaccttcttccacttccaatgcgctttcgtggctggacgaggaactgctgtgcttgggattagctgaccccgctccgaatgtcccaccaaaggagtccgccgggaatagccaatggcatctgctgcaaagagaacagagtgaccttgatttcttttctcccaggccgggaactgcggcttgtggcgctagtgatgcaccactcctgcagccctcggccccttcctcctcatcttcgcaggcccccttacccccaccttttcccgcccctgtggtgccagcttccgtgccggcaccttccgcagggtcctcgttattctcaaccggcgtcgccccagctttggctccgaaggtggaacctgcggtgcctggccaccacggactcgcactgggcaatagcgctctacatcatctggacgccctcgatcagctcctagaggaggctaaggtgacctctggcctagtcaagccaaccacgtcacccctgataccaaccaccacacctgccaggcccttattgcccttcagtaccggtccaggtagtccactgttccagcctctctccttccaatctcaggggagtccgcctaagggccccgagttgtccttggcttcgatacatgtgcccctggaatcaataaaacctagtagtgccctgcctgttacagcctacgacaagaacggttttcgtatcctgttccactttgccaaggagtgtcccccagggcgccctgatgtgttggtggtggtagtttccatgctgaatacggctcccctacccgtgaaaagcatagtgcttcaggccgctgtgccaaaatccatgaaggttaaactgcagccgccttccggtaccgagttaagtccattttcaccaatacaacctccagccgccatcacacaggtgatgctgttggcaaaccctctgaagaaacaggtcctgtcatttctggggaaagcttgtctgcagccctgggggcaagccatcttgctgaccacctcatgcctggcatag

SEQ ID NO: 68437 - DNA, 1779 bp, Artificial Sequence
  derived and/or modified sequence
atggccctgcctgaggaggccaagatcaaggatgcctaccacatgctgaagaggcagggcatcgtgcagagcgacccccccatccctgtggacaggaccctcatccccagccccccaccccggcccaagaaccctgtgtttgatgatgaggagaagagcaagctgctggccaagctgctgaagagcaagaacccagatgacctgcaggaggccaacaagctgatcaagtccatggtgaaggaggatgaggcccgcatccagaaggtgaccaagaggctgcacaccctggaggaggtgaacaacaacgtgcggctgctgtctgagatgctgctgcactacagccaggaggacagcagtgatggagaccgggagctgatgaaggagctgtttgaccagtgtgagaacaagaggaggaccctcttcaagctggccagcgagacagaggacaatgacaacagcctgggggacatcctgcaggccagtgacaacctgagcagggtcatcaacagctacaagaccatcatcgagggccaggtgatcaatggagaggtggccaccctgaccctgcctgacagcgagggcaacagccagtgcagcaaccagggcaccctgattgacctggccgagctggacaccaccaacagcctgagctctgtgctggccccagcccccaccccacccagcagcggcatccccatcctgcccccaccaccccaggccagcggccccccaagaagccgcagcagcagccaggccgaggccaccctgggccccagcagcaccagcaatgccctgtcctggctggatgaggagctgctgtgcctgggcctggccgaccctgccccaaatgtgccccccaaggagagcgctggcaacagccagtggcacctgctgcagcgggagcagagcgacctggacttcttcagcccccggcccggcacagctgcctgtggggccagtgatgcccccctgctgcagcccagcgcccccagcagcagcagcagccaggcccccctgcccccacccttccctgcccctgtggtgcctgcctctgtgcctgcccccagcgctggcagcagcctcttcagcactggagtggccccagccctggcccccaaggtggagcctgctgtgcccggccaccacggcctggccctgggcaacagcgccctgcaccacctggatgccctggaccagctgctggaggaggccaaggtgaccagcggcctggtgaagcccaccaccagccccctcatccccaccaccaccccagcccggcccctgctgcccttcagcactggacctggcagccccctcttccagcccctgtccttccagagccagggcagcccccccaagggccctgagctgagcctggccagcatccacgtgcccctggagagcatcaagcccagcagcgccctgcctgtgacagcctatgacaagaatggcttccgcatcctcttccactttgccaaggagtgccccccaggccgcccagatgtgctggtggtggtggtgtccatgctgaacacagcccccctgcctgtgaagagcatcgtgctgcaggccgctgtgcccaagtccatgaaggtgaagctgcagccccccagcggcacagagctgagccccttcagccccatccagcccccagctgccatcacccaggtgatgctgctggccaaccccctgaagaagcaggtgctgtccttcctgggcaaggcctgcctgcagccctggggccaggccatcctgctgaccaccagctgcctggcctag

SEQ ID NO: 68438 - DNA, 1779 bp, Artificial Sequence
  derived and/or modified sequence
atggccctgcccgaggaggccaagatcaaggacgcctaccacatgcttaaaagacaaggtatcgtgcagtccgatccccctatccccgtggacagaacattgatcccgtccccacctccacgaccgaagaacccggtgtttgatgacgaagagaaaagtaaacttcttgctaagcttctgaaatccaaaaaccccgacgacctgcaggaggctaataaactaatcaagagtatggtgaaggaagacgaggcacggatacagaaagttacaaaacgtcttcacacccttgaggaagtgaataacaatgtgcggcttctgagcgagatgctgctacattactcacaggaagatagctcagacggcgaccgggaactaatgaaggaactctttgatcaatgcgagaataaacggcgcacgttgttcaaactagccagcgaaactgaggataatgacaattccctcggggatatcttacaggcgtctgacaatctttcccgagtcatcaatagctataagactattatcgaaggacaggttatcaatggggaagtggctaccctgactttacccgactccgagggcaactctcagtgttcaaaccagggcaccttgattgatctcgccgaactggacaccactaactccctgtccagcgtgctggccccggcacccactccccccagttctggaattcctatcctgcctccacctcctcaagcgtccggcccccctcggagcagatcaagtagccaggctgaggcaaccttagggccgagctcaacctcgaacgctctatcttggttggatgaagagctgttgtgcctgggcctcgccgatccagctcctaacgtgccacccaaggagagcgccggcaatagccagtggcatctgctgcagcgcgaacagtccgaccttgacttcttcagcccccgacccggcaccgcggcttgcggggcctccgatgcccctctgttacaaccaagcgcaccttctagctcttcctctcaggccccattgcctcctccttttcctgccccggtcgtccctgccagcgtccctgcaccctcagccggcagtagcttgtttagcactggtgttgcgccagcgcttgccccaaaagtggaaccagctgttcccggtcaccacgggttggccctggggaactccgctttacatcacctcgatgcactggaccagcttctggaagaagcaaaagtgacttcaggacttgtcaagcctacaacctctcctctgatcccaacaaccaccccagccagacccctcctacctttctctacaggaccaggatcaccattgttccagccgctatccttccagagtcaggggtcccctccaaagggacctgagttgtccttagccagcattcacgtaccactggaatctatcaagcccagtagtgcccttccggtcaccgcttacgacaagaatgggttccgcatcctgttccacttcgcaaaggaatgcccaccagggcgccccgacgtcttggtggtggtggtgtccatgctgaacaccgctccgcttccagtcaagagcatcgtgctgcaggccgccgtgccaaaaagcatgaaagtcaaactgcaaccgcccagtggcacggaacttagcccgttcagtccaatacagccacccgcagcaataacacaagtaatgttgttggccaatccccttaagaagcaggtgctgtccttcctgggcaaagcatgtctgcagccatgggggcaggctattttgctgaccacatcttgcctcgcatag

SEQ ID NO: 68439 - DNA, 1779 bp, Artificial Sequence
  derived and/or modified sequence
atggcattacccgaggaggctaaaattaaagatgcatatcacatgctgaagagacagggcatcgtgcaaagcgacccaccaatcccagtagatcgaacacttatcccatccccgcctcccaggccgaagaaccctgtttttgacgacgaggaaaagtccaagctgcttgctaaactccttaaaagtaagaatcccgatgaccttcaggaagccaacaagctgataaagagcatggttaaagaagacgaggcccgaattcagaaagtcacaaagagactgcacacactggaagaggtgaacaacaacgtgcgcctcctctccgaaatgctgctgcactattcccaagaggatagctccgacggtgatcgtgagctcatgaaggaacttttcgatcagtgtgagaacaagagacgtacactatttaagcttgcgagcgaaactgaagataatgacaacagcttaggggacattctgcaggcctccgataatctgtcccgtgtgatcaatagctacaaaacaattattgaaggccaggttataaatggggaggtagcaaccctcaccctgccagatagtgaaggcaactcccagtgcagcaaccagggaacccttattgatctcgccgagctcgatactactaacagtctcagctccgtgcttgcgcctgcccctacgcctcctagctccggtatccctatcctgccaccacctcctcaggcgagtggcccacccaggtctaggtcatcctcccaggctgaggccactctgggaccgagctccactagtaacgctctgtcttggttggatgaggagctgttgtgcctcggacttgccgatcccgctccgaatgttcccccaaaggaaagtgccggaaacagccagtggcacctgcttcagcgagagcagtctgatcttgacttcttctcacctagacctggaacagccgcatgtggcgcttcggacgccccactcttacagccgtctgccccttcatccagttcaagccaggcaccactgccacctccattccccgctccggtagtccctgcatccgtacctgcccctagtgctggatcaagcttattctccacaggtgtggcaccggcactagcccctaaagtggagcccgcagtccctggacaccacggtctggcactgggaaattccgcactgcaccatctggatgcgctggatcaactactcgaggaggccaaggtgaccagtggactagtcaaaccaaccacgtctccactcatccccactacaacaccagccaggccactgctgccattttctacaggcccaggctcccctctcttccaaccactgagcttccaaagccagggttcaccgccaaagggccctgaactttcactcgccagtattcacgtgcccctcgagagcattaaaccatccagtgccctacctgtcacagcttatgacaagaacggatttaggatcctgttccactttgccaaggaatgtcctcccggtagaccagacgtccttgtagttgtagtgagcatgctcaatactgccccacttcccgtgaagtcaatcgtgctgcaggcagccgtgcctaaatcaatgaaggtgaagctgcagcccccatccggaacagaactgagccctttttctccaattcaacccccagcggctatcacgcaagtaatgctgttggccaatcctttgaagaagcaggtgctatcattcttggggaaggcatgcctccagccatggggacaggcaatactgcttaccactagttgtctggcgtag

SEQ ID NO: 68440 - DNA, 1779 bp, Artificial Sequence
  derived and/or modified sequence
atggccctgcccgaggaggccaagatcaaggacgcctaccacatgctgaagagacagggcatcgtgcagagcgacccccccatccccgtggacagaaccctgatccccagccccccccccagacccaagaaccccgtgttcgacgacgaggagaagagcaagctgctggccaagctgctgaagagcaagaaccccgacgacctgcaggaggccaacaagctgatcaagagcatggtgaaggaggacgaggccagaatccagaaggtgaccaagagactgcacaccctggaggaggtgaacaacaacgtgagactgctgagcgagatgctgctgcactacagccaggaggacagcagcgacggcgacagagagctgatgaaggagctgttcgaccagtgcgagaacaagagaagaaccctgttcaagctggccagcgagaccgaggacaacgacaacagcctgggcgacatcctgcaggccagcgacaacctgagcagagtgatcaacagctacaagaccatcatcgagggccaggtgatcaacggcgaggtggccaccctgaccctgcccgacagcgagggcaacagccagtgcagcaaccagggcaccctgatcgacctggccgagctggacaccaccaacagcctgagcagcgtgctggcccccgcccccaccccccccagcagcggcatccccatcctgcccccccccccccaggccagcggcccccccagaagcagaagcagcagccaggccgaggccaccctgggccccagcagcaccagcaacgccctgagctggctggacgaggagctgctgtgcctgggcctggccgaccccgcccccaacgtgccccccaaggagagcgccggcaacagccagtggcacctgctgcagagagagcagagcgacctggacttcttcagccccagacccggcaccgccgcctgcggcgccagcgacgcccccctgctgcagcccagcgcccccagcagcagcagcagccaggcccccctgcccccccccttccccgcccccgtggtgcccgccagcgtgcccgcccccagcgccggcagcagcctgttcagcaccggcgtggcccccgccctggcccccaaggtggagcccgccgtgcccggccaccacggcctggccctgggcaacagcgccctgcaccacctggacgccctggaccagctgctggaggaggccaaggtgaccagcggcctggtgaagcccaccaccagccccctgatccccaccaccacccccgccagacccctgctgcccttcagcaccggccccggcagccccctgttccagcccctgagcttccagagccagggcagcccccccaagggccccgagctgagcctggccagcatccacgtgcccctggagagcatcaagcccagcagcgccctgcccgtgaccgcctacgacaagaacggcttcagaatcctgttccacttcgccaaggagtgcccccccggcagacccgacgtgctggtggtggtggtgagcatgctgaacaccgcccccctgcccgtgaagagcatcgtgctgcaggccgccgtgcccaagagcatgaaggtgaagctgcagccccccagcggcaccgagctgagccccttcagccccatccagccccccgccgccatcacccaggtgatgctgctggccaaccccctgaagaagcaggtgctgagcttcctgggcaaggcctgcctgcagccctggggccaggccatcctgctgaccaccagctgcctggcctag

SEQ ID NO: 68441 - protein, 907 aa, Artificial Sequence
  derived and/or modified sequence
VESAIAEGGASRFSASSGGGGSRGAPQHYPKTAGNSEFLGKTPGQNAQKWIPARSTRRDDNSAANNSANEKERHDAIFRKVRGILNKLTPEKFDKLCLELLNVGVESKLILKGVILLIVDKALEEPKYSSLYAQLCLRLAEDAPNFDGPAAEGQPGQKQSTTFRRLLISKLQDEFENRTRNVDVYDKRENPLLPEEEEQRAIAKIKMLGNIKFIGELGKLDLIHESILHKCIKTLLEKKKRVQLKDMGEDLECLCQIMRTVGPRLDHERAKSLMDQYFARMCSLMLSKELPARIRFLLQDTVELREHHWVPRKAFLDNGPKTINQIRQDAVKDLGVFIPAPMAQGMRSDFFLEGPFMPPRMKMDRDPLGGLADMFGQMPGSGIGTGPGVIQDRFSPTMGRHRSNQLFNGHGGHIMPPTQSQFGEMGGKFMKSQGLSQLYHNQSQGLLSQLQGQSKDMPPRFSKKGQLNADEISLRPAQSFLMNKNQVPKLQPQITMIPPSAQPPRTQTPPLGQTPQLGLKTNPPLIQEKPAKTSKKPPPSKEELLKLTETVVTEYLNSGNANEAVNGVREMRAPKHFLPEMLSKVIILSLDRSDEDKEKASSLISLLKQEGIATSDNFMQAFLNVLDQCPKLEVDIPLVKSYLAQFAARAIISELVSISELAQPLESGTHFPLFLLCLQQLAKLQDREWLTELFQQSKVNMQKMLPEIDQNKDRMLEILEGKGLSFLFPLLKLEKELLKQIKLDPSPQTIYKWIKDNISPKLHVDKGFVNILMTSFLQYISSEVNPPSDETDSSSAPSKEQLEQEKQLLLSFKPVMQKFLHDHVDLQVSALYALQVHCYNSNFPKGMLLRFFVHFYDMEIIEEEAFLAWKEDITQEFPGKGKALFQVNQWLTWLETAEEEESEEEAD

SEQ ID NO: 68442 - protein, 253 aa, Artificial Sequence
  derived and/or modified sequence
MQAFLNVLDQCPKLEVDIPLVKSYLAQFAARAIISELVSISELAQPLESGTHFPLFLLCLQQLAKLQDREWLTELFQQSKVNMQKMLPEIDQNKDRMLEILEGKGLSFLFPLLKLEKELLKQIKLDPSPQTIYKWIKDNISPKLHVDKGFVNILMTSFLQYISSEVNPPSDETDSSSAPSKEQLEQEKQLLLSFKPVMQKFLHDHVDLQVSALYALQVHCYNSNFPKGMLLFLCTSMTWKLLKKKLSWLGKKI

SEQ ID NO: 68443 - protein, 980 aa, Artificial Sequence
  derived and/or modified sequence
MAGWPTPAGTRPWRTEARLCSDGEGAWLGPLAPWREARLASRRGGISFLLSPPLPTPSINIILLKILRCQAAKVESAIAEGGASRFSASSGGGGSRGAPQHYPKTAGNSEFLGKTPGQNAQKWIPARSTRRDDNSAANNSANEKERHDAIFRKVRGILNKLTPEKFDKLCLELLNVGVESKLILKGVILLIVDKALEEPKYSSLYAQLCLRLAEDAPNFDGPAAEGQPGQKQSTTFRRLLISKLQDEFENRTRNVDVYDKRENPLLPEEEEQRAIAKIKMLGNIKFIGELGKLDLIHESILHKCIKTLLEKKKRVQLKDMGEDLECLCQIMRTVGPRLDHERAKSLMDQYFARMCSLMLSKELPARIRFLLQDTVELREHHWVPRKAFLDNGPKTINQIRQDAVKDLGVFIPAPMAQGMRSDFFLEGPFMPPRMKMDRDPLGGLADMFGQMPGSGIGTGPGVIQDRFSPTMGRHRSNQLFNGHGGHIMPPTQSQFGEMGGKFMKSQGLSQLYHNQSQGLLSQLQGQSKDMPPRFSKKGQLNADEISLRPAQSFLMNKNQVPKLQPQITMIPPSAQPPRTQTPPLGQTPQLGLKTNPPLIQEKPAKTSKKPPPSKEELLKLTETVVTEYLNSGNANEAVNGVREMRAPKHFLPEMLSKVIILSLDRSDEDKEKASSLISLLKQEGIATSDNFMQAFLNVLDQCPKLEVDIPLVKSYLAQFAARAIISELVSISELAQPLESGTHFPLFLLCLQQLAKLQDREWLTELFQQSKVNMQKMLPEIDQNKDRMLEILEGKGLSFLFPLLKLEKELLKQIKLDPSPQTIYKWIKDNISPKLHVDKGFVNILMTSFLQYISSEVNPPSDETDSSSAPSKEQLEQEKQLLLSFKPVMQKFLHDHVDLQVSALYALQVHCYNSNFPKGMLLRFFVHFYDMEIIEEEAFLAWKEDITQEFPGKGKALFQVNQWLTWLETAEEEESEEEAD

SEQ ID NO: 68444 - protein, 244 aa, Artificial Sequence
  derived and/or modified sequence
VESAIAEGGASRFSASSGGGGSRGAPQHYPKTAGNSEFLGKTPGQNAQKWIPARSTRRDDNSAANNSANEKERHDAIFRKVRGILNKLTPEKFDKLCLELLNVGVESKLILKGVILLIVDKALEEPKYSSLYAQLCLRLAEDAPNFDGPAAEGQPGQKQSTTFRRLLISKLQDEFENRTRNVDVYDKRENPLLPEEEEQRAIAKIKMLGNIKFIGELGKLDLIHESILHKCIKTLLEKKKRVQL

SEQ ID NO: 68445 - protein, 112 aa, Artificial Sequence
  derived and/or modified sequence
VESAIAEGGASRFSASSGGGGSRGAPQHYPKTAGNSEFLGKTPGQNAQKWIPARSTRRDDNSAANNSANEKERHDAIFRKVRGILNKLTPEKFDKLCLELLNVGVESKLILK

SEQ ID NO: 68446 - protein, 282 aa, Artificial Sequence
  derived and/or modified sequence
VESAIAEGGASRFSASSGGGGSRGAPQHYPKTAGNSEFLGKTPGQNAQKWIPARSTRRDDNSAANNSANEKERHDAIFRKVRGILNKLTPEKFDKLCLELLNVGVESKLILKGVILLIVDKALEEPKYSSLYAQLCLRLAEDAPNFDGPAAEGQPGQKQSTTFRRLLISKLQDEFENRTRNVDVYDKRENPLLPEEEEQRAIAKIKMLGNIKFIGELGKLDLIHESILHKCIKTLLEKKKRVQLKDMGEDLECLCQIMRTVGPRLDHERAKSLMDQYFARMC

SEQ ID NO: 68447 - protein, 130 aa, Artificial Sequence
  derived and/or modified sequence
VESAIAEGGASRFSASSGGGGSRGAPQHYPKTAGNSEFLGKTPGQNAQKWIPARSTRRDDNSAANNSANEKERHDAIFRKVRGILNKLTPEKFDKLCLELLNVGVESKLILKGVILLIVDKALEEPKYSS

SEQ ID NO: 68448 - DNA, 3978 bp, Artificial Sequence
  derived and/or modified sequence
gcgcactgcggcggggctgcgccgcaaccgagctcagccctgtggctcctcctcgctgccctgcgcggattggtggcagacggcaaccgggccgctgattgggcggcgaaggagccattcggggagactctggtgggttcggctgccccaagagtgataagttcggcttcagacacgccttagcgccagcagtgagtcggagctctatggaggtggcagcgggtaccgagtggcggctgcagcagcgactcctctgagctgagtttgaggccgtccccgactccttcctcccccttccctcccccttttttttgttttccgttcccctttcccctcccttccctatccccgacgaccggatcctgaggaggcagctgcggtggcagctgctgagttctcggtgaaggtatttcatttctcctgtcccctcccctccccaccccatctattaatattattcttttgaagattcttcgttgtcaagccgccaaagtggagagtgcgattgcagaagggggtgcttctcgtttcagtgcttcttcgggcggaggaggaagtaggggtgcacctcagcactatcccaagactgctggcaacagcgagttcctggggaaaaccccagggcaaaacgctcagaaatggattcctgcacgaagcactagacgagatgacaactccgcagcaaacaactccgcaaacgaaaaagaacgacatgatgcaatcttcaggaaagtaagaggcatactaaataagcttactcctgaaaagtttgacaagctatgccttgagctcctcaatgtgggtgtagagtctaaactcatccttaaaggggtcatactgctgattgtggacaaagccctagaagagccaaagtatagctcactgtatgctcagctatgtctgcgattggcagaagatgcaccaaactttgatggcccagcagcagagggtcaaccaggacagaagcaaagcaccacattcagacgcctcctaatttccaaattacaagatgaatttgaaaaccgaactagaaatgttgatgtctatgataagcgtgaaaatcccctcctccccgaggaggaggaacagagagccattgctaagatcaagatgttgggaaacatcaaattcattggagagcttggcaagcttgatcttattcacgaatctatccttcataagtgcatcaaaacacttttggaaaagaagaagagagtccaactcaaagatatgggagaggatttggagtgcctctgtcagataatgaggacagtgggacctagattagaccatgaacgagccaagtccttaatggatcagtactttgcccgaatgtgctccttgatgttaagtaaggaattgccagcaaggattcgtttcctgctgcaggataccgtagagttgcgagaacaccattgggttcctcgcaaggcttttcttgacaatggaccaaagacgatcaatcaaattcgtcaagatgcagtaaaagatctaggggtgtttattcctgctcctatggctcaagggatgagaagtgacttctttctggagggaccgttcatgccacccaggatgaaaatggatagggacccacttggaggacttgctgatatgtttggacaaatgccaggtagcggaattggtactggtccaggagttatccaggatagattttcacccaccatgggacgtcatcgttcaaatcaactcttcaatggccatgggggacacatcatgcctcccacacaatcgcagtttggagagatgggaggcaagtttatgaaaagccaggggctaagccagctctaccataaccagagtcagggactcttatcccagctgcaaggacagtcgaaggatatgccacctcggttttctaagaaaggacagcttaatgcagatgagattagcctgaggcctgctcagtcgttcctaatgaataaaaatcaagtgccaaagcttcagccccagataactatgattcctcctagtgcacaaccaccacgcactcaaacaccacctctgggacagacacctcagcttggtctcaaaactaatccaccgcttatccaggaaaagcctgccaagaccagcaaaaagccaccaccgtcaaaggaagaactccttaaactaactgaaactgttgtgactgaatatctaaatagtggaaatgcaaatgaggctgtcaatggtgtaagagaaatgagggctcctaaacactttcttcctgagatgttaagcaaagtaatcatcctgtcactagatagaagcgatgaagataaagaaaaagcaagttctttgatcagtttactcaaacaggaagggatagccacaagtgacaacttcatgcaggctttcctgaatgtattggaccagtgtcccaaactggaggttgacatccctttggtgaaatcctatttagcacagtttgcagctcgtgccatcatttcagagctggtgagcatttcagaactagctcaaccactagaaagtggcacccattttcctctcttcctactttgtcttcagcagttagctaaattacaagatcgagaatggttaacagaactttttcaacaaagcaaggtcaatatgcagaaaatgctcccagaaattgatcagaataaggaccgcatgttggagattttggaaggaaagggactgagtttcttattcccactcctcaaattggagaaggaactgttgaagcaaataaagttggatccatcccctcaaaccatatataaatggattaaagataacatctctcccaaacttcatgtagataaaggatttgtgaacatcttaatgactagcttcttacagtacatttctagtgaagtaaacccccccagcgatgaaacagattcatcctctgctccttccaaagaacagttagagcaggaaaaacaactactactatctttcaagccagtaatgcagaaatttcttcatgatcacgttgatctacaagtcagtgccctgtatgctctccaggtgcactgctataacagcaacttcccaaaaggcatgttacttcgcttttttgtgcacttctatgacatggaaattattgaagaagaagctttcttggcttggaaagaagatataacccaagagtttccgggaaaaggcaaggctttgttccaggtgaatcagtggctaacctggttagaaactgctgaagaagaagaatcagaggaagaagctgactaaagaaccagccaaagccttaaattgtgcaaaacatactgttgctatgatgtaactgcatttgacctaaccactgcgaaaattcattccgctgtaatgttttcacaatatttaaagcagaagcacgtcagttaggatttccttctgcataaggtttttttgtagtgtaatgtcttaatcatagtctaccatcaaatattttaggagtatctttaatgtttagatagtatattagcagcatgcaataattacatcataagttctcaagcagaggcagtctattgcaaggaccttctttgctgccagttatcataggctgttttaagttagaaaactgaatagcaacactgaatactgtagaaatgcactttgctcagtaatacttgagttgttgcaatatttgattatccatttggttgttacagaaaaattcttaactgtaattgatggttgttgccgtaatagtatattgcctgtatttctacctctagtaatgggctttatgtgctagattttaatatccttgagcctgggcaagtgcacaagtctttttaaaagaaacatggtttacttgcacaaaactgatcagttttgagagatcgttaatgcccttgaagtggtttttgtgggtgtgaaacaaatggtgagaatttgaattggtccctcctattatagtattgaaattaagtctacttaatttatcaagtcatgttcatgccctgattttatatacttgtatctatcaataaacattgtgatacttga

SEQ ID NO: 68449 - DNA, 2926 bp, Artificial Sequence
  derived and/or modified sequence
gcgccagcagtgagtcggagctctatggaggtggcagcgggtaccgagtggcggctgcagcagcgactcctctgagctgagtttgaggccgtccccgactccttcctcccccttccctcccccttttttttgttttccgttcccctttcccctcccttccctatccccgacgaccggatcctgaggaggcagctgcggtggcagctgctgagttctcggtgaaggtatttcatttctcctgtcccctcccctccccaccccatctattaatattattcttttgaagattcttcgttgtcaagccgccaaagtggagagtgcgattgcagaagggggtgcttctcgtttcagtgcttcttcgggcggaggaggaagtaggggtgcacctcagcactatcccaagactgctggcaacagcgagttcctggggaaaaccccagggcaaaacgctcagaaatggattcctgcacgaagcactagacgagatgacaactccgcagcaaacaactccgcaaacgaaaaagaacgacatgatgcaatcttcaggaaagtaagaggcatactaaataagcttactcctgaaaagtttgacaagctatgccttgagctcctcaatgtgggtgtagagtctaaactcatccttaaaggggtcatactgctgattgtggacaaagccctagaagagccaaagtatagctcactgtatgctcagctatgtctgcgattggcagaagatgcaccaaactttgatggcccagcagcagagggtcaaccaggacagaagcaaagcaccacattcagacgcctcctaatttccaaattacaagatgaatttgaaaaccgaactagaaatgttgatgtctatgataagcgtgaaaatcccctcctccccgaggaggaggaacagagagccattgctaagatcaagatgttgggaaacatcaaattcattggagagcttggcaagcttgatcttattcacgaatctatccttcataagtgcatcaaaacacttttggaaaagaagaagagagtccaactcaaagatatgggagaggatttggagtgcctctgtcagataatgaggacagtgggacctagattagaccatgaacgagccaagtccttaatggatcagtactttgcccgaatgtgctccttgatgttaagtaaggaattgccagcaaggattcgtttcctgctgcaggataccgtagagttgcgagaacaccattgggttcctcgcaaggcttttcttgacaatggaccaaagacgatcaatcaaattcgtcaagatgcagtaaaagatctaggggtgtttattcctgctcctatggctcaagggatgagaagtgacttctttctggagggaccgttcatgccacccaggatgaaaatggatagggacccacttggaggacttgctgatatgtttggacaaatgccaggtagcggaattggtactggtccaggagttatccaggatagattttcacccaccatgggacgtcatcgttcaaatcaactcttcaatggccatgggggacacatcatgcctcccacacaatcgcagtttggagagatgggaggcaagtttatgaaaagccaggggctaagccagctctaccataaccagagtcagggactcttatcccagctgcaaggacagtcgaaggatatgccacctcggttttctaagaaaggacagcttaatgcagatgagattagcctgaggcctgctcagtcgttcctaatgaataaaaatcaagtgccaaagcttcagccccagataactatgattcctcctagtgcacaaccaccacgcactcaaacaccacctctgggacagacacctcagcttggtctcaaaactaatccaccgcttatccaggaaaagcctgccaagaccagcaaaaagccaccaccgtcaaaggaagaactccttaaactaactgaaactgttgtgactgaatatctaaatagtggaaatgcaaatgaggctgtcaatggtgtaagagaaatgagggctcctaaacactttcttcctgagatgttaagcaaagtaatcatcctgtcactagatagaagcgatgaagataaagaaaaagcaagttctttgatcagtttactcaaacaggaagggatagccacaagtgacaacttcatgcaggctttcctgaatgtattggaccagtgtcccaaactggaggttgacatccctttggtgaaatcctatttagcacagtttgcagctcgtgccatcatttcagagctggtgagcatttcagaactagctcaaccactagaaagtggcacccattttcctctcttcctactttgtcttcagcagttagctaaattacaagatcgagaatggttaacagaactttttcaacaaagcaaggtcaatatgcagaaaatgctcccagaaattgatcagaataaggaccgcatgttggagattttggaaggaaagggactgagtttcttattcccactcctcaaattggagaaggaactgttgaagcaaataaagttggatccatcccctcaaaccatatataaatggattaaagataacatctctcccaaacttcatgtagataaaggatttgtgaacatcttaatgactagcttcttacagtacatttctagtgaagtaaacccccccagcgatgaaacagattcatcctctgctccttccaaagaacagttagagcaggaaaaacaactactactatctttcaagccagtaatgcagaaatttcttcatgatcacgttgatctacaagtcagtgccctgtatgctctccaggtgcactgctataacagcaacttcccaaaaggcatgttactttttttgtgcacttctatgacatggaaattattgaagaagaagctttcttggcttggaaagaagatataa

SEQ ID NO: 68450 - DNA, 3045 bp, Artificial Sequence
  derived and/or modified sequence
agtgttggccaggccgccgtgcggtcatggccggatggccgacgcctgcagggacgaggccgtggcggaccgaggcacggctgtgctcggacggcgagggagcgtggctcggaccgctagcgccgtggcgggaggcacgcctggcctcccggcggggaggtatttcatttctcctgtcccctcccctccccaccccatctattaatattattcttttgaagattcttcgttgtcaagccgccaaagtggagagtgcgattgcagaagggggtgcttctcgtttcagtgcttcttcgggcggaggaggaagtaggggtgcacctcagcactatcccaagactgctggcaacagcgagttcctggggaaaaccccagggcaaaacgctcagaaatggattcctgcacgaagcactagacgagatgacaactccgcagcaaacaactccgcaaacgaaaaagaacgacatgatgcaatcttcaggaaagtaagaggcatactaaataagcttactcctgaaaagtttgacaagctatgccttgagctcctcaatgtgggtgtagagtctaaactcatccttaaaggggtcatactgctgattgtggacaaagccctagaagagccaaagtatagctcactgtatgctcagctatgtctgcgattggcagaagatgcaccaaactttgatggcccagcagcagagggtcaaccaggacagaagcaaagcaccacattcagacgcctcctaatttccaaattacaagatgaatttgaaaaccgaactagaaatgttgatgtctatgataagcgtgaaaatcccctcctccccgaggaggaggaacagagagccattgctaagatcaagatgttgggaaacatcaaattcattggagagcttggcaagcttgatcttattcacgaatctatccttcataagtgcatcaaaacacttttggaaaagaagaagagagtccaactcaaagatatgggagaggatttggagtgcctctgtcagataatgaggacagtgggacctagattagaccatgaacgagccaagtccttaatggatcagtactttgcccgaatgtgctccttgatgttaagtaaggaattgccagcaaggattcgtttcctgctgcaggataccgtagagttgcgagaacaccattgggttcctcgcaaggcttttcttgacaatggaccaaagacgatcaatcaaattcgtcaagatgcagtaaaagatctaggggtgtttattcctgctcctatggctcaagggatgagaagtgacttctttctggagggaccgttcatgccacccaggatgaaaatggatagggacccacttggaggacttgctgatatgtttggacaaatgccaggtagcggaattggtactggtccaggagttatccaggatagattttcacccaccatgggacgtcatcgttcaaatcaactcttcaatggccatgggggacacatcatgcctcccacacaatcgcagtttggagagatgggaggcaagtttatgaaaagccaggggctaagccagctctaccataaccagagtcagggactcttatcccagctgcaaggacagtcgaaggatatgccacctcggttttctaagaaaggacagcttaatgcagatgagattagcctgaggcctgctcagtcgttcctaatgaataaaaatcaagtgccaaagcttcagccccagataactatgattcctcctagtgcacaaccaccacgcactcaaacaccacctctgggacagacacctcagcttggtctcaaaactaatccaccgcttatccaggaaaagcctgccaagaccagcaaaaagccaccaccgtcaaaggaagaactccttaaactaactgaaactgttgtgactgaatatctaaatagtggaaatgcaaatgaggctgtcaatggtgtaagagaaatgagggctcctaaacactttcttcctgagatgttaagcaaagtaatcatcctgtcactagatagaagcgatgaagataaagaaaaagcaagttctttgatcagtttactcaaacaggaagggatagccacaagtgacaacttcatgcaggctttcctgaatgtattggaccagtgtcccaaactggaggttgacatccctttggtgaaatcctatttagcacagtttgcagctcgtgccatcatttcagagctggtgagcatttcagaactagctcaaccactagaaagtggcacccattttcctctcttcctactttgtcttcagcagttagctaaattacaagatcgagaatggttaacagaactttttcaacaaagcaaggtcaatatgcagaaaatgctcccagaaattgatcagaataaggaccgcatgttggagattttggaaggaaagggactgagtttcttattcccactcctcaaattggagaaggaactgttgaagcaaataaagttggatccatcccctcaaaccatatataaatggattaaagataacatctctcccaaacttcatgtagataaaggatttgtgaacatcttaatgactagcttcttacagtacatttctagtgaagtaaacccccccagcgatgaaacagattcatcctctgctccttccaaagaacagttagagcaggaaaaacaactactactatctttcaagccagtaatgcagaaatttcttcatgatcacgttgatctacaagtcagtgccctgtatgctctccaggtgcactgctataacagcaacttcccaaaaggcatgttacttcgcttttttgtgcacttctatgacatggaaattattgaagaagaagctttcttggcttggaaagaagatataacccaagagtttccgggaaaaggcaaggctttgttccaggtgaatcagtggctaacctggttagaaactgctgaagaagaagaatcagaggaagaagctgactaaagaaccagccaaagccttaaattgtgcaaaacatactgttgctatgatgtaactgcatttgacctaaccactgcga

SEQ ID NO: 68451 - DNA, 3654 bp, Artificial Sequence
  derived and/or modified sequence
ctgaaatacgttgtaattgaatgaaggcttatagatctgtatgttagcagtgtctaattttggtgctctttctcgttccaggtatttcatttctcctgtcccctcccctccccaccccatctattaatattattcttttgaagattcttcgttgtcaagccgccaaagtggagagtgcgattgcagaagggggtgcttctcgtttcagtgcttcttcgggcggaggaggaagtaggggtgcacctcagcactatcccaagactgctggcaacagcgagttcctggggaaaaccccagggcaaaacgctcagaaatggattcctgcacgaagcactagacgagatgacaactccgcagcaaacaactccgcaaacgaaaaagaacgacatgatgcaatcttcaggaaagtaagaggcatactaaataagcttactcctgaaaagtttgacaagctatgccttgagctcctcaatgtgggtgtagagtctaaactcatccttaaaggggtcatactgctgattgtggacaaagccctagaagagccaaagtatagctcactgtatgctcagctatgtctgcgattggcagaagatgcaccaaactttgatggcccagcagcagagggtcaaccaggacagaagcaaagcaccacattcagacgcctcctaatttccaaattacaagatgaatttgaaaaccgaactagaaatgttgatgtctatgataagcgtgaaaatcccctcctccccgaggaggaggaacagagagccattgctaagatcaagatgttgggaaacatcaaattcattggagagcttggcaagcttgatcttattcacgaatctatccttcataagtgcatcaaaacacttttggaaaagaagaagagagtccaactcaaagatatgggagaggatttggagtgcctctgtcagataatgaggacagtgggacctagattagaccatgaacgagccaagtccttaatggatcagtactttgcccgaatgtgctccttgatgttaagtaaggaattgccagcaaggattcgtttcctgctgcaggataccgtagagttgcgagaacaccattgggttcctcgcaaggcttttcttgacaatggaccaaagacgatcaatcaaattcgtcaagatgcagtaaaagatctaggggtgtttattcctgctcctatggctcaagggatgagaagtgacttctttctggagggaccgttcatgccacccaggatgaaaatggatagggacccacttggaggacttgctgatatgtttggacaaatgccaggtagcggaattggtactggtccaggagttatccaggatagattttcacccaccatgggacgtcatcgttcaaatcaactcttcaatggccatgggggacacatcatgcctcccacacaatcgcagtttggagagatgggaggcaagtttatgaaaagccaggggctaagccagctctaccataaccagagtcagggactcttatcccagctgcaaggacagtcgaaggatatgccacctcggttttctaagaaaggacagcttaatgcagatgagattagcctgaggcctgctcagtcgttcctaatgaataaaaatcaagtgccaaagcttcagccccagataactatgattcctcctagtgcacaaccaccacgcactcaaacaccacctctgggacagacacctcagcttggtctcaaaactaatccaccgcttatccaggaaaagcctgccaagaccagcaaaaagccaccaccgtcaaaggaagaactccttaaactaactgaaactgttgtgactgaatatctaaatagtggaaatgcaaatgaggctgtcaatggtgtaagagaaatgagggctcctaaacactttcttcctgagatgttaagcaaagtaatcatcctgtcactagatagaagcgatgaagataaagaaaaagcaagttctttgatcagtttactcaaacaggaagggatagccacaagtgacaacttcatgcaggctttcctgaatgtattggaccagtgtcccaaactggaggttgacatccctttggtgaaatcctatttagcacagtttgcagctcgtgccatcatttcagagctggtgagcatttcagaactagctcaaccactagaaagtggcacccattttcctctcttcctactttgtcttcagcagttagctaaattacaagatcgagaatggttaacagaactttttcaacaaagcaaggtcaatatgcagaaaatgctcccagaaattgatcagaataaggaccgcatgttggagattttggaaggaaagggactgagtttcttattcccactcctcaaattggagaaggaactgttgaagcaaataaagttggatccatcccctcaaaccatatataaatggattaaagataacatctctcccaaacttcatgtagataaaggatttgtgaacatcttaatgactagcttcttacagtacatttctagtgaagtaaacccccccagcgatgaaacagattcatcctctgctccttccaaagaacagttagagcaggaaaaacaactactactatctttcaagccagtaatgcagaaatttcttcatgatcacgttgatctacaagtcagtgccctgtatgctctccaggtgcactgctataacagcaacttcccaaaaggcatgttacttcgcttttttgtgcacttctatgacatggaaattattgaagaagaagctttcttggcttggaaagaagatataacccaagagtttccgggaaaaggcaaggctttgttccaggtgaatcagtggctaacctggttagaaactgctgaagaagaagaatcagaggaagaagctgactaaagaaccagccaaagccttaaattgtgcaaaacatactgttgctatgatgtaactgcatttgacctaaccactgcgaaaattcattccgctgtaatgttttcacaatatttaaagcagaagcacgtcagttaggatttccttctgcataaggtttttttgtagtgtaatgtcttaatcatagtctaccatcaaatattttaggagtatctttaatgtttagatagtatattagcagcatgcaataattacatcataagttctcaagcagaggcagtctattgcaaggaccttctttgctgccagttatcataggctgttttaagttagaaaactgaatagcaacactgaatactgtagaaatgcactttgctcagtaatacttgagttgttgcaatatttgattatccatttggttgttacagaaaaattcttaactgtaattgatggttgttgccgtaatagtatattgcctgtatttctacctctagtaatgggctttatgtgctagattttaatatccttgagcctgggcaagtgcacaagtctttttaaaagaaacatggtttacttgcacaaaactgatcagttttgagagatcgttaatgcccttgaagtggtttttgtgggtgtgaaacaaatggtgagaatttgaattggtccctcctattatagtattgaaattaagtctacttaatttatcaagtcatgttcatgccctgattttatatacttgtatctatcaataaacattgtgatacttgat

SEQ ID NO: 68452 - DNA, 4001 bp, Artificial Sequence
  derived and/or modified sequence
gggaggaatgctccgctcttttgttcccaggaagggaaaaacggggcggaggttcctgctgccatgttgtggccctggtcttccgcctgcaagtgctagtcctgtacacccggccccctctcgcgcgtctttccacgagctctccacggggaggaggcgaaagggtggacaggggaaaactgctgaagagctttcggagagacctcatctagtcgctggcctcgtcaaggcagtaaaaattcctagggcagacattttccacgtgatgttgctcgtgtctgtagttagacttttctattgatctcagtgctcagttttaaagatagtagaatgtggctttttcaaaagattcgttctgagccgtttaaaatgctcttgtgttctacgaagtctctttgcatccttgaacaccggggaatttccaggtatttcatttctcctgtcccctcccctccccaccccatctattaatattattcttttgaagattcttcgttgtcaagccgccaaagtggagagtgcgattgcagaagggggtgcttctcgtttcagtgcttcttcgggcggaggaggaagtaggggtgcacctcagcactatcccaagactgctggcaacagcgagttcctggggaaaaccccagggcaaaacgctcagaaatggattcctgcacgaagcactagacgagatgacaactccgcagcaaacaactccgcaaacgaaaaagaacgacatgatgcaatcttcaggaaagtaagaggcatactaaataagcttactcctgaaaagtttgacaagctatgccttgagctcctcaatgtgggtgtagagtctaaactcatccttaaaggggtcatactgctgattgtggacaaagccctagaagagccaaagtatagctcactgtatgctcagctatgtctgcgattggcagaagatgcaccaaactttgatggcccagcagcagagggtcaaccaggacagaagcaaagcaccacattcagacgcctcctaatttccaaattacaagatgaatttgaaaaccgaactagaaatgttgatgtctatgataagcgtgaaaatcccctcctccccgaggaggaggaacagagagccattgctaagatcaagatgttgggaaacatcaaattcattggagagcttggcaagcttgatcttattcacgaatctatccttcataagtgcatcaaaacacttttggaaaagaagaagagagtccaactcaaagatatgggagaggatttggagtgcctctgtcagataatgaggacagtgggacctagattagaccatgaacgagccaagtccttaatggatcagtactttgcccgaatgtgctccttgatgttaagtaaggaattgccagcaaggattcgtttcctgctgcaggataccgtagagttgcgagaacaccattgggttcctcgcaaggcttttcttgacaatggaccaaagacgatcaatcaaattcgtcaagatgcagtaaaagatctaggggtgtttattcctgctcctatggctcaagggatgagaagtgacttctttctggagggaccgttcatgccacccaggatgaaaatggatagggacccacttggaggacttgctgatatgtttggacaaatgccaggtagcggaattggtactggtccaggagttatccaggatagattttcacccaccatgggacgtcatcgttcaaatcaactcttcaatggccatgggggacacatcatgcctcccacacaatcgcagtttggagagatgggaggcaagtttatgaaaagccaggggctaagccagctctaccataaccagagtcagggactcttatcccagctgcaaggacagtcgaaggatatgccacctcggttttctaagaaaggacagcttaatgcagatgagattagcctgaggcctgctcagtcgttcctaatgaataaaaatcaagtgccaaagcttcagccccagataactatgattcctcctagtgcacaaccaccacgcactcaaacaccacctctgggacagacacctcagcttggtctcaaaactaatccaccgcttatccaggaaaagcctgccaagaccagcaaaaagccaccaccgtcaaaggaagaactccttaaactaactgaaactgttgtgactgaatatctaaatagtggaaatgcaaatgaggctgtcaatggtgtaagagaaatgagggctcctaaacactttcttcctgagatgttaagcaaagtaatcatcctgtcactagatagaagcgatgaagataaagaaaaagcaagttctttgatcagtttactcaaacaggaagggatagccacaagtgacaacttcatgcaggctttcctgaatgtattggaccagtgtcccaaactggaggttgacatccctttggtgaaatcctatttagcacagtttgcagctcgtgccatcatttcagagctggtgagcatttcagaactagctcaaccactagaaagtggcacccattttcctctcttcctactttgtcttcagcagttagctaaattacaagatcgagaatggttaacagaactttttcaacaaagcaaggtcaatatgcagaaaatgctcccagaaattgatcagaataaggaccgcatgttggagattttggaaggaaagggactgagtttcttattcccactcctcaaattggagaaggaactgttgaagcaaataaagttggatccatcccctcaaaccatatataaatggattaaagataacatctctcccaaacttcatgtagataaaggatttgtgaacatcttaatgactagcttcttacagtacatttctagtgaagtaaacccccccagcgatgaaacagattcatcctctgctccttccaaagaacagttagagcaggaaaaacaactactactatctttcaagccagtaatgcagaaatttcttcatgatcacgttgatctacaagtcagtgccctgtatgctctccaggtgcactgctataacagcaacttcccaaaaggcatgttacttcgcttttttgtgcacttctatgacatggaaattattgaagaagaagctttcttggcttggaaagaagatataacccaagagtttccgggaaaaggcaaggctttgttccaggtgaatcagtggctaacctggttagaaactgctgaagaagaagaatcagaggaagaagctgactaaagaaccagccaaagccttaaattgtgcaaaacatactgttgctatgatgtaactgcatttgacctaaccactgcgaaaattcattccgctgtaatgttttcacaatatttaaagcagaagcacgtcagttaggatttccttctgcataaggtttttttgtagtgtaatgtcttaatcatagtctaccatcaaatattttaggagtatctttaatgtttagatagtatattagcagcatgcaataattacatcataagttctcaagcagaggcagtctattgcaaggaccttctttgctgccagttatcataggctgttttaagttagaaaactgaatagcaacactgaatactgtagaaatgcactttgctcagtaatacttgagttgttgcaatatttgattatccatttggttgttacagaaaaattcttaactgtaattgatggttgttgccgtaatagtatattgcctgtatttctacctctagtaatgggctttatgtgctagattttaatatccttgagcctgggcaagtgcacaagtctttttaaaagaaacatggtttacttgcacaaaactgatcagttttgagagatcgttaatgcccttgaagtggtttttgtgggtgtgaaacaaatggtgagaatttgaattggtccctcctattatagtattgaaattaagtctacttaatttatcaagtcatgttcatgccctgattttatatacttgtatctatcaataaacattgtgatacttgatgta

SEQ ID NO: 68453 - DNA, 2724 bp, Artificial Sequence
  derived and/or modified sequence
gtcgagtcagccattgccgagggcggggctagcagatttagcgcttctagcggcggcgggggaagtagaggagccccgcagcactaccctaagacagccggcaactctgaattcctaggaaaaacgccgggtcaaaatgcacaaaaatggatcccagccaggagtaccagacgggacgacaacagtgctgccaacaacagtgccaacgagaaagagaggcatgatgctatcttcaggaaggtccggggtattcttaacaagctgacccctgagaaatttgacaagctgtgtctggaactcctgaacgtgggagtggagtcaaagctaatcctgaagggagtgatcttactcatcgtggacaaagccctggaagagcctaagtattcctccctctacgcccagctctgtttgcggctggccgaggacgccccgaacttcgacggaccagccgctgagggccagccgggacaaaaacagagtacgaccttcagacgactgttgatttcaaaactgcaggacgagttcgagaatcgaactagaaacgtcgacgtctatgacaagcgggagaatcccctcctacccgaggaggaggagcagcgtgcgattgcaaagattaagatgctgggcaatataaaatttattggggagctgggaaaactagacctcatacacgagtctattctgcacaaatgtatcaagacattgctggaaaagaaaaagcgagtccaactcaaagacatgggcgaagacttagaatgtctctgccaaatcatgcggactgttgggcccaggcttgaccacgaacgcgcaaagtccctcatggaccagtactttgcaagaatgtgcagcttgatgcttagcaaagagctcccagccaggataaggttcctcttacaggataccgtggagctgcgggagcatcactgggtgccgaggaaggcttttctggataacgggccaaaaacaataaaccagatccgacaagatgccgtgaaggacttgggcgtatttattcctgcaccaatggcacagggcatgcggagcgacttttttcttgagggcccattcatgcctcccagaatgaagatggatcgcgacccgctgggtggcctggccgacatgtttggccagatgcccggctctggaatcgggacgggccccggggtgatccaggacaggtttagtccgacaatgggccggcacagatcaaaccagctctttaacggtcacggaggacacatcatgccccctacacaatcgcagttcggagagatgggaggcaagtttatgaagagtcaaggattatctcagttgtaccacaatcaaagtcaaggactcctgagccagctgcagggacagagtaaggatatgccccctagattttcaaagaagggccagctaaacgcagacgaaatttccctacgacccgcccagtcctttctgatgaacaaaaaccaggtgcccaagctgcaaccgcaaatcaccatgatcccaccatctgctcagcccccgaggacacagacccccccactgggccaaactcctcagctggggctgaagactaatcccccgttaattcaggagaagcctgcgaaaacatccaaaaaaccaccccccagtaaggaagaactgcttaagctgacagaaacagtcgtcactgagtatctcaactcagggaacgccaatgaggctgtaaacggggtgagggaaatgcgggccccaaagcacttcttaccagagatgctgagcaaagtaattatcctctccttggaccgtagcgacgaggacaaggagaaagcgtccagcctgatcagcctgctgaagcaagaagggatcgcgacctccgataacttcatgcaggctttcctcaatgtgctggatcagtgtccaaaattggaggtggatataccacttgtcaagagctatctcgcacagttcgctgcacgggcaataattagcgagcttgtgtctatctccgaactggctcaacctctggaatccggcacccatttccccctgttcttactgtgtctgcaacaacttgctaaactccaagaccgcgaatggctcacagagttatttcaacagagcaaagtcaacatgcagaagatgctgccagagattgaccagaacaaagatcggatgctggagatcctcgagggcaagggactgtctttcctcttccctttgctgaaactggaaaaggaattactcaagcaaattaagcttgacccttccccccagactatctacaaatggatcaaggataatatcagccctaagctgcacgtggacaagggctttgttaacattctcatgacctcattcttacagtatattagtagtgaggtgaaccccccgagcgatgaaaccgacagttccagtgccccttcaaaagagcagttggaacaagagaagcagctgctcctctccttcaagccagtgatgcaaaagttcctgcacgatcatgtggatctgcaagtttccgccctgtatgccttacaggtgcactgctacaactccaacttcccaaagggcatgcttctcagattcttcgtccacttctatgacatggaaatcatcgaggaagaggctttcctcgcctggaaagaggacatcactcaggagttcccgggcaaagggaaagcacttttccaagttaaccagtggttgacctggctagagacggccgaagaggaagaaagtgaggaggaggctgactag

SEQ ID NO: 68454 - DNA, 2943 bp, Artificial Sequence
  derived and/or modified sequence
atggccgggtggcctactcccgcgggcactaggccatggagaacagaggcaagactctgttcagacggggagggggcctggctgggaccgcttgccccgtggagagaggctcgtctggccagtcgcagaggaggaatctcattcttgctctcgccaccattgcccactccctccatcaacatcatcctgctgaaaatcctacgctgccaggctgctaaggtggaaagcgccatcgccgaaggtggtgcctcccggtttagtgcatcatctgggggtggcggctcccgaggcgctccacagcactatccaaagactgcgggcaacagcgagttccttggaaagacccccggtcaaaatgcccaaaagtggatcccagcacggagcaccaggcgcgacgacaattcagcagctaacaatagcgcaaacgaaaaagaacggcatgatgctattttccggaaggtgaggggtatcctgaacaagctcacgcccgaaaaattcgataaactgtgtttggagctgctgaacgtcggagtggagagcaagcttattttgaagggcgtgattctgctcattgttgataaggctttggaggagcctaagtactcaagtctgtatgcgcagctctgccttcgcctcgcagaggatgcgcccaattttgacggcccggccgcagaaggacagccaggacagaaacagtcaacaactttccgtcgtcttctcatttcgaagcttcaggatgagtttgagaatcggacccggaatgtcgacgtgtatgataagagggagaatcctctcctaccagaagaagaggaacaaagggctattgctaagataaaaatgctcggcaatataaaatttatcggggaacttggaaaattagacctgattcacgaatccatcctgcacaaatgcatcaaaactctcctcgagaaaaaaaagcgtgtccagctgaaggacatgggcgaagaccttgagtgcctatgtcaaattatgcgaacagtggggcctcgtcttgaccacgaaagagccaaatccttgatggatcagtacttcgctcgcatgtgctctctgatgctttccaaagagctccctgccagaatcagattccttttacaggatactgtcgagctgagagagcaccattgggtacctcgcaaggcattcctcgataatgggccaaaaaccatcaaccagatccgccaagatgccgtcaaagacctgggagtgttcatcccagccccaatggcgcagggaatgagaagtgacttcttcctcgaggggcctttcatgccacctcgaatgaaaatggacagagaccctctgggggggctggcggacatgtttggccagatgccaggcagcggtattggaactggtcctggcgttatccaggaccggtttagccctacaatgggccggcaccgttccaaccagctctttaacggacacggtggccacattatgcccccgactcagtcccagtttggggaaatgggcggaaaatttatgaagagccaaggtcttagccaactgtaccacaaccagtcacagggtctcctttcccagctgcagggtcagtccaaggacatgcctcctaggttctctaaaaaaggacagctgaatgcagatgaaatctctttgcgcccagctcaaagcttcctaatgaataagaaccaggtaccaaagctgcagcctcagatcacaatgataccaccatcggctcagccacctcggacacaaacaccaccattggggcagactccacagctgggcctcaaaacgaatcctcccctcattcaggagaagcctgccaaaacgtcaaaaaagccaccaccaagcaaggaggagctcctcaaactgacagaaacggtggtaaccgaatacctgaattccggaaatgcaaacgaggcagtcaacggcgtccgggagatgcgcgcgccgaagcattttttgccagagatgctttctaaggtcattattctgtcattggatcgcagcgacgaagataaggagaaagcttctagcctgatttctttgctgaagcaggagggcatcgccacttccgataattttatgcaagcattcctaaatgttctcgaccagtgtcctaaattagaagtggacatccccttggtgaaatcatacctggcccagttcgcggctcgcgcaatcatcagtgagcttgtttcgatctcagaactcgctcaacccttggaaagcggaactcattttccactgtttctactgtgtctgcagcaactggcaaagctgcaagatcgcgaatggttgacagagctgttccaacagtccaaggtgaatatgcagaagatgctgccagaaatcgatcaaaataaagatagaatgctggagatactggaaggaaagggattatcttttttgtttccactcttaaagctagagaaagaactgttaaaacaaatcaagctcgatcctagcccacagacaatctataaatggatcaaggataacatatcaccgaaacttcacgtcgacaaaggttttgtgaatatactcatgacctcattcctgcagtacatcagctccgaggtcaacccaccatccgacgagacagattcctcctctgccccctcgaaggagcagcttgaacaggagaaacagctgctcttatcttttaagcccgttatgcagaagttcttgcacgatcacgtggaccttcaggttagtgctctatacgcgctccaggtgcactgttataattctaactttccaaaaggcatgctgttgcgatttttcgtccatttctacgacatggaaatcatcgaagaagaagctttcctggcatggaaagaagatatcacacaggagtttcctggaaagggcaaggcattgttccaggtgaatcaatggctcacttggctggagaccgctgaagaggaggaatctgaagaggaggcagactag

SEQ ID NO: 68455 - DNA, 2724 bp, Artificial Sequence
  derived and/or modified sequence
gtggagagcgctatagcggagggaggagcttctagattttcagcatcttcaggtggcgggggctccagaggggctccgcagcattacccaaagacagcaggcaatagcgaatttctgggcaaaacgccaggtcaaaacgctcagaagtggatccctgcccggtcaacgcggagggatgacaattcggctgccaacaattctgctaacgaaaaggagagacacgacgccatctttcggaaggtgcgcggcattcttaacaagctgacacccgaaaagtttgacaaattgtgcttggagctgctgaacgtgggtgtcgaaagcaagctcatcttgaagggcgtgatacttctaatcgtcgataaagccttggaggagcctaagtactcttccctctatgcacaactgtgtctgcgactggctgaagatgctcctaatttcgatgggcctgctgccgagggccagcccggacaaaaacagtcaactacgttccggcgcctcctcatttccaagctgcaggacgagttcgagaatcgaacacggaatgtggacgtttatgataagagggaaaacccacttctgcccgaggaagaagaacagcgtgcaattgctaaaatcaaaatgctggggaatatcaaattcatcggcgagctcgggaagttagatctgatccacgaatctattctccataagtgtatcaagaccctgctggaaaaaaagaagcgcgtgcagctgaaggatatgggagaggacctggaatgtctatgtcaaattatgaggactgtcggcccgcggcttgaccatgagcgtgctaagtccctgatggaccagtacttcgctcggatgtgttcgttgatgctgtctaaggaactgccagctagaataagattcctcctccaggacactgttgaattgagagagcaccattgggtcccacgcaaggctttcctggacaacgggcccaaaacaataaaccagattagacaggatgccgtaaaggacttgggagtgttcattccggctcctatggcacagggcatgcgtagcgattttttcttagaggggccatttatgccacctcgtatgaagatggaccgcgaccccctcggaggcctggcggatatgttcgggcagatgcctggctctggaatcggcaccgggcccggcgttatccaagacaggttctctcctaccatggggcgccaccgatccaatcaattgttcaacggccacggggggcacattatgcctccaacccagagccagtttggcgagatgggcgggaagttcatgaaaagccagggactctcacagctgtaccataaccagtcacagggtctcctgagccagcttcagggccagtcaaaggacatgccacctcgcttcagtaagaagggtcagttgaacgcagatgaaatctctctaaggcctgcacaatcctttcttatgaataagaaccaggttcccaaactgcagccacagattacgatgatacccccttcagcccaaccacctaggactcaaacccctcccctgggacaaacccctcagctaggtctgaaaaccaatcctcccttgatccaagaaaagccggctaagaccagtaagaagcctcccccatctaaggaagaactgctcaagctcacggagaccgttgtaacggagtacctgaactccggcaacgcaaacgaagctgttaatggagtgcgagaaatgcgggcgccaaagcattttctgcccgagatgctgagcaaggttatcattctctctttggaccgatcagatgaagacaaagaaaaggcctcttcgcttatttcactgttgaagcaagaggggattgccacttcagataacttcatgcaggccttcctcaacgtgcttgaccagtgcccgaagctagaggttgacatacctctggttaaaagctatcttgctcagttcgctgcccgtgcgattatctccgagctggtgtcaatttccgagctggcccagcctctggagagtggaacccattttcctctcttccttctttgcctccagcagttagcaaagctccaagaccgagagtggttgaccgagctgttccaacagtcgaaagtgaacatgcagaagatgctccctgagatcgaccaaaataaggataggatgctagaaatcctagagggcaagggactttcttttctgtttcctctcctgaagttggaaaaggaattgctgaaacaaattaagctggatccttctccgcagacaatctataaatggattaaggacaatatttcaccaaagcttcatgtcgacaagggctttgttaatatcctgatgaccagtttcttgcagtatatttcgtccgaagtgaatcccccgtcagacgaaaccgactcatcttccgccccttccaaagagcaactcgagcaggaaaagcagctgctgctgtcattcaagcccgtgatgcagaagttcctacatgatcacgtcgatctgcaagtcagcgctctgtatgctctgcaagtgcactgttacaactctaatttcccgaaaggcatgcttttaagattcttcgtacatttctacgacatggagataatagaggaagaggctttcctcgcttggaaggaggacatcactcaggagtttcctggcaagggcaaggccctgttccaagtgaatcaatggctaacgtggttggaaactgcagaagaagaggaatccgaagaggaagctgactag

SEQ ID NO: 68456 - DNA, 2724 bp, Artificial Sequence
  derived and/or modified sequence
gtggagtctgctatagccgaggggggggctagcagattctccgcctccagcggcgggggaggatctagaggggcgcctcaacactatcccaagacagcaggcaacagtgaatttctcgggaagacaccggggcaaaatgcccagaaatggatacctgcccgtagtactcggagggacgataacagtgcggccaacaacagtgctaacgaaaaggaacgacatgatgccatcttcagaaaagtacgggggatactcaacaagctgacacctgaaaagtttgataagctctgcctcgagttgctgaacgtgggcgttgagtcaaaactgatcttgaagggagtgatccttctcatcgttgacaaggccctcgaggaacccaagtattcaagtctttatgcccagctatgtttgcggctagcagaggacgcgccgaatttcgacggcccagcagccgagggacagccggggcagaagcaatcaacgacatttcgcaggcttcttatctccaagctgcaggacgagttcgagaatcgaactaggaatgtggacgtgtatgacaagcgggagaaccccctgctgcccgaagaggaagaacagcgagccattgccaaaataaagatgttaggtaatattaaattcattggagagcttgggaagttagacctaatccacgaatctatcctgcacaagtgtatcaagaccctgctggagaaaaagaagagagtacaattgaaagatatgggagaggatttagagtgtctgtgtcagattatgcggacagtagggccaagactggatcatgagagagccaagtccttgatggaccagtactttgctagaatgtgtagcctgatgctatccaaggagctgccagctcggatcagatttttgttgcaagatactgtggaactccgggagcatcactgggtccctagaaaagccttcctggataatggacccaaaaccataaatcaaatcaggcaggacgcggtaaaggatcttggtgtgtttattccagccccaatggctcaagggatgcgttcagattttttccttgaaggacctttcatgcctcctcgaatgaagatggatagggacccgcttggcggtttggcggacatgtttggtcagatgccgggctctggcattgggaccgggcctggtgtgatacaggaccggtttagccccacaatgggccgtcacagaagcaaccagctcttcaatgggcatggtggccacatcatgcccccaacacaaagtcagttcggtgaaatgggggggaagttcatgaagtctcaagggctgagccagttgtaccacaaccagtcccagggtctactgtcacaactgcagggccagtcaaaggacatgccacccaggttctccaaaaaggggcagctgaacgccgacgaaatctcacttaggccagcccaaagcttccttatgaacaagaatcaggtgcctaagcttcagccccagatcacaatgatcccgccttccgcccaaccgccaaggacacagacgccaccactcgggcagacccctcagctcggactgaagactaacccaccactgattcaagagaaacctgcgaagacctccaaaaagccgcctcccagtaaagaagagctactaaaactcaccgaaactgtggttacagagtatctgaacagtggcaacgccaacgaggctgtcaacggcgtgagggaaatgcgcgcgcccaagcacttcctgcccgagatgctctctaaagttattattctttctctcgatcgcagcgatgaggacaaagaaaaggccagctctctcatttccctgctgaagcaagagggaatagccactagcgacaatttcatgcaagcatttctgaacgtactggaccagtgcccaaagctggaagtcgacatcccactggtgaagagctatcttgcacagtttgccgctagggctatcatttccgagctggtcagcatcagcgagttagcccagcctctggaatccggtacgcactttcccttgtttttgctatgcctccagcagctggccaagctgcaggatcgagagtggttgacagaactctttcagcagtccaaggtaaatatgcagaaaatgcttcccgagattgaccagaacaaggatcgaatgctggagatccttgaggggaagggcttgagcttcttattccctctgctgaaattggaaaaggagctgctcaagcagatcaaattggatcctagccctcagactatttataagtggatcaaggataatattagccctaaactccatgtagacaaaggctttgtgaatattctgatgacgagctttctgcagtacataagctcagaggtcaacccccccagtgacgaaactgacagcagttctgccccgtccaaagaacagctcgagcaggaaaagcagttattactaagctttaagccagtgatgcaaaagtttctgcatgatcacgtggatctgcaggtgtcagcattgtatgcactgcaggtgcactgttacaactctaactttccgaaaggcatgctgctgcggttttttgtccacttctacgacatggaaattattgaggaagaggcgttcctcgcctggaaagaggacattacccaggaattccccggcaaaggaaaggctctcttccaggttaaccagtggctgacctggctggagacagctgaagaggaggagtccgaggaggaagcagactag

SEQ ID NO: 68457 - DNA, 2724 bp, Artificial Sequence
  derived and/or modified sequence
gtggagagcgccatcgccgagggcggggccagccgcttcagcgccagcagcggcggcggcggcagcagaggagccccccagcactaccccaagacagctggcaacagcgagttcctgggcaagaccccaggccagaatgcccagaagtggatcccagcccggagcaccaggagagatgacaacagcgctgccaacaacagcgccaatgagaaggagagacatgatgccatcttcaggaaggtgcggggcatcctgaacaagctgaccccagagaagtttgacaagctgtgcctggagctgctgaatgtgggcgtggagagcaagctgatcctgaagggcgtcatcctgctgattgtggacaaggccctggaggagcccaagtacagcagcctgtatgcccagctgtgcctgcggctggctgaagatgcccccaactttgatggccctgctgctgagggccagcccggccagaagcagagcaccaccttccggcggctgctgatcagcaagctgcaggatgaatttgagaacagaacaagaaatgtggatgtgtatgacaagcgggagaaccccctgctgcctgaggaggaggagcagagggccatcgccaagatcaagatgctgggcaacatcaagttcatcggggagctgggcaagctggacctgatccacgagagcatcctgcacaagtgcatcaagaccctgctggagaagaagaagagggtgcagctgaaggacatgggagaggacctggagtgcctgtgccagatcatgaggacagtgggcccccggctggaccacgagcgggccaagagcctgatggaccagtactttgccaggatgtgcagcctgatgctgagcaaggagctgcctgcccgcatccgcttcctgctgcaggacacagtggagctgcgggagcaccactgggtgcccaggaaggccttcctggacaatggccccaagaccatcaaccagatccggcaggatgctgtgaaggacctgggcgtcttcatcccagcccccatggcccagggcatgagaagtgacttcttcctggagggccccttcatgccacccaggatgaagatggaccgggaccccctgggcggcctggccgacatgtttggccagatgcctggcagcggcattggaactggacctggggtcatccaggaccgcttcagccccaccatgggccgccacaggagcaaccagctgttcaacggccacggcggccacatcatgccacccacccagagccagtttggagagatgggcggcaagttcatgaagagccagggcctgagccagctgtaccacaaccagagccagggcctgctgagccagctgcagggccagagcaaggacatgccaccccgcttcagcaagaagggccagctgaatgctgatgagatcagcctgcggcctgcccagagcttcctgatgaacaagaaccaggtgcccaagctgcagccccagatcaccatgatcccccccagcgcccagccccccaggacccagaccccacccctgggccagaccccccagctgggcctgaagaccaaccccccactcatccaggagaagccagccaagaccagcaagaagcccccacccagcaaggaggagctgctgaagctgacagagaccgtggtgacagagtacctgaacagcggaaatgccaatgaggccgtgaatggagtgcgggagatgagggcccccaagcacttcctgcctgagatgctgagcaaggtgatcatcctgagcctggacagaagtgatgaggacaaggagaaggccagcagcctcatcagcctgctgaagcaggagggcatcgccaccagtgacaacttcatgcaggccttcctgaatgtgctggaccagtgccccaagctggaggtggacatccccctggtgaagagctacctggcccagtttgctgcccgggccatcatcagcgagctggtgtccatcagcgagctggcccagcccctggagagcggcacccacttccccctcttcctgctgtgcctgcagcagctggccaagctgcaggaccgggagtggctgacagagctgttccagcagagcaaggtgaacatgcagaagatgctgcctgagattgaccagaacaaggacaggatgctggagatcctggagggcaagggcctgtccttcctgttccccctgctgaagctggagaaggagctgctgaagcagatcaagctggaccccagcccccagaccatctacaagtggatcaaggacaacatcagccccaagctgcacgtggacaagggctttgtgaacatcctgatgaccagcttcctgcagtacatcagcagcgaggtgaaccccccatctgatgaaacagacagcagcagcgcccccagcaaggagcagctggagcaggagaagcagctgctgctgtccttcaagcctgtgatgcagaagttcctgcatgaccacgtggacctgcaggtgtctgccctgtatgccctgcaggtgcactgctacaacagcaacttccccaagggcatgctgctgcgcttctttgtgcacttctatgacatggagatcatcgaggaggaggccttcctggcctggaaggaggacatcacccaggagttccctgggaagggcaaggccctcttccaggtgaaccagtggctgacctggctggagacagctgaggaggaggagagcgaggaggaggccgactag

SEQ ID NO: 68458 - DNA, 2943 bp, Artificial Sequence
  derived and/or modified sequence
atggccggctggcccaccccagctggcacccggccctggaggacagaggcccggctgtgcagtgatggagagggcgcctggctgggccccctggccccctggagggaggcccggctggccagccggcggggcggcatctccttcctgctgagcccccccctgcccacccccagcatcaacatcatcctgctgaagatcctgcgctgccaggccgccaaggtggagagcgccatcgccgagggcggggccagccgcttcagcgccagcagcggcggcggcggcagcagaggagccccccagcactaccccaagacagctggcaacagcgagttcctgggcaagaccccaggccagaatgcccagaagtggatcccagcccggagcaccaggagagatgacaacagcgctgccaacaacagcgccaatgagaaggagagacatgatgccatcttcaggaaggtgcggggcatcctgaacaagctgaccccagagaagtttgacaagctgtgcctggagctgctgaatgtgggcgtggagagcaagctgatcctgaagggcgtcatcctgctgattgtggacaaggccctggaggagcccaagtacagcagcctgtatgcccagctgtgcctgcggctggccgaggatgcccccaactttgatggccctgctgctgagggccagcccggccagaagcagagcaccaccttccggcggctgctgatcagcaagctgcaggatgaatttgaaaatagaacaagaaatgtggatgtgtatgacaagcgggagaaccccctgctgcctgaggaggaggagcagagggccatcgccaagatcaagatgctgggcaacatcaagttcatcggggagctgggcaagctggacctgattcatgagagcatcctgcacaagtgcatcaagaccctgctggagaagaagaagagggtgcagctgaaggacatgggagaggacctggagtgcctgtgccagatcatgaggacagtgggcccccggctggaccacgagcgggccaagagcctgatggaccagtactttgccaggatgtgcagcctgatgctgagcaaggagctgcctgcccgcatccgcttcctgctgcaggacacagtggagctgcgggagcaccactgggtgcccaggaaggccttcctggacaatggccccaagaccatcaaccagatccggcaggatgctgtgaaggacctgggcgtcttcatcccagcccccatggcccagggcatgagaagtgacttcttcctggagggccccttcatgccacccaggatgaagatggaccgggaccccctgggcggcctggccgacatgtttggccagatgcctggcagcggcatcggcaccggccctggggtcatccaggaccgcttcagccccaccatgggccgccacaggagcaaccagctgttcaatggacatggaggccacatcatgccacccacccagagccagtttggagagatgggcggcaagttcatgaagagccagggcctgagccagctgtaccacaaccagagccagggcctgctgagccagctgcagggccagagcaaggacatgccaccccgcttcagcaagaagggccagctgaatgctgatgagatcagcctgcggcctgcccagagcttcctgatgaacaagaaccaggtgcccaagctgcagccccagatcaccatgatccccccatctgcccagccccccaggacccagaccccacccctgggccagaccccccagctgggcctgaagaccaaccccccactcatccaggagaagccagccaagaccagcaagaagcccccacccagcaaggaggagctgctgaagctgacagaaacagtggtgacagagtacctgaacagcggaaatgccaatgaagctgtgaatggagtgcgggagatgagggcccccaagcacttcctgcctgagatgctgagcaaggtgatcatcctgagcctggacagaagtgatgaggacaaggagaaggccagcagcctcatcagcctgctgaagcaggagggcatcgccaccagtgacaacttcatgcaggccttcctgaatgtgctggaccagtgccccaagctggaggtggacatccccctggtgaagagctacctggcccagtttgctgcccgggccatcatcagcgagctggtgtccatcagcgagctggcccagcccctggagagcggcacccacttccccctcttcctgctgtgcctgcagcagctggccaagctgcaggaccgggagtggctgacagagctgttccagcagagcaaggtgaacatgcagaagatgctgcctgagattgaccagaacaaggacaggatgctggagatcctggagggcaagggcctgtccttcctgttccccctgctgaagctggagaaggagctgctgaagcagatcaagctggaccccagcccccagaccatctacaagtggatcaaggacaacatcagccccaagctgcacgtggacaagggctttgtgaacatcctgatgaccagcttcctgcagtacatcagcagcgaggtgaaccccccatctgatgaaacagacagcagcagcgcccccagcaaggagcagctggagcaggagaagcagctgctgctgtccttcaagcctgtgatgcagaagttcctgcatgaccacgtggacctgcaggtgtctgccctgtatgccctgcaggtgcactgctacaacagcaacttccccaagggcatgctgctgcgcttctttgtgcacttctatgacatggagatcatcgaggaggaggccttcctggcctggaaggaggacatcacccaggagttccctgggaagggcaaggccctcttccaggtgaaccagtggctgacctggctggagacagctgaggaggaggagagcgaggaggaggccgactag

SEQ ID NO: 68459 - DNA, 2724 bp, Artificial Sequence
  derived and/or modified sequence
gtggagagcgccatcgccgagggcggcgccagccggttcagcgccagttcagggggcggcggcagcagaggggccccccaacactatcccaagactgctggaaattctgagtttctgggtaaaaccccaggacagaatgcacagaagtggattcccgcccggtctaccagacgcgacgataatagcgccgcaaacaatagcgcaaatgagaaagagcgacacgacgccatctttcggaaagtccgcggcatattaaacaagctgacccctgagaagttcgacaaactgtgcctggaattactcaacgtgggcgtcgaatccaaactgatccttaaaggtgtaatcctgttgattgtcgacaaggcccttgaggagcccaagtactcctccctctacgctcagctatgcctaagactggcagaggatgcccccaactttgacgggcctgctgccgaagggcagcccgggcagaagcaatctacgactttcagacggctgttaatcagcaagttgcaggatgagttcgaaaataggactagaaatgtcgacgtgtacgataagagagagaacccactgctgcccgaggaagaggaacagagggctattgcaaaaatcaagatgttagggaacatcaagttcatcggcgagttgggaaagttggatctgattcacgagagcattttgcacaagtgcattaagactctgcttgaaaagaaaaaaagagtgcagctgaaagatatgggagaggatctggagtgcttgtgccagatcatgcggacagtcggcccacgactggaccatgagcgggctaagtctttgatggaccagtacttcgccagaatgtgctcgctaatgctgagtaaggaactgccggccagaatcagattcctccttcaggacactgtagaacttagggaacatcactgggtcccccgcaaagccttcttggacaacgggccaaaaacaatcaatcaaatcaggcaggacgctgtgaaagacctgggcgtgtttatccccgcacctatggcgcaaggtatgcgaagcgatttttttctggaaggccctttcatgcccccaaggatgaagatggatcgtgatccgctgggtggccttgctgacatgtttggacagatgccaggatccggtatcggaacgggacccggggtgatccaagaccggtttagtcccactatggggcgtcaccggagtaatcaactgttcaacggccacggggggcacatcatgccccctacacagtcccagttcggagagatgggaggtaagtttatgaagtcccaaggcctgtcgcagctctaccataatcagtcacaagggttactgtctcagctacaggggcaatctaaagacatgccaccacgctttagtaagaagggacagttaaacgctgacgagatctcacttcgccctgctcaatctttcttgatgaacaagaatcaggtgcctaagctgcagccacagatcaccatgatacccccatctgcccagcccccccgtactcagacccccccacttgggcagaccccgcaattagggctgaagactaatccacctctgattcaggaaaagcccgccaagacttcaaagaagccccctccatctaaagaagagctactcaagctcacagaaacagttgtcaccgaatacctcaatagtggaaatgcgaacgaggccgtaaacggagttcgtgagatgagggcacctaaacattttttacccgagatgctgagcaaggtgataatactgtctttggacaggagcgacgaagacaaagagaaagcgtcctccctaatctcgttgctcaaacaggaggggatagcaacctcggacaactttatgcaggcctttctgaatgtcttagaccaatgtcccaagctggaagtggacatcccactggtgaagtcttaccttgcacagtttgctgcccgagccatcataagcgaacttgtaagcatctccgaattagcgcagcccttggagagtggcacacacttccccctgttccttttatgtctgcaacagctggcaaagttacaggacagagaatggctcacagagttgtttcaacagtctaaagtgaatatgcagaagatgctgcccgaaatagaccagaacaaagacaggatgctagaaatactcgaggggaaaggcctgtccttcctgtttcccctgctcaagctggagaaggagcttctgaaacaaattaagctcgatccgtccccacaaaccatctacaagtggataaaggacaacatatcaccaaagcttcatgtggacaaagggtttgttaacatccttatgacatcattccttcaatatatcagttccgaggttaacccacctagcgatgaaacagattcctccagcgctccgtccaaggagcaactcgaacaagagaagcagctgttgctttcctttaagccggtgatgcaaaaattcctacacgaccacgttgatctgcaggtcagcgcgctgtacgcactgcaggtgcactgctacaattccaattttccgaagggaatgctgctgcgtttctttgtgcacttttacgatatggagattatcgaggaagaagcgtttcttgcctggaaagaggatataacccaggagttccctggtaaagggaaggcgctttttcaagtcaaccaatggcttacttggttggagactgcagaggaagaagagagcgaggaggaagctgattag

SEQ ID NO: 68460 - DNA, 2943 bp, Artificial Sequence
  derived and/or modified sequence
atggccggctggcccacccccgccggcacccggccctggcggaccgaagcaaggctctgcagtgacggcgagggcgcatggcttgggccactggccccatggcgggaagccaggctagccagcagacggggaggtattagctttctgcttagtcctccgttacccaccccctcaataaacattatcctgctcaaaattctccgatgccaggccgccaaagtggagtctgctatcgcagaggggggtgcttccaggttctccgcttcctcaggcggagggggctcacgtggagcaccacagcactaccctaaaacagctggaaatagcgagtttctgggtaaaacacccggtcaaaatgcccagaagtggattcccgccaggagtactcgcagggatgacaatagtgcagccaacaatagcgccaacgaaaaagaaaggcacgacgctattttcaggaaggtccgggggatcctcaataaattaaccccggagaaatttgacaaactctgcttagagctgcttaatgtgggagtcgagtccaaactgattctcaagggggtgatcctcctaattgtcgacaaggccctcgaggaacctaaatatagcagtttatacgcccagctgtgccttcgcctggctgaggatgcaccaaacttcgacggtcctgcagcagagggccagccaggccagaagcaatcgaccacattccgtaggctcctcatatccaaactgcaggacgaatttgaaaacagaacgcgaaacgtcgatgtgtacgacaaaagggagaacccactgttgcccgaagaagaggagcagagagccatcgctaagattaagatgcttggaaacatcaaattcatcggtgagctgggcaaactggaccttattcacgagagcatcctgcacaaatgcatcaagactcttctggagaagaagaagagagtgcaactcaaagacatgggggaagacctggagtgcctatgccagattatgaggaccgtgggacctcggctggaccacgagcgcgcaaaaagcctgatggatcagtacttcgctagaatgtgttccttgatgctcagtaaagaactgcccgcccgtataaggttcctgctgcaggataccgtggaactgagagagcaccattgggtacctcggaaggcctttttggacaatggccctaagacaatcaaccagatccggcaggacgccgtaaaagacctcggagtgtttatcccagctccaatggctcaaggaatgagaagcgacttttttctggagggaccctttatgcctccacgtatgaaaatggaccgcgatcctctggggggactggctgacatgttcggtcagatgcccggatccggtatcgggactggccccggggtaatccaagacaggttcagcccaactatggggcgtcacagaagcaatcaactgtttaatggccatggaggtcacatcatgccccctacacagtcacaatttggcgaaatggggggaaagtttatgaaatcacaagggttatctcagctctatcataaccagagccagggcctcctctcccaactgcaagggcagagtaaggacatgccgccaaggtttagcaaaaaggggcagcttaatgctgacgagattagtctgagacccgcgcagtcgttcctgatgaataagaaccaagtgcctaaactgcagccgcagattacaatgattcccccatctgcccaaccacctcggactcaaactcctccgttaggacagaccccacagttgggcctgaaaaccaatcctcctctgatccaggaaaaaccggctaaaacatccaagaagccacctcctagcaaagaggagctgctgaaactcacagagacagttgtgactgaatacctgaacagcggaaacgccaacgaagctgtcaatggcgtgcgggaaatgcgggcccctaagcattttttgccggagatgctatccaaggtgataattctgtccctggacaggagcgatgaggataaggaaaaagcctccagtctgatttctttgttgaaacaggaaggtattgcaacatctgacaactttatgcaggcctttctgaatgtgctggatcagtgtcctaaattggaagtggatatcccacttgttaagtcttacttggcccagtttgcggccagggccatcataagcgagctggtctctattagtgagttggctcaaccactagagagcggcactcacttccccctctttttactctgcctgcagcagctggcgaagctgcaggatcgagaatggctcactgaactgtttcaacaatccaaggtgaatatgcagaagatgctgccagagattgaccagaataaggatcggatgttagagatcctggaagggaaaggactgagcttcctgttcccactactcaagctcgagaaggagctattgaagcagattaagcttgacccatctccgcagacaatatacaagtggatcaaggataacatttcaccaaagttgcacgtcgacaaggggtttgtaaatattctgatgactagcttccttcagtatatctctagcgaagttaatccaccgagcgacgagaccgatagtagctctgctccgtccaaagagcagctggaacaggagaagcagctgctattgtcgttcaaacccgtaatgcagaagttcctgcatgatcatgtcgatctgcaggtctccgccctgtatgcgctgcaagttcattgctacaattccaactttccaaagggaatgctcctgcgctttttcgtccatttttatgacatggaaatcatcgaggaggaggcttttctcgcctggaaggaagacataacgcaggagttccctgggaaaggaaaggccctgttccaggttaatcagtggttaacctggctcgagactgctgaggaggaggaatccgaggaggaggccgactag

SEQ ID NO: 68461 - DNA, 2724 bp, Artificial Sequence
  derived and/or modified sequence
gtggagagcgccatcgccgagggcggcgccagccggttcagcgcctcatcaggaggtggtgggtcccgcggcgccccgcaacactaccctaagacagcgggaaactccgagttcttgggcaagacccccggacagaacgcccagaagtggattcccgcccgtagtactcggcgggacgacaacagtgctgccaacaactcagctaacgaaaaagagagacatgacgcaattttccgcaaggtaagaggcatccttaataagctgaccccggaaaagttcgacaaattgtgtctggagctgctgaatgtcggagtcgagtcaaagcttatactaaagggagtcatattacttattgtggataaggccctggaggaaccaaagtactcaagcctctatgcccagctttgcctgcggctggcagaggacgcacctaatttcgacggacctgcagcagaaggacagcctggccagaaacagtcaactacctttcgcagattgctgatttcaaagctccaggatgagttcgagaataggacgcggaacgttgatgtctacgataagagggaaaacccactgctacccgaggaagaggaacagcgagccatcgcgaagatcaagatgctgggaaacataaagtttatcggagagctgggtaagctcgacctgatccatgagtcaattttgcacaagtgcataaagacactcctggagaagaaaaaacgcgtccaacttaaggatatgggcgaagatttggagtgcctttgccagattatgagaacagttggtccacgtcttgaccatgaaagggccaagtctcttatggaccagtattttgcaagaatgtgtagcctgatgcttagtaaagagctgccggcgcggatacgcttcctactacaagatactgttgagctgcgggagcaccactgggtcccacggaaagcctttctggacaatggcccgaagaccatcaaccagatccgccaagacgccgttaaagaccttggcgtatttattcccgctcctatggcacagggcatgaggtccgatttctttcttgaggggcctttcatgccccctcgcatgaaaatggatcgcgacccactgggggggctggctgatatgttcggacagatgccaggctcaggtatagggaccggcccaggggtgatccaggatcgcttttcaccaactatggggaggcaccggtccaaccagttgtttaacggacacggaggccacatcatgcctcccacccaaagccagttcggagaaatgggcgggaagttcatgaagtcacaaggattgtcccagctgtaccataaccagtctcaggggcttctatcccaactgcaaggccagagcaaggacatgcccccaaggtttagcaagaagggacagctaaacgctgacgaaatttctctgcgtccggcccagtcttttctgatgaataaaaaccaggtgccgaagctgcaaccccagatcaccatgatcccaccctccgctcagccacccaggacgcaaacgccccccctgggccagacaccccaactggggttaaaaaccaacccacccctcatacaggaaaaaccagctaaaaccagtaagaagccccctcccagtaaggaggaactgctgaaactgacagagaccgttgtcacagagtacttgaattccggcaacgctaacgaggccgtgaatggggtccgtgaaatgcgtgcacccaaacacttcctccccgagatgctgtctaaggttattatcttatccctggatcgcagtgatgaagacaaggaaaaggcgagttcgctgatttccttgttgaaacaggagggcattgcgacctctgacaacttcatgcaagcgtttctgaatgtgctcgatcagtgcccaaaactggaagtggatataccgctggtgaaatcctacctagcccaatttgccgcccgtgccatcattagcgaactcgtaagcattagcgagctggctcaaccattggagtctggtacccactttccgctcttcctactttgtcttcaacagctggcaaaacttcaggaccgagagtggttgacagaattatttcaacagagtaaggtgaacatgcagaaaatgctgcccgaaatcgaccagaacaaagaccgtatgcttgaaatattggaaggcaaggggttatcctttttattccctctactgaaactcgagaaagagctattgaagcagattaaattagacccctctcctcaaactatttacaagtggataaaggataacatctcccctaaactccatgtagataagggatttgtgaacatcctgatgacctcctttcttcagtatatctcaagtgaagtgaaccccccaagcgatgagactgactcgagttctgccccatcaaaagagcagctcgaacaggagaaacagctccttcttagctttaagccagttatgcagaagttcttgcatgaccacgttgacctgcaggtctcagctttgtatgctctgcaggtccattgttataattccaattttcccaagggaatgttactgaggtttttcgttcacttttatgatatggaaatcattgaagaggaggcctttctggcttggaaagaggacataacgcaggagttccccggcaagggtaaagctttgtttcaggtgaaccaatggctgacttggctcgaaactgccgaggaggaggagagtgaggaagaagccgactag

SEQ ID NO: 68462 - DNA, 2724 bp, Artificial Sequence
  derived and/or modified sequence
gtggagagcgccatcgccgagggcggcgccagccggttcagcgcctccagcgggggcggaggtagccgaggcgccccacaacactatccgaaaaccgccggtaattccgaatttttggggaaaacccccggacagaacgcccagaagtggattccagcacgaagcacacgcagagacgataatagcgctgcaaataacagtgctaatgagaaggaacgccacgatgcaattttcagaaaggtgagaggaattctgaacaaactgactcctgaaaaatttgataagctctgtcttgagctcctcaatgttggagtggaatccaagctaattctgaagggcgttatcctgttaatcgtggataaggcacttgaggagcccaagtatagttctctctacgctcagctctgcttacggctggccgaggatgcccccaacttcgatggcccggcagcagagggacagcctgggcagaagcagtcaactaccttcagaaggcttctcattagtaaattgcaagacgaattcgagaatagaactaggaatgtcgacgtctacgataagagagagaatcctctcttaccagaagaagaggaacagagagccattgcaaaaataaaaatgctagggaatattaagtttattggggagcttggcaaactggacctgatccatgaaagtattcttcataagtgcattaagacgctcctggaaaagaagaagagggttcagctgaaggatatgggcgaggacctcgaatgtctgtgccagataatgcgtactgtgggaccacgtctggatcatgagcgggccaaaagtcttatggatcagtattttgccaggatgtgcagcctgatgctaagtaaggagcttcccgccagaatccggtttttactccaagacaccgtggagcttagagaacaccattgggtaccaagaaaagcattcctggataacggtccaaaaacaatcaatcagatcagacaggatgccgtgaaagacctcggggtgttcattccagccccgatggcccagggaatgaggagtgatttcttcctggaggggccttttatgcctcctagaatgaaaatggatcgcgatcccttaggcgggctggccgacatgtttggccaaatgccagggtccgggattggtactggccccggcgtcatccaggatcgctttagtccgacaatgggtcgtcaccggtcaaaccaactctttaacggccacggagggcacataatgcctcccactcagagccagtttggcgaaatgggaggaaagttcatgaagagccaaggcctgtcccagctctaccacaatcagagccagggactcctgagccaactgcagggccagtccaaggacatgccccctcggttcagcaaaaagggacaacttaacgccgatgagattagcctccggccagcccagagcttcttaatgaacaagaaccaggtccccaagctccaacctcagattacgatgattcctccttcggctcagcccccacgtacccagacccctcctctgggacagacaccacagcttgggctcaaaaccaatcctcccctgattcaggaaaagccggctaagacatcaaaaaaaccccctccaagcaaagaggaattactaaaattgaccgagacagtggtaacagaatacctgaatagtggcaacgcaaacgaggcagtaaatggcgtacgagagatgagagcccccaagcactttctccctgagatgctttccaaagtgataattttgtccctggatcgctctgacgaggacaaggaaaaggcaagctccctgattagccttttgaagcaggagggcattgcgaccagcgacaattttatgcaggcctttctgaacgtgttggaccagtgccccaaactggaagtcgatatcccactggtgaagagctaccttgctcagtttgcagccagagcgatcatcagcgagcttgttagtatcagtgagcttgcacagccccttgagagcggcactcatttcccactgtttttgctctgcctgcagcagctggccaaattacaggaccgtgagtggttaactgaactcttccagcagagcaaggtgaatatgcagaaaatgctgcccgaaatcgatcaaaacaaggatcgcatgctggagattttggagggcaaaggtctttcctttctgttccccctgcttaagttggagaaagagctcctgaaacagattaagctggatcccagccctcagaccatctacaagtggattaaggacaatatctcacctaagcttcatgtggacaagggatttgtaaacatccttatgacctcctttttgcagtacatcagcagcgaggttaatccaccctccgatgaaaccgactcttcgtccgcaccttctaaagagcagctggaacaagagaaacagttgttgctgagtttcaagccagttatgcaaaagttcctgcatgatcatgtggacttacaggtcagtgcgctttacgctctgcaggtccattgttacaattcaaattttccaaaaggaatgctcctcaggtttttcgtgcacttctatgacatggaaatcatcgaggaggaggctttcctcgcatggaaagaggatatcacacaggagtttcctggcaaaggcaaggcactgttccaggttaatcaatggctgacttggctcgaaacagctgaggaggaggaatccgaggaggaggcagactag

SEQ ID NO: 68463 - DNA, 2724 bp, Artificial Sequence
  derived and/or modified sequence
gtggagtctgctatcgcagaagggggagcaagcaggttttcggcgagttctgggggaggcggtagccggggagcgccacagcattatcctaagacagctggtaactcagaatttctcggaaaaaccccgggacagaatgcccagaagtggattcccgctagatccacgcgccgtgacgataactccgctgcaaacaacagcgccaacgagaaggaacgccacgacgccatattccgtaaggttagagggatcctgaataaattgacaccagagaaatttgacaagctgtgcctcgagcttctgaatgtcggagtcgagtcaaagctgatcctcaagggagtaatcctgttaatcgtcgacaaggcactagaagaacccaagtattctagcttgtacgctcagctgtgcctgagattggccgaggatgccccaaatttcgatggccctgcagcagagggccagcccggtcagaagcagtcaactacgtttcggaggttgttaatctcgaagttgcaggatgaattcgaaaatcggacccgaaatgtggatgtgtacgacaaacgcgagaaccccctgctcccagaggaggaagagcaacgcgcaattgcaaagatcaagatgctcggtaacattaaatttattggcgaactgggcaagctcgatttgatacacgagtctatcctgcataagtgcattaagacgctgctcgaaaaaaagaaacgtgttcaactgaaagatatgggtgaggatctagaatgcctttgccagatcatgaggacagtggggccaagactggatcatgagcgtgccaagtctcttatggaccagtactttgccagaatgtgctcactgatgttgtcaaaagaactgcccgctcgcatccgcttcctactgcaagatacagtagaattgagagagcaccactgggttcccaggaaagccttcctagataacggaccaaagacaataaaccagatccggcaagacgccgtgaaggaccttggagtgttcatccccgctcctatggcgcagggaatgcgcagtgactttttcctggaagggccattcatgccccctcgaatgaagatggacagagatccacttggtggactggctgatatgtttgggcagatgcctggcagtggcattggcaccggccctggggtaattcaggatcggttttctcctaccatgggccgtcacaggtcaaaccagcttttcaacgggcatgggggtcatatcatgcctcccacacagtcacaatttggcgagatgggtggaaagtttatgaagagtcaggggttgtctcagttataccacaaccagtcccaggggttgctgagtcagctgcaaggacaatccaaggatatgcctccgaggtttagtaagaaagggcaactcaacgctgacgagatctccctccggcctgcacagtcctttcttatgaataagaatcaggttcccaaactccagccacagattacaatgattcctccttccgcacagcctccaagaactcagactcctcctctcggtcagacccctcagctaggcctgaaaacaaatccacctctgatccaagaaaaacctgccaaaacttcaaagaagcctcccccttccaaggaagagctgctgaaattgactgaaaccgtggttacagagtacttaaacagcggcaacgctaatgaggcagtgaacggggtgagagagatgcgcgcacccaagcactttctgcctgagatgctgagcaaagttataattcttagcctcgacagatctgatgaggacaaggaaaaggctagttccctgattagcctcctgaaacaggaggggatcgcaacttctgacaatttcatgcaggcgtttcttaatgtgttagatcagtgtcctaagctggaagtggatatcccactggttaagagctacctggcacagtttgccgctagggcaataatttcggagctggtttcaataagcgagctagcacagccgctcgaaagcggaacccacttccctctgttcctgctctgtctgcagcagttggcgaaactgcaggacagagaatggctgaccgaactgtttcaacagtctaaggttaacatgcagaaaatgctgcctgagatcgatcagaataaagacagaatgctggagatcctcgagggtaaggggctctcctttttgtttcccttgctgaaactcgaaaaggagctcctgaagcagattaagctcgacccatcccctcagactatctataagtggatcaaggataatatcagccccaagctccatgttgataaaggattcgtcaacatactgatgaccagtttcctgcagtacatcagtagtgaagtgaatccccctagtgacgagaccgacagttcttctgcaccttccaaggagcaattagaacaggaaaaacagctgcttctgagttttaagccagtcatgcagaaatttctccatgatcatgttgatttgcaggtgtctgccttgtacgcactgcaagtgcattgctacaattcaaacttccctaaaggcatgctcctacggtttttcgttcacttctacgacatggaaatcatcgaggaagaagcgttcctcgcttggaaggaggatataacacaggaatttcccggtaagggcaaggccttgttccaggttaaccagtggttgacgtggctcgaaacagccgaggaggaggagtcagaagaggaagccgactag

SEQ ID NO: 68464 - DNA, 2943 bp, Artificial Sequence
  derived and/or modified sequence
atggctggatggcccacccctgccggtaccagaccatggagaacggaggccaggttgtgctctgatggagagggggcatggctgggtcctctagccccttggagggaggcgcgacttgctagtcgccgagggggaatttcctttctcttgtcacccccactgcccaccccgagtatcaacattatcctcttaaagatcctcaggtgccaagcggctaaggtcgagagcgccattgctgagggaggcgcatcccgcttctcagcatctagtggtggagggggaagtaggggagcaccacagcattatcctaagaccgcgggaaacagcgaatttctgggtaaaacccccggacagaatgcgcaaaaatggattcccgcaagatctactagaagagacgataatagcgctgccaataactccgccaatgaaaaggagaggcacgacgcaatttttcgaaaggtgcggggaattctgaataaactaacccctgaaaaatttgacaagctatgcctggagctgcttaacgtgggtgttgaatcaaaactgattctaaaaggcgtgatcctcttaatagtggacaaagctttggaggaacccaagtactcttccctgtacgcccagctgtgtctgcgcttggccgaagatgcacctaactttgacggacccgctgccgaaggtcaaccaggtcagaagcagagcaccacttttaggcgcctattgatctccaagctccaggacgagttcgaaaacagaaccagaaatgtggacgtctatgataagagggaaaatcctctccttccagaagaagaggaacaacgcgcaatcgccaaaattaaaatgttgggcaatattaaatttatcggcgagttgggcaagctagatcttatccacgaatctatcttgcacaaatgcatcaagactctgctggagaagaagaaaagagtgcaacttaaagatatgggggaggatctcgagtgcttatgtcagatcatgaggactgttgggcctcggctggaccacgagcgcgctaaaagcttaatggatcagtacttcgcccgaatgtgttcccttatgctttccaaggaactgcccgcaaggatcaggtttcttctgcaggatacggtagaactccgggaacatcattgggtgcccaggaaggcctttctcgataacgggcctaagacaatcaaccagataagacaggatgctgtcaaagatctgggagtgttcattcctgccccaatggcacagggcatgaggtcggacttcttcctggaggggccttttatgccccctcgaatgaagatggacagggatccccttggaggcttagcagatatgttcggacagatgcctggctccggtattgggacaggtcccggagttatccaagatcggttttctcctaccatggggcgacaccgctctaaccaactctttaacggccatggagggcatataatgccaccgacacaaagccagtttggtgaaatgggtgggaagttcatgaaaagccagggactgtctcagctctatcacaatcagagccaggggttgctctcccaactgcagggacagagtaaggatatgcctcctcgtttttcaaaaaaaggacagctaaacgcagacgaaatcagtctgagacccgcacagtcatttctaatgaacaagaaccaggtcccaaaactccagccccagatcactatgattcctccaagcgcacagccccctcggacacagacaccaccgctaggacagacaccccagcttggactgaagactaatcccccactcattcaggagaagccagctaagacaagcaaaaaaccccctccctccaaggaggagctgctcaagctaacagaaaccgtggtcactgagtatttaaactcaggcaacgcaaatgaggccgtgaacggggtgagggagatgagagctccaaagcattttttacccgagatgctgtcgaaagtgattatcctttctttggaccggtctgacgaggacaaagagaaagcaagtagtttgatcagcctgctgaagcaagaggggatagctaccagcgataactttatgcaggcattcctcaatgtcctcgatcagtgtcctaagctggaggtcgatatacccctggttaagagctatctggcacagttcgccgcacgagctatcatttcggagctcgttagcatctctgagctggctcaaccactggaatcaggcacacatttcccactgttccttctctgcctgcagcaactagctaagttgcaggaccgagagtggctgaccgagctgttccagcagagcaaagttaacatgcagaagatgcttccagagatcgaccagaacaaagacagaatgcttgaaatattagagggaaaggggcttagctttctattccccttactcaagctggagaaggaactgctgaagcagattaagctcgacccctctcctcagacaatatataagtggattaaagacaacatctccccgaagctgcacgtggacaagggtttcgttaatatactcatgacctcattcctacagtacataagcagcgaagtgaacccaccttctgatgagacagactcgtcttcagctccatcaaaagagcagctagaacaggaaaaacaactgctcttgtcatttaaaccggtcatgcaaaagtttctccacgaccacgtcgacctgcaagtgtccgctctctatgccctgcaggtacactgctacaattccaatttccccaaaggcatgttgctcaggttttttgttcacttttacgacatggagatcattgaggaagaggctttcttggcttggaaagaggatatcactcaggagttcccaggcaagggtaaagccctcttccaggttaatcagtggttaacttggctcgaaacagcggaggaggaggagtctgaggaagaagctgactag

SEQ ID NO: 68465 - DNA, 2724 bp, Artificial Sequence
  derived and/or modified sequence
gtagagtctgcaatcgctgaggggggagctagcagattttctgcttcctcaggaggaggcggatcccgcggtgcgcctcagcactatcccaagactgcgggtaactcggaattcctgggaaaaaccccgggacagaacgcacagaaatggattcccgcacggagtacacgccgagacgacaattccgcggctaacaattcggcaaatgagaaggagaggcatgacgccatcttccggaaagtgcgaggcatcctaaataagctgacgcccgagaagttcgacaaactatgtctggagctgctgaacgtcggcgtggagtcaaaattaatcctgaagggtgtgatactcctgatcgtggataaggctctagaggagccgaaatattccagtctttacgcccaactctgcctgcgtctggctgaggacgcgcctaattttgacgggccagccgcagaaggacagcctggtcagaagcagtccaccaccttccggagactgctgatctccaagcttcaggacgagtttgagaaccgcacccgaaatgtggatgtgtacgacaaaagagagaatcctcttttacccgaggaagaggagcaacgcgcaattgcaaaaattaagatgctcggcaatattaagttcatcggggagctcggcaagcttgatttaatacacgaaagcatcctccacaagtgcattaagaccctcctcgaaaagaaaaagagggtgcaactgaaagatatgggcgaagacctcgagtgcctgtgtcagatcatgcgcaccgtcggtccaaggttggaccatgaaagggccaagtccttgatggaccagtattttgcgaggatgtgttctctcatgctcagtaaggaactgcctgctcggatacggttcctactgcaggataccgtggaacttcgggaacaccactgggtcccacgaaaggcattccttgacaatggtcctaagacgattaatcagattagacaggatgccgtgaaagatctgggtgtgtttatccccgctcccatggcccagggtatgcgctctgatttcttcttagaagggccattcatgcctccgaggatgaagatggaccgcgacccccttgggggtctcgctgatatgttcggccaaatgccaggcagcgggattggcacagggcctggagtaattcaagataggttcagccccactatgggcaggcacaggagtaatcagctatttaacggacacggaggtcatataatgcctcccacgcaaagccagttcggggaaatggggggaaagtttatgaagtcacaagggctatctcagttgtaccataatcagagtcaggggctccttagtcagctgcagggacagtcgaaggacatgccaccaaggttttctaaaaaaggacaactcaacgcagatgaaatcagtttacggcctgcccagtcgttcctgatgaataaaaaccaagtacctaaactgcagccgcagatcacgatgattcctcccagtgctcaaccccctcggacacaaacccctcccctcggccagacccctcagttggggttgaagaccaaccctccactgattcaggagaagcccgctaaaactagcaaaaaacccccaccaagcaaagaggagttgctgaagctgacagaaacggttgtcaccgaatatctaaactccgggaatgcaaatgaagctgtaaatggagttagggaaatgcgagctccgaaacactttcttcctgagatgctcagtaaagtgatcattcttagccttgatcgcagcgatgaggataaagagaaggcctctagccttatctcactgctgaagcaggagggaattgctacctcagataactttatgcaggcattccttaacgttctggaccagtgccccaaactggaggtggacattcccctggtaaagagttatctcgcgcagtttgcagcacgggctattatcagtgagttggtgagtatatccgagcttgcacaaccactggaatcaggaacccactttcccctgtttttattatgtcttcaacaattggcgaaactacaggatagagaatggctgaccgaactgttccagcagagcaaggtgaatatgcagaaaatgctgcctgagatcgaccagaacaaggatcgaatgcttgagatcctcgaggggaaggggctgtccttcctctttcctctcttgaaactcgaaaaggagttactgaaacagattaagctagatccctccccacaaacgatctacaagtggatcaaggacaacatctccccaaagttgcacgttgacaagggattcgtgaacatactgatgacatccttcctccaatatattagcagcgaggtcaacccgcctagtgacgaaaccgacagttcttccgccccatctaaggaacagctcgagcaagaaaaacagctgttgcttagttttaaaccagtgatgcaaaaatttcttcatgaccatgtggatttgcaggtaagtgcactctacgcactgcaggtccactgttacaattccaacttccctaagggcatgctactgcgattcttcgtgcacttttatgacatggagattatcgaagaggaagcttttctggcctggaaggaagatataacgcaggaattccccggaaagggaaaggcgctgtttcaggtcaatcagtggctaacctggctggagaccgccgaagaggaggagtcagaggaggaggcagactag

SEQ ID NO: 68466 - DNA, 2724 bp, Artificial Sequence
  derived and/or modified sequence
gtagaatctgcgattgcagagggcggtgctagcagattttcagctagttctggtggaggcggttctaggggcgctccacagcattatcccaagactgccggaaactctgagttcttgggtaagacccccggacagaatgcacaaaagtggattcccgctcgcagtactcgcagggatgacaatagcgccgctaacaattccgccaacgaaaaagaaaggcacgacgctatatttcgcaaagtgagaggcattcttaacaaactcacccctgagaagtttgacaagttgtgtctagaactgctcaacgttggcgtggaaagcaagctcattctcaagggagttatcctgctcattgtggacaaagcattggaagaacctaaatatagcagtctatatgcgcagctgtgtctgagactggctgaggacgcccctaattttgatgggcctgctgccgaggggcagccaggtcagaaacagtctaccactttccgcaggctcctgatcagcaaactccaggatgagttcgagaaccggacacgcaatgttgacgtgtatgacaagagggagaatcccctgctaccagaagaggaggaacagcgggcaatagccaaaattaaaatgctgggaaacatcaaattcatcggggagctcggcaagctggatctgatccacgaatcgattctccacaagtgcattaagaccctccttgagaagaagaagagagtacagttaaaagacatgggcgaggacctagagtgcctttgccagattatgcggaccgtgggaccaaggcttgatcatgaacgggcaaagtctttaatggaccaatactttgcacggatgtgctccttgatgctgagtaaagaactcccagccaggatacggttcttgctgcaggatacagtggaactgagagagcaccattgggtcccaagaaaagctttcctggacaacggtcccaaaacaattaatcagatcagacaggatgctgttaaagacctgggagtcttcatccctgcccctatggctcagggcatgagaagcgacttttttctggagggaccgtttatgcccccacgtatgaagatggatagagaccctctgggaggcctggcagacatgtttggccagatgcccggaagcggaattgggaccggaccaggtgttatccaggacagattcagccccactatgggcaggcatcggagtaatcaactgttcaacggacatggtggccacatcatgccacctacgcagagccaattcggggaaatggggggaaaattcatgaagagccagggtttgtcccaattgtaccacaaccaatcccaggggttgttgagccaactgcagggacagtcaaaagatatgccgcctcgattctctaaaaaagggcagctaaatgctgacgagatttctctccggccagcccagagttttctgatgaacaaaaaccaggtgcccaagctgcagccccaaatcaccatgatacccccttccgcacaacccccaagaacccagaccccccctttaggccaaacgccccagttggggctcaagactaatcctccactcattcaggagaagccggctaagaccagtaaaaaaccccctccctccaaagaagaattgctgaagctgaccgagaccgtggtgaccgagtaccttaattccgggaacgccaatgaggccgtgaatggggtgagggagatgcgggcacctaaacacttcttaccagaaatgctgtccaaagtgatcatcctctccctcgatagatccgacgaagataaggaaaaggcgtcctctctgatctccctattgaagcaagagggcatcgccactagtgacaatttcatgcaggcatttctaaacgtgttggaccagtgccctaagctagaggtggatataccactggtgaagtcgtacctggcacaatttgctgcgagagcaatcatttcagaactggtgtccatcagtgagctggctcagccactggaatccggcacgcacttccccttatttctgctgtgtttacagcaactggcgaaactccaggatcgtgaatggctcacagagttgtttcagcagagtaaagttaatatgcagaagatgttgccagagattgaccagaacaaggacagaatgctcgagattctcgaggggaaaggcttatccttcctcttccccctgctgaagttagagaaagaactcctcaaacagataaagctggatccaagtcctcagacaatttacaagtggattaaggataacattagcccaaagctgcatgttgacaagggatttgtgaacatcctaatgaccagctttctgcaatatatctcaagcgaggtcaatccccctagcgatgagacggatagctccagtgccccatccaaagagcagttagaacaagagaagcagctgctcttgtctttcaaaccagtcatgcaaaagtttctgcacgaccatgtggatctgcaggtgagcgctttgtacgctctccaagtgcattgctataacagcaactttcccaaaggcatgcttttgcgcttctttgtccacttttacgacatggagatcatcgaggaagaggctttcctcgcttggaaagaggatatcactcaagaattccccggtaagggcaaagccctgttccaggtaaaccagtggttaacttggctcgagaccgccgaggaggaagagtccgaagaagaggcagactag

SEQ ID NO: 68467 - DNA, 2724 bp, Artificial Sequence
  derived and/or modified sequence
gtggagagcgccatcgccgagggcggcgccagcagattcagcgccagcagcggcggcggcggcagcagaggcgccccccagcactaccccaagaccgccggcaacagcgagttcctgggcaagacccccggccagaacgcccagaagtggatccccgccagaagcaccagaagagacgacaacagcgccgccaacaacagcgccaacgagaaggagagacacgacgccatcttcagaaaggtgagaggcatcctgaacaagctgacccccgagaagttcgacaagctgtgcctggagctgctgaacgtgggcgtggagagcaagctgatcctgaagggcgtgatcctgctgatcgtggacaaggccctggaggagcccaagtacagcagcctgtacgcccagctgtgcctgagactggccgaggacgcccccaacttcgacggccccgccgccgagggccagcccggccagaagcagagcaccaccttcagaagactgctgatcagcaagctgcaggacgagttcgagaacagaaccagaaacgtggacgtgtacgacaagagagagaaccccctgctgcccgaggaggaggagcagagagccatcgccaagatcaagatgctgggcaacatcaagttcatcggcgagctgggcaagctggacctgatccacgagagcatcctgcacaagtgcatcaagaccctgctggagaagaagaagagagtgcagctgaaggacatgggcgaggacctggagtgcctgtgccagatcatgagaaccgtgggccccagactggaccacgagagagccaagagcctgatggaccagtacttcgccagaatgtgcagcctgatgctgagcaaggagctgcccgccagaatcagattcctgctgcaggacaccgtggagctgagagagcaccactgggtgcccagaaaggccttcctggacaacggccccaagaccatcaaccagatcagacaggacgccgtgaaggacctgggcgtgttcatccccgcccccatggcccagggcatgagaagcgacttcttcctggagggccccttcatgccccccagaatgaagatggacagagaccccctgggcggcctggccgacatgttcggccagatgcccggcagcggcatcggcaccggccccggcgtgatccaggacagattcagccccaccatgggcagacacagaagcaaccagctgttcaacggccacggcggccacatcatgccccccacccagagccagttcggcgagatgggcggcaagttcatgaagagccagggcctgagccagctgtaccacaaccagagccagggcctgctgagccagctgcagggccagagcaaggacatgccccccagattcagcaagaagggccagctgaacgccgacgagatcagcctgagacccgcccagagcttcctgatgaacaagaaccaggtgcccaagctgcagccccagatcaccatgatcccccccagcgcccagccccccagaacccagaccccccccctgggccagaccccccagctgggcctgaagaccaacccccccctgatccaggagaagcccgccaagaccagcaagaagcccccccccagcaaggaggagctgctgaagctgaccgagaccgtggtgaccgagtacctgaacagcggcaacgccaacgaggccgtgaacggcgtgagagagatgagagcccccaagcacttcctgcccgagatgctgagcaaggtgatcatcctgagcctggacagaagcgacgaggacaaggagaaggccagcagcctgatcagcctgctgaagcaggagggcatcgccaccagcgacaacttcatgcaggccttcctgaacgtgctggaccagtgccccaagctggaggtggacatccccctggtgaagagctacctggcccagttcgccgccagagccatcatcagcgagctggtgagcatcagcgagctggcccagcccctggagagcggcacccacttccccctgttcctgctgtgcctgcagcagctggccaagctgcaggacagagagtggctgaccgagctgttccagcagagcaaggtgaacatgcagaagatgctgcccgagatcgaccagaacaaggacagaatgctggagatcctggagggcaagggcctgagcttcctgttccccctgctgaagctggagaaggagctgctgaagcagatcaagctggaccccagcccccagaccatctacaagtggatcaaggacaacatcagccccaagctgcacgtggacaagggcttcgtgaacatcctgatgaccagcttcctgcagtacatcagcagcgaggtgaacccccccagcgacgagaccgacagcagcagcgcccccagcaaggagcagctggagcaggagaagcagctgctgctgagcttcaagcccgtgatgcagaagttcctgcacgaccacgtggacctgcaggtgagcgccctgtacgccctgcaggtgcactgctacaacagcaacttccccaagggcatgctgctgagattcttcgtgcacttctacgacatggagatcatcgaggaggaggccttcctggcctggaaggaggacatcacccaggagttccccggcaagggcaaggccctgttccaggtgaaccagtggctgacctggctggagaccgccgaggaggaggagagcgaggaggaggccgactag

SEQ ID NO: 68468 - DNA, 2943 bp, Artificial Sequence
  derived and/or modified sequence
atggccggctggcccacccccgccggcaccagaccctggagaaccgaggccagactgtgcagcgacggcgagggcgcctggctgggccccctggccccctggagagaggccagactggccagcagaagaggcggcatcagcttcctgctgagcccccccctgcccacccccagcatcaacatcatcctgctgaagatcctgagatgccaggccgccaaggtggagagcgccatcgccgagggcggcgccagcagattcagcgccagcagcggcggcggcggcagcagaggcgccccccagcactaccccaagaccgccggcaacagcgagttcctgggcaagacccccggccagaacgcccagaagtggatccccgccagaagcaccagaagagacgacaacagcgccgccaacaacagcgccaacgagaaggagagacacgacgccatcttcagaaaggtgagaggcatcctgaacaagctgacccccgagaagttcgacaagctgtgcctggagctgctgaacgtgggcgtggagagcaagctgatcctgaagggcgtgatcctgctgatcgtggacaaggccctggaggagcccaagtacagcagcctgtacgcccagctgtgcctgagactggccgaggacgcccccaacttcgacggccccgccgccgagggccagcccggccagaagcagagcaccaccttcagaagactgctgatcagcaagctgcaggacgagttcgagaacagaaccagaaacgtggacgtgtacgacaagagagagaaccccctgctgcccgaggaggaggagcagagagccatcgccaagatcaagatgctgggcaacatcaagttcatcggcgagctgggcaagctggacctgatccacgagagcatcctgcacaagtgcatcaagaccctgctggagaagaagaagagagtgcagctgaaggacatgggcgaggacctggagtgcctgtgccagatcatgagaaccgtgggccccagactggaccacgagagagccaagagcctgatggaccagtacttcgccagaatgtgcagcctgatgctgagcaaggagctgcccgccagaatcagattcctgctgcaggacaccgtggagctgagagagcaccactgggtgcccagaaaggccttcctggacaacggccccaagaccatcaaccagatcagacaggacgccgtgaaggacctgggcgtgttcatccccgcccccatggcccagggcatgagaagcgacttcttcctggagggccccttcatgccccccagaatgaagatggacagagaccccctgggcggcctggccgacatgttcggccagatgcccggcagcggcatcggcaccggccccggcgtgatccaggacagattcagccccaccatgggcagacacagaagcaaccagctgttcaacggccacggcggccacatcatgccccccacccagagccagttcggcgagatgggcggcaagttcatgaagagccagggcctgagccagctgtaccacaaccagagccagggcctgctgagccagctgcagggccagagcaaggacatgccccccagattcagcaagaagggccagctgaacgccgacgagatcagcctgagacccgcccagagcttcctgatgaacaagaaccaggtgcccaagctgcagccccagatcaccatgatcccccccagcgcccagccccccagaacccagaccccccccctgggccagaccccccagctgggcctgaagaccaacccccccctgatccaggagaagcccgccaagaccagcaagaagcccccccccagcaaggaggagctgctgaagctgaccgagaccgtggtgaccgagtacctgaacagcggcaacgccaacgaggccgtgaacggcgtgagagagatgagagcccccaagcacttcctgcccgagatgctgagcaaggtgatcatcctgagcctggacagaagcgacgaggacaaggagaaggccagcagcctgatcagcctgctgaagcaggagggcatcgccaccagcgacaacttcatgcaggccttcctgaacgtgctggaccagtgccccaagctggaggtggacatccccctggtgaagagctacctggcccagttcgccgccagagccatcatcagcgagctggtgagcatcagcgagctggcccagcccctggagagcggcacccacttccccctgttcctgctgtgcctgcagcagctggccaagctgcaggacagagagtggctgaccgagctgttccagcagagcaaggtgaacatgcagaagatgctgcccgagatcgaccagaacaaggacagaatgctggagatcctggagggcaagggcctgagcttcctgttccccctgctgaagctggagaaggagctgctgaagcagatcaagctggaccccagcccccagaccatctacaagtggatcaaggacaacatcagccccaagctgcacgtggacaagggcttcgtgaacatcctgatgaccagcttcctgcagtacatcagcagcgaggtgaacccccccagcgacgagaccgacagcagcagcgcccccagcaaggagcagctggagcaggagaagcagctgctgctgagcttcaagcccgtgatgcagaagttcctgcacgaccacgtggacctgcaggtgagcgccctgtacgccctgcaggtgcactgctacaacagcaacttccccaagggcatgctgctgagattcttcgtgcacttctacgacatggagatcatcgaggaggaggccttcctggcctggaaggaggacatcacccaggagttccccggcaagggcaaggccctgttccaggtgaaccagtggctgacctggctggagaccgccgaggaggaggagagcgaggaggaggccgactag

SEQ ID NO: 68469 - protein, 738 aa, Artificial Sequence
  derived and/or modified sequence
  misc_feature (1)..(1): Xaa can be any naturally occurring amino acid
XPEKPVKQEEMAALDVDSGGGGGGGGGHGEYLQQQQQHGNGAVAAAAAAQTGDLASAQLGGAPNRWEVLSATPTTIKDEAGNLVQIPSAATSSGQYVLPLQNLQNQQIFSVAPGSDSSNGTVSSVQYQVIPQIQSADGQQVQIGFTGSSDNGGINQESSQIQIIPGSNQTLLASGTPSANIQNLIPQTGQVQVQGVAIGGSSFPGQTQVVANVPLGLPGNITFVPINSVDLDSLGLSGSSQTMTAGINADGHLINTGQAMDSSDNSERTGERVSPDINETNTDTDLFVPTSSSSQLPVTIDSTGILQQNTNSLTTSSGQVHSSDLQGNYIQSPVSEETQAQNIQVSTAQPVVQHLQLQESQQPTSQAQIVQGITPQTIHGVQASGQNISQQALQNLQLQLNPGTFLIQAQTVTPSGQVTWQTFQVQGVQNLQNLQIQNTAAQQITLTPVQTLTLGQVAAGGAFTSTPVSLSTGQLPNLQTVTVNSIDSAGIQLHPGENADSPADIRIKEEEPDPEEWQLSGDSTLNTNDLTHLRVQVVDEEGDQQHQEGKRLRRVACTCPNCKEGGGRGTNLGKKKQHICHIPGCGKVYGKTSHLRAHLRWHSGERPFVCNWMYCGKRFTRSDELQRHRRTHTGEKKFVCPECSKRFMRSDHLAKHIKTHQNKKGIHSSSTVLASVEAARDDTLITAGGTTLILANIQQGSVSGIGTVNTSATSNQDILTNTEIPLQLVTVSGNETME

SEQ ID NO: 68470 - protein, 728 aa, Artificial Sequence
  derived and/or modified sequence
MAALDVDSGGGGGGGGGHGEYLQQQQQHGNGAVAAAAAAQTGDLASAQLGGAPNRWEVLSATPTTIKDEAGNLVQIPSAATSSGQYVLPLQNLQNQQIFSVAPGSDSSNGTVSSVQYQVIPQIQSADGQQVQIGFTGSSDNGGINQESSQIQIIPGSNQTLLASGTPSANIQNLIPQTGQVQVQGVAIGGSSFPGQTQVVANVPLGLPGNITFVPINSVDLDSLGLSGSSQTMTAGINADGHLINTGQAMDSSDNSERTGERVSPDINETNTDTDLFVPTSSSSQLPVTIDSTGILQQNTNSLTTSSGQVHSSDLQGNYIQSPVSEETQAQNIQVSTAQPVVQHLQLQESQQPTSQAQIVQGITPQTIHGVQASGQNISQQALQNLQLQLNPGTFLIQAQTVTPSGQVTWQTFQVQGVQNLQNLQIQNTAAQQITLTPVQTLTLGQVAAGGAFTSTPVSLSTGQLPNLQTVTVNSIDSAGIQLHPGENADSPADIRIKEEEPDPEEWQLSGDSTLNTNDLTHLRVQVVDEEGDQQHQEGKRLRRVACTCPNCKEGGGRGTNLGKKKQHICHIPGCGKVYGKTSHLRAHLRWHSGERPFVCNWMYCGKRFTRSDELQRHRRTHTGEKKFVCPECSKRFMRSDHLAKHIKTHQNKKGIHSSSTVLASVEAARDDTLITAGGTTLILANIQQGSVSGIGTVNTSATSNQDILTNTEIPLQLVTVSGNETME

SEQ ID NO: 68471 - protein, 2243 aa, Artificial Sequence
  derived and/or modified sequence
MFKKLKQKISEEQQQLQQALAPAQASSNSSTPTRMRSRTSSFTEQLDEGTPNRENASTHASKSPDSVNGSEPSIPQSGDTQSFAQKLQLRVPSVESLFRSPIKESLFRSSSKESLVRTSSRESLNRLDLDSSTASFDPPSDMDSEAEDLVGNSDSLNKEQLIQRLRRMERSLSSYRGKYSELVTAYQMLQREKKKLQGILSQSQDKSLRRIAELREELQMDQQAKKHLQEEFDASLEEKDQYISVLQTQVSLLKQRLRNGPMNVDVLKPLPQLEPQAEVFTKEENPESDGEPVVEDGTSVKTLETLQQRVKRQENLLKRCKETIQSHKEQCTLLTSEKEALQEQLDERLQELEKIKDLHMAEKTKLITQLRDAKNLIEQLEQDKGMVIAETKRQMHETLEMKEEEIAQLRSRIKQMTTQGEELREQKEKSERAAFEELEKALSTAQKTEEARRKLKAEMDEQIKTIEKTSEEERISLQQELSRVKQEVVDVMKKSSEEQIAKLQKLHEKELARKEQELTKKLQTREREFQEQMKVALEKSQSEYLKISQEKEQQESLALEELELQKKAILTESENKLRDLQQEAETYRTRILELESSLEKSLQENKNQSKDLAVHLEAEKNKHNKEITVMVEKHKTELESLKHQQDALWTEKLQVLKQQYQTEMEKLREKCEQEKETLLKDKEIIFQAHIEEMNEKTLEKLDVKQTELESLSSELSEVLKARHKLEEELSVLKDQTDKMKQELEAKMDEQKNHHQQQVDSIIKEHEVSIQRTEKALKDQINQLELLLKERDKHLKEHQAHVENLEADIKRSEGELQQASAKLDVFQSYQSATHEQTKAYEEQLAQLQQKLLDLETERILLTKQVAEVEAQKKDVCTELDAHKIQVQDLMQQLEKQNSEMEQKVKSLTQVYESKLEDGNKEQEQTKQILVEKENMILQMREGQKKEIEILTQKLSAKEDSIHILNEEYETKFKNQEKKMEKVKQKAKEMQETLKKKLLDQEAKLKKELENTALELSQKEKQFNAKMLEMAQANSAGISDAVSRLETNQKEQIESLTEVHRRELNDVISIWEKKLNQQAEELQEIHEIQLQEKEQEVAELKQKILLFGCEKEEMNKEITWLKEEGVKQDTTLNELQEQLKQKSAHVNSLAQDETKLKAHLEKLEVDLNKSLKENTFLQEQLVELKMLAEEDKRKVSELTSKLKTTDEEFQSLKSSHEKSNKSLEDKSLEFKKLSEELAIQLDICCKKTEALLEAKTNELINISSSKTNAILSRISHCQHRTTKVKEALLIKTCTVSELEAQLRQLTEEQNTLNISFQQATHQLEEKENQIKSMKADIESLVTEKEALQKEGGNQQQAASEKESCITQLKKELSENINAVTLMKEELKEKKVEISSLSKQLTDLNVQLQNSISLSEKEAAISSLRKQYDEEKCELLDQVQDLSFKVDTLSKEKISALEQVDDWSNKFSEWKKKAQSRFTQHQNTVKELQIQLELKSKEAYEKDEQINLLKEELDQQNKRFDCLKGEMEDDKSKMEKKESNLETELKSQTARIMELEDHITQKTIEIESLNEVLKNYNQQKDIEHKELVQKLQHFQELGEEKDNRVKEAEEKILTLENQVYSMKAELETKKKELEHVNLSVKSKEEELKALEDRLESESAAKLAELKRKAEQKIAAIKKQLLSQMEEKEEQYKKGTESHLSELNTKLQEREREVHILEEKLKSVESSQSETLIVPRSAKNVAAYTEQEEADSQGCVQKTYEEKISVLQRNLTEKEKLLQRVGQEKEETVSSHFEMRCQYQERLIKLEHAEAKQHEDQSMIGHLQEELEEKNKKYSLIVAQHVEKEGGKNNIQAKQNLENVFDDVQKTLQEKELTCQILEQKIKELDSCLVRQKEVHRVEMEELTSKYEKLQALQQMDGRNKPTELLEENTEEKSKSHLVQPKLLSNMEAQHNDLEFKLAGAEREKQKLGKEIVRLQKDLRMLRKEHQQELEILKKEYDQEREEKIKQEQEDLELKHNSTLKQLMREFNTQLAQKEQELEMTIKETINKAQEVEAELLESHQEETNQLLKKIAEKDDDLKRTAKRYEEILDAREEEMTAKVRDLQTQLEELQKKYQQKLEQEENPGNDNTQLAQKTTLISDSKLKEQEFREQIHNLEDRLKKYEKNVYATTVGTPYKGGNLYHTDVSLFGEPTEFEYLRKVLFEYMMGRETKTMAKVITTVLKFPDDQTQKILEREDARLMSWLRSSS

SEQ ID NO: 68472 - DNA, 6732 bp, Artificial Sequence
  derived and/or modified sequence
atgttcaaaaagctgaagcagaagatttcagaagaacagcagcagctgcagcaggccctcgcacctgcacaggcttccagtaattccagcacgcctaccaggatgaggagccggacgtccagcttcaccgaacagctggatgagggaacaccgaatcgcgagaacgcttctacacatgcaagcaaatctcccgattcagttaatggcagcgaacccagcataccccagagcggtgatactcagagcttcgctcagaagctgcaactgcgagttcccagcgtcgagagcctgttcagatcaccgatcaaggaatccctgtttcgcagcagttctaaggagtctttggtgagaacatcctcccgcgagtctctgaaccgtttagatttagacagctctaccgcctctttcgatccaccttccgatatggattccgaagcagaagatttggtcggaaacagcgactctctgaacaaggagcagttaatccaaaggctcagacggatggaaagatctctctcttcttaccggggcaagtatagcgagttagtgacagcttaccaaatgctgcaaagggagaagaaaaagctgcaggggatattaagtcagtcgcaagacaagagcttgaggcgaatcgcggagctgcgggaggagttgcaaatggatcagcaggcaaaaaagcatctgcaagaggagtttgatgccagcctggaagaaaaagatcagtacatcagcgtgctccagacccaggttagccttcttaagcagaggctaaggaatggacctatgaatgtggacgtgctgaagccactccctcagttggagcctcaagccgaggtgttcaccaaagaggagaatcccgagagcgacggcgagcctgttgttgaagacggcacgtctgtgaagacgttagagaccctccagcaacgagttaagcggcaggaaaacctactaaagagatgtaaagagacgatccagtcacacaaagagcagtgtacgctgctcacctctgaaaaggaagctttacaggagcaattggacgagaggctgcaggaactggaaaagatcaaagacctgcacatggccgaaaagactaaactgatcacccagctgagagacgccaaaaacctgatcgagcagctggaacaggataaggggatggtcatcgcggagacgaagaggcagatgcacgaaactctggaaatgaaggaggaagagatcgcacagctgcggtcaaggattaagcagatgaccacccagggggaggaattgagggagcagaaggagaagtccgagcgggctgcttttgaggagctggagaaggccctgtcaaccgctcagaaaaccgaggaggcccgcaggaaactgaaggccgaaatggacgaacagattaagacaatagagaagacatcggaggaggaacgtatctctctgcagcaggagctgtcacgcgtgaaacaggaggtggtcgacgtgatgaaaaagtccagtgaagagcaaattgccaaattgcagaagttgcatgaaaaagaactagccaggaaagaacaggagttaactaaaaagctgcagaccagggagcgggaatttcaagaacaaatgaaggtagcccttgaaaagtcccagtcggaataccttaaaatatctcaggagaaggagcaacaggagtccctagctctcgaggagcttgagttgcagaagaaagcaatccttacggagagtgagaacaagctccgggatctgcagcaggaggcagagacttaccgcaccaggatactggagttagaaagctctctggagaaatcgctgcaagaaaataagaatcagagcaaggatctcgccgtacacctagaggctgaaaagaacaagcataataaggagatcaccgtgatggtggaaaaacacaagactgaactcgaatcactgaaacaccagcaggatgccctgtggactgagaaactgcaggtgctgaagcagcagtaccagacggaaatggaaaagcttcgcgagaagtgtgagcaggagaaagaaacactgttgaaggataaagaaataattttccaggcccacattgaagagatgaacgagaagaccctggagaagctggacgtgaaacagaccgaacttgaatctctgagcagtgaactgtccgaagttctgaaggctagacacaaactcgaagaagaactgtcagtgttaaaggaccaaaccgacaagatgaaacaggaactcgaggctaaaatggatgaacagaaaaaccaccaccagcagcaagtggactccatcattaaagagcatgaagtgagtattcaaagaaccgaaaaggccctgaaggatcaaatcaaccaactggagctgctgctgaaggagagagacaaacatttaaaggaacaccaggcccacgtggagaaccttgaagctgacatcaaacgcagcgagggcgaactccagcaagcttctgctaagctggatgtcttccaatcataccagtcggcgacacacgaacagacaaaagcctacgaggagcagctggcacaattacagcagaagctattggacctggagacggagcgaatcctgctaacaaagcaggtagccgaggtagaagctcaaaaaaaggacgtgtgcaccgaattggacgcccataaaatccaggtccaggacctaatgcagcaacttgagaaacagaattcagaaatggagcagaaagttaaatctctgacccaggtgtatgagagcaaacttgaagacggtaataaagagcaagagcagaccaagcagattttagtggagaaagagaatatgatccttcaaatgagagaggggcagaaaaaggagatcgaaatactaacacagaagctgagcgccaaagaggattcaatacacattttgaacgaggagtacgaaaccaaattcaagaaccaggaaaagaagatggaaaaagtaaagcaaaaagccaaagagatgcaggaaaccctgaagaagaagctgctcgaccaggaagcaaagctcaagaaagagttggaaaatactgctcttgagctgtcccagaaggagaagcagtttaacgctaaaatgctggagatggctcaggccaacagtgccggtatttccgacgccgtatcgcggctggaaaccaatcagaaagagcagatcgaatctctgactgaggtgcatcggcgggagcttaatgatgtcatcagcatctgggagaaaaagttgaaccagcaggctgaggagctccaggagatccatgaaatccaattacaagagaaagaacaggaagtggccgagctgaaacagaaaatcctcttattcggctgtgagaaggaagagatgaacaaagagattacatggttgaaagaggagggggtcaaacaggataccaccttgaacgaactccaagaacagctcaaacaaaaatcagctcacgtgaactccttagcccaggatgagaccaaactcaaggcccacctagagaagctcgaagtggatctgaataagagcttgaaagaaaacacttttctccaggagcaactggtggagctgaagatgctggcagaggaagacaaaagaaaagtttccgagttaacatcaaagctgaaaaccactgatgaggagttccaatccctgaagagctcccacgagaagtccaataagtcacttgaagacaagtccctcgagttcaaaaaattatcagaggaactggccatccaattagatatctgctgcaaaaaaaccgaggcactactggaagctaaaacaaacgaactcatcaacatcagcagtagcaaaaccaatgctatcctgtcaaggatctcccactgccaacataggaccaccaaagtcaaggaggctctacttatcaaaacttgtactgtgagtgagctggaggcccagctccgtcagttgacagaagaacagaatactctgaacatctcttttcagcaggcaactcaccagctggaagaaaaagaaaatcagattaagagtatgaaagccgacattgaatcactcgttactgagaaagaggctttgcagaaggaagggggaaaccagcaacaggctgcgagcgaaaaagaatcttgtatcacacagctgaaaaaggaactttccgaaaacatcaacgccgtgacacttatgaaggaggaactcaaggagaaaaaggtcgagatcagctcactctccaaacagttgaccgacctaaacgttcagctgcaaaactcaatttcgctgagcgagaaagaggcggcaatttcctcgctgcgtaaacagtacgatgaagaaaagtgtgagctactcgatcaggttcaggacctttcattcaaagtggataccctgtccaaggagaagataagtgctctggagcaggtggatgactggtccaacaagttctcggaatggaagaaaaaagcccagtctcgattcacgcaacatcagaataccgtgaaagagctgcagatccaactagagctgaagtccaaggaggcctacgagaaggacgaacagatcaatctcctcaaggaggaactggatcaacagaacaagcgatttgattgtcttaaaggagaaatggaggacgacaagtccaaaatggagaagaaagagtccaacctggaaacggaactgaaaagccaaaccgcaagaatcatggaactcgaagatcatatcacgcagaagacaatagagatcgaatctctgaatgaggtcctcaagaattacaaccagcagaaggacatcgagcataaggaacttgtgcagaaattacaacacttccaggagctaggggaagagaaggataatcgcgtcaaagaagccgaagaaaagatcctgacattggagaatcaggtgtacagtatgaaagccgaactcgagaccaagaaaaaggagttggaacacgtgaatcttagcgtgaagagcaaagaagaggaattaaaggctctggaggatcgcctagagagcgaatcagcagcaaagctggctgaacttaagaggaaagctgagcaaaagatcgccgcaattaaaaaacaactactgagccagatggaagagaaggaggagcagtataagaaagggacagagagccatttgtctgaactcaacaccaaattgcaggaaagggaaagggaagtacacatactagaggaaaagctgaaaagcgtcgagtccagtcaatccgaaacgctgatcgttcctcgatccgcgaaaaacgtcgccgcatataccgagcaggaggaagccgactcacagggctgcgtgcagaaaacatatgaagagaagatcagcgtgctgcagcgcaaccttaccgaaaaagaaaagctattgcaacgggtgggccaggaaaaggaagaaactgtgtcttcccactttgagatgcggtgccaataccaggagcggctgatcaaactggaacacgccgaggccaagcagcatgaggaccagagcatgatcgggcacctgcaggaggagctggaggagaaaaacaagaagtatagcctcattgtcgcccagcacgtagagaaggaaggcggcaagaataatattcaagccaaacagaatctggaaaacgtgttcgacgacgtccaaaaaaccctgcaggagaaagaattgacctgccagatcttggaacaaaagataaaggagttggatagttgtctcgtgcgacaaaaagaagtgcaccgggtggagatggaagagctgaccagtaagtatgagaaactgcaggcactgcagcagatggacggtcggaacaaacccacagagctgctggaggagaacaccgaggagaagagtaaatcccacctcgtccaacctaaactactgtctaatatggaggcccagcacaacgacctagaattcaagcttgccggtgccgagcgagagaagcagaagctggggaaggaaatcgttcggctccagaaagatttgcgtatgctcagaaaggagcaccagcaagagctggagattctgaagaaggagtacgaccaggagcgagaagagaagataaagcaggaacaagaagacttggaattgaagcataactcgactttaaagcagcttatgagggaatttaatactcagttggctcagaaagagcaggaactcgagatgacgataaaggaaacaattaataaagcccaggaagtcgaagctgagcttctggagtcccaccaggaagagactaatcagctcctgaagaagatcgccgagaaagacgacgatttaaagcgaaccgctaagagatacgaggagattctggacgcacgcgaggaggagatgacggcaaaagtgcgcgacctccagacccagcttgaggagctgcaaaagaaataccagcagaagctggagcaggaggagaacccaggcaatgataatacacagctggcgcagaaaacaacattaatctctgatagcaagctgaaagagcaggagttccgggagcagatccacaacttggaagaccgcctgaaaaaatacgaaaaaaatgtctacgccaccacggtgggaacaccatacaaggggggaaacctttaccacactgatgtttctctttttggggagcctactgaatttgagtatctaagaaaggtactgttcgagtacatgatgggaagggagaccaagacaatggccaaggtgattaccacggtgcttaaattcccggacgaccagacgcagaaaattctcgagagagaggatgctagactgatgtcgtggctgcgcagtagcagctag

SEQ ID NO: 68473 - DNA, 7673 bp, Artificial Sequence
  derived and/or modified sequence
gcaagcgcccttggcgcacagttcacctgctgccgttgtcgtcgccgccgcggctcccggggctggatggggggccgaggccagccagtggcacccggaagaaagagacgcggcggcggcgacgccgacaccctcaggacgagtgtccggacttgcccacagcctcaaggaggagacggcgaggcccggcccccgctgtccctggtgtaaagaagtcgccgtagccgtcgcggccgggactccccgggctctcgcccttcaggtttcgttgacactcaggaccgtacgtacgctgcgccatgttcaagaaactgaagcaaaagatcagcgaggagcagcagcagctccagcaggcgctggctcctgctcaggcgtcctccaattcttcaacaccaacaagaatgaggagcaggacatcttcatttacagagcaacttgatgaaggtacacccaatagagagaatgcatctactcatgcctcgaaatctcctgacagtgttaatggaagtgaaccaagcattcctcagtcaggtgacacacagtcttttgcacagaagctccagctccgggtgccctccgtggagtctttgtttcgaagtccgataaaggaatctctattccggtcttcttctaaagagtctttggtacgaacatcttccagagaatccctgaatcgacttgacctggacagttctactgccagttttgatccaccctctgatatggatagcgaggctgaagacttggtagggaattcagacagtctcaacaaagaacagttgattcagcggttgcgaagaatggaacgaagcttaagtagctacaggggaaaatattctgagcttgttacagcttatcagatgcttcagagagagaagaaaaagctacaaggtatattaagtcagagtcaggataaatcacttcggagaatagcagaattaagagaggagctccaaatggaccagcaggcaaagaaacatctgcaagaggagtttgatgcatctttagaggagaaagatcagtatatcagtgttctccaaactcaggtttctctactgaaacaacgattacgaaatggcccgatgaatgttgatgtactgaaaccacttcctcagctggaaccacaggctgaagtcttcactaaagaagagaatccagaaagtgatggagagccagtagtggaagatggaacttctgtaaaaacactggaaacactccagcaaagagtgaagcgtcaagagaacctacttaagcgttgtaaggaaacaattcagtcacataaggaacaatgtacactattaactagtgaaaaagaagctctgcaagaacaactggatgaaagacttcaagaactagaaaagataaaggaccttcatatggccgagaagactaaacttatcactcagttgcgtgatgcaaagaacttaattgaacagcttgaacaagataagggaatggtaatcgcagagacaaaacgtcagatgcatgaaaccctggaaatgaaagaagaagaaattgctcaactccgtagtcgcatcaaacagatgactacccagggagaggaattacgggaacagaaagaaaagtccgaaagagctgcttttgaggaacttgaaaaagctttgagtacagcccaaaaaacagaggaagcacggagaaaactgaaggcagaaatggatgaacaaataaaaactatcgaaaaaacaagtgaggaggaacgcatcagtcttcaacaggaattaagtcgggtgaaacaggaggttgttgatgtaatgaaaaaatcctcagaagaacaaattgctaagctacagaagcttcatgaaaaggagctggccagaaaagagcaggaactgaccaagaagcttcagacccgagaaagggaatttcaggaacaaatgaaagtagctcttgaaaagagtcaatcagaatatttgaagatcagccaagaaaaagaacagcaagaatctttggccctagaagagttagagttgcagaaaaaagcaatcctcacagaaagtgaaaataaacttcgggaccttcagcaagaagcagagacttacagaactagaattcttgaattggaaagttctttggaaaaaagcttacaagaaaacaaaaatcagtcaaaagatttggctgttcatctggaagctgaaaaaaataagcacaataaggagattacagtcatggttgaaaaacacaagacagaattggaaagccttaagcatcagcaggatgccctttggactgaaaaactccaagtcttaaagcaacaatatcagactgaaatggaaaaacttagggaaaagtgtgaacaagaaaaagaaacattgttgaaagacaaagagattatcttccaggcccacatagaagaaatgaatgaaaagactttagaaaagcttgatgtgaagcaaacagaactagaatcattatcttctgaactgtcagaagtattaaaagcccgtcacaaactagaagaggaactttctgttctgaaagatcaaacagataaaatgaagcaggaattagaggccaagatggatgaacagaaaaatcatcaccagcagcaagttgacagtatcattaaagaacacgaggtatctatccagaggactgagaaggcattaaaagatcaaattaatcaacttgagcttctcttgaaggaaagggacaagcatttgaaagagcatcaggctcatgtagaaaatttagaggcagatattaaaaggtctgaaggggaactccagcaggcatctgctaagctggacgtttttcagtcttaccagagtgccacacatgagcagacaaaagcatatgaggaacagttggcccaattgcagcagaagttgttggatttggaaacagaaagaattcttcttaccaaacaggttgctgaagttgaagcacaaaagaaagatgtttgtactgagttagatgctcacaaaatccaggtgcaggacttaatgcagcaacttgaaaaacaaaatagtgaaatggagcaaaaagtaaaatctttaacccaagtctatgagtccaaacttgaagatggtaacaaagaacaggaacagacaaagcaaatcttggtggaaaaggaaaatatgattttacaaatgagagaaggacagaagaaagaaattgagatactcacacagaaattgtcagccaaggaggacagtattcatattttgaatgaggaatatgaaaccaaatttaaaaaccaagaaaaaaagatggaaaaagttaagcagaaagcaaaggagatgcaagaaacgttaaagaaaaaattactggatcaggaagccaaacttaagaaagagcttgaaaatactgctctagagcttagtcagaaagaaaaacagtttaatgccaaaatgctggaaatggcacaggctaactcagctggaatcagtgatgcagtgtcaagactggaaacaaaccaaaaagaacaaatagaaagtcttactgaggttcatcgacgagaactcaatgatgtcatatcaatctgggaaaagaaacttaatcagcaagctgaagaacttcaggaaatacatgaaatccaattacaggaaaaagaacaagaggtagcagaactgaaacaaaagatcctcctatttgggtgtgaaaaagaagagatgaacaaggaaataacatggctgaaggaagaaggtgttaagcaggatacaacattaaatgaattacaggaacagttaaagcagaagtctgcccatgtgaattctcttgcacaagatgaaactaaactgaaagctcatcttgaaaagctagaggttgacttgaataagtctctgaaggaaaatacttttcttcaagagcagctagttgaactgaagatgctggcagaagaagataagcggaaggtttctgagttgactagcaagttgaaaaccacagatgaagaattccagagtttgaaatcttcacatgaaaaaagtaacaaaagcctagaggacaagagcttggaatttaaaaaactgtctgaggaactagcgattcagctagatatttgctgtaagaaaaccgaagccttattagaagctaaaacaaatgagctaatcaacattagtagtagtaaaactaatgccattctttctaggatttctcattgtcagcaccgtacaactaaagttaaggaggcactgttaattaaaacttgcacagtttctgaattagaagcacaacttagacagttgacagaggagcaaaatacactaaatatttcttttcaacaggctactcatcagttagaagaaaaagaaaatcaaattaagagcatgaaggctgatattgaaagtcttgtaacagaaaaagaagccttacagaaggaaggaggcaatcagcaacaggctgcttctgaaaaggagtcttgtataacacagttgaagaaagagttatctgaaaacatcaatgctgtcacattgatgaaagaagagcttaaagaaaaaaaagttgagattagcagtcttagtaaacaactaactgatttgaatgttcagcttcaaaatagcatcagcctatccgaaaaagaagcagccatttcatcactaagaaagcagtatgatgaagaaaaatgtgaattgctggatcaggtgcaagatttatcttttaaagttgacactctgagtaaagagaaaatttctgctcttgagcaggtagatgactggtccaataaattctcagaatggaagaagaaagcacagtcaagatttacacagcatcaaaacactgttaaagaattgcagatccagcttgagttaaaatcaaaggaagcttatgaaaaggatgagcagataaatttattgaaggaagagcttgatcagcaaaataaaagatttgattgtttaaagggtgaaatggaagacgacaagagcaagatggagaaaaaggagtctaatttagaaacagagttaaagtctcaaacagcaagaattatggaattagaggaccatattacccagaaaactattgaaatagagtccttaaatgaagttcttaaaaattacaatcaacaaaaggatattgaacacaaagaattggttcagaaacttcaacattttcaagagttaggagaagaaaaggacaacagggttaaagaagctgaagaaaaaatcttaacacttgaaaaccaagtttattccatgaaagctgaacttgaaactaagaagaaagaattagaacatgtgaatttaagtgtgaaaagcaaagaggaggagttaaaggcattggaagataggcttgagtcagaaagtgctgcaaaattagcagagttgaagagaaaagctgaacaaaaaattgctgccattaagaagcagttgttatctcaaatggaagagaaagaagaacagtataaaaaaggtacagaaagccatttgagtgagctaaatacaaaattgcaggaaagagaaagggaagttcacatcttggaagaaaaacttaagtcagtggaaagttcacagtcagaaacattaattgtacccagatcagcaaaaaatgtggcagcatatactgaacaagaagaagcagattcccaaggctgtgtgcagaagacatatgaagaaaaaatcagtgttttacaaagaaacttaactgaaaaagaaaagctattgcagagggtagggcaggaaaaagaagagacagtttcttctcattttgaaatgcgatgccaataccaggagcgcttaataaagctagaacatgctgaggcaaagcaacatgaagatcaaagtatgataggtcatcttcaagaggagcttgaagaaaaaaacaagaaatattccttgatagtagcccagcatgtggaaaaagaaggaggtaaaaataacatacaggcaaagcaaaacttggaaaatgtgtttgacgacgtccagaaaaccctccaggagaaggaactaacctgtcagattttggagcaaaagataaaagagctggattcctgcttagtaagacagaaagaagtacatagagttgaaatggaagagttgacctcaaaatatgaaaaattacaggctttacaacagatggatggaagaaataaacccacagaacttttggaagaaaacactgaagaaaagtccaaatcacatttggtccaacccaaattgcttagtaacatggaagcccagcacaatgatctggagtttaaattagccggggcagaacgggagaaacagaaactgggcaaggagattgttagattgcagaaagaccttcgaatgttgagaaaggagcatcagcaagaattggaaatactaaagaaagaatatgatcaagaaagggaagagaaaatcaaacaggagcaggaagatcttgaactgaagcacaattccacattaaaacagctgatgagggagtttaatacacagctggcacaaaaggaacaagagctggaaatgaccataaaagaaactatcaataaggcccaggaggtggaggctgaacttttagaaagccatcaagaagagacaaatcagttacttaaaaaaattgctgagaaagatgatgatctaaaacgaacagccaaaagatatgaagaaatccttgatgctcgtgaagaagaaatgactgcaaaagtaagggacctgcagactcaacttgaggagctgcagaagaaataccagcaaaagctagagcaggaggagaaccctggcaatgataatacacagctagcacagaagacgactttaatcagtgattcgaaattgaaagagcaagagttcagagaacagattcacaatttagaagaccgtttgaagaaatatgaaaagaatgtatatgcaacaactgtggggacaccttacaaaggtggcaatttgtaccatacggatgtctcactctttggagaacctaccgaatttgagtatttgcgaaaagtgctttttgagtatatgatgggtcgtgagactaagaccatggcaaaagttataaccaccgtactgaagttccctgatgatcagactcagaaaattttggaaagagaagatgctcggctgatgtcatggctccgatcttcatcttgaagaagagtgacattgggtgactgctgcttggaaaactgtccacacttgctactctttgagaatgaagttgtcattcagggcccctcatgtagccaaaagaccaagaaaaatctggcccacagataagttgcagactgcctttaaaatagattttatcagtggagaaatggtgatagttttttcttcagttttctcttgggaagagttttatgttgtttaaaagatattttgataacttaacctgctttatgggcttacataatattcctttcatccattctttttaaagaacggcttacctttcctatttatttttagggtgattttttaaaaagacttgtgcaatacattttgaggtgaaacttagtggattttttctgataaattagagcatttaattgactattttattcaggttgatctgttgaatatttgctaaagaccagttctttaagctaagacatgtaaaaaatcccaaatggcagtacctcattgtttacttagcttttgtacttatatttttcagaggaaaaaacactactgtaaattgtgaatagccaatacataactgtattgtatgcaaatctgtgattgttggcagtgtcatctctgagaaacagataaataaagtttatttactat

SEQ ID NO: 68474 - DNA, 6732 bp, Artificial Sequence
  derived and/or modified sequence
atgttcaagaagctgaagcagaagatcagcgaggagcagcagcagctgcagcaggccctggccccagcccaggccagcagcaacagcagcacccccaccaggatgaggagcaggaccagcagcttcacagagcagctggatgagggcacccccaaccgggagaatgccagcacccacgccagcaagagcccagacagcgtgaatggcagcgagcccagcatcccccagagcggggacacccagagctttgcccagaagctgcagctgcgggtgcccagcgtggagagcctcttccgcagccccatcaaggagagcctcttccgcagcagcagcaaggagagcctggtgaggaccagcagccgggagagcctgaaccggctggacctggacagcagcacagccagctttgacccccccagcgacatggacagcgaggccgaggacctggtgggcaacagcgacagcctgaacaaggagcagctgatccagaggctgcggaggatggagaggagcctgagcagctaccggggcaagtacagcgagctggtgacagcctaccagatgctgcagcgggagaagaagaagctgcagggcatcctgagccagagccaggacaagagcctgcggagaattgctgagctgcgggaggagctgcagatggaccagcaggccaagaagcacctgcaggaggagtttgatgccagcctggaggagaaggaccagtacatctctgtgctgcagacccaggtgtccctgctgaagcagaggctgagaaatggccccatgaatgtggatgtgctgaagcccctgccccagctggagccccaggccgaggtgttcaccaaggaggagaaccctgagagtgatggagagcctgtggtggaggatggcacctctgtgaagaccctggagaccctgcagcagagggtgaagaggcaggagaacctgctgaagcgctgcaaggagaccatccagagccacaaggagcagtgcaccctgctgaccagcgagaaggaggccctgcaggagcagctggatgagcggctgcaggagctggagaagatcaaggacctgcacatggccgagaagaccaagctgatcacccagctgagagatgccaagaacctgattgagcagctggagcaggacaagggcatggtgattgctgagaccaagaggcagatgcatgagaccctggagatgaaggaggaggagatcgcccagctgcggagccgcatcaagcagatgaccacccagggcgaggagctgcgggagcagaaggagaagtcagaaagagctgcctttgaggagctggagaaggccctgagcacagcccagaagacagaggaggcccggaggaagctgaaggccgagatggatgagcagatcaagaccatcgagaagaccagcgaggaggagcgcatcagcctgcagcaggagctgagccgggtgaagcaggaggtggtggatgtgatgaagaagagcagcgaggagcagatcgccaagctgcagaagctgcacgagaaggagctggccaggaaggagcaggagctgaccaagaagctgcagacccgggagcgggagttccaggagcagatgaaggtggccctggagaagagccagagcgagtacctgaagatcagccaggagaaggagcagcaggagagcctggccctggaggagctggagctgcagaagaaggccatcctgacagaaagtgagaacaagctgcgggacctgcagcaggaggccgagacctaccgcacccgcatcctggagctggagagcagcctggagaagagcctgcaggagaacaagaaccagagcaaggacctggccgtgcacctggaggccgagaagaacaagcacaacaaggagatcaccgtgatggtggagaagcacaagacagagctggagagcctgaagcaccagcaggatgccctgtggacagagaagctgcaggtgctgaagcagcagtaccagacagagatggagaagctgcgggagaagtgtgagcaggagaaggagaccctgctgaaggacaaggagatcatcttccaggcccacatcgaggagatgaatgagaagaccctggagaagctggatgtgaagcagacagagctggagagcctgagcagcgagctgtctgaggtgctgaaggcccggcacaagctggaggaggagctgtctgtgctgaaggaccagacagacaagatgaagcaggagctggaggccaagatggatgagcagaagaaccaccaccagcagcaggtggacagcatcatcaaggagcacgaggtgtccatccagaggacagagaaggccctgaaggaccagatcaaccagctggagctgctgctgaaggagcgggacaagcacctgaaggagcaccaggcccacgtggagaacctggaggccgacatcaagaggtctgagggggagctgcagcaggccagcgccaagctggatgtgttccagagctaccagagcgccacccatgagcagaccaaggcctatgaggagcagctggcccagctgcagcagaagctgctggacctggagacagagcgcatcctgctgaccaagcaggtggccgaggtggaggcccagaagaaggatgtgtgcacagagctggatgcccacaagatccaggtgcaggacctgatgcagcagctggagaagcagaacagcgagatggagcagaaggtgaagagcctgacccaggtgtatgagagcaagctggaggatggcaacaaggagcaggagcagaccaagcagatcctggtggagaaggagaacatgatcctgcagatgagggagggccagaagaaggagattgagatcctgacccagaagctgagcgccaaggaggacagcatccacatcctgaatgaggagtatgagaccaagttcaagaaccaggagaagaagatggagaaggtgaagcagaaggccaaggagatgcaggagaccctgaagaagaagctgctggaccaggaggccaagctgaagaaggagctggagaacacagccctggagctgagccagaaggagaagcagttcaatgccaagatgctggagatggcccaggccaacagcgctggcatcagtgatgctgtgtcccggctggagaccaaccagaaggagcagatcgagagcctgacagaggtgcacagaagagagctgaatgatgtgatcagcatctgggagaagaagctgaaccagcaggccgaggagctgcaggagatccacgagatccagctgcaggagaaggagcaggaggtggccgagctgaagcagaagatcctgctgtttggctgtgagaaggaggagatgaacaaggagatcacctggctgaaggaggagggcgtgaagcaggacaccaccctgaatgagctgcaggagcagctgaagcagaagagcgcccacgtgaacagcctggcccaggatgagaccaagctgaaggcccacctggagaagctggaggtggacctgaacaagagcctgaaggagaacaccttcctgcaggagcagctggtggagctgaagatgctggccgaggaggacaagaggaaggtgtctgagctgaccagcaagctgaagaccacagatgaggagttccagagcctgaagagcagccatgagaagagcaacaagagcctggaggacaagagcctggagttcaagaagctgtctgaggagctggccatccagctggacatctgctgcaagaagacagaggccctgctggaggccaagaccaatgaactcatcaacatcagcagcagcaagaccaatgccatcctgagccgcatcagccactgccagcacaggaccaccaaggtgaaggaggccctgctgatcaagacctgcaccgtgtctgagctggaggcccagctgcggcagctgacagaggagcagaacaccctgaacatctccttccagcaggccacccaccagctggaggagaaggagaaccagatcaagtccatgaaggctgacatcgagagcctggtgacagagaaggaggccctgcagaaggagggcggcaaccagcagcaggccgccagcgagaaggagagctgcatcacccagctgaagaaggagctgtctgagaacatcaatgctgtgaccctgatgaaggaggagctgaaggagaagaaggtggagatcagcagcctgagcaagcagctgacagacctgaatgtgcagctgcagaacagcatcagcctgtctgagaaggaggccgccatcagcagcctgaggaagcagtatgatgaggagaagtgtgagctgctggaccaggtgcaggacctgtccttcaaggtggacaccctgagcaaggagaagatcagcgccctggagcaggtggatgactggagcaacaagttcagcgagtggaagaagaaggcccagagccgcttcacccagcaccagaacacagtgaaggagctgcagatccagctggagctgaagagcaaggaggcctatgagaaggatgagcagatcaacctgctgaaggaggagctggaccagcagaacaagagatttgactgcctgaagggggagatggaggatgacaagagcaagatggagaagaaggagagcaacctggagacagagctgaagagccagacagcccgcatcatggagctggaggaccacatcacccagaagaccattgaaattgagagcctgaatgaggtgctgaagaactacaaccagcagaaggacatcgagcacaaggagctggtgcagaagctgcagcacttccaggagctgggggaggagaaggacaacagagtgaaggaggccgaggagaagatcctgaccctggagaaccaggtgtacagcatgaaggccgagctggagaccaagaagaaggagctggagcacgtgaacctgtctgtgaagagcaaggaggaggagctgaaggccctggaggaccggctggagagcgagagcgctgccaagctggccgagctgaagaggaaggccgagcagaagattgctgccatcaagaagcagctgctgagccagatggaggagaaggaggagcagtacaagaagggcacagagagccacctgtctgagctgaacaccaagctgcaggagcgggagcgggaggtgcacatcctggaggagaagctgaagtctgtggagagcagccagagcgagaccctgattgtgcccaggtctgccaagaatgtggccgcctacacagagcaggaggaggccgacagccagggctgtgtgcagaagacctatgaggagaagatctctgtgctgcagaggaacctgacagagaaggagaagctgctgcagagggtgggccaggagaaggaggagaccgtgagcagccactttgagatgcgctgccagtaccaggagcggctcatcaagctggagcacgccgaggccaagcagcacgaggaccagagcatgattggccacctgcaggaggagctggaggagaagaacaagaagtacagcctgattgtggcccagcacgtggagaaggagggcggcaagaacaacatccaggccaagcagaacctggagaatgtgtttgatgatgtgcagaagaccctgcaggagaaggagctgacctgccagatcctggagcagaagatcaaggagctggacagctgcctggtgcggcagaaggaggtgcaccgggtggagatggaggagctgaccagcaaatatgagaagctgcaggccctgcagcagatggatggaagaaacaagcccacagagctgctggaggagaacacagaggagaagagcaagagccacctggtgcagcccaagctgctgagcaacatggaggcccagcacaatgacctggagttcaagctggccggggctgagcgggagaagcagaagctgggcaaggagatcgtgcggctgcagaaggacctgaggatgctgaggaaggagcaccagcaggagctggagatcctgaagaaggagtatgaccaggagcgggaggagaagatcaagcaggagcaggaggacctggagctgaagcacaacagcaccctgaagcagctgatgagggagttcaacacccagctggcccagaaggagcaggagctggagatgaccatcaaggagaccatcaacaaggcccaggaggtggaggccgagctgctggagagccaccaggaggagaccaaccagctgctgaagaagattgctgagaaggatgatgacctgaagaggacagccaagagatatgaggagatcctggatgcccgggaggaggagatgacagccaaggtgcgggacctgcagacccagctggaggagctgcagaagaagtaccagcagaagctggagcaggaggagaaccctggaaatgacaacacccagctggcccagaagaccaccctcatcagtgacagcaagctgaaggagcaggagttccgggagcagatccacaacctggaggaccggctgaagaagtatgagaagaatgtgtatgccaccaccgtgggcaccccctacaagggcggcaacctgtaccacacagatgtgtccctgtttggagagcccacagaatttgagtacctgaggaaggtgctgtttgagtacatgatgggccgggagaccaagaccatggccaaggtgatcaccaccgtgctgaagttcccagatgaccagacccagaagatcctggagagagaagatgcccggctgatgtcctggctgcggagcagcagctag

SEQ ID NO: 68475 - DNA, 6732 bp, Artificial Sequence
  derived and/or modified sequence
atgttcaagaagctgaagcagaagatcagcgaggagcagcagcagctccagcaggccctcgcaccagcccaggcctcttccaactcctcaaccccaacccgaatgcgctctcgaaccagctctttcacagagcaactggacgaaggtaccccaaatcgggaaaatgctagcacccacgctagcaaaagccccgatagcgtgaatggttctgagccatccattcctcaaagcggtgacacacagagctttgcacagaaattacagctgagagtgccttccgttgagtcactgtttcggagcccgatcaaggaatccctgtttagatctagtagtaaggaatccctggtgcgcacctcctcccgggaatctttgaaccgcctcgatctagattcgagcaccgcatcttttgatccaccatctgacatggactctgaagctgaagacttagttggcaacagcgatagcctaaataaagagcagctgattcagcgcctgcggcgcatggagcgatcgttgtcctcatatagaggaaagtacagcgagctggtgacagcttaccagatgctgcagcgggaaaaaaaaaagttacaaggcatcctttcgcagagtcaggataaaagtctgaggcggattgccgagctcagggaggagctacagatggatcagcaggctaaaaagcaccttcaggaggagtttgacgccagcctggaggagaaagaccagtatatttctgtgctgcaaacgcaagtatccttactgaagcagaggttgcggaacggaccaatgaacgtcgatgtgttaaagccccttccccagcttgaacctcaggcagaagtcttcacaaaagaggaaaaccccgagagcgatggcgagcccgttgtcgaggatggcacttccgtcaaaaccctggagacactgcaacagcgtgttaagaggcaggaaaatttgctcaaacgctgtaaggagactattcagtcacataaggagcagtgcactttgctgactagtgagaaggaagccttacaggagcagctcgatgaacgcctacaagagctcgagaaaataaaagacctgcacatggcagagaaaactaaattgatcacgcagttgagagatgccaagaacctcatcgagcaacttgagcaggataaagggatggtgatcgccgagaccaagagacaaatgcatgagacactagaaatgaaagaagaggaaattgctcagctgagaagtagaataaagcagatgacaactcagggcgaggaactgagggagcaaaaggagaagagtgaacgcgccgcattcgaggagctggaaaaagctctgtccaccgcacaaaagacagaggaggccaggagaaagttgaaagctgaaatggacgaacaaatcaaaactattgaaaagacaagcgaagaggagcgaatcagcctgcagcaggagctgtcccgcgttaaacaggaggttgttgacgtgatgaaaaaaagcagcgaagaacagatagctaaactgcagaagctgcacgaaaaggagctggctcgcaaggaacaagagctgacaaagaaacttcaaaccagagagcgtgaattccaggagcagatgaaggtggcgcttgagaaatcccagtctgaatatctgaaaattagccaggagaaggaacagcaagagagtctagctcttgaggagctggaactgcagaaaaaagcaatcctgaccgaaagtgaaaacaagctgcgtgacctgcagcaagaagctgaaacttataggaccaggatcctggagctcgagtccagtctggagaagtctctccaggaaaataaaaaccagtcgaaagatctagctgtccacctggaggccgaaaaaaacaaacacaacaaagaaattacggtgatggtagagaagcataaaacggagctagagagtctgaagcatcaacaggatgcattatggaccgagaagcttcaagtattgaaacaacagtaccagaccgaaatggaaaagcttcgtgaaaaatgcgagcaggaaaaagagaccctcttgaaagacaaggagattattttccaggcacatattgaggaaatgaatgagaaaacactggaaaaactagatgtaaaacaaaccgaattagagagtctgagtagtgagctgtccgaggtgctgaaagctaggcataaactggaagaggagctgagcgtgctgaaagatcagactgacaagatgaagcaggagttagaagcgaagatggacgagcagaagaaccatcatcagcagcaggtagacagtataatcaaagagcatgaggtgtccatccaaaggaccgaaaaggcactgaaggaccagattaatcagctagagctcctccttaaggagcgagataaacacctgaaggaacaccaggcacacgtggagaacctggaggccgacataaaaaggtccgaaggcgaattgcaacaggcttccgctaaactggacgtctttcagagttatcagtcagcaactcatgagcagaccaaggcatacgaagagcagcttgcgcagctgcagcaaaagctgctcgacttagagaccgaacgcatcctgcttacaaagcaggtcgcggaggtagaggcccagaaaaaggacgtgtgtaccgagctcgatgctcacaagattcaggtgcaggacctcatgcagcaactggaaaaacagaactctgaaatggaacagaaagtgaaatctctaacacaagtgtacgagtcgaagctggaggacggcaacaaagaacaagagcagaccaaacagatacttgtggaaaaagagaacatgatcttgcagatgcgggagggccaaaagaaggaaattgagatactgactcagaagttaagtgccaaagaagacagcatccacatcctaaacgaggagtacgaaacaaaattcaagaaccaagaaaagaagatggaaaaggttaaacagaaagctaaggagatgcaagaaactctgaagaagaaactgctggatcaggaggctaagctcaagaaggagctcgagaacactgctctggaactgtcccagaaggaaaaacaatttaatgccaagatgttagagatggctcaggcaaacagtgccgggatcagcgatgctgtttcccggctcgagacaaaccagaaggagcaaattgagtctctcacagaagttcacaggagggaactcaacgacgtgatcagcatctgggagaagaaactgaatcaacaagctgaagagctacaggaaatccacgaaatccagctgcaggaaaaagagcaagaagtggccgagctgaaacagaagatactgctcttcgggtgcgaaaaggaagaaatgaataaggagattacctggcttaaggaagagggcgtaaaacaagacacaaccttaaatgagttgcaggaacagctcaaacagaaatccgctcatgttaattctctggcccaagacgagaccaagctgaaggctcacctagagaaactcgaggttgatctcaataagtccctgaaggagaatacgttcctccaggaacaactggtagagctgaagatgctggccgaggaggacaagcggaaagtatcagagcttacctccaagctgaaaaccaccgatgaggaatttcagtcactcaaatcttcacacgagaagtctaataaatccttggaggataagagcttggaatttaaaaagctcagtgaagaacttgcaattcagttggatatctgctgcaaaaagactgaagctttgctcgaagccaagacaaacgaacttatcaacatatcctcatccaagaccaatgctatcctcagccgcatctcacactgtcaacaccgcactactaaggtcaaggaggcactgctgattaagacatgtactgtgagtgaattggaagcacaactgaggcaattgaccgaagaacaaaataccctcaacataagtttccagcaggcaacccaccagctcgaagagaaggaaaatcagattaaatctatgaaggccgacatcgagagtcttgtcaccgaaaaggaggcactgcagaaggagggcggaaaccagcagcaggctgcttcagaaaaagaatcctgcattactcagctcaaaaaagaactgtcagagaatatcaacgcagtgacacttatgaaagaagaactgaaggagaaaaaggtggaaattagcagcttgtctaagcagctgacagacttaaatgtacagctgcaaaactctattagcctgtcggaaaaggaagctgcaatctcttccctccggaaacagtacgacgaagagaaatgcgagttgctcgaccaagtgcaggacttatcctttaaggtggacactttgtctaaggagaaaatatctgccctggaacaggtggacgactggtctaataaattctcggaatggaaaaagaaggcccagagcagattcacgcagcaccagaacaccgtcaaagagctgcaaatacagttagaactcaagtcgaaggaggcatatgagaaagacgagcagatcaacctccttaaggaggagctcgatcagcaaaacaagagatttgattgcttaaaaggcgaaatggaggacgacaagtccaaaatggagaaaaaggaatccaacctggaaaccgagctgaagagtcaaacggcacgcatcatggaacttgaagatcacatcacccaaaagactattgaaatcgagtccctgaacgaagtgctgaagaattacaatcagcagaaggacattgagcataaggaactggtgcagaaactgcagcacttccaagagctgggagaggaaaaggataatcgggtcaaggaggcagaggagaaaatactcactcttgagaaccaggtctattcgatgaaagccgagctagagaccaagaagaaggaattagagcacgtgaacctcagtgtcaagtccaaggaggaggagctcaaggccctggaggacaggctggaaagcgagtccgccgccaaacttgctgaactgaagcgaaaagccgaacaaaaaattgcagcaattaaaaaacagctgctgtcccagatggaggaaaaggaagagcagtataaaaagggcaccgagtcacacctctctgagctgaataccaagctgcaggagcgggagcgcgaggtgcacatccttgaggagaagctgaagtctgtcgagagcagtcaatctgagaccctcattgtgccccgctccgccaaaaacgtcgcagcatataccgaacaggaggaggccgactcgcagggttgtgtgcaaaaaacctatgaggagaaaattagcgtgctgcagcggaatttgaccgaaaaagaaaaactgctgcagcgggttggccaggaaaaggaggagactgtgtcaagtcatttcgagatgagatgccaatatcaggaacgactcattaaattggagcacgccgaagctaaacagcacgaagaccagagtatgattgggcacctgcaggaggagctggaagagaagaataaaaagtattccttaatcgttgcccagcatgtcgagaaagaaggggggaagaataacatacaggcaaagcaaaatttagagaacgtgttcgacgacgtgcaaaagaccttacaggaaaaggaacttacatgccagattctggaacagaaaatcaaagagttggattcttgtctcgttcggcagaaggaggttcaccgtgtggaaatggaagaattaacctcgaagtatgagaagctgcaggctttgcaacagatggatggaaggaataagcctactgaattgctggaggagaatacagaagaaaaaagtaagtctcatcttgtgcaaccaaagctcttgagtaatatggaggcccagcacaatgatctggaatttaaacttgccggagccgagcgcgagaagcagaaactgggaaaggagatcgtgaggctgcagaaggacctgagaatgctccggaaagagcaccaacaggaactcgagatcctcaaaaaggaatacgatcaagaacgggaggagaagattaagcaggaacaggaggacttggaactcaagcacaacagcactttaaagcagctcatgagggaattcaatacgcagctggctcagaaagagcaggagctcgagatgaccattaaggagacaataaataaagcccaggaagtcgaggctgagctgctggaaagccaccaggaggagacgaaccagctgctcaagaagatcgccgaaaaggatgacgatctgaaaaggactgccaaacgctacgaggagattctcgacgccagggaggaagaaatgaccgcaaaggtccgggacctgcagactcaacttgaggagctgcagaagaagtaccagcagaagttggagcaggaggaaaaccccggaaatgataacacacagcttgctcagaaaacaaccctgataagtgactcgaaactcaaggaacaggagtttcgcgagcagatccataatcttgaagaccggctaaagaaatacgagaaaaacgtatacgcgacgacggtgggcacaccttacaaaggcgggaacctgtatcatactgacgtatccctgtttggcgagcctactgagttcgaatatctccgcaaggttctgttcgagtatatgatgggacgcgaaacaaagacaatggcaaaagtaatcaccactgtgctcaaattcccagacgatcagacccaaaagatcctggaacgggaggacgcccggttgatgagttggttaagatcaagctcctag

SEQ ID NO: 68476 - DNA, 6731 bp, Artificial Sequence
  derived and/or modified sequence
atgtttaaaaagttaaagcagaaaatttccgaagagcagcagcagttgcagcaagccctggctcccgcacaagctagctctaacagctcgactcctaccaggatgcggtcccgcacatcttccttcaccgagcagctagacgaaggtacacctaaccgagagaatgcctcaactcatgcatctaaaagccctgattccgtgaatggtagcgaaccctcaattccccagtcaggcgatactcaatcatttgcccagaagttacagctgcgagtccctagtgtggagtccctgttcagaagccccattaaggagagtttgtttcggtcttcctcgaaagagtctctcgtgagaacatcctcccgagaatccctaaatcgacttgatctggattcaagtaccgcatccttcgaccccccaagcgacatggattcggaggctgaggatctggtgggtaattctgactctttaaacaaagagcagcttatacagaggctccggagaatggagaggtctctgagtagctacagagggaagtactctgaactggtcaccgcctaccagatgctgcagagagagaagaaaaagttacaggggattttatctcagagccaggacaagtccttaaggagaatagcagaactgagagaggagttgcaaatggatcagcaggcgaaaaagcacctccaggaagagttcgacgcatcgctggaggagaaagatcaatacatatctgtgctacaaacccaggtgtccctcctgaaacagaggctgcggaacgggcctatgaatgttgatgtgctgaaaccgctgccccaactggagccacaggctgaggtcttcaccaaggaggaaaatcctgaaagcgacggtgagccagtcgtagaggatggtacgtctgtcaagactctggaaaccctgcaacagagggtaaaacgtcaggaaaacctccttaaacgctgcaaagagaccatccagtcgcacaaggagcaatgtacgctcctgacgtcagaaaaggaggcactccaggagcaactggatgagcgcctgcaggaattggagaagatcaaagatctacacatggcagagaagacgaagctgatcacccagttaagagacgcaaagaatctgatcgaacagctcgagcaagacaaaggaatggtgatagccgaaactaagaggcagatgcacgaaactctggaaatgaaagaagaagaaatcgcccagctccggtccaggatcaagcagatgacgacacagggcgaggaactcagagagcaaaaggaaaagagtgagagagccgcatttgaggaattagaaaaggctttgtcaactgcccagaaaacggaggaggctagaagaaagctgaaggccgagatggacgagcagataaagacaattgaaaaaaccagcgaagaagaaagaataagtctacagcaggagctgtcacgcgtgaagcaggaggtggtggatgttatgaagaaatcaagtgaggaacagatcgcgaaactccagaagttgcatgagaaggaacttgccagaaaagagcaggagctgactaaaaaactgcagacacgtgagagggaatttcaggagcaaatgaaggtcgccctagagaagagccagtccgaatacctgaaaattagtcaagaaaaagaacagcaggaatctttggctctggaagaactcgaattgcagaaaaaagccattctaactgagagcgaaaataagctccgggatctgcagcaggaagctgagacatatagaacgcgtatcctggagctggagtcctccttggaaaagtcactacaggaaaataagaatcagtctaaggatctggctgtgcatttggaggccgagaaaaataaacacaataaggaaatcaccgtgatggtcgaaaaacataaaactgagctggaatccttgaaacaccaacaagatgctctctggaccgagaaactgcaggtgttgaaacagcagtaccagaccgagatggaaaagttgcgggaaaaatgcgaacaggaaaaagagactcttttgaaagacaaggagattattttccaggcacatatagaagaaatgaatgaaaagacgttggagaagctggacgtgaaacaaaccgagctggagtccctgagcagtgagctgtccgaagtgcttaaagcgaggcacaaactcgaagaagagctgtccgtgttgaaggaccagaccgacaagatgaaacaggagctagaggcgaagatggatgagcagaagaaccaccaccaacagcaggtggatagtatcataaaggaacacgaagtgtcaatccagcggactgagaaggccctcaaggaccagatcaatcaacttgaactgctcttgaaagaaagagataagcaccttaaggagcatcaggcgcatgtggaaaacctggaggcggacataaaacgatccgagggggaactgcaacaggcaagcgctaagctggacgtattccagagctatcaaagcgcaacccacgagcagaccaaggcctacgaagagcagttggcgcagctacagcaaaagctcctcgaccttgagaccgagcgcattctgcttaccaagcaggtcgccgaggttgaagcccagaagaaggacgtgtgcaccgagctcgatgcacacaaaatccaagtccaggatctgatgcagcagcttgagaagcaaaacagcgaaatggaacagaaagtgaaaagccttacccaggtctacgaatctaagctcgaggatggaaacaaggaacaggagcaaacgaaacagattctggtagaaaaggaaaacatgatcctgcagatgcgcgagggacagaagaaagagatcgaaatcctgactcagaagttatccgccaaggaagattccattcacattctcaatgaggagtacgagacaaagttcaagaatcaggagaagaaaatggagaaagttaaacagaaggcgaaagagatgcaggaaaccttgaaaaaaaaactgcttgaccaggaggctaagcttaaaaaggagctggaaaatacagctctggaactgtcccagaaggagaagcagtttaacgccaaaatgcttgagatggcccaggctaatagcgccggtatttcagatgctgtgtctcgactggagacaaaccagaaggagcagatcgagtccttaacagaggtgcatcggagagaactgaacgatgttataagcatctgggaaaagaaactaaaccagcaggctgaggaattgcaggagatccacgaaatccagttgcaggaaaaggagcaagaggtggccgaactaaaacagaaaattctgcttttcgggtgtgagaaagaagaaatgaataaggagataacctggttaaaggaagagggggttaagcaggacactaccctcaacgagctgcaggaacagctaaaacagaagagcgcccacgttaatagcttagcccaagacgagaccaagttgaaagcccacctggaaaagctagaggttgacctgaataaatctctgaaggaaaacacattcctacaggaacagctggtggagctgaagatgttggctgaagaagataagagaaaggtgtctgagctgacctcaaaattaaagacaaccgatgaagaatttcaaagccttaaaagttcccacgagaaatctaataagtccctggaagacaaaagcctcgagttcaagaagctgagcgaggagctggctatccagctcgatatttgctgcaagaagacagaagccctcctggaggccaaaactaacgagctgattaacatctcctccagcaagaccaatgccattctttctcggatctctcactgccagcaccgaacaacaaaggtgaaggaggccctccttattaagacctgtacagtttctgagctggaagcccagttgcgacagctgaccgaggaacaaaacacactaaatatctcattccagcaggcaacacatcagctagaagaaaaggaaaaccagattaagagcatgaaggcagatattgagtcgcttgtgacagaaaaggaggccctgcagaaggagggagggaaccagcagcaggccgctagcgaaaaggaatcttgcataacacagctcaagaaggaactgtcagaaaatataaatgccgtgactctgatgaaagaggagctgaaggagaaaaaagtggagatcagctcgctctccaaacagctgacagacctgaacgtgcaactgcaaaactccattagtctttcggagaaagaggctgcaatctctagtctacggaaacagtatgacgaggagaagtgtgaactgctggaccaggtgcaggacctgtcgtttaaggttgacactctcagtaaggagaagatcagcgctctggagcaagtggacgactggtcaaacaagttctccgagtggaagaagaaagcccagtctcgctttacccagcaccagaacacggtgaaggaattgcagatccagcttgaattgaagagtaaggaggcctatgaaaaggacgaacagatcaatctgctcaaagaggaattagatcagcaaaataaaagattcgattgtctgaaaggggagatggaggacgacaagagcaagatggagaagaaggagagcaatctggaaaccgagctcaagagccaaaccgcaagaattatggagctggaggaccacatcacacagaagaccattgagatcgagtctcttaacgaggtgctcaaaaactacaatcagcagaaagacatcgagcacaaagagttggtccagaagctgcaacactttcaggaactgggggaggaaaaggacaaccgcgtgaaggaagcagaagaaaagatcctcacattggagaaccaagtgtattctatgaaagccgagttagaaacaaagaagaaggagttggaacatgttaacctctccgtgaaatccaaagaggaagaactcaaagccctggaggaccgactcgagtctgagtccgcagctaagctggcagagctcaagcggaaggcagaacaaaagattgctgccataaagaaacagctcttatcccagatggaagagaaggaagagcagtacaagaaaggcactgaaagccatttatcggaactgaacactaaactgcaggaacgcgaacgggaagtgcatattttggaagaaaagctgaaaagtgtggagtccagccaaagcgaaacactcattgtacccagaagcgccaagaacgttgctgcttataccgagcaggaagaagcagacagccagggatgcgtgcagaagacctacgaagagaaaatctccgtgctacaacgcaatcttaccgaaaaggaaaaactgctgcagcgagtcggccaggaaaaagaggagacagtgagcagtcatttcgagatgagatgccagtaccaggaacgactcatcaagttggagcatgcggaggccaagcaacacgaggatcagtccatgataggccatctacaagaagagcttgaagaaaaaaataagaagtatagcttaattgtggctcaacatgtggaaaaggagggagggaagaacaatattcaggcgaagcagaacctcgaaaatgtgttcgacgacgtacagaaaaccctgcaggaaaaggaactgacttgccagatcttggaacagaaaatcaaggagttggatagttgtcttgtacggcagaaggaggtacacagggtggagatggaggaattgacttctaagtacgaaaagctgcaggccctgcagcagatggatggcaggaacaagccaaccgagttacttgaggaaaataccgaggagaagagcaaaagtcatttagtgcagcctaaactgctgtccaacatggaggctcaacacaacgatctcgagttcaaactggcaggggctgagcgggaaaagcagaaacttggaaaagagatagtcagactccagaaggatctaagaatgctgcgcaaagaacaccagcaggagctcgaaattttgaaaaaggagtacgaccaggagcgggaggaaaaaatcaagcaggaacaggaagacctggaactcaaacacaatagcactctcaagcagctaatgcgagagtttaatactcagctggcacagaaggagcaggaactagagatgacaatcaaggagacgattaacaaagcacaggaagtggaggcggagctgctggagagtcatcaagaagaaacaaaccaactgttgaaaaagattgctgagaaggacgacgatcttaaacggaccgccaaacgctacgaggagatccttgacgccagagaagaagagatgaccgcaaaagtgagggaccttcagacacaactggaggagctgcaaaagaaatatcagcagaaactcgagcaggaagagaatcccggaaatgacaatacccaactagcccagaaaacgaccttgatctccgactcaaaactgaaagagcaggagtttcgagagcagattcacaatcttgaggacagactgaagaagtatgaaaagaacgtttatgccactactgttggaacaccctataaaggaggcaatctgtatcacacagacgtgagtcttttcggcgaaccgaccgaattcgaatacctacgaaaggttttgttcgaatacatgatgggcagggagacaaaaactatggcaaaggtcatcactaccgttttgaagttccctgacgatcagacacagaagatcctggagcgcgaggacgccaggctgatgagctggcttcggagttcctccta

SEQ ID NO: 68477 - DNA, 6732 bp, Artificial Sequence
  derived and/or modified sequence
atgttcaagaagctgaagcagaagatcagcgaggagcagcagcagctgcagcaggccctggcccccgcccaggccagcagcaacagcagcacccccaccagaatgagaagcagaaccagcagcttcaccgagcagctggacgagggcacccccaacagagagaacgccagcacccacgccagcaagagccccgacagcgtgaacggcagcgagcccagcatcccccagagcggcgacacccagagcttcgcccagaagctgcagctgagagtgcccagcgtggagagcctgttcagaagccccatcaaggagagcctgttcagaagcagcagcaaggagagcctggtgagaaccagcagcagagagagcctgaacagactggacctggacagcagcaccgccagcttcgacccccccagcgacatggacagcgaggccgaggacctggtgggcaacagcgacagcctgaacaaggagcagctgatccagagactgagaagaatggagagaagcctgagcagctacagaggcaagtacagcgagctggtgaccgcctaccagatgctgcagagagagaagaagaagctgcagggcatcctgagccagagccaggacaagagcctgagaagaatcgccgagctgagagaggagctgcagatggaccagcaggccaagaagcacctgcaggaggagttcgacgccagcctggaggagaaggaccagtacatcagcgtgctgcagacccaggtgagcctgctgaagcagagactgagaaacggccccatgaacgtggacgtgctgaagcccctgccccagctggagccccaggccgaggtgttcaccaaggaggagaaccccgagagcgacggcgagcccgtggtggaggacggcaccagcgtgaagaccctggagaccctgcagcagagagtgaagagacaggagaacctgctgaagagatgcaaggagaccatccagagccacaaggagcagtgcaccctgctgaccagcgagaaggaggccctgcaggagcagctggacgagagactgcaggagctggagaagatcaaggacctgcacatggccgagaagaccaagctgatcacccagctgagagacgccaagaacctgatcgagcagctggagcaggacaagggcatggtgatcgccgagaccaagagacagatgcacgagaccctggagatgaaggaggaggagatcgcccagctgagaagcagaatcaagcagatgaccacccagggcgaggagctgagagagcagaaggagaagagcgagagagccgccttcgaggagctggagaaggccctgagcaccgcccagaagaccgaggaggccagaagaaagctgaaggccgagatggacgagcagatcaagaccatcgagaagaccagcgaggaggagagaatcagcctgcagcaggagctgagcagagtgaagcaggaggtggtggacgtgatgaagaagagcagcgaggagcagatcgccaagctgcagaagctgcacgagaaggagctggccagaaaggagcaggagctgaccaagaagctgcagaccagagagagagagttccaggagcagatgaaggtggccctggagaagagccagagcgagtacctgaagatcagccaggagaaggagcagcaggagagcctggccctggaggagctggagctgcagaagaaggccatcctgaccgagagcgagaacaagctgagagacctgcagcaggaggccgagacctacagaaccagaatcctggagctggagagcagcctggagaagagcctgcaggagaacaagaaccagagcaaggacctggccgtgcacctggaggccgagaagaacaagcacaacaaggagatcaccgtgatggtggagaagcacaagaccgagctggagagcctgaagcaccagcaggacgccctgtggaccgagaagctgcaggtgctgaagcagcagtaccagaccgagatggagaagctgagagagaagtgcgagcaggagaaggagaccctgctgaaggacaaggagatcatcttccaggcccacatcgaggagatgaacgagaagaccctggagaagctggacgtgaagcagaccgagctggagagcctgagcagcgagctgagcgaggtgctgaaggccagacacaagctggaggaggagctgagcgtgctgaaggaccagaccgacaagatgaagcaggagctggaggccaagatggacgagcagaagaaccaccaccagcagcaggtggacagcatcatcaaggagcacgaggtgagcatccagagaaccgagaaggccctgaaggaccagatcaaccagctggagctgctgctgaaggagagagacaagcacctgaaggagcaccaggcccacgtggagaacctggaggccgacatcaagagaagcgagggcgagctgcagcaggccagcgccaagctggacgtgttccagagctaccagagcgccacccacgagcagaccaaggcctacgaggagcagctggcccagctgcagcagaagctgctggacctggagaccgagagaatcctgctgaccaagcaggtggccgaggtggaggcccagaagaaggacgtgtgcaccgagctggacgcccacaagatccaggtgcaggacctgatgcagcagctggagaagcagaacagcgagatggagcagaaggtgaagagcctgacccaggtgtacgagagcaagctggaggacggcaacaaggagcaggagcagaccaagcagatcctggtggagaaggagaacatgatcctgcagatgagagagggccagaagaaggagatcgagatcctgacccagaagctgagcgccaaggaggacagcatccacatcctgaacgaggagtacgagaccaagttcaagaaccaggagaagaagatggagaaggtgaagcagaaggccaaggagatgcaggagaccctgaagaagaagctgctggaccaggaggccaagctgaagaaggagctggagaacaccgccctggagctgagccagaaggagaagcagttcaacgccaagatgctggagatggcccaggccaacagcgccggcatcagcgacgccgtgagcagactggagaccaaccagaaggagcagatcgagagcctgaccgaggtgcacagaagagagctgaacgacgtgatcagcatctgggagaagaagctgaaccagcaggccgaggagctgcaggagatccacgagatccagctgcaggagaaggagcaggaggtggccgagctgaagcagaagatcctgctgttcggctgcgagaaggaggagatgaacaaggagatcacctggctgaaggaggagggcgtgaagcaggacaccaccctgaacgagctgcaggagcagctgaagcagaagagcgcccacgtgaacagcctggcccaggacgagaccaagctgaaggcccacctggagaagctggaggtggacctgaacaagagcctgaaggagaacaccttcctgcaggagcagctggtggagctgaagatgctggccgaggaggacaagagaaaggtgagcgagctgaccagcaagctgaagaccaccgacgaggagttccagagcctgaagagcagccacgagaagagcaacaagagcctggaggacaagagcctggagttcaagaagctgagcgaggagctggccatccagctggacatctgctgcaagaagaccgaggccctgctggaggccaagaccaacgagctgatcaacatcagcagcagcaagaccaacgccatcctgagcagaatcagccactgccagcacagaaccaccaaggtgaaggaggccctgctgatcaagacctgcaccgtgagcgagctggaggcccagctgagacagctgaccgaggagcagaacaccctgaacatcagcttccagcaggccacccaccagctggaggagaaggagaaccagatcaagagcatgaaggccgacatcgagagcctggtgaccgagaaggaggccctgcagaaggagggcggcaaccagcagcaggccgccagcgagaaggagagctgcatcacccagctgaagaaggagctgagcgagaacatcaacgccgtgaccctgatgaaggaggagctgaaggagaagaaggtggagatcagcagcctgagcaagcagctgaccgacctgaacgtgcagctgcagaacagcatcagcctgagcgagaaggaggccgccatcagcagcctgagaaagcagtacgacgaggagaagtgcgagctgctggaccaggtgcaggacctgagcttcaaggtggacaccctgagcaaggagaagatcagcgccctggagcaggtggacgactggagcaacaagttcagcgagtggaagaagaaggcccagagcagattcacccagcaccagaacaccgtgaaggagctgcagatccagctggagctgaagagcaaggaggcctacgagaaggacgagcagatcaacctgctgaaggaggagctggaccagcagaacaagagattcgactgcctgaagggcgagatggaggacgacaagagcaagatggagaagaaggagagcaacctggagaccgagctgaagagccagaccgccagaatcatggagctggaggaccacatcacccagaagaccatcgagatcgagagcctgaacgaggtgctgaagaactacaaccagcagaaggacatcgagcacaaggagctggtgcagaagctgcagcacttccaggagctgggcgaggagaaggacaacagagtgaaggaggccgaggagaagatcctgaccctggagaaccaggtgtacagcatgaaggccgagctggagaccaagaagaaggagctggagcacgtgaacctgagcgtgaagagcaaggaggaggagctgaaggccctggaggacagactggagagcgagagcgccgccaagctggccgagctgaagagaaaggccgagcagaagatcgccgccatcaagaagcagctgctgagccagatggaggagaaggaggagcagtacaagaagggcaccgagagccacctgagcgagctgaacaccaagctgcaggagagagagagagaggtgcacatcctggaggagaagctgaagagcgtggagagcagccagagcgagaccctgatcgtgcccagaagcgccaagaacgtggccgcctacaccgagcaggaggaggccgacagccagggctgcgtgcagaagacctacgaggagaagatcagcgtgctgcagagaaacctgaccgagaaggagaagctgctgcagagagtgggccaggagaaggaggagaccgtgagcagccacttcgagatgagatgccagtaccaggagagactgatcaagctggagcacgccgaggccaagcagcacgaggaccagagcatgatcggccacctgcaggaggagctggaggagaagaacaagaagtacagcctgatcgtggcccagcacgtggagaaggagggcggcaagaacaacatccaggccaagcagaacctggagaacgtgttcgacgacgtgcagaagaccctgcaggagaaggagctgacctgccagatcctggagcagaagatcaaggagctggacagctgcctggtgagacagaaggaggtgcacagagtggagatggaggagctgaccagcaagtacgagaagctgcaggccctgcagcagatggacggcagaaacaagcccaccgagctgctggaggagaacaccgaggagaagagcaagagccacctggtgcagcccaagctgctgagcaacatggaggcccagcacaacgacctggagttcaagctggccggcgccgagagagagaagcagaagctgggcaaggagatcgtgagactgcagaaggacctgagaatgctgagaaaggagcaccagcaggagctggagatcctgaagaaggagtacgaccaggagagagaggagaagatcaagcaggagcaggaggacctggagctgaagcacaacagcaccctgaagcagctgatgagagagttcaacacccagctggcccagaaggagcaggagctggagatgaccatcaaggagaccatcaacaaggcccaggaggtggaggccgagctgctggagagccaccaggaggagaccaaccagctgctgaagaagatcgccgagaaggacgacgacctgaagagaaccgccaagagatacgaggagatcctggacgccagagaggaggagatgaccgccaaggtgagagacctgcagacccagctggaggagctgcagaagaagtaccagcagaagctggagcaggaggagaaccccggcaacgacaacacccagctggcccagaagaccaccctgatcagcgacagcaagctgaaggagcaggagttcagagagcagatccacaacctggaggacagactgaagaagtacgagaagaacgtgtacgccaccaccgtgggcaccccctacaagggcggcaacctgtaccacaccgacgtgagcctgttcggcgagcccaccgagttcgagtacctgagaaaggtgctgttcgagtacatgatgggcagagagaccaagaccatggccaaggtgatcaccaccgtgctgaagttccccgacgaccagacccagaagatcctggagagagaggacgccagactgatgagctggctgagaagcagcagctag

SEQ ID NO: 68478 - protein, 480 aa, Artificial Sequence
  derived and/or modified sequence
MDDLQSQNLSMDMTDSPPALANNRLENGMAQLITTEAWNINSTDLVEGSSAPELNPNGNATYVMTTQGPVQLPVVLEQHVFQHLNSPLVLPQEAPCSSSTIHNNLFQGAEDPEAQPQLLDLRIPSQPQEPTLPFEAVLQNLFPSQGTLGPPPCQPPPGYAPVPPQPFSSPLSPLVPPATLLVPYPVIVPLPVPVPIPIPIPMPQSSESKFSSSFPKPPSSFGLHPFKGTQTPLEKDELKPFDILQPKEYFQLSRHTVIKMGSENEALDLSMKSVPWLKAGEVSPPIFQEDAALDLSVAAHRKSEPPPETLYDSGASVDSSGHTVMEKLPSGMEISFAPATSHEAPAMMDSHISSSDAATEMLSQPNHPSGEVKAENNIEMVGESQAAKVIVSVEDAVPTIFCGKIKGLSGVSTKNFSFKREDSVLQGYDINSQGEESMGNAEPLRKPIKNRSIKLKKVNSQEIHMLPIKKQRLATFFPRK

SEQ ID NO: 68479 - DNA, 1443 bp, Artificial Sequence
  derived and/or modified sequence
atggacgatctacagtcccaaaacctgtctatggacatgacagacagtccgcctgcactggctaataaccgcttagagaatggcatggcccaactcatcacaactgaggcttggaatataaacagcactgacttagtggaaggatcttccgctcctgaactaaacccgaacggcaatgccacgtacgtgatgaccactcaggggcccgtgcagcttcctgtggtgcttgagcagcacgtcttccagcatctgaatagccctctggtcctgcctcaagaggccccctgcagttcctccaccatacacaacaacttgtttcagggagccgaagatcctgaggcccagccacaattacttgacctcagaatcccctcacagccgcaagaacccacactgccttttgaagcagtcctgcaaaacctattcccgagccaggggactttgggtcctcctccatgtcaaccgcctccaggctacgcaccagtgccgccgcagccattttcctccccactttcccccctcgtaccgcctgcaacgttattagtgccatacccagtgattgtacccttgcccgtgcccgtgcctatccccatcccaatacccatgccacagtcttcggaatctaaattctcttcgtcctttcctaagccacctagttcttttggtttgcacccttttaaggggacccagaccccattagagaaggatgagctcaaaccatttgacatcctacagcccaaggagtacttccagctgagccgtcataccgtcataaagatgggttccgaaaatgaggcactagatctaagcatgaaaagcgttccttggctcaaggctggcgaggtcagtccacccattttccaagaggacgcagcactggatttgtccgtcgctgcacaccgaaaaagcgagccacctccagagactctgtatgatagcggcgcaagcgttgactcttccgggcacactgtcatggaaaagctgccctccggtatggaaattagcttcgcacccgccacaagccacgaagcccccgccatgatggactcccacatcagctcatcggatgctgccactgaaatgctttcacagcccaatcatcctagcggcgaggtgaaagccgagaacaacattgagatggtcggcgaatcccaggctgccaaagttatcgtaagcgtggaggatgcagtgcctacaatcttctgtggcaaaatcaagggactgtctggggtgtctacaaagaacttctcgtttaagcgagaggacagcgtgctgcagggctacgatatcaacagccagggcgaggaaagcatggggaacgccgaacccctccgcaagccgataaaaaataggagtataaaactgaagaaggtgaacagccaagagatccatatgctgccgataaagaaacagcgactcgctacttttttcccccgaaagtag

SEQ ID NO: 68480 - DNA, 1443 bp, Artificial Sequence
  derived and/or modified sequence
atggatgacctgcagagccagaacctgtccatggacatgacagacagccccccagccctggccaacaaccggctggagaatggcatggcccagctgatcaccacagaggcctggaacatcaacagcacagacctggtggagggcagcagcgcccctgagctgaaccccaatggaaatgccacctacgtgatgaccacccagggccctgtgcagctgcctgtggtgctggagcagcacgtgttccagcacctgaacagccccctggtgctgccccaggaggccccctgcagcagcagcaccatccacaacaacctcttccagggcgctgaggaccctgaggcccagccccagctgctggacctgcgcatccccagccagccccaggagcccaccctgccctttgaggccgtgctgcagaacctcttccccagccagggcaccctgggccccccaccctgccagcccccacctggctacgcccctgtgcccccccagcccttcagcagccccctgagccccctggtgcccccagccaccctgctggtgccctaccctgtgattgtgcccctgcctgtgcctgtgcccatccccatccccatccccatgccccagagcagcgagagcaagttcagcagcagcttccccaagccacccagcagctttggcctgcaccccttcaagggcacccagacccccctggagaaggatgagctgaagccctttgacatcctgcagcccaaggagtacttccagctgagccgccacacagtcatcaagatgggctctgaaaatgaggccctggacctgtccatgaagtctgtgccctggctgaaggccggggaggtgagcccccccatcttccaggaggatgctgccctggacctgtctgtggccgcccacaggaagtctgagcccccacctgagaccctgtatgattctggggcctctgtggacagcagcggccacacagtgatggagaagctgcccagcggcatggagatcagctttgccccagccaccagccatgaggccccagccatgatggacagccacatcagcagcagtgatgctgccacagagatgctgagccagcccaaccaccccagcggggaggtgaaggccgagaacaacatcgagatggtgggggagagccaggccgccaaggtgattgtgtctgtggaggatgctgtgcccaccatcttctgtgggaagatcaagggcctgtctggagtgtccaccaagaacttctccttcaagagagaagattctgtgctgcagggctatgacatcaacagccagggcgaggagagcatgggaaatgctgagcccctgaggaagcccatcaagaacagaagcatcaagctgaagaaggtgaacagccaggagatccacatgctgcccatcaagaagcagaggctggccaccttcttccccaggaagtag

SEQ ID NO: 68481 - DNA, 1443 bp, Artificial Sequence
  derived and/or modified sequence
atggacgacctgcagagccagaacctgagcatggacatgaccgactctccacccgcactggctaacaatagattggaaaacgggatggcccaactgattacaactgaagcttggaacattaatagtacagacctggtggagggaagcagcgcacccgaactgaacccaaacggtaatgctacatacgtgatgactacacagggcccagttcaactgccagtggttctggagcagcacgtttttcagcacttgaattcgcctctggtgttgcctcaggaggctccatgttcatctagtacgatccataataatctgttccagggcgccgaagatcctgaagcacaaccccagctactggatcttcggatcccatctcaaccacaggagcctacactgcctttcgaagcagtactccagaatctgttcccttcccaaggaaccctggggccccccccttgccagccaccaccagggtatgcacccgttcctccacaaccttttagtagtcctctgagtcctcttgtgcctccagcgaccctgttggtgccgtatcccgtgattgtgccgctgcccgtgcctgtacccattccgatccctattccaatgccacagtccagtgaaagcaaattttccagcagtttcccgaaaccacccagtagttttggactccatccatttaagggcacccagactcccctggagaaggatgagcttaaacctttcgatattctgcagcctaaggagtacttccaactaagccggcacacagtcataaaaatggggtcagaaaatgaggccctggatctgagtatgaagtccgttccatggcttaaagctggagaagtgtcacccccaatattccaggaggacgcggcgcttgatttatccgtcgctgcacatcgaaaatctgaacctcctccagaaaccctgtacgatagtggagcctctgtcgattcctctgggcacactgtgatggagaagctgccctccggaatggaaattagctttgcccccgctacgtcacacgaggctcctgcaatgatggattcccacatatcttcctcggatgcagccaccgagatgctttctcagcccaaccatccttccggggaggtgaaagcagagaacaacattgagatggtgggcgaatctcaagcggcaaaggtgatcgtgagcgtcgaggacgctgtgcctacaattttttgcggaaaaatcaagggtctcagtggcgtgtctaccaaaaacttttctttcaagcgagaggacagtgttctgcagggatacgacattaactctcagggggaggagtctatgggaaatgcggaaccattaaggaaaccaataaagaatcgtagcatcaagttgaaaaaagtgaattcacaggaaattcatatgctgccgattaagaaacagagacttgccacttttttcccacgcaagtag

SEQ ID NO: 68482 - DNA, 1443 bp, Artificial Sequence
  derived and/or modified sequence
atggatgatctccaatctcagaatctgtcaatggatatgacagactctcccccagcactggcaaacaatcggctagaaaacgggatggcacaactcataaccaccgaagcatggaacatcaatagcacagacttagtggagggaagttctgctcccgaactcaacccaaatgggaacgccacctatgtaatgaccactcagggccctgtgcagcttccagtagttcttgaacagcacgtgtttcagcatctgaatagtcccctggttctaccacaggaagccccatgcagctctagcactattcataataacctgttccagggggcagaagaccctgaggcccagccccaactgctggatctccggatcccaagccagccgcaggaacctacgctaccttttgaggccgttctgcagaacctctttccttcccaagggacgcttggccctccaccctgccagccccctccagggtatgcccctgtgccaccccaaccctttagctcccctctttctccacttgttcctcccgcaactctgttggtcccatacccagtcattgtgccactgccggtgcccgttccaattccaatcccgatccccatgcctcagtcatctgagagcaagttcagctcgagcttccccaaaccaccctcctcattcggcctccatccttttaaaggaacccagacccccttagagaaggacgaactgaagcccttcgatattctgcagcctaaggagtattttcagcttagtaggcatacggtgatcaaaatgggaagtgaaaatgaagccctggatctgagcatgaagtccgtcccttggctaaaggccggtgaggttagccctcctatttttcaggaagatgcagcactggacctgtcagtggccgctcacaggaagtccgaacctccccctgaaaccctatatgacagcggggctagcgtggactctagtggtcacacggttatggagaagctgccatccggcatggagatctcgtttgcacctgccaccagccatgaagctcctgccatgatggattcccatataagctcttccgacgccgctactgaaatgctgtcacagcctaaccatccatcgggcgaagtcaaggccgaaaacaacatcgagatggtaggcgagtcccaggctgccaaagttatagtgtcagttgaagatgccgtgcccaccatcttttgcgggaaaattaagggactgtccggtgtgtcaactaagaacttctcctttaagcgggaagattctgtgctgcagggatacgatatcaacagccagggcgaagaatctatgggtaatgcggaacccttgcgaaaaccgatcaagaacaggagtatcaagctcaagaaagtcaatagtcaggagatacacatgcttcctatcaaaaaacaacggctggcaacattttttcccaggaaatag

SEQ ID NO: 68483 - DNA, 2074 bp, Artificial Sequence
  derived and/or modified sequence
cttggtgtatatagtaaaggccgggcgccgcacgcagacacacactcgccaggacacaggcgcacacacgctcacgcacaaccagcagcggcggcggcgacagcgactcggtgacagcggcgacggcggctcccaccgcggcgcacccccttcaggcggccggcggcgaggccagaccggagagttccagcacactcgaccaccccgcggcttcctggaggcggcggccgcgattgcgaggccaagtggcatcagagctgagtgatggacgacctgcagtcccagaacctctccatggacatgactgactcccctcctgccttggctaataacagactggagaatggcatggctcagctgatcaccaccgaggcctggaacatcaactccactgacctggtggagggaagctccgcaccagagctcaatccgaatggcaatgccacctacgtcatgaccacccagggccccgtgcaactgcccgtggtgctggagcagcacgtctttcagcacctcaactcccctctggtcctgccgcaggaggccccatgctcctccagtaccatccacaacaacctcttccagggagcggaggaccccgaggcccagccccagctcctggacctgaggatccccagccagccgcaggagcccactttgccatttgaagctgtgctccagaatttgtttccctcccagggcactctcgggcccccaccctgtcagcctcctcctggctatgcccctgtgcccccacagccttttagctcccccttgtcccccctggtcccaccagccaccctcttggtgccgtatcctgtaatcgtccccttgcctgtgccagtccctattcccatccccatcccgatgcctcagagttctgaatccaagttcagctccagtttccccaagccaccatcttccttcggcctgcacccctttaaaggcacccagacccctctggaaaaagatgaactgaagccctttgacatcctccagcctaaggagtacttccagctcagccgccacacggtcattaagatgggaagtgagaacgaggccctggatctctccatgaagtcagtgccctggctcaaggctggtgaagtcagtcccccaatcttccaggaagatgcagccctagacctgtcagtggcagcccaccggaaatccgagcctccccctgagacactgtatgacagtggtgcatcagtggacagctcaggtcacacagtgatggagaaacttcccagtggcatggaaatttcttttgcccctgccacgtcccatgaggccccagccatgatggatagtcacatcagcagcagtgatgctgctaccgagatgctcagccagcccaaccaccccagcggcgaagtcaaggctgaaaataacattgagatggtgggcgagtcccaggcggccaaggtcattgtctctgtcgaagatgctgtgcctaccatattctgtggcaagatcaaaggcctctcaggggtgtccaccaaaaacttctccttcaaaagagaagactccgtgcttcagggctatgacatcaacagccaaggggaagagtccatgggaaatgcagagccccttaggaaacccatcaaaaaccggagcataaagttaaagaaagtgaactcccaggaaatacacatgctcccaatcaaaaaacaacggctggccaccttttttccaagaaagtaaataacggctttttaaaatttgtatgattataatatggggaaaggtgcattggttttataaaaaggcatttaaaacaaattatctttgttaattattttggggagtagttgggaaatggaaaggtgaattggctctagaggccctgtatgctagtatcattttcttttttaatttttgacttttcacaaatgagtaaataagagcaacctatttttcaagcagattgcacattttttgcagctttaatggaatattgggtgaattagaggggtaaaaaaagctattttcattgccacaaagtgctttgatgatgtaatacctaataaagggtaggatgaatatttcacaataaatgtttgtttgcact

SEQ ID NO: 68484 - DNA, 1443 bp, Artificial Sequence
  derived and/or modified sequence
atggacgacctgcagagccagaacctgagcatggacatgaccgacagcccccccgccctggccaacaacagactggagaacggcatggcccagctgatcaccaccgaggcctggaacatcaacagcaccgacctggtggagggcagcagcgcccccgagctgaaccccaacggcaacgccacctacgtgatgaccacccagggccccgtgcagctgcccgtggtgctggagcagcacgtgttccagcacctgaacagccccctggtgctgccccaggaggccccctgcagcagcagcaccatccacaacaacctgttccagggcgccgaggaccccgaggcccagccccagctgctggacctgagaatccccagccagccccaggagcccaccctgcccttcgaggccgtgctgcagaacctgttccccagccagggcaccctgggcccccccccctgccagcccccccccggctacgcccccgtgcccccccagcccttcagcagccccctgagccccctggtgccccccgccaccctgctggtgccctaccccgtgatcgtgcccctgcccgtgcccgtgcccatccccatccccatccccatgccccagagcagcgagagcaagttcagcagcagcttccccaagccccccagcagcttcggcctgcaccccttcaagggcacccagacccccctggagaaggacgagctgaagcccttcgacatcctgcagcccaaggagtacttccagctgagcagacacaccgtgatcaagatgggcagcgagaacgaggccctggacctgagcatgaagagcgtgccctggctgaaggccggcgaggtgagcccccccatcttccaggaggacgccgccctggacctgagcgtggccgcccacagaaagagcgagcccccccccgagaccctgtacgacagcggcgccagcgtggacagcagcggccacaccgtgatggagaagctgcccagcggcatggagatcagcttcgcccccgccaccagccacgaggcccccgccatgatggacagccacatcagcagcagcgacgccgccaccgagatgctgagccagcccaaccaccccagcggcgaggtgaaggccgagaacaacatcgagatggtgggcgagagccaggccgccaaggtgatcgtgagcgtggaggacgccgtgcccaccatcttctgcggcaagatcaagggcctgagcggcgtgagcaccaagaacttcagcttcaagagagaggacagcgtgctgcagggctacgacatcaacagccagggcgaggagagcatgggcaacgccgagcccctgagaaagcccatcaagaacagaagcatcaagctgaagaaggtgaacagccaggagatccacatgctgcccatcaagaagcagagactggccaccttcttccccagaaagtag

SEQ ID NO: 68485 - protein, 246 aa, Artificial Sequence
  derived and/or modified sequence
QRRIRVTTIARNWADVQSQLRHIEAAFDQEAAAVLMARLGVFRAESEEGPDVLRWLDRQLIRLCQKFGQYNKEDPTSFRLSDSFSLYPQFMFHLRRSPFLQVFNNSPDESSYYRHHFARQDLTQSLIMIQPILYSYSFHGPPETIAQWRKAGYQDMPEYENFKHLLQAPLDDAQEILQARFPMPRYINTEHGGSQARFLLSKVNPSQTHNNLYAWGQETGAPILTDDVSLQVFMDHLKKLAVSSAC

SEQ ID NO: 68486 - DNA, 741 bp, Artificial Sequence
  derived and/or modified sequence
cagcggcggattagggtgacaacaattgctcgcaattgggctgacgttcagtctcagttgcgacacattgaggctgccttcgaccaggaagcagctgctgtcttgatggcacgcctgggcgttttccgcgccgaatctgaggaagggcctgacgtgctgcggtggctggataggcagctgatcaggctttgtcaaaagttcggccagtacaacaaagaagaccccacaagcttcaggctcagtgatagcttttcactctacccgcagtttatgttccacctgcgacgaagtccctttctgcaggttttcaataactcacccgacgagagctcatactaccgtcatcacttcgcaagacaggacctgacacagagcctcattatgattcaaccaattttatacagctactcttttcacggaccccctgagacaatcgcccaatggagaaaagccgggtatcaggatatgcccgaatacgagaacttcaagcacttactgcaagccccccttgacgacgctcaggagatcctccaggctagattccctatgccccgctacatcaatacagagcacggagggagccaggctaggttcctcctgagtaaagtcaacccgtctcagacacacaacaacctgtacgcctggggccaggaaactggagccccgatacttacagatgacgtgtctttgcaggtcttcatggatcacctgaagaagctggccgtgtcatctgcatgctag

SEQ ID NO: 68487 - DNA, 741 bp, Artificial Sequence
  derived and/or modified sequence
cagaggcgcatccgggtgaccaccatcgccaggaactgggcagatgtgcagagccagctgcggcacattgaagctgcctttgaccaggaggccgctgctgtgctgatggcccggctgggcgtcttccgggcagagagcgaggagggcccagatgtgctgcgctggctggaccggcagctgatccggctgtgccagaagtttggccagtacaacaaggaggaccccaccagcttccggctgagtgacagcttcagcctgtacccccagttcatgttccacctgcggcgcagccccttcctgcaggtgttcaacaacagcccagatgagagcagctactaccgccaccactttgcccggcaggacctgacccagagcctcatcatgatccagcccatcctgtacagctacagcttccacggccccccagagaccatcgcccagtggaggaaggccggctaccaggacatgccagaatatgagaacttcaagcacctgctgcaggcccccctggatgatgcccaggagatcctgcaggcccgcttccccatgccccgctacatcaacacagaacatggaggcagccaggcccgcttcctgctgagcaaggtgaaccccagccagacccacaacaacctgtatgcctggggccaggagactggagcccccatcctgacagatgatgtgtccctgcaggtgttcatggaccacctgaagaagctggccgtgagcagcgcctgctag

SEQ ID NO: 68488 - DNA, 741 bp, Artificial Sequence
  derived and/or modified sequence
cagcggcggatccgggtgaccaccatcgcccggaactgggccgacgtgcagagtcagcttaggcatattgaggctgcctttgatcaagaggcggccgcagtcctcatggcccgcttgggtgtgtttagggcggagagcgaagaggggccggatgtgctgaggtggttagatagacaactcatccgtctttgccagaaatttggccaatacaataaagaagatcccaccagtttcaggttatcggactcattcagtctatacccacagttcatgtttcatctgagaagatcacctttcttacaggtgtttaataacagcccagatgagtcttcgtattataggcaccattttgcccggcaggacttaacgcagagcttaatcatgattcagcccatactgtacagttattccttccacggccctcccgagacaatcgcccaatggaggaaggccggctaccaggacatgcctgaatacgaaaattttaagcatctgctgcaggctcctcttgacgatgcgcaggaaattttgcaggcccgctttcccatgccccggtacatcaatacagagcacggcgggagccaagccaggttcctcttgtccaaggtgaatccttcgcagacccacaacaatctttatgcctggggccaggagacgggagctcccatcctgacagacgacgtgtctctacaggtgtttatggaccacctcaagaaactggcggtttccagtgcctgttag

SEQ ID NO: 68489 - DNA, 741 bp, Artificial Sequence
  derived and/or modified sequence
cagagaaggattcgcgtcaccactatcgcaaggaattgggcagatgtccagagccaattgcgccatattgaggcagccttcgaccaggaggcggctgccgttttgatggccaggctgggtgtcttccgagcggaaagcgaagaaggtccagatgttttacggtggctggacaggcagcttattagactgtgtcagaagttcggccagtataacaaagaagaccccaccagttttcgcctgtcagacagttttagcctgtacccccagttcatgtttcacctgcgcagatccccattccttcaggtgttcaataatagtcccgatgagtctagctactaccgccaccacttcgcccgacaagacctcacccagtccctgataatgattcagcccattttgtatagctacagtttccacggtccgccagagacaattgcccagtggcggaaagcaggttaccaggacatgcccgaatacgaaaactttaagcaccttctgcaggcacctctcgacgacgcacaggagatcttacaggctcgcttccccatgcctaggtatatcaatactgagcatggaggcagccaggctcgctttctcctctctaaggtgaacccatcacagacacacaacaatttgtatgcatggggacaggaaaccggagcccctattctgaccgatgacgttagcctacaggtttttatggaccatctgaagaagttggcagtgtcaagtgcgtgctag

SEQ ID NO: 68490 - DNA, 834 bp, Artificial Sequence
  derived and/or modified sequence
cagagacgcatccgcgtgaccaccatcgcccgaaattgggcagatgtacagagtcagctcaggcacatagaagcagcatttgaccaggaggctgcggcagtgttgatggcacggcttggggtgttccgagcggagtcagaggaggggcccgatgtgctccggtggctggaccgacaactcatccgactgtgtcaaaagtttggacagtataacaaagaagaccccacttcttttaggttatcagattccttttctctatatcctcagtttatgttccatctgagaagatctccatttcttcaagtgtttaacaacagtcctgatgagtcgtcatattacagacatcattttgcccggcaggacctgacccagtccctcatcatgatccagcccattctctactcttactcctttcatgggccaccagagaccatagcccagtggcgtaaagctggctaccaggacatgcccgagtatgaaaacttcaagcaccttctgcaggcaccactggatgatgctcaagaaattctgcaagcacgcttcccgatgccacgttacatcaacacggagcatggaggcagtcaggctcgattccttttgtccaaagtgaacccatctcagacacacaataacctgtatgcttggggacaggaaactggagcacccatcctaactgatgatgttagcctgcaggtgttcatggaccatttgaagaagctggctgtctccagtgcctgttaagctgaggatacaaccaggaaatgcaacggtgtcagattgtgttcaaaatgtctagaaaggcttgataacattcctgttacttttctagcagat

SEQ ID NO: 68491 - DNA, 741 bp, Artificial Sequence
  derived and/or modified sequence
cagagaagaatcagagtgaccaccatcgccagaaactgggccgacgtgcagagccagctgagacacatcgaggccgccttcgaccaggaggccgccgccgtgctgatggccagactgggcgtgttcagagccgagagcgaggagggccccgacgtgctgagatggctggacagacagctgatcagactgtgccagaagttcggccagtacaacaaggaggaccccaccagcttcagactgagcgacagcttcagcctgtacccccagttcatgttccacctgagaagaagccccttcctgcaggtgttcaacaacagccccgacgagagcagctactacagacaccacttcgccagacaggacctgacccagagcctgatcatgatccagcccatcctgtacagctacagcttccacggcccccccgagaccatcgcccagtggagaaaggccggctaccaggacatgcccgagtacgagaacttcaagcacctgctgcaggcccccctggacgacgcccaggagatcctgcaggccagattccccatgcccagatacatcaacaccgagcacggcggcagccaggccagattcctgctgagcaaggtgaaccccagccagacccacaacaacctgtacgcctggggccaggagaccggcgcccccatcctgaccgacgacgtgagcctgcaggtgttcatggaccacctgaagaagctggccgtgagcagcgcctgctag

SEQ ID NO: 68492 - DNA, 3633 bp, Artificial Sequence
  derived and/or modified sequence
cttgaacctttgtcacccctcacgttgcacaccaaagacataccctagtgattaaatgctgattttgtgtacgattgtccacggacgccaaaacaatcacagagctgcttgatttgttttaattaccagcacaaaatgccatcagtctgggacgtgatcgggcagaggtgtactcacagtagtgtaaatactgctgtaaatagttgtctgatggtggctttgacagtgagctagcttctgagttttcccttctttttatactgttttctgtgctggcttttttgaatcttcctaatttttcatctctttaacaaactcctatgaagttgaaaccgggaagtttgctctaacatttccagagaaggtattaagtcatgatgcaggaatctgcgacagagacaataagcaacagttcaatgaatcaaaatggaatgagcactctaagcagccaattagatgctggcagcagagatggaagatcaagtggtgacaccagctctgaagtaagcacagtagaactgctgcatctgcaacaacagcaggctctccaggcagcaagacaacttcttttacagcagcaaacaagtggattgaaatctcctaagagcagtgataaacagagaccactgcaggtgcctgtgtcagtggccatgatgactccccaggtgatcacccctcagcaaatgcagcagatccttcagcaacaagtcctgtctcctcagcagctacaagcccttctccaacaacagcaggctgtcatgctgcagcagcaacaactacaagagttttacaagaaacagcaagagcagttacatcttcagcttttgcagcagcagcagcaacagcagcagcagcaacaacagcagcaacaacagcagcagcaacaacaacaacaacagcagcaacaacagcagcagcagcagcaacagcagcagcagcagcaacagcatcctggaaagcaagcgaaagagcagcagcagcagcagcagcagcaacagcaattggcagcccagcagcttgtcttccagcagcagcttctccagatgcaacaactccagcagcagcagcatctgctcagccttcagcgtcagggactcatctccattccacctggccaggcagcacttcctgtccaatcgctgcctcaagctggcttaagtcctgctgagattcagcagttatggaaagaagtgactggagttcacagtatggaagacaatggcattaaacatggagggctagacctcactactaacaattcctcctcgactacctcctccaacacttccaaagcatcaccaccaataactcatcattccatagtgaatggacagtcttcagttctaagtgcaagacgagacagctcgtcacatgaggagactggggcctctcacactctctatggccatggagtttgcaaatggccaggctgtgaaagcatttgtgaagattttggacagtttttaaagcaccttaacaatgaacacgcattggatgaccgaagcactgctcagtgtcgagtgcaaatgcaggtggtgcaacagttagaaatacagctttctaaagaacgcgaacgtcttcaagcaatgatgacccacttgcacatgcgaccctcagagcccaaaccatctcccaaacctctaaatctggtgtctagtgtcaccatgtcgaagaatatgttggagacatccccacagagcttacctcaaacccctaccacaccaacggccccagtcaccccgattacccagggaccctcagtaatcaccccagccagtgtgcccaatgtgggagccatacgaaggcgacattcagacaaatacaacattcccatgtcatcagaaattgccccaaactatgaattttataaaaatgcagatgtcagacctccatttacttatgcaactctcataaggcaggctatcatggagtcatctgacaggcagttaacacttaatgaaatttacagctggtttacacggacatttgcttacttcaggcgtaatgcagcaacttggaagaatgcagtacgtcataatcttagcctgcacaagtgttttgttcgagtagaaaatgttaaaggagcagtatggactgtggatgaagtagaataccagaagcgaaggtcacaaaagataacaggaagtccaaccttagtaaaaaatatacctaccagtttaggctatggagcagctcttaatgccagtttgcaggctgccttggcagagagcagtttacctttgctaagtaatcctggactgataaataatgcatccagtggcctactgcaggccgtccacgaagacctcaatggttctctggatcacattgacagcaatggaaacagtagtccgggctgctcacctcagccgcacatacattcaatccacgtcaaggaagagccagtgattgcagaggatgaagactgcccaatgtccttagtgacaacagctaatcacagtccagaattagaagacgacagagagattgaagaagagcctttatctgaagatctggaatgagaactgacttgtgaaacctcagcgtgaagggacatatcactgaccttcataaccactccacaaccatgaatatttgacaaatttttactgtgactatttattaagcatggataaaggagacagccctaaaggaacttactaagccagccctttgggattcagtaccaacaggcaaattgcttgttttcttcttcttcttcttctttttttttttttttttagaaaaaaagacaaaaactgattttcttgaaaaaaaaaaatgaactgttctttctataatggctttgcccatttaaaaaatgtggctcttaagggttcatgaaatgactgaatatgaggatacatgtcctgtagaaagcaaatgcgcctcatatactgccaaaaatagtgttagtttcattaatgtgaattttccagcattcagtagttgtaatgttagaaacaattgctggtcaagttcaacttgttgctattgtttttaatttgcacaggagtagtatcagaaattagtgtcactgcttgtatctagctgaattttaaacaacagaacattagttttttatgttggtgccaccaactgtaaatgacataagttagttattacaaaacacagtaattagactgttgcaaccatctaaaaccttaggcttccagtctgtgctgttagtgttaagatgtaaagtgcaatcctaagctaacattatctgtgcaagcaccatagaaacatttgcatatctgcatagatcttacaactgtactctttacctccttgtgataaagctttgtctacctgcaaacacagtcaaaggctacagctgcaaaccaaagccaactctaaccatggccaagagctcaaggacagaagcagccacatgctttggtcagccttctgtaacttcaattagtacaaaggaaccttttccatgaactacctgctgttttctgatgacctctgggatcttttcatttagccctaaacaaagaaacaaatatgacaaaaaccacaactaaaaaatgttaattcagtcacagagtaatcttctgaggccaaaagtccatctaaatgcaatgaagatttgctttcattaaagacagaggtgaggacaaaatc

SEQ ID NO: 68493 - DNA, 2638 bp, Artificial Sequence
  derived and/or modified sequence
ctgattttgtgtacgattgtccacggacgccaaaacaatcacagagctgcttgatttgttttaattaccagcacaaaatgccatcagtctgggacgtgatcgggcagaggtgtactcacagtagtgtaaatactgctgtaaatagttgtctgatggtggctttgacagtgagctagcttctgagttttcccttctttttatactgttttctgtgctggcttttttgaatcttcctaatttttcatctctttaacaaactcctatgaagttgaaaccgggaagtttgctctaacatttccagagaaggtattaagtcatgatgcaggaatctgcgacagagacaataagcaacagttcaatgaatcaaaatggaatgagcactctaagcagccaattagatgctggcagcagagatggaagatcaagtggtgacaccagctctgaagtaagcacagtagaactgctgcatctgcaacaacagcaggctctccaggcagcaagacaacttcttttacagcagcaaacaagtggattgaaatctcctaagagcagtgataaacagagaccactgcaggtgcctgtgtcagtggccatgatgactccccaggtgatcacccctcagcaaatgcagcagatccttcagcaacaagtcctgtctcctcagcagctacaagcccttctccaacaacagcaggctgtcatgctgcagcagcaacaactacaagagttttacaagaaacagcaagagcagttacatcttcagcttttgcagcagcagcagcaacagcagcagcagcaacaacagcagcaacaacagcagcagcaacaacaacaacaacagcagcaacaacagcagcagcagcagcaacagcagcagcagcagcaacagcatcctggaaagcaagcgaaagagcagcagcagcagcagcagcagcaacagcaattggcagcccagcagcttgtcttccagcagcagcttctccagatgcaacaactccagcagcagcagcatctgctcagccttcagcgtcagggactcatctccattccacctggccaggcagcacttcctgtccaatcgctgcctcaagctggcttaagtcctgctgagattcagcagttatggaaagaagtgactggagttcacagtatggaagacaatggcattaaacatggagggctagacctcactactaacaattcctcctcgactacctcctccaacacttccaaagcatcaccaccaataactcatcattccatagtgaatggacagtcttcagttctaagtgcaagacgagacagctcgtcacatgaggagactggggcctctcacactctctatggccatggagtttgcaaatggccaggctgtgaaagcatttgtgaagattttggacagtttttaaagcaccttaacaatgaacacgcattggatgaccgaagcactgctcagtgtcgagtgcaaatgcaggtggtgcaacagttagaaatacagctttctaaagaacgcgaacgtcttcaagcaatgatgacccacttgcacatgcgaccctcagagcccaaaccatctcccaaacctctaaatctggtgtctagtgtcaccatgtcgaagaatatgttggagacatccccacagagcttacctcaaacccctaccacaccaacggccccagtcaccccgattacccagggaccctcagtaatcaccccagccagtgtgcccaatgtgggagccatacgaaggcgacattcagacaaatacaacattcccatgtcatcagaaattgccccaaactatgaattttataaaaatgcagatgtcagacctccatttacttatgcaactctcataaggcaggctatcatggagtcatctgacaggcagttaacacttaatgaaatttacagctggtttacacggacatttgcttacttcaggcgtaatgcagcaacttggaagaatgcagtacgtcataatcttagcctgcacaagtgttttgttcgagtagaaaatgttaaaggagcagtatggactgtggatgaagtagaataccagaagcgaaggtcacaaaagataacaggaagtccaaccttagtaaaaaatatacctaccagtttaggctatggagcagctcttaatgccagtttgcaggctgccttggcagagagcagtttacctttgctaagtaatcctggactgataaataatgcatccagtggcctactgcaggccgtccacgaagacctcaatggttctctggatcacattgacagcaatggaaacagtagtccgggctgctcacctcagccgcacatacattcaatccacgtcaaggaagagccagtgattgcagaggatgaagactgcccaatgtccttagtgacaacagctaatcacagtccagaattagaagacgacagagagattgaagaagagcctttatctgaagatctggaatgagaactgacttgtgaaacctcagcgtgaagggacatatcactgaccttcataaccactccacaaccatgaatatttgacaaatttttactgtgactatttattaagcatggataaaggagacagccctaaaggaacttactaagccagccctttgggattcagtaccaacaggca

SEQ ID NO: 68494 - DNA, 2285 bp, Artificial Sequence
  derived and/or modified sequence
ttgaaaccgggaagtttgctctaacatttccagagaaggtattaagtcatgatgcaggaatctgcgacagagacaataagcaacagttcaatgaatcaaaatggaatgagcactctaagcagccaattagatgctggcagcagagatggaagatcaagtggtgacaccagctctgaagtaagcacagtagaactgctgcatctgcaacaacagcaggctctccaggcagcaagacaacttcttttacagcagcaaacaagtggattgaaatctcctaagagcagtgataaacagagaccactgcagccatgagacagacttgtggttcttcaacagctgtgcagagcagagacgtaaatttaaggtgcctgtgtcagtggccatgatgactccccaggtgatcacccctcagcaaatgcagcagatccttcagcaacaagtcctgtctcctcagcagctacaagcccttctccaacaacagcaggctgtcatgctgcagcagcaacaactacaagagttttacaagaaacagcaagagcagttacatcttcagcttttgcagcagcagcagcaacagcagcagcagcaacaacagcagcaacaacagcagcagcaacaacaacaacaacagcagcaacaacagcagcagcagcagcaacagcagcagcagcagcaacagcatcctggaaagcaagcgaaagagcagcagcagcagcagcagcagcaacagcaattggcagcccagcagcttgtcttccagcagcagcttctccagatgcaacaactccagcagcagcagcatctgctcagccttcagcgtcagggactcatctccattccacctggccaggcagcacttcctgtccaatcgctgcctcaagctggcttaagtcctgctgagattcagcagttatggaaagaagtgactggagttcacagtatggaagacaatggcattaaacatggagggctagacctcactactaacaattcctcctcgactacctcctccaacacttccaaagcatcaccaccaataactcatcattccatagtgaatggacagtcttcagttctaagtgcaagacgagacagctcgtcacatgaggagactggggcctctcacactctctatggccatggagtttgcaaatggccaggctgtgaaagcatttgtgaagattttggacagtttttaaagcaccttaacaatgaacacgcattggatgaccgaagcactgctcagtgtcgagtgcaaatgcaggtggtgcaacagttagaaatacagctttctaaagaacgcgaacgtcttcaagcaatgatgacccacttgcacatgcgaccctcagagcccaaaccatctcccaaacctctaaatctggtgtctagtgtcaccatgtcgaagaatatgttggagacatccccacagagcttacctcaaacccctaccacaccaacggccccagtcaccccgattacccagggaccctcagtaatcaccccagccagtgtgcccaatgtgggagccatacgaaggcgacattcagacaaatacaacattcccatgtcatcagaaattgccccaaactatgaattttataaaaatgcagatgtcagacctccatttacttatgcaactctcataaggcaggctatcatggagtcatctgacaggcagttaacacttaatgaaatttacagctggtttacacggacatttgcttacttcaggcgtaatgcagcaacttggaagaatgcagtacgtcataatcttagcctgcacaagtgttttgttcgagtagaaaatgttaaaggagcagtatggactgtggatgaagtagaataccagaagcgaaggtcacaaaagataacaggaagtccaaccttagtaaaaaatatacctaccagtttaggctatggagcagctcttaatgccagtttgcaggctgccttggcagagagcagtttacctttgctaagtaatcctggactgataaataatgcatccagtggcctactgcaggccgtccacgaagacctcaatggttctctggatcacattgacagcaatggaaacagtagtccgggctgctcacctcagccgcacatacattcaatccacgtcaaggaagagccagtgattgcagaggatgaagactgcccaatgtccttagtgacaacagctaatcacagtccagaattagaagacgacagagagattgaagaagagcctttatctgaagatctggaatgagaactgacttgtgaaacctcagcgtgaaggg

SEQ ID NO: 68495 - DNA, 1593 bp, Artificial Sequence
  derived and/or modified sequence
atgatgactccccaggtgatcacccctcagcaaatgcagcagatccttcagcaacaagtcctgtctcctcagcagctacaagcccttctccaacaacagcaggctgtcatgctgcagcagcaacaactacaagagttttacaagaaacagcaagagcagttacatcttcagcttttgcagcagcagcagcaacagcagcagcagcaacaacagcagcaacaacagcagcagcaacaacaacaacaacagcagcaacaacagcagcagcagcagcaacagcagcagcagcagcaacagcatcctggaaagcaagcgaaagagcagcagcagcagcagcagcagcaacagcaattggcagcccagcagcttgtcttccagcagcagcttctccagatgcaacaactccagcagcagcagcatctgctcagccttcagcgtcagggactcatctccattccacctggccaggcagcacttcctgtccaatcgctgcctcaagctggcttaagtcctgctgagattcagcagttatggaaagaagtgactggagttcacagtatggaagacaatggcattaaacatggagggctagacctcactactaacaattcctcctcgactacctcctccaacacttccaaagcatcaccaccaataactcatcattccatagtgaatggacagtcttcagttctaagtgcaagacgagacagctcgtcacatgaggagactggggcctctcacactctctatggccatggagtttgcaaatggccaggctgtgaaagcatttgtgaagattttggacagtttttaaagcaccttaacaatgaacacgcattggatgaccgaagcactgctcagtgtcgagtgcaaatgcaggtggtgcaacagttagaaatacagctttctaaagaacgcgaacgtcttcaagcaatgatgacccacttgcacatgcgaccctcagagcccaaaccatctcccaaacctgctatcatggagtcatctgacaggcagttaacacttaatgaaatttacagctggtttacacggacatttgcttacttcaggcgtaatgcagcaacttggaagaatgcagtacgtcataatcttagcctgcacaagtgttttgttcgagtagaaaatgttaaaggagcagtatggactgtggatgaagtagaataccagaagcgaaggtcacaaaagataacaggaagtccaaccttagtaaaaaatatacctaccagtttaggctatggagcagctcttaatgccagtttgcaggctgccttggcagagagcagtttacctttgctaagtaatcctggactgataaataatgcatccagtggcctactgcaggccgtccacgaagacctcaatggttctctggatcacattgacagcaatggaaacagtagtccgggctgctcacctcagccgcacatacattcaatccacgtcaaggaagagccagtgattgcagaggatgaagactgcccaatgtccttagtgacaacagctaatcacagtccagaattagaagacgacagagagattgaagaagagcctttatctgaagatctggaatga

SEQ ID NO: 68496 - DNA, 2664 bp, Artificial Sequence
  derived and/or modified sequence
tgcatctgctgtgtacagacttggctttgtactcttttcctgggggagagaaagtctttcttctctgctagttgattcctgtttttgtgaaacagctaagaaaacatctgtggcaggcagaaaaattgacaaaggattgacaaacaccattagctgaaaattttccatttcattgcaactatgcattgtttactttactgtaaatatcttaatacatcatcctctgaatatgctggcagagaagctggagaactgtgatttcaattaaggtattaagtcatgatgcaggaatctgcgacagagacaataagcaacagttcaatgaatcaaaatggaatgagcactctaagcagccaattagatgctggcagcagagatggaagatcaagtggtgacaccagctctgaagtaagcacagtagaactgctgcatctgcaacaacagcaggctctccaggcagcaagacaacttcttttacagcagcaaacaagtggattgaaatctcctaagagcagtgataaacagagaccactgcaggtgcctgtgtcagtggccatgatgactccccaggtgatcacccctcagcaaatgcagcagatccttcagcaacaagtcctgtctcctcagcagctacaagcccttctccaacaacagcaggctgtcatgctgcagcagcaacaactacaagagttttacaagaaacagcaagagcagttacatcttcagcttttgcagcagcagcagcaacagcagcagcagcaacaacagcagcaacaacagcagcagcaacaacaacaacaacagcagcaacaacagcagcagcagcagcaacagcagcagcagcagcaacagcatcctggaaagcaagcgaaagagcagcagcagcagcagcagcagcaacagcaattggcagcccagcagcttgtcttccagcagcagcttctccagatgcaacaactccagcagcagcagcatctgctcagccttcagcgtcagggactcatctccattccacctggccaggcagcacttcctgtccaatcgctgcctcaagctggcttaagtcctgctgagattcagcagttatggaaagaagtgactggagttcacagtatggaagacaatggcattaaacatggagggctagacctcactactaacaattcctcctcgactacctcctccaacacttccaaagcatcaccaccaataactcatcattccatagtgaatggacagtcttcagttctaagtgcaagacgagacagctcgtcacatgaggagactggggcctctcacactctctatggccatggagtttgcaaatggccaggctgtgaaagcatttgtgaagattttggacagtttttaaagcaccttaacaatgaacacgcattggatgaccgaagcactgctcagtgtcgagtgcaaatgcaggtggtgcaacagttagaaatacagctttctaaagaacgcgaacgtcttcaagcaatgatgacccacttgcacatgcgaccctcagagcccaaaccatctcccaaacctctaaatctggtgtctagtgtcaccatgtcgaagaatatgttggagacatccccacagagcttacctcaaacccctaccacaccaacggccccagtcaccccgattacccagggaccctcagtaatcaccccagccagtgtgcccaatgtgggagccatacgaaggcgacattcagacaaatacaacattcccatgtcatcagaaattgccccaaactatgaattttataaaaatgcagatgtcagacctccatttacttatgcaactctcataaggcaggctatcatggagtcatctgacaggcagttaacacttaatgaaatttacagctggtttacacggacatttgcttacttcaggcgtaatgcagcaacttggaagaatgcagtacgtcataatcttagcctgcacaagtgttttgttcgagtagaaaatgttaaaggagcagtatggactgtggatgaagtagaataccagaagcgaaggtcacaaaagataacaggaagtccaaccttagtaaaaaatatacctaccagtttaggctatggagcagctcttaatgccagtttgcaggctgccttggcagagagcagtttacctttgctaagtaatcctggactgataaataatgcatccagtggcctactgcaggccgtccacgaagacctcaatggttctctggatcacattgacagcaatggaaacagtagtccgggctgctcacctcagccgcacatacattcaatccacgtcaaggaagagccagtgattgcagaggatgaagactgcccaatgtccttagtgacaacagctaatcacagtccagaattagaagacgacagagagattgaagaagagcctttatctgaagatctggaatgagaactgacttgtgaaacctcagcgtgaagggacatatcactgaccttcataaccactccacaaccatgaatatttgacaaatttttactgtgactatttattaagcatggataaaggagacagccctaaaggaacttactaagccagccctttgggattcagtaccaacaggcaaattgcttgttttcttcttcttcttcttctttttttttttttttttagaaaaaaagacaaaaa

SEQ ID NO: 68497 - DNA, 8300 bp, Artificial Sequence
  derived and/or modified sequence
gccgccgcgggtgccacctcccgggacgctgcccacggcgtccccggtcgcgatcaaacaaataatagaagtctgttgaagctttgtcctgacctatcctggaagtagaagaatactctggagaaaggagcattgtaagcacaaagaataagattcctcaatcctgagagagagaattaaagtctaactctccaaattttcaacaggagttttgagtaaagaaaatggagaagtttgtgggagagaaaggtctactctaatgtgatgctgggattgaattttcctaggactccgtttcaaggttaattcgaaagtcttgtggaagatctggaagaaacagccagtactcatatatatagaaagaggagttggatgtttgtcaataaactcatctggctttaaataaatcaaaacaaaaagaataatttgctactagtcttccaacatgtttgaagaacagcctgctgtttggggaggtattaagtcatgatgcaggaatctgcgacagagacaataagcaacagttcaatgaatcaaaatggaatgagcactctaagcagccaattagatgctggcagcagagatggaagatcaagtggtgacaccagctctgaagtaagcacagtagaactgctgcatctgcaacaacagcaggctctccaggcagcaagacaacttcttttacagcagcaaacaagtggattgaaatctcctaagagcagtgataaacagagaccactgcagccatgagacagacttgtggttcttcaacagctgtgcagagcagagacgtaaatttaaggtgcctgtgtcagtggccatgatgactccccaggtgatcacccctcagcaaatgcagcagatccttcagcaacaagtcctgtctcctcagcagctacaagcccttctccaacaacagcaggctgtcatgctgcagcaggattttttggattctggattggaaaatttcagagctgccttggaaaaaaatcaacaactacaagagttttacaagaaacagcaagagcagttacatcttcagcttttgcagcagcagcagcaacagcagcagcagcaacaacagcagcaacaacagcagcagcaacaacaacaacaacagcagcaacaacagcagcagcagcagcaacagcagcagcagcagcaacagcatcctggaaagcaagcgaaagagcagcagcagcagcagcagcagcaacagcaattggcagcccagcagcttgtcttccagcagcagcttctccagatgcaacaactccagcagcagcagcatctgctcagccttcagcgtcagggactcatctccattccacctggccaggcagcacttcctgtccaatcgctgcctcaagctggcttaagtcctgctgagattcagcagttatggaaagaagtgactggagttcacagtatggaagacaatggcattaaacatggagggctagacctcactactaacaattcctcctcgactacctcctccaacacttccaaagcatcaccaccaataactcatcattccatagtgaatggacagtcttcagttctaagtgcaagacgagacagctcgtcacatgaggagactggggcctctcacactctctatggccatggagtttgcaaatggccaggctgtgaaagcatttgtgaagattttggacagtttttaaagcaccttaacaatgaacacgcattggatgaccgaagcactgctcagtgtcgagtgcaaatgcaggtggtgcaacagttagaaatacagctttctaaagaacgcgaacgtcttcaagcaatgatgacccacttgcacatgcgaccctcagagcccaaaccatctcccaaacctaatatttgcaaagtcacatacagatgcatatggatgtttctgcgtttctcaaactatgcagaggtgctcttgtacatcccagagaagcttacaccagtggctttgtaaatgtattaaatgcagcatttaggagcattatctcagctttcatttatctaaatctggtgtctagtgtcaccatgtcgaagaatatgttggagacatccccacagagcttacctcaaacccctaccacaccaacggccccagtcaccccgattacccagggaccctcagtaatcaccccagccagtgtgcccaatgtgggagccatacgaaggcgacattcagacaaatacaacattcccatgtcatcagaaattgccccaaactatgaattttataaaaatgcagatgtcagacctccatttacttatgcaactctcataaggcaggctatcatggagtcatctgacaggcagttaacacttaatgaaatttacagctggtttacacggacatttgcttacttcaggcgtaatgcagcaacttggaagaatgcagtacgtcataatcttagcctgcacaagtgttttgttcgagtagaaaatgttaaaggagcagtatggactgtggatgaagtagaataccagaagcgaaggtcacaaaagataacaggaagtccaaccttagtaaaaaatatacctaccagtttaggctatggagcagctcttaatgccagtttgcaggctgccttggcagagagcagtttacctttgctaagtaatcctggactgataaataatgcatccagtggcctactgcaggccgtccacgaagacctcaatggttctctggatcacattgacagcaatggaaacagtagtccgggctgctcacctcagccgcacatgtaagtgtggttaacagactctctaaagggaagaatctatattaatatgcttcttaaatttagaatttttccgaagtttttactgttgtataagttgaaaatacaaatttaagtggagttaaattataccacgttcataatatgacaaagtttatcaaaatcggttttaatacattttttagatgatctcaaatgccatatcattattgttccagcagtcctctacagattcttagtactactaatgttctcttgggcataaagcagtgtctaagatgaatctacatcttatgggtcattatcacaggttggtttgtatggtgcaataagaatattcatgatggaataagttgttataatttttactactgttacaggtctctaaaccatttatgaactgtagtcaagatattgcccgtttttataaaccgtaaaatgcaaagtttaactgttacccacagtttacatagaagctagtaaagtgtaactttttgcctgtcttataaatcagtgtaattatatattcaactttaattactggtgcgtctgtattggcaaggtttataagttatattttatgcaagactacgattcctattaatatttagcagctaactatatcattaattactctaaaatctttcccctaccatctttttaatggagctgagagagtagaagtattaaaaattgatgtattgtggatttcagaaatgtgtatgacactttaaaaaatgcctggcttttttcaatagtgtcaagcatattagtgtcttgtttactaaaatgtattgaccgtggtagaactcagaattcagaggaaaaaaatttgaatctgaataatgaagtgtgtacaccatttagctgtcaggatgagttgtaactcatgtctatacttcctagaattaaacgtcacatacttctaattacaagttattgaggtaagattagtcctttctcttatttttatattgtcttcctttatttttccattcaatatctagtaaaaggtctgaaagagaaatatactctttatatgtacccattttcacttgacctttcacagggtattatttttgttgtctttttaaacattttattctgtttgacatattaatgtctttaagagcatatgtctaattgctttatagcacttttactctatcacctttgcaaaaaaacacactgtgaacattaatgtgttttatcaggttccgaaccattacttcttcaaaatggaaaaatttgtcttttggaagtgtctttagatgtattaaataatacaaaagaagtaataaaactcaaagtagaaagaacatgaatatatgctcttgagagtagcagtattctaaaacaaggaaagtgagcaatcagacaaaagtttttatatccccgctttatcctatcagccatgcagtgggtagcttgcggccttttactttcagcagttctcctgagtatgctaaatagtttattaaacattatatttcagaacctgaaataataattgggctaaattgtagcattgttagatgggtattggttttcgtttggcaattgctacttcagatttttcattttattattaaagtttatgaaatatttcagagaaatattagtatgtattagataacacctaaaaattatacatataatgtccagtatattgctgctatgggtttataaagttaaaatgttcatagttaatatataacacattttatgcttatatgaattagtgcatttgaaaaatacttatgtttattttccatagataaaaggaaagcttgttgaaaatagatttcagaaaaaataaaaattaaaaggggtgtaaattgtccctttttctaagttacatcaattataatcaaaattttaattatcttgcagaatattgagtcaatattcattcttaaatctgtttctgctgctgtcattaggtttttgcataatagatgtcaaatatttatgaaatatttcagtattctctatcttcacctttataaagttctaagatgcttgtacttaaaccatgttatgtattttattaggcaaaggaagaaatattgatataattctctcagtcaaaatttggttgtatataattgagtgcatttcaaaatactttggaaattaaacagaagtgaaataatttttataagacatttacacagcatacttatatctcctaaaatgaagtcatgttacttgttgttttagaggggggtagttgtgctgatgcaattgtaaacaagaggaaatagggcctagtggtatcagaacataggttgtaatgccagactgtcagggttccaattccagattcaatagttaatagccaagtgggattgagcacgttacttaatatttctttcctcagctttctcagctgaaaatgaggtaagtaataatataatgcttcttatttcataagattcttgcaaagaaatgagtgcctggaacataataattgctccttgtgtctctcatagtgctgtgtaaataggtactgatttatattacttcctgtaatacctcactgttactaaaaatgagtctataaacaatatgaaaatatttttgtattttgcattttaaggcactctgtaagtttgtggttagtcattgacaatccattttcttctccttctttcttctcttataattcataaagtaagcagatccataaaactgaaacaacatgaggccaggcatggtggcttatgccagtaatcccagcattttgggaggggagggcaggaggattgcttgaggccaggagttcaagaccagcctggacaacatagtgagaccctgtatctacaaaaataattttaaaaattagttgggtgtggtgtgtgcctgtatacagtcctagctactcaggaggctcaggcaggaggaaagcttgagcctagggatttcgaggttacagtaagctatgatcatggcatggaactccagcctgcaccacagagtgagactctatctgtctctaaaaataaaaagtgaaacaatatgacacaaggacttattataggtagcacattacctatatttaggtatctgaagttacctagttatctgaagttttaggcaatgaacaactcaaatagaacaacaccaacccagaatcagggacatatcatatatgtcttgaaaacattgagtattagttttgaaaggaatttagaatacataagggaatacagaatttagaatataggaagtgggaccagactgctgagtgacttaaatatcaagctatggtgtttgtttcagtcagtatacagcttgttactgttatcagcttgactttgacacgatcagagctatgcattagaaacagtaatctaaaagtgtactgaatgaaccatgacttaatgaaactcatgtataggagaatattctgaaattgggagagactggaagcagaaaattaattcttgcagtatgtaatatctaacataaatacaagactaggagtggagagcaaagaatccgtataagaagtgctgtgaaaagaaatactggaacaagacaaccaactgaatgctagggacaaagatgaaaattgggaaaattcatagccactttaaaagtctgcaaagagaaatagaggacacaagaagcaggttcaaaagggaagatgaagaattcagcattttacttggggaatctaagaacctaaatatcattagattcaggagaaaacactgatgatttttttgattagtcttttaattcaactccattatagtaaaattctacgtggtagaatatgaatatatacctgaggttgatagagaagatgttttttgaagcattagaagagtgaaatagatatggtctggtgcttcttataaattgtggagaacaagagatgccaaattatcatttatattccatactccatattttaacccttttcttccactccagttttcgctttattcagtgtcctgaataaaggcctcttccaaattaatgcatttatttcgctcacactatttgaatttctgccctttcccttttctggttcccctctactctcttacctaaattctacctttccttacaggactagtcctatttttttccaagagggtttcccaaggaattttactatcaggaccatgcactctgctccacacttctaaagagcttgcttcttataccactattttggactaatactttgtgtacatgtgtgagtgtgtgtgcacacacacatgcacgtgtgtttatgcatacatctgtgttcattttgcagatatccctaccttaatgacaagtcccttaaagacagattatgttttagacaaattatagtataagaaacccctagcacattctactatgtcaagtaagcattcagtaaaagtatgatactgattatgaagaatcaaattggagattacagttaattagaaatggtttgacttcacaaagtcatacttacaggagtataaaatccagggttctcctagaatcttgaagaaggagaacaaaagagattttaggaagaacagatgagtaaatataatgttcatttttatgtgggagctaggaaaattttctaaatattggtagactatactttttaagttttatttttagttttaattatttaattaatatgtattttataaccattccaatttacgtgagtaaaaagtggctttccactttgagtagaatgaggccccttcacctcattcatgattatcatctcaaccttgttaaattttatttacattgttgaaagattgaaaacaattatcaaaatttaggcaatataaatcagatgaatgtttaaggggatttcagcaaaaagtaggaaaggttaaagccaggcgacattgtatagattctacataataattttttgaaacttctttgactgttttgactcaactacttattgattcaaagcaagtacttcacttttaaaacatttttattttctattgctgttcaaagagtcctagaaacatccatggtatgaataaaggaaaacgatactttaagtgtccgagctgagtatcattacaatttataatattgttcccttatgcacctgaatgccaatattccctttttcagagttatatagaatatgaattaaaaatgactagcttcctattttatatagacatttacctctagaaatgtttaaaaggttaggattgatgctgtctttaagcagaaataatttgaacttactgtcttctctcatgtgttggacttaagtgaatgacaagagaagaaaacatgtagactagacttggaagatgaacgcatactgatacaatcaatccatttcctgtctacttcccaacctaaggcaagaagtggaatttaatgatgtacccaccatgtttagttctactcagttgtttctttttgtattaagtaattgtttctcctcattctcaataagttggttcagatttgctgttcttcctcgtataaaatgttaaatgagattcccatttttatattttcaaatgttgtgtctagagatcaaaataaatattcttccct

SEQ ID NO: 68498 - DNA, 6415 bp, Artificial Sequence
  derived and/or modified sequence
cttgaacctttgtcacccctcacgttgcacaccaaagacataccctagtgattaaatgctgattttgtgtacgattgtccacggacgccaaaacaatcacagagctgcttgatttgttttaattaccagcacaaaatgccatcagtctgggacgtgatcgggcagaggtgtactcacagtagtgtaaatactgctgtaaatagttgtctgatggtggctttgacagtgagctagcttctgagttttcccttctttttatactgttttctgtgctggcttttttgaatcttcctaatttttcatctctttaacaaactcctatgaagttgaaaccgggaagtttgctctaacatttccagagaaggtattaagtcatgatgcaggaatctgcgacagagacaataagcaacagttcaatgaatcaaaatggaatgagcactctaagcagccaattagatgctggcagcagagatggaagatcaagtggtgacaccagctctgaagtaagcacagtagaactgctgcatctgcaacaacagcaggctctccaggcagcaagacaacttcttttacagcagcaaacaagtggattgaaatctcctaagagcagtgataaacagagaccactgcaggtgcctgtgtcagtggccatgatgactccccaggtgatcacccctcagcaaatgcagcagatccttcagcaacaagtcctgtctcctcagcagctacaagcccttctccaacaacagcaggctgtcatgctgcagcaggattttttggattctggattggaaaatttcagagctgccttggaaaaaaatcaacaactacaagagttttacaagaaacagcaagagcagttacatcttcagcttttgcagcagcagcagcaacagcagcagcagcaacaacagcagcaacaacagcagcagcaacaacaacaacaacagcagcaacaacagcagcagcagcagcaacagcagcagcagcagcaacagcatcctggaaagcaagcgaaagagcagcagcagcagcagcagcagcaacagcaattggcagcccagcagcttgtcttccagcagcagcttctccagatgcaacaactccagcagcagcagcatctgctcagccttcagcgtcagggactcatctccattccacctggccaggcagcacttcctgtccaatcgctgcctcaagctggcttaagtcctgctgagattcagcagttatggaaagaagtgactggagttcacagtatggaagacaatggcattaaacatggagggctagacctcactactaacaattcctcctcgactacctcctccaacacttccaaagcatcaccaccaataactcatcattccatagtgaatggacagtcttcagttctaagtgcaagacgagacagctcgtcacatgaggagactggggcctctcacactctctatggccatggagtttgcaaatggccaggctgtgaaagcatttgtgaagattttggacagtttttaaagcaccttaacaatgaacacgcattggatgaccgaagcactgctcagtgtcgagtgcaaatgcaggtggtgcaacagttagaaatacagctttctaaagaacgcgaacgtcttcaagcaatgatgacccacttgcacatgcgaccctcagagcccaaaccatctcccaaacctctaaatctggtgtctagtgtcaccatgtcgaagaatatgttggagacatccccacagagcttacctcaaacccctaccacaccaacggccccagtcaccccgattacccagggaccctcagtaatcaccccagccagtgtgcccaatgtgggagccatacgaaggcgacattcagacaaatacaacattcccatgtcatcagaaattgccccaaactatgaattttataaaaatgcagatgtcagacctccatttacttatgcaactctcataaggcaggctatcatggagtcatctgacaggcagttaacacttaatgaaatttacagctggtttacacggacatttgcttacttcaggcgtaatgcagcaacttggaagaatgcagtacgtcataatcttagcctgcacaagtgttttgttcgagtagaaaatgttaaaggagcagtatggactgtggatgaagtagaataccagaagcgaaggtcacaaaagataacaggaagtccaaccttagtaaaaaatatacctaccagtttaggctatggagcagctcttaatgccagtttgcaggctgccttggcagagagcagtttacctttgctaagtaatcctggactgataaataatgcatccagtggcctactgcaggccgtccacgaagacctcaatggttctctggatcacattgacagcaatggaaacagtagtccgggctgctcacctcagccgcacatacattcaatccacgtcaaggaagagccagtgattgcagaggatgaagactgcccaatgtccttagtgacaacagctaatcacagtccagaattagaagacgacagagagattgaagaagagcctttatctgaagatctggaatgagaactgacttgtgaaacctcagcgtgaagggacatatcactgaccttcataaccactccacaaccatgaatatttgacaaatttttactgtgactatttattaagcatggataaaggagacagccctaaaggaacttactaagccagccctttgggattcagtaccaacaggcaaattgcttgttttcttcttcttcttcttctttttttttttttttttagaaaaaaagacaaaaactgattttcttgaaaaaaaaaaatgaactgttctttctataatggctttgcccatttaaaaaatgtggctcttaagggttcatgaaatgactgaatatgaggatacatgtcctgtagaaagcaaatgcgcctcatatactgccaaaaatagtgttagtttcattaatgtgaattttccagcattcagtagttgtaatgttagaaacaattgctggtcaagttcaacttgttgctattgtttttaatttgcacaggagtagtatcagaaattagtgtcactgcttgtatctagctgaattttaaacaacagaacattagttttttatgttggtgccaccaactgtaaatgacataagttagttattacaaaacacagtaattagactgttgcaaccatctaaaaccttaggcttccagtctgtgctgttagtgttaagatgtaaagtgcaatcctaagctaacattatctgtgcaagcaccatagaaacatttgcatatctgcatagatcttacaactgtactctttacctccttgtgataaagctttgtctacctgcaaacacagtcaaaggctacagctgcaaaccaaagccaactctaaccatggccaagagctcaaggacagaagcagccacatgctttggtcagccttctgtaacttcaattagtacaaaggaaccttttccatgaactacctgctgttttctgatgacctctgggatcttttcatttagccctaaacaaagaaacaaatatgacaaaaaccacaactaaaaaatgttaattcagtcacagagtaatcttctgaggccaaaagtccatctaaatgcaatgaagatttgctttcattaaagacagaggtgaggacaaaatccgcagtggaagttatgatatgctagaaagcaacaaatgtggatcactgaccaaaacgattatgtacttgatgcaaatgcagattgcatattgttatatatatagtactttgtgtttttgttttccctcattcagtcagttattttcagtggtgaatacatgttgttagaagatgtcttgtatggtcttaatctttgttgtgtactatttttttatagtcttaagttataatgaaaaaacaaaaagtaggaaccaaacataaaaggtctagtaaagccaaaaattaatttcatattgattttaaagtgatctagctgagtttttacactgaaagcaaagattatagcaattgtagtccatggtatttattttcagtcaaaccaaagttacatataattctgcctctgcttatacgggatattaacactaacaatacactcccttcaaagacttgcacaggccaaattgttggaatgctggttttcttgacaattccaaaccccaaaactatgataatgagttatgatgtagttgaaaatagcatagtcagatgtttgcttaaaacctagaaacttaacatgttgcttttcatgtgctgtgccaagtcttgataatactttttcccccaaccaagggacctcataacctgattatggttattgctttacaaacagttttgacagaaggtggctgctagagcttaacatacgttcccgttccatgtgatggaaccggttcttgcaaactaagctcatcattgattctttgctgaagtcagcaaatagagttagagagatacccagtcatctatcacaccaaataaaaggacataacggctttcaaaagggttttcccacttacccaaaaggctttctgaaagcttctacctctgcaaaaaaaaaaaaagaaaaaaaaaaaaagaaaaacattagaacaattatggcagattgcatgaaacgtgagaacgtcacagtaactgctacttttcattatgtttgtctttgggtcatgatcaacgaaccggaagtttacaatatggtattaaaagaaagatgggtatggtgaaagatggttttcagtcatctaggatcctactgtaaggattatctgaaaggaaaaatgggtctttcaggtgcatgttcaaaaggctttgagggactggaagtaactgcgagagttgtaccatcagaagggtggcctaagactacaatgctaaagtatgcatacctcagttagaaaacttttgaaaggaagtctcagccacagaatgcatatacctgtagagttttgcatgggttttatatgaatacaattttaaaaaatagctgcttgcacattataccagaaaaacctccaaaactgcaattgctttgaaaatagattttaggttttttggagtttcctgaaatgcttggtctgtattttgataattgtgcatattatgtaaaaatgttggtggacccataaatgaccagactttttctaagaaaaatgttgctttaatgcatttcatgaatttttactcttatatcattgcttgctagtaatagcaaatctgcttttctgcatctgctttgcgtagctattgtaaggctttgaactaatgtatgtatttattgcttgaacttctgtgcataccttataaagcataatgtctgacaatttaaatggctcatgtattcttgcttctatcataagctgattatggggactatgatcttttgtatacagcaaattttaaactgtagcacaaacatctgtttatgtattggtggaatatacctgttttatttatcttttttgaggtaaactaatttttgatacttttcattactgtgtactatgttcatactttgaattctctgacgttagaagtcatggttgagaattgtaacagctgttattcgttctgtattcatggctttcactgctgaataaaataaaggaccaaacctaggatttgaaagaaaactgtctacctctaacaccagggagttatcagattttattttacatagttttagtctacaaagacacaattgcttaaacctagtgggcttaaggcttatattctatgtggttggattcgtggcacagttgtactatttgaaaatcaattaaaattttatgtgaatgttacaagtatttggtagaattaccactaactgggttttctttagataactcagatatggagaaaatgtcatcagcattctgtgtctacagctgcttaacttcataagaatgcatttctttgtgattagggaatcgaagaatagtcagctaggaatagagctacagaagtacacttacataaaccatcctggactttaatgtccctgggcagattcagtcgcaaaatccaatatgatattttgtaaagttttcaagttggacatttacatttttgagaattttgagacttcatcttacacatgccagtattaacacacatttggacaatagctttattaagtctataaagctattgaaaggaacatggcttacccttgttatttcactagttcaggttgcaacgaaaggtttttttgtccatgaacacttggcatatcttacttagcaaaaaagaaggatgtacattttactatagaattaatgtatgaacagtgtgtcactgctgttggatgtaaaaatgtatatgaaaccatttcattcacttgattacatttctgaagtataaataaaaaaatctaattctttttgacccattt

SEQ ID NO: 68499 - DNA, 6443 bp, Artificial Sequence
  derived and/or modified sequence
cttgaacctttgtcacccctcacgttgcacaccaaagacataccctagtgattaaatgctgattttgtgtacgattgtccacggacgccaaaacaatcacagagctgcttgatttgttttaattaccagcacaaaatgccatcagtctgggacgtgatcgggcagaggtgtactcacagtagtgtaaatactgctgtaaatagttgtctgatggtggctttgacagtgagctagcttctgagttttcccttctttttatactgttttctgtgctggcttttttgaatcttcctaatttttcatctctttaacaaactcctatgaagttgaaaccgggaagtttgctctaacatttccagagaaggtattaagtcatgatgcaggaatctgcgacagagacaataagcaacagttcaatgaatcaaaatggaatgagcactctaagcagccaattagatgctggcagcagagatggaagatcaagtggtgacaccagctctgaagtaagcacagtagaactgctgcatctgcaacaacagcaggctctccaggcagcaagacaacttcttttacagcagcaaacaagtggattgaaatctcctaagagcagtgataaacagagaccactgcaggaattgcttccagaaacaaaattatgtatctgtggccactcttctggtgatgggcatcctcacaacacatttgcagtgcctgtgtcagtggccatgatgactccccaggtgatcacccctcagcaaatgcagcagatccttcagcaacaagtcctgtctcctcagcagctacaagcccttctccaacaacagcaggctgtcatgctgcagcagcaacaactacaagagttttacaagaaacagcaagagcagttacatcttcagcttttgcagcagcagcagcaacagcagcagcagcaacaacagcagcaacaacagcagcagcaacaacaacaacaacagcagcaacaacagcagcagcagcagcaacagcagcagcagcagcaacagcatcctggaaagcaagcgaaagagcagcagcagcagcagcagcagcaacagcaattggcagcccagcagcttgtcttccagcagcagcttctccagatgcaacaactccagcagcagcagcatctgctcagccttcagcgtcagggactcatctccattccacctggccaggcagcacttcctgtccaatcgctgcctcaagctggcttaagtcctgctgagattcagcagttatggaaagaagtgactggagttcacagtatggaagacaatggcattaaacatggagggctagacctcactactaacaattcctcctcgactacctcctccaacacttccaaagcatcaccaccaataactcatcattccatagtgaatggacagtcttcagttctaagtgcaagacgagacagctcgtcacatgaggagactggggcctctcacactctctatggccatggagtttgcaaatggccaggctgtgaaagcatttgtgaagattttggacagtttttaaagcaccttaacaatgaacacgcattggatgaccgaagcactgctcagtgtcgagtgcaaatgcaggtggtgcaacagttagaaatacagctttctaaagaacgcgaacgtcttcaagcaatgatgacccacttgcacatgcgaccctcagagcccaaaccatctcccaaacctctaaatctggtgtctagtgtcaccatgtcgaagaatatgttggagacatccccacagagcttacctcaaacccctaccacaccaacggccccagtcaccccgattacccagggaccctcagtaatcaccccagccagtgtgcccaatgtgggagccatacgaaggcgacattcagacaaatacaacattcccatgtcatcagaaattgccccaaactatgaattttataaaaatgcagatgtcagacctccatttacttatgcaactctcataaggcaggctatcatggagtcatctgacaggcagttaacacttaatgaaatttacagctggtttacacggacatttgcttacttcaggcgtaatgcagcaacttggaagaatgcagtacgtcataatcttagcctgcacaagtgttttgttcgagtagaaaatgttaaaggagcagtatggactgtggatgaagtagaataccagaagcgaaggtcacaaaagataacaggaagtccaaccttagtaaaaaatatacctaccagtttaggctatggagcagctcttaatgccagtttgcaggctgccttggcagagagcagtttacctttgctaagtaatcctggactgataaataatgcatccagtggcctactgcaggccgtccacgaagacctcaatggttctctggatcacattgacagcaatggaaacagtagtccgggctgctcacctcagccgcacatacattcaatccacgtcaaggaagagccagtgattgcagaggatgaagactgcccaatgtccttagtgacaacagctaatcacagtccagaattagaagacgacagagagattgaagaagagcctttatctgaagatctggaatgagaactgacttgtgaaacctcagcgtgaagggacatatcactgaccttcataaccactccacaaccatgaatatttgacaaatttttactgtgactatttattaagcatggataaaggagacagccctaaaggaacttactaagccagccctttgggattcagtaccaacaggcaaattgcttgttttcttcttcttcttcttctttttttttttttttttagaaaaaaagacaaaaactgattttcttgaaaaaaaaaaatgaactgttctttctataatggctttgcccatttaaaaaatgtggctcttaagggttcatgaaatgactgaatatgaggatacatgtcctgtagaaagcaaatgcgcctcatatactgccaaaaatagtgttagtttcattaatgtgaattttccagcattcagtagttgtaatgttagaaacaattgctggtcaagttcaacttgttgctattgtttttaatttgcacaggagtagtatcagaaattagtgtcactgcttgtatctagctgaattttaaacaacagaacattagttttttatgttggtgccaccaactgtaaatgacataagttagttattacaaaacacagtaattagactgttgcaaccatctaaaaccttaggcttccagtctgtgctgttagtgttaagatgtaaagtgcaatcctaagctaacattatctgtgcaagcaccatagaaacatttgcatatctgcatagatcttacaactgtactctttacctccttgtgataaagctttgtctacctgcaaacacagtcaaaggctacagctgcaaaccaaagccaactctaaccatggccaagagctcaaggacagaagcagccacatgctttggtcagccttctgtaacttcaattagtacaaaggaaccttttccatgaactacctgctgttttctgatgacctctgggatcttttcatttagccctaaacaaagaaacaaatatgacaaaaaccacaactaaaaaatgttaattcagtcacagagtaatcttctgaggccaaaagtccatctaaatgcaatgaagatttgctttcattaaagacagaggtgaggacaaaatccgcagtggaagttatgatatgctagaaagcaacaaatgtggatcactgaccaaaacgattatgtacttgatgcaaatgcagattgcatattgttatatatatagtactttgtgtttttgttttccctcattcagtcagttattttcagtggtgaatacatgttgttagaagatgtcttgtatggtcttaatctttgttgtgtactatttttttatagtcttaagttataatgaaaaaacaaaaagtaggaaccaaacataaaaggtctagtaaagccaaaaattaatttcatattgattttaaagtgatctagctgagtttttacactgaaagcaaagattatagcaattgtagtccatggtatttattttcagtcaaaccaaagttacatataattctgcctctgcttatacgggatattaacactaacaatacactcccttcaaagacttgcacaggccaaattgttggaatgctggttttcttgacaattccaaaccccaaaactatgataatgagttatgatgtagttgaaaatagcatagtcagatgtttgcttaaaacctagaaacttaacatgttgcttttcatgtgctgtgccaagtcttgataatactttttcccccaaccaagggacctcataacctgattatggttattgctttacaaacagttttgacagaaggtggctgctagagcttaacatacgttcccgttccatgtgatggaaccggttcttgcaaactaagctcatcattgattctttgctgaagtcagcaaatagagttagagagatacccagtcatctatcacaccaaataaaaggacataacggctttcaaaagggttttcccacttacccaaaaggctttctgaaagcttctacctctgcaaaaaaaaaaaaagaaaaaaaaaaaaagaaaaacattagaacaattatggcagattgcatgaaacgtgagaacgtcacagtaactgctacttttcattatgtttgtctttgggtcatgatcaacgaaccggaagtttacaatatggtattaaaagaaagatgggtatggtgaaagatggttttcagtcatctaggatcctactgtaaggattatctgaaaggaaaaatgggtctttcaggtgcatgttcaaaaggctttgagggactggaagtaactgcgagagttgtaccatcagaagggtggcctaagactacaatgctaaagtatgcatacctcagttagaaaacttttgaaaggaagtctcagccacagaatgcatatacctgtagagttttgcatgggttttatatgaatacaattttaaaaaatagctgcttgcacattataccagaaaaacctccaaaactgcaattgctttgaaaatagattttaggttttttggagtttcctgaaatgcttggtctgtattttgataattgtgcatattatgtaaaaatgttggtggacccataaatgaccagactttttctaagaaaaatgttgctttaatgcatttcatgaatttttactcttatatcattgcttgctagtaatagcaaatctgcttttctgcatctgctttgcgtagctattgtaaggctttgaactaatgtatgtatttattgcttgaacttctgtgcataccttataaagcataatgtctgacaatttaaatggctcatgtattcttgcttctatcataagctgattatggggactatgatcttttgtatacagcaaattttaaactgtagcacaaacatctgtttatgtattggtggaatatacctgttttatttatcttttttgaggtaaactaatttttgatacttttcattactgtgtactatgttcatactttgaattctctgacgttagaagtcatggttgagaattgtaacagctgttattcgttctgtattcatggctttcactgctgaataaaataaaggaccaaacctaggatttgaaagaaaactgtctacctctaacaccagggagttatcagattttattttacatagttttagtctacaaagacacaattgcttaaacctagtgggcttaaggcttatattctatgtggttggattcgtggcacagttgtactatttgaaaatcaattaaaattttatgtgaatgttacaagtatttggtagaattaccactaactgggttttctttagataactcagatatggagaaaatgtcatcagcattctgtgtctacagctgcttaacttcataagaatgcatttctttgtgattagggaatcgaagaatagtcagctaggaatagagctacagaagtacacttacataaaccatcctggactttaatgtccctgggcagattcagtcgcaaaatccaatatgatattttgtaaagttttcaagttggacatttacatttttgagaattttgagacttcatcttacacatgccagtattaacacacatttggacaatagctttattaagtctataaagctattgaaaggaacatggcttacccttgttatttcactagttcaggttgcaacgaaaggtttttttgtccatgaacacttggcatatcttacttagcaaaaaagaaggatgtacattttactatagaattaatgtatgaacagtgtgtcactgctgttggatgtaaaaatgtatatgaaaccatttcattcacttgattacatttctgaagtataaataaaaaaatctaattctttttgacccatttataa

SEQ ID NO: 68500 - DNA, 2148 bp, Artificial Sequence
  derived and/or modified sequence
atgatgcaagaaagcgcaacagaaaccatctcgaattcgtctatgaatcagaatggcatgtctaccttgtcttcacaacttgacgcaggcagccgagacggcaggtcttcgggggacaccagtagtgaagtatcgacagtagaattattgcatctgcaacagcaacaggccttacaggccgccagacaactcctgttgcagcagcaaactagtggcttaaagagtccaaaatcatcagataaacagagaccactgcaggttccggtaagcgtcgctatgatgacaccccaggtgatcacaccccagcaaatgcagcagatccttcagcagcaggtgctctcaccacagcagttacaggcgctgctgcagcaacagcaggctgtgatgctgcagcagcaacagttacaggaattttacaagaagcaacaggaacagctgcatttgcagctgctgcagcagcaacaacagcagcaacaacagcagcaacagcaacagcaacagcagcaacaacagcagcagcagcagcagcagcaacaacagcaacagcagcagcagcagcagcagcagcagcagcacccagggaagcaagccaaagagcagcagcagcagcaacaacagcagcagcagttggccgcacagcagcttgttttccaacagcaacttctacagatgcagcaattacagcagcagcagcacctcctgtccctgcaaagacagggacttatctccattccccccggccaggcagccctgccggtgcaaagcctgcctcaggccggtttgtccccagccgagatccagcagttatggaaagaggtgaccggcgtccattctatggaggacaacggtatcaaacacgggggcctggacctaacaacaaataactcctcttccaccacctccagcaacacatccaaggccagcccacccataacccaccattctatagttaatggccagtcttccgtgctgagtgccagacgagactcctcctctcatgaagagaccggcgcgtcacacactctatacggccatggagtatgcaaatggcctgggtgtgaaagtatctgtgaagactttggacagtttcttaaacatctgaataatgagcatgctttagatgacagaagcaccgcccagtgccgcgtccaaatgcaagtggtacaacagttagaaattcagttgtccaaggagcgcgagagacttcaggccatgatgacccaccttcatatgagaccttccgagcctaaaccctccccaaagccccttaatctggtctcctccgtcacaatgtcaaaaaatatgctggaaacatccccccaatcactcccgcagacccccacgacaccgaccgccccagtcactcctattacacaaggcccatctgtcatcacccctgctagtgtgcccaatgtgggagccatcaggcgcaggcatagtgataaatacaacattcctatgtccagtgagatcgctccaaactatgagttttacaagaacgcggatgtgcggcccccgttcacatacgcgactcttatccgacaggcgatcatggagagtagcgacagacaactcacgctgaatgaaatctacagctggttcacccggacgtttgcctactttaggcggaacgccgccacttggaagaatgcggtaaggcacaatctgtcattacataaatgttttgtccgcgtagaaaacgtcaaaggtgcagtgtggacagtcgacgaagtggaatatcagaaacgccggagccagaagatcactgggagccctaccctggtcaaaaatattcccacgtccctcggctatggcgctgcattaaacgcctctttacaggccgccttagctgagtcctctttaccacttctgtcgaaccctggattgattaacaatgcatcttcagggctgctgcaggcggttcacgaagatctaaacggctccctagaccatatagattcaaatggaaatagttcacccggatgtagcccacagccgcacatacattctattcatgtgaaggaagaacccgtgattgccgaggacgaggactgtcctatgtctctggtgacaactgccaaccactctccagaacttgaggatgatcgggagattgaagaagagccactctctgaagatctggagtag

SEQ ID NO: 68501 - DNA, 1872 bp, Artificial Sequence
  derived and/or modified sequence
atgatgaccccccaagttatcacaccacaacagatgcagcagatcttgcagcagcaggtgctgtccccacagcagctgcaggcactgttgcaacaacagcaggccgtgatgctgcagcaacagcagttgcaggagttctacaagaaacaacaggaacagctccatctacagctgctgcagcagcaacagcagcagcagcagcagcagcaacagcagcagcagcaacagcaacagcaacagcaacagcaacagcagcaacaacaacagcagcagcagcagcagcaacagcagcaacagcaccctggcaaacaagctaaagaacagcagcagcaacagcagcagcagcagcagctcgctgcccagcagctggtattccagcaacaattgttgcagatgcagcaattgcagcagcaacaacacctcctcagtctccaaaggcagggattaatttcaatccctccaggacaggctgctctgccggtccagtccctgccacaggccggactgtctccagctgagattcagcaattatggaaggaagtgacaggtgtgcattctatggaagacaacgggatcaaacacggtgggttggatctcacaactaacaatagcagctctacaacctcctcaaacacatccaaagcttcaccccctataacacaccattctatcgtcaacggtcagagttcagtgcttagtgcccgcagagattcgtccagccacgaagagacaggcgcaagtcacactttgtacggtcacggcgtgtgcaagtggcctggttgcgagagtatttgcgaagattttggccagtttctcaagcacctgaacaacgaacatgctttggatgatcggagcactgcacagtgtcgagttcagatgcaagtggtgcaacaactcgagatccagctctctaaggaacgcgaacgtctgcaggctatgatgactcacttgcacatgcgtcccagcgagccgaaacccagccctaaacctctcaatctggtgtcctccgttaccatgagcaaaaatatgttggaaaccagtccacaaagtttgccacagaccccaactacgcccactgcccccgtgactccaattacacaggggcccagcgtaattacacccgcttccgttcccaacgttggggctatcagacgaagacactcagataaatataacattcctatgagttccgagatcgcaccaaattacgagttctacaagaatgccgacgttcgccctccttttacctacgctaccctgatccgccaggcgatcatggagagctcagatcggcagcttaccctgaatgagatctactcctggttcacaagaactttcgcgtattttcgtcggaacgcagcgacttggaaaaacgccgtgcgacataacctctctcttcataagtgtttcgtaagagtggagaacgtgaagggggctgtgtggactgttgacgaagtggagtatcaaaagagacggagccagaaaattaccggctcccccacattggtgaagaacatccccacaagcctgggatatggcgcagctcttaatgcttcgctgcaagccgcattggcagagtcatccctgccgcttctgtcaaatcctggccttatcaacaacgctagttccgggttgcttcaggcagtacatgaggacctaaatgggagtctggatcacatcgattccaatggcaacagctcaccaggctgttcaccacaaccccatatccatagtattcacgtgaaagaagaaccagtaatagcagaagatgaggactgccccatgagccttgtgaccacagccaatcactcacccgagctggaggatgatcgggagatagaggaggagccgctatccgaagacctcgagtag

SEQ ID NO: 68502 - DNA, 1593 bp, Artificial Sequence
  derived and/or modified sequence
atgatgacacctcaggtgattactccacagcaaatgcagcagatcctccagcaacaggtcctctctccccagcagctgcaagctctgcttcagcagcagcaggctgtgatgttgcagcagcaacagcttcaagaattttacaaaaaacagcaagagcaactccacctgcagctgctgcagcaacagcaacagcagcagcagcaacagcagcagcaacagcagcaacagcagcagcagcagcagcaacaacagcagcagcagcaacagcaacagcaacagcaacagcagcaacagcagcacccagggaagcaagctaaagaacaacagcagcaacagcagcagcagcagcagctggcagctcagcaactggtgtttcagcaacagctcctgcagatgcagcaactgcagcaacagcagcatttgttgagcttgcagagacagggtctcatctcaattccacctggccaggctgcactacctgtgcaatccctgcctcaggctggccttagtccggccgagattcagcaactttggaaggaggtaaccggcgtgcactccatggaagacaacggaataaaacacggggggttagacctgaccaccaataatagttcgtcaactacaagtagcaacactagcaaagcctccccacccatcacccaccattctattgtaaacggccagagcagcgtccttagtgcccgcagagatagttcctcccacgaggagaccggagctagccacacgctgtacggccacggtgtctgtaagtggccaggctgcgaatcaatctgcgaagatttcggacagtttctgaaacatctgaataacgaacatgcgctcgatgaccgctccactgctcagtgtagagtccagatgcaggtggtccagcagttggagatacaactgtctaaagagagggagcgtctgcaagcaatgatgacccatctgcatatgcggcctagcgaaccgaagcctagtccgaaacctgcgataatggaaagcagcgaccgacaactgacattgaatgagatttatagttggttcacaaggaccttcgcttactttcgccggaacgccgcgacctggaaaaatgccgtccggcacaacctttcactccataagtgttttgtgcgcgtggaaaacgtgaagggcgcagtctggactgtcgatgaggtcgagtatcagaagcgacggagtcagaaaattactggctccccgactcttgtgaaaaatattcctaccagtctgggttatggggccgcgctcaatgccagcctgcaggcagcgctggccgaaagctccctgcccctgctcagtaaccctggactgataaataacgctagtagcggcttacttcaggctgtccatgaggacctgaatggctcactggaccacattgattctaacgggaacagctcaccaggttgttctccgcaaccacacatccactcaattcacgtcaaggaagagcctgtcatcgccgaagacgaagattgtccaatgtcgttagtcaccaccgccaaccacagcccagaactggaggatgatagagaaatcgaagaggaacctttgtctgaagacctggagtag

SEQ ID NO: 68503 - DNA, 2148 bp, Artificial Sequence
  derived and/or modified sequence
atgatgcaggagtccgcaactgaaacgatttctaattctagtatgaatcagaatggaatgtcgactctctcatcccagttagacgctggatctagagatggtcgcagctccggggatacaagctccgaagtctcaactgtggaactgctgcacctgcagcagcagcaggcactacaggcagccagacagttactgttgcagcagcagacatctggcctgaagagtccaaagtcttccgacaagcagagacccttgcaagtccctgtcagcgtggccatgatgacaccccaagtgatcaccccccaacaaatgcagcaaattttacagcagcaggtcctgagtccgcagcaactgcaggctctgctccagcagcagcaggcagtaatgctccagcaacaacagcttcaggaattctataagaagcagcaggagcagctgcacctccagctgttgcagcagcagcagcagcagcagcagcagcagcaacagcaacagcagcagcagcagcagcagcagcagcagcaacagcagcagcagcagcagcagcagcagcagcagcaacagcaacagcagcatcctggaaaacaggccaaggaacagcagcagcagcagcagcagcagcaacaactggctgctcagcagctcgttttccagcagcagctcctccagatgcaacagctacagcagcagcagcatctgttgtcgttacagagacagggcctcatctcgatcccgccaggtcaggctgcgctccctgtacaaagcctcccccaggctggcctgagcccggccgaaattcagcagttgtggaaggaagtgactggcgttcacagcatggaagacaacggaattaagcatggtggccttgatctgacaactaataattctagctcaactaccagtagcaatactagcaaggcttccccacccatcacacatcacagtatcgtgaacggacagtccagcgtcctttcagcacgcagggatagctcctcccacgaggaaacaggtgcctctcataccctttatggccacggtgtgtgcaagtggccggggtgcgaatcgatctgcgaagactttggtcaattcttgaagcatctgaacaacgagcatgcgctcgatgaccgctcaactgcccagtgtagagtacaaatgcaggtggttcagcaactcgagatccagctctccaaagaacgcgaacggttacaggccatgatgactcacctgcacatgcgtccatccgagcccaagccaagcccgaagccactgaaccttgtctcctctgtgaccatgtctaagaacatgctggagacctccccgcagtccctcccccaaactcccacaactccaaccgcgcctgtcactcctataacccagggcccgtcagttatcacccctgcctcagtgcctaacgtcggtgccatccgccggcggcactccgataaatacaatatccctatgtcctcggagattgcccccaattacgagttttacaaaaacgctgacgtgcgcccacctttcacttacgcgacactgattaggcaggctattatggagagctcagatcggcagctgaccctcaatgagatctactcctggttcaccagaacattcgcctacttcagacgcaacgccgccacatggaagaacgcagtacggcataacctttccttgcataagtgttttgtcagagtggagaacgtcaaaggggccgtgtggaccgttgatgaagtagagtaccaaaagagacggtctcaaaagatcaccggttcaccaacactggtcaaaaatatcccaacttccctcggctacggagccgcactgaacgctagcctgcaagcagcactggcagaaagttctctgcccctcttaagcaatcccggtctgattaacaatgcctcctcagggctgcttcaggccgtccacgaggatctgaatggaagtttggatcatattgactcaaacgggaatagcagcccagggtgttccccccagcctcacattcactcaattcatgtgaaggaggaacctgtcattgctgaagacgaagattgtccgatgtctctcgtcaccacagccaatcactcccccgagcttgaggacgaccgggagattgaggaagaacccctctctgaggacctagaatag

SEQ ID NO: 68504 - DNA, 2199 bp, Artificial Sequence
  derived and/or modified sequence
atgatgcaagagtcggctacagagacaatatctaactcatctatgaaccagaatggcatgtctacactgagtagccaactcgatgccggttcccgggacggaaggagcagtggagatactagttcagaagtttctacagtggagctgctgcacttacagcagcaacaggcgctccaggctgcccgccaactcctgctgcagcagcaaacctcaggcttaaaatctccgaagtcgtccgataagcaaaggcctctccaggtacctgtgtccgttgccatgatgactcctcaggtcatcacaccccagcagatgcagcagatcctccaacaacaagtccttagtccccagcagttgcaggcactgctgcagcagcaacaggcggtcatgctccagcaggactttctggattccggattggagaattttcgagccgccctcgagaagaatcagcagctccaagagttttacaagaagcaacaagagcagttgcatttgcagctgctacagcagcagcagcagcagcagcaacaacagcagcagcagcagcagcaacaacagcagcaacagcagcagcagcaacagcagcagcaacagcaacagcaacagcagcagcagcagcaacaacatcctggcaaacaggctaaagaacaacagcaacagcagcagcagcagcagcagctggccgcacagcagctagttttccagcaacagttattacagatgcagcagcttcagcagcagcaacacctgctttcgctgcagaggcagggactcatctcaattccgcccggccaagctgctctgcccgtccaatccttgcctcaggctggtctcagccctgccgagattcagcagctttggaaagaagttactggggtgcactcaatggaggacaacggcatcaagcacggaggtcttgatttgaccaccaataattctagctcaacaacctcctctaacaccagcaaggcatccccaccaatcacccaccatagcatagtgaatggacaatccagcgtgctgagcgcaagacgcgactcttctagccacgaagaaaccggtgcatctcataccctgtatggtcatggtgtttgtaagtggccaggatgtgagagcatttgtgaagactttggacaatttctcaaacacttgaacaatgagcacgcactggatgaccgcagcacggcacaatgccgggttcagatgcaggtggttcagcagttggagatacagttgagcaaggagagagagcgtctgcaggctatgatgacccatctccacatgcgacccagcgaacctaaacctagccctaagcccctaaatttggtgtcaagcgtgaccatgtcaaagaacatgttagagacctctccacaaagcctgcctcaaacccccacgacacccacagctccagttacccctatcactcaaggaccttctgttattacccctgcgagcgttcccaatgtgggtgctatccgccggcgccactcggataagtacaatatacctatgtccagcgagatcgccccaaactacgagttctataagaacgcagacgtacgccccccctttacgtacgcaacacttatccgccaagcgataatggagagttcagacagacagcttacgctaaatgagatttactcttggttcactcgaacctttgcatacttccgccgcaatgctgccacatggaagaatgcggtgaggcacaacctctcactgcataagtgttttgtgcgcgttgagaatgtgaaaggtgcggtttggaccgtagatgaagtagaatatcagaagcggcgaagccagaagatcactgggagccccaccctcgttaaaaatatcccgactagcctgggctacggggcggccctcaacgccagtctgcaggctgcgctcgccgaatcctccctcccacttctctctaaccccggacttatcaacaatgcatcatccgggttgctccaggctgtccacgaggacctgaatgggagtttggaccacattgacagcaacggaaatagctctcctggctgttcaccacagcctcatatacatagcatccatgtcaaggaggaaccagtgatagccgaagacgaggattgtcccatgagcctggttacaaccgcaaaccatagcccggagctggaggacgaccgcgagatagaggaggagccgctttccgaggacctcgagtag

SEQ ID NO: 68505 - DNA, 2223 bp, Artificial Sequence
  derived and/or modified sequence
atgatgcaggaaagcgcaacagagaccatcagtaattcgtcaatgaaccagaacggcatgtccacgctctcgagtcagctcgacgctggatctcgcgacggccgctcatctggggacacctccagtgaggtgtctactgtggagttgttgcacctgcagcagcaacaagccctgcaggcggctaggcagttgctgctccagcagcagacctcaggcctgaagtctccaaaaagttctgacaagcagagacccctccaggaactgctacccgagacgaagctgtgtatctgtggccattcatctggcgatggccacccacataacactttcgcggttcctgtcagcgtggccatgatgacgcctcaggtgatcaccccccagcagatgcagcagattctccagcagcaggttctgagtccacagcagctccaagccttactacagcagcaacaggccgtgatgctacagcagcaacaacttcaggaattctataagaagcaacaagaacaactgcacctccagttgttacagcaacagcagcagcaacagcagcagcaacagcagcaacagcagcaacagcagcagcagcagcagcagcagcagcagcagcagcaacagcagcagcaacagcagcagcagcaacagcaacaccccgggaagcaggcaaaagagcaacagcagcagcagcagcagcaacagcagctcgcagcccaacaactggtgtttcaacagcagttgctgcagatgcagcagcttcaacagcagcagcatctgctgtcccttcagaggcagggacttatcagcattcccccggggcaggctgcattacctgtgcagtctcttccacaggcagggttgtctcctgcagagattcagcagctgtggaaggaggtgactggcgtgcacagcatggaagacaacggcatcaaacatggtggtctcgacctcactacaaataatagcagctccacaactagtagcaatacttccaaagcctcgccacccattacgcaccacagtatcgttaacggccaatcttccgttctctccgccaggcgtgatagctcctcacacgaggaaacaggtgcctctcacaccctgtatgggcacggggtgtgcaaatggccaggctgcgagtccatttgcgaggattttgggcaattcctgaagcacttgaataacgagcacgcattggatgaccgctctacggcacaatgcagggtgcagatgcaggtcgtgcaacagcttgaaatacagttgtccaaagaaagggaacgcctccaggctatgatgactcacctccatatgcgaccatcagagcctaagccatcccccaaacctctaaatctcgtgagtagcgtgaccatgtctaagaacatgctagaaacctcacctcagagtcttccccagactcctacgaccccaaccgcgcctgtaacacctatcacgcagggacctagtgtgatcactccagcctcagtacctaatgttggggcaatacgacggcggcattcggataagtacaatatcccaatgtcctccgagatcgcccctaattacgagttctacaagaatgctgacgttcggcccccctttacttacgccaccctgattcgtcaagccatcatggagtcatcagatcgacagctcacactgaacgaaatctacagctggtttacccggaccttcgcatacttcaggaggaatgcagctacttggaagaatgctgtgcgtcacaatcttagcctgcataaatgctttgtcagagtcgagaacgttaagggggcagtctggaccgtagatgaggtggaataccagaaaagaagaagccaaaagatcaccgggtcaccgactcttgtcaaaaatatacccaccagcctcggatatggtgcagccctgaatgcgtctttacaagccgccctagctgagagcagcctgcccctcctgtccaaccctggcctgataaataatgcatccagcgggctcctgcaagcagtgcacgaagacctgaacgggtcactggatcatatcgactcaaatgggaatagctcccctggctgttcaccacaaccacacatccacagtatccacgttaaggaagaaccagtcatagctgaggacgaggattgtcctatgagcttggtgaccacagctaaccactcccccgaactcgaagacgacagagagattgaagaagaacccctgagcgaagaccttgaatag

SEQ ID NO: 68506 - DNA, 2148 bp, Artificial Sequence
  derived and/or modified sequence
atgatgcaggagagcgccacagagaccatcagcaacagctccatgaaccagaatggcatgagcaccctgagcagccagctggatgctggcagcagagatggccgcagcagcggggacaccagcagcgaggtgtccacagtggagctgctgcacctgcagcagcagcaggccctgcaggccgcccggcagctgctgctgcagcagcagaccagcggcctgaagagccccaagagcagtgacaagcagaggcccctgcaggtgcctgtgtctgtggccatgatgaccccccaggtgatcaccccccagcagatgcagcagatcctgcagcagcaggtgctgagcccccagcagctgcaggccctgctgcagcagcagcaggccgtgatgctgcagcagcagcagctgcaggagttctacaagaagcagcaggagcagctgcacctgcagctgctgcagcagcagcagcagcagcagcagcagcagcagcagcagcagcagcagcagcagcagcagcagcagcagcagcagcagcagcagcagcagcagcagcagcagcagcagcagcagcagcagcaccctgggaagcaggccaaggagcagcagcagcagcagcagcagcagcagcagctggccgcccagcagctggtgttccagcagcagctgctgcagatgcagcagctgcagcagcagcagcacctgctgagcctgcagaggcagggcctcatcagcatccccccaggccaggccgccctgcctgtgcagagcctgccccaggccggcctgagccctgctgagatccagcagctgtggaaggaggtgactggagtgcacagcatggaggacaatggcatcaagcacggcggcctggacctgaccaccaacaacagcagcagcaccaccagcagcaacaccagcaaggccagcccccccatcacccaccacagcatcgtgaatggccagagctctgtgctgagcgcccggcgggacagcagcagccatgaggagaccggggccagccacaccctgtatggccatggagtgtgcaagtggccaggctgtgagagcatctgtgaggactttggccagttcctgaagcacctgaacaatgaacatgccctggatgacaggagcacagcccagtgccgggtgcagatgcaggtggtgcagcagctggagatccagctgagcaaggagcgggagcggctgcaggccatgatgacccacctgcacatgaggcccagcgagcccaagcccagccccaagcccctgaacctggtgtcctctgtgaccatgagcaagaacatgctggagaccagcccccagagcctgccccagacccccaccacccccacagcccctgtgacccccatcacccagggccccagcgtcatcaccccagcctctgtgcccaacgtgggcgccatcagaagaagacacagcgacaagtacaacatccccatgagcagcgagatcgcccccaactatgagttctacaagaatgctgatgtgcggccccccttcacctacgccaccctcatccggcaggccatcatggagagcagtgaccggcagctgaccctgaatgagatctacagctggttcaccaggacctttgcctacttcagaagaaatgctgccacctggaagaatgctgtgcgccacaacctgagcctgcacaagtgctttgtgcgggtggagaatgtgaagggagctgtgtggacagtggatgaggtggagtaccagaagagaagaagccagaagatcaccggcagccccaccctggtgaagaacatccccaccagcctgggctacggggccgccctgaatgccagcctgcaggccgccctggccgagagcagcctgcccctgctgagcaaccctggcctcatcaacaatgccagcagcggcctgctgcaggccgtgcatgaggacctgaatggcagcctggaccacatcgacagcaatggaaacagcagccctggctgcagcccccagccccacatccacagcatccacgtgaaggaggagcctgtgattgctgaagatgaggactgccccatgagcctggtgaccacagccaaccacagccctgagctggaggatgaccgggagattgaggaggagcccctgtctgaggacctggagtag

SEQ ID NO: 68507 - DNA, 1872 bp, Artificial Sequence
  derived and/or modified sequence
atgatgaccccccaggtgatcaccccccagcagatgcagcagatcctgcagcagcaggtgctgagcccccagcagctgcaggccctgctgcagcagcagcaggccgtgatgctgcagcagcagcagctgcaggagttctacaagaagcagcaggagcagctgcacctgcagctgctgcagcagcagcagcagcagcagcagcagcagcagcagcagcagcagcagcagcagcagcagcagcagcagcagcagcagcagcagcagcagcagcagcagcagcagcagcagcagcagcagcaccctgggaagcaggccaaggagcagcagcagcagcagcagcagcagcagcagctggccgcccagcagctggtgttccagcagcagctgctgcagatgcagcagctgcagcagcagcagcacctgctgagcctgcagaggcagggcctcatcagcatccccccaggccaggccgccctgcctgtgcagagcctgccccaggccggcctgagccctgctgagatccagcagctgtggaaggaggtgactggagtgcacagcatggaggacaatggcatcaagcacggcggcctggacctgaccaccaacaacagcagcagcaccaccagcagcaacaccagcaaggccagcccccccatcacccaccacagcatcgtgaatggccagagctctgtgctgagcgcccggcgggacagcagcagccatgaggagaccggggccagccacaccctgtatggccatggagtgtgcaagtggccaggctgtgagagcatctgtgaggactttggccagttcctgaagcacctgaacaatgaacatgccctggatgacaggagcacagcccagtgccgggtgcagatgcaggtggtgcagcagctggagatccagctgagcaaggagcgggagcggctgcaggccatgatgacccacctgcacatgaggcccagcgagcccaagcccagccccaagcccctgaacctggtgtcctctgtgaccatgagcaagaacatgctggagaccagcccccagagcctgccccagacccccaccacccccacagcccctgtgacccccatcacccagggccccagcgtcatcaccccagcctctgtgcccaacgtgggcgccatcagaagaagacacagcgacaagtacaacatccccatgagcagcgagatcgcccccaactatgagttctacaagaatgctgatgtgcggccccccttcacctacgccaccctcatccggcaggccatcatggagagcagtgaccggcagctgaccctgaatgagatctacagctggttcaccaggacctttgcctacttcagaagaaatgctgccacctggaagaatgctgtgcgccacaacctgagcctgcacaagtgctttgtgcgggtggagaatgtgaagggagctgtgtggacagtggatgaggtggagtaccagaagagaagaagccagaagatcaccggcagccccaccctggtgaagaacatccccaccagcctgggctacggggccgccctgaatgccagcctgcaggccgccctggccgagagcagcctgcccctgctgagcaaccctggcctcatcaacaatgccagcagcggcctgctgcaggccgtgcatgaggacctgaatggcagcctggaccacatcgacagcaatggaaacagcagccctggctgcagcccccagccccacatccacagcatccacgtgaaggaggagcctgtgattgctgaagatgaggactgccccatgagcctggtgaccacagccaaccacagccctgagctggaggatgaccgggagattgaggaggagcccctgtctgaggacctggagtag

SEQ ID NO: 68508 - DNA, 1593 bp, Artificial Sequence
  derived and/or modified sequence
atgatgaccccccaggtgatcaccccccagcagatgcagcagatcctgcagcagcaggtgctgagcccccagcagctgcaggccctgctgcagcagcagcaggccgtgatgctgcagcagcagcagctgcaggagttctacaagaagcagcaggagcagctgcacctgcagctgctgcagcagcagcagcagcagcagcagcagcagcagcagcagcagcagcagcagcagcagcagcagcagcagcagcagcagcagcagcagcagcagcagcagcagcagcagcagcagcagcagcaccctgggaagcaggccaaggagcagcagcagcagcagcagcagcagcagcagctggccgcccagcagctggtgttccagcagcagctgctgcagatgcagcagctgcagcagcagcagcacctgctgagcctgcagaggcagggcctcatcagcatccccccaggccaggccgccctgcctgtgcagagcctgccccaggccggcctgagccctgctgagatccagcagctgtggaaggaggtgactggagtgcacagcatggaggacaatggcatcaagcacggcggcctggacctgaccaccaacaacagcagcagcaccaccagcagcaacaccagcaaggccagcccccccatcacccaccacagcatcgtgaatggccagagctctgtgctgagcgcccggcgggacagcagcagccatgaggagaccggggccagccacaccctgtatggccatggagtgtgcaagtggccaggctgtgagagcatctgtgaggactttggccagttcctgaagcacctgaacaatgaacatgccctggatgacaggagcacagcccagtgccgggtgcagatgcaggtggtgcagcagctggagatccagctgagcaaggagcgggagcggctgcaggccatgatgacccacctgcacatgaggcccagcgagcccaagcccagccccaagccagccatcatggagagcagtgaccggcagctgaccctgaatgagatctacagctggttcaccaggacctttgcctacttcagaagaaatgctgccacctggaagaatgctgtgcgccacaacctgagcctgcacaagtgctttgtgcgggtggagaatgtgaagggagctgtgtggacagtggatgaggtggagtaccagaagaggaggagccagaagatcaccggcagccccaccctggtgaagaacatccccaccagcctgggctatggagctgccctgaatgccagcctgcaggccgccctggccgagagcagcctgcccctgctgagcaaccctggcctcatcaacaatgccagcagcggcctgctgcaggccgtgcatgaggacctgaatggcagcctggaccacatcgacagcaatggaaacagcagccctggctgcagcccccagccccacatccacagcatccacgtgaaggaggagcctgtgattgctgaagatgaggactgccccatgagcctggtgaccacagccaaccacagccctgagctggaggatgaccgggagattgaggaggagcccctgtctgaggacctggagtag

SEQ ID NO: 68509 - DNA, 2199 bp, Artificial Sequence
  derived and/or modified sequence
atgatgcaggagagcgccacagagaccatcagcaacagctccatgaaccagaatggcatgagcaccctgagcagccagctggatgctggcagcagagatggccgcagcagcggggacaccagcagcgaggtgtccacagtggagctgctgcacctgcagcagcagcaggccctgcaggccgcccggcagctgctgctgcagcagcagaccagcggcctgaagagccccaagagcagtgacaagcagaggcccctgcaggtgcctgtgtctgtggccatgatgaccccccaggtgatcaccccccagcagatgcagcagatcctgcagcagcaggtgctgagcccccagcagctgcaggccctgctgcagcagcagcaggccgtgatgctgcagcaggacttcctggacagcggcctggagaacttccgggccgccctggagaagaaccagcagctgcaggagttctacaagaagcagcaggagcagctgcacctgcagctgctgcagcagcagcagcagcagcagcagcagcagcagcagcagcagcagcagcagcagcagcagcagcagcagcagcagcagcagcagcagcagcagcagcagcagcagcagcagcagcagcagcaccctgggaagcaggccaaggagcagcagcagcagcagcagcagcagcagcagctggccgcccagcagctggtgttccagcagcagctgctgcagatgcagcagctgcagcagcagcagcacctgctgagcctgcagaggcagggcctcatcagcatccccccaggccaggccgccctgcctgtgcagagcctgccccaggccggcctgagccctgctgagatccagcagctgtggaaggaggtgactggagtgcacagcatggaggacaatggcatcaagcatggaggcctggacctgaccaccaacaacagcagcagcaccaccagcagcaacaccagcaaggccagcccccccatcacccaccacagcatcgtgaatggccagagctctgtgctgagcgcccggcgggacagcagcagccatgaggagactggagccagccacaccctgtatggccacggcgtgtgcaagtggccaggctgtgagagcatctgtgaagattttggccagttcctgaagcacctgaacaatgagcacgccctggatgacaggagcacagcccagtgccgggtgcagatgcaggtggtgcagcagctggagatccagctgagcaaggagcgggagcggctgcaggccatgatgacccacctgcacatgaggccttctgagcccaagcccagccccaagcccctgaacctggtgtcctctgtgaccatgagcaagaacatgctggagaccagcccccagagcctgccccagacccccaccacccccacagcccctgtgacccccatcacccagggccccagcgtcatcaccccagcctctgtgcccaacgtgggcgccatcagaagaagacacagcgacaagtacaacatccccatgagcagcgagatcgcccccaactatgagttctacaagaatgctgatgtgcggccccccttcacctacgccaccctcatccggcaggccatcatggagagcagtgaccggcagctgaccctgaatgagatctacagctggttcaccaggacctttgcctacttcagaagaaatgctgccacctggaagaatgctgtgcgccacaacctgagcctgcacaagtgctttgtgcgggtggagaatgtgaagggagctgtgtggacagtggatgaggtggagtaccagaagaggaggagccagaagatcaccggcagccccaccctggtgaagaacatccccaccagcctgggctatggagctgccctgaatgccagcctgcaggccgccctggccgagagcagcctgcccctgctgagcaaccctggcctcatcaacaatgccagcagcggcctgctgcaggccgtgcatgaggacctgaatggcagcctggaccacatcgacagcaatggaaacagcagccctggctgcagcccccagccccacatccacagcatccacgtgaaggaggagcctgtgattgctgaagatgaggactgccccatgagcctggtgaccacagccaaccacagccctgagctggaggatgaccgggagattgaggaggagcccctgtctgaggacctggagtag

SEQ ID NO: 68510 - DNA, 2223 bp, Artificial Sequence
  derived and/or modified sequence
atgatgcaggagagcgccacagagaccatcagcaacagctccatgaaccagaatggcatgagcaccctgagcagccagctggatgctggcagcagagatggccgcagcagcggggacaccagcagcgaggtgtccacagtggagctgctgcacctgcagcagcagcaggccctgcaggccgcccggcagctgctgctgcagcagcagaccagcggcctgaagagccccaagagcagtgacaagcagaggcccctgcaggagctgctgcctgagaccaagctgtgcatctgtggccacagcagtggagatggccacccccacaacacctttgctgtgcctgtgtctgtggccatgatgaccccccaggtgatcaccccccagcagatgcagcagatcctgcagcagcaggtgctgagcccccagcagctgcaggccctgctgcagcagcagcaggccgtgatgctgcagcagcagcagctgcaggagttctacaagaagcagcaggagcagctgcacctgcagctgctgcagcagcagcagcagcagcagcagcagcagcagcagcagcagcagcagcagcagcagcagcagcagcagcagcagcagcagcagcagcagcagcagcagcagcagcagcagcagcagcagcaccctgggaagcaggccaaggagcagcagcagcagcagcagcagcagcagcagctggccgcccagcagctggtgttccagcagcagctgctgcagatgcagcagctgcagcagcagcagcacctgctgagcctgcagaggcagggcctcatcagcatccccccaggccaggccgccctgcctgtgcagagcctgccccaggccggcctgagccctgctgagatccagcagctgtggaaggaggtgactggagtgcacagcatggaggacaatggcatcaagcatggaggcctggacctgaccaccaacaacagcagcagcaccaccagcagcaacaccagcaaggccagcccccccatcacccaccacagcatcgtgaatggccagagctctgtgctgagcgcccggcgggacagcagcagccatgaggagactggagccagccacaccctgtatggccacggcgtgtgcaagtggccaggctgtgagagcatctgtgaagattttggccagttcctgaagcacctgaacaatgagcacgccctggatgacaggagcacagcccagtgccgggtgcagatgcaggtggtgcagcagctggagatccagctgagcaaggagcgggagcggctgcaggccatgatgacccacctgcacatgaggccttctgagcccaagcccagccccaagcccctgaacctggtgtcctctgtgaccatgagcaagaacatgctggagaccagcccccagagcctgccccagacccccaccacccccacagcccctgtgacccccatcacccagggccccagcgtcatcaccccagcctctgtgcccaacgtgggcgccatcagaagaagacacagcgacaagtacaacatccccatgagcagcgagatcgcccccaactatgagttctacaagaatgctgatgtgcggccccccttcacctacgccaccctcatccggcaggccatcatggagagcagtgaccggcagctgaccctgaatgagatctacagctggttcaccaggacctttgcctacttcagaagaaatgctgccacctggaagaatgctgtgcgccacaacctgagcctgcacaagtgctttgtgcgggtggagaatgtgaagggagctgtgtggacagtggatgaggtggagtaccagaagaggaggagccagaagatcaccggcagccccaccctggtgaagaacatccccaccagcctgggctatggagctgccctgaatgccagcctgcaggccgccctggccgagagcagcctgcccctgctgagcaaccctggcctcatcaacaatgccagcagcggcctgctgcaggccgtgcatgaggacctgaatggcagcctggaccacatcgacagcaatggaaacagcagccctggctgcagcccccagccccacatccacagcatccacgtgaaggaggagcctgtgattgctgaagatgaggactgccccatgagcctggtgaccacagccaaccacagccctgagctggaggatgaccgggagattgaggaggagcccctgtctgaggacctggagtag

SEQ ID NO: 68511 - DNA, 2148 bp, Artificial Sequence
  derived and/or modified sequence
atgatgcaggagagcgccaccgagaccatcagcaacagcagcatgaaccagaatggaatgtcgacattgagcagtcagctcgatgcaggctctagggatggacgtagctcaggcgatacgagttcggaagtgagcacagtcgaactactacacttgcaacagcagcaggccttgcaagctgcccgacagctcctcctgcaacagcaaacctccggcctcaagtcccccaagtcctcagacaagcagaggcccctgcaggtccctgtctcagtggccatgatgaccccccaggtgattactcctcagcaaatgcaacagatcctgcagcagcaagtactaagcccccagcagcttcaggccctgctgcaacaacagcaggcggtgatgcttcagcaacagcagctccaggagttctacaaaaaacagcaagaacaactccacctgcagctcttgcaacagcagcagcagcagcagcaacagcagcagcagcaacaacaacagcaacagcagcaacagcaacagcagcagcagcagcaacagcaacagcaacagcagcagcagcagcagcagcagcacccaggtaagcaggccaaggaacagcaacagcaacaacagcagcagcaacaattggcagcccaacagctcgttttccagcaacagctgcttcagatgcagcagcttcagcagcagcaacacctcctgtcactccagagacagggtctcattagtatccctccaggtcaggccgccctgcctgtgcagagccttccccaggccggtttatctccagccgaaattcagcagctctggaaagaggtgacaggagtgcatagcatggaggataacggaattaagcacgggggcctggacctcaccactaacaatagctcgtctacgacctcatctaatacctctaaggcctcacctcctatcacccaccatagtatcgttaacggccaaagtagcgtgcttagcgcccgccgggattcttctagccatgaagagacaggagcctcacacacgttatacgggcacggagtgtgcaagtggccggggtgcgaatccatctgcgaggacttcgggcaattcctgaagcacttgaacaacgaacatgcactcgatgaccggtcaaccgctcagtgtcgggtgcagatgcaagtggtgcagcagctcgaaatccaactttccaaggagagggaaagactccaggccatgatgacacacctgcacatgaggccctcagagcccaaaccttccccaaagcccctgaacctggtctcttcggtgaccatgtccaagaacatgttggagactagcccccagagcctgccacagacccccaccacgcccaccgccccggtcacccctataacgcaaggcccgagcgtcatcactccagcttccgtcccaaatgtgggtgccattagaaggagacacagcgacaaatataacatccctatgtcttctgagattgctccaaactacgagttttataagaacgccgacgtacgcccaccttttacttacgccaccttgattagacaggctatcatggaaagctcggacagacagttaacactgaatgagatctacagctggttcactaggacatttgcctacttccgaaggaatgcagctacatggaagaacgcagtgcgccacaacctttccctgcataagtgcttcgttcgggtcgagaacgtgaagggagccgtgtggacagtggacgaggtagaatatcaaaagcggcgctcccagaaaattaccggctcccccactctggtgaagaatatccccacctccctcggttacggtgcggcactgaatgcgagtttgcaggccgctttggccgaaagctcactcccgctgcttagcaatccaggcctgatcaacaacgccagtagcggtctgttgcaggcggtccatgaagacttgaacggtagcctggatcatatagacagcaacgggaactcttcccccggttgctcccctcagccgcacattcactcaatccatgttaaagaagagcccgtcatcgctgaggatgaggattgccccatgtctttggtgaccacggccaaccattcaccggaactcgaagatgaccgcgaaattgaagaggaaccactgagtgaagacttggagtag

SEQ ID NO: 68512 - DNA, 1872 bp, Artificial Sequence
  derived and/or modified sequence
atgatgaccccccaggtgatcaccccccagcagatgcagcagatcctgcagcagcaggtgctctcccctcagcagcttcaggctttattgcagcaacagcaggcggtgatgctgcagcagcagcaactgcaggagttctacaagaagcagcaggagcaacttcacttacagttactgcaacagcagcaacagcagcagcaacagcagcagcagcaacagcagcagcaacagcaacagcagcagcagcagcagcaacaacaacagcagcagcagcagcaacagcagcagcagcagcagcacccgggaaaacaggccaaggaacagcagcagcagcagcagcagcagcagcagctggccgcacagcagttggtgttccagcagcagctgctacagatgcaacagttgcagcaacagcaacatttgctgtctctacaacgtcagggtctcatatccataccaccaggccaggcagccctgccagtgcaaagtttgcctcaggcaggcctgtctcctgcggagatacagcagctctggaaggaagttaccggagtgcactctatggaagacaacggtattaagcacggaggactggatcttacaacaaacaatagttcctccacaacttccagtaacacatccaaggcatctcctccgatcacccaccacagtatcgtgaatggacagagttcagtactcagcgcccgcagagactcatcttcccacgaggagacaggcgcatctcatacattgtacggtcatggggtctgtaagtggccgggctgcgaatctatttgcgaggacttcggccagtttctcaaacacttgaataacgagcatgccctggacgatagatcgacagcacagtgccgggtgcagatgcaggtcgtgcagcagctcgagatccaactgtctaaggagcgggagagactgcaagcaatgatgacccatctgcatatgaggccttctgaaccaaaaccttcccccaagccactcaacttggtgagtagtgtgacgatgtcgaaaaacatgctggaaacctccccgcagtcactcccccagacaccaactacccccaccgccccagtaactcctataactcagggtccgtctgtgattacccccgcctccgttcctaacgtgggtgcaattcgtaggagacacagcgataagtataacatacccatgagttccgagattgcgcctaactatgagttttacaagaatgccgacgttaggcccccctttacttacgcgaccttgattcggcaggctatcatggagagctcagataggcaactgaccctgaacgagatttattcatggtttactaggactttcgcctatttcaggcgcaacgcggctacgtggaagaatgctgttcgccataatctgagcttgcacaagtgctttgtgcgcgtcgagaacgttaaaggcgcagtctggaccgtcgacgaagtggagtaccagaagagacgctcacaaaagattactggttctcccacacttgtgaaaaacattcctacaagtctgggctatggagccgccctgaacgccagcctgcaggctgcactcgccgaatccagccttccactgctgtctaatccgggcttgataaacaatgcaagtagcggactcctccaagccgttcatgaggatttaaatgggagccttgatcacattgattctaatggcaactcaagtcctgggtgttcgccacagccccatattcattccatccatgtgaaagaggagccagtcattgctgaggacgaagactgcccaatgagtctcgtgaccaccgccaaccatagcccagaactcgaggatgatagagaaatagaggaagaacccctcagcgaggatctggaatag

SEQ ID NO: 68513 - DNA, 1593 bp, Artificial Sequence
  derived and/or modified sequence
atgatgaccccccaggtgatcaccccccagcagatgcagcagatccttcaacagcaagtgttgagccctcaacagctgcaggcacttttacaacagcagcaagctgtgatgctacagcagcagcaactgcaggagttctacaaaaagcagcaggagcagctgcatcttcagctgctgcagcagcagcaacagcagcagcagcagcagcagcagcaacaacaacagcaacagcaacagcagcaacaacagcagcagcagcagcaacaacagcagcagcagcagcagcaacagcagcagcatcccggcaaacaggctaaagagcaacaacaacagcagcagcaacagcagcagctcgctgctcagcaacttgtgtttcaacagcagctgctgcagatgcaacagcttcagcagcagcagcacctcctgtccttacaaaggcagggcctcattagcatccctcccggtcaggcagcgctgccggttcagtccctcccccaggcgggactatcccccgccgagatccagcagctgtggaaggaagttacaggcgttcattctatggaagataatggcatcaaacatgggggcttggaccttactaccaacaattcctcaagtacgacaagcagtaacacctctaaggcatccccccccataacccatcacagtattgtgaatggacagagctcagtgttgagcgcaagacgagattctagctcacatgaagaaacaggagcgagccatactctgtacggacacggtgtgtgcaagtggcccggctgtgagtctatctgtgaggactttgggcagttcctgaagcaccttaataacgagcatgcgttagacgaccgatcgacagctcaatgtcgcgtgcagatgcaagttgtacagcaactggagatacagctttctaaagaaagagagcgtctccaggctatgatgacacaccttcatatgagaccttccgagccgaagccgtccccaaagcccgcaataatggagagtagtgaccggcagttgacgttaaatgaaatctactcttggtttactcgcacgtttgcttactttcgcaggaacgccgccacatggaaaaacgccgttcgtcataacctctcactgcataagtgctttgtgcgtgttgagaatgtgaagggcgcggtttggacagtcgacgaggtggagtatcagaagcggaggagtcagaaaattactgggtctcccaccctcgtgaagaacatacccaccagtctgggatatggggccgctctaaatgcttctttgcaggcggccctggctgagtcctctcttcccttgctcagcaatcccggacttatcaacaatgcgtcatccggcctgctccaggccgtccatgaagacctcaatggttccctcgatcatatcgattcaaatggcaacagctcccctggctgtagcccacagccacacattcactctattcacgtgaaggaggagcccgtgattgctgaggacgaggactgcccaatgagtttagtaaccactgcaaaccacagtcccgagcttgaggacgaccgtgagatagaggaagagcccctgagcgaggacctggagtag

SEQ ID NO: 68514 - DNA, 2148 bp, Artificial Sequence
  derived and/or modified sequence
atgatgcaggagagcgccaccgagaccatcagcaacagcagcatgaatcaaaatgggatgtctacactgagctcccagcttgacgcgggcagtcgggacggcaggtcgtccggagacaccagcagcgaggtcagcaccgtcgagctgctacatctgcagcagcagcaggctctgcaagccgccaggcaactcttactgcaacaacagacctccggtctgaagtcccctaagtcaagcgacaagcagagacccctgcaggtccccgtttcagtcgccatgatgacccctcaggtgataacaccacagcagatgcagcagatcctgcagcaacaggtactgtcgcctcaacagctacaagctctgctccagcagcagcaggccgttatgctgcagcaacagcagctgcaggagttttacaagaaacaacaagagcagctgcatctacagctgctgcaacaacagcagcaacagcaacagcagcaacaacagcaacagcagcaacagcagcagcagcaacagcagcaacagcaacagcagcagcagcagcagcaacaacaacagcagcagcagcagcaccccggaaaacaggctaaggagcaacagcagcagcaacagcagcagcagcagcttgccgcacaacaactcgtgttccagcagcaactgcttcagatgcaacagctgcagcagcagcagcacctccttagcctccagcgccagggccttatcagcatccctcccggacaggctgctttaccggtccagagtcttccgcaggctggcttaagccccgcagaaatacagcagctgtggaaggaggtgaccggagtacacagcatggaagataacggaatcaagcatggcggactggaccttaccacaaacaattcctccagcaccaccagcagtaatacttccaaagcgagccccccaattacacaccactccatagtgaatggacagtccagcgtcttatccgctcggagggattccagctctcatgaagagacaggcgcctctcacacattgtacggtcacggggtgtgcaagtggccaggatgcgagtcaatttgcgaggattttggacagttcctgaaacatctgaataacgaacacgctcttgacgatcgctcgacagcccagtgccgtgtgcagatgcaggtcgtgcaacaacttgagatccaactgtcaaaagaacgcgaacggcttcaagcgatgatgacgcaccttcatatgagaccatcagagccaaagccttcccctaagcccctgaatctggtatctagcgtcacaatgtccaagaacatgctggagacctcgccacaatcactaccgcaaactcccactacccccaccgcaccagtcacacctattacgcaggggccttctgtaataaccccagcctctgtgccaaatgtgggagcaatccgccgtcgtcattctgacaaatacaacattcccatgtcctcggagatagccccgaattacgagttttacaagaacgcggatgttcggcccccctttacatacgctaccctgatcagacaggcgattatggaatcgagcgaccgccagctaactctaaacgagatctatagttggtttaccaggacatttgcctattttagacgcaacgccgcaacctggaaaaacgcagtgaggcacaatctgtcactgcataaatgtttcgtgcgagtggagaatgttaagggcgctgtctggactgttgacgaagtcgagtaccagaaaagaagaagccagaagattacagggtctcctaccttggtgaagaacattcccacatcactcggatacggtgcagcactaaacgccagcctccaggccgctctggccgagtcatccttgcctctgctgtccaatccaggtctgatcaataacgcttctagtggtctgttgcaggccgtgcacgaggatcttaatgggagccttgatcatatcgattccaatggcaattctagcccaggttgctcaccccaacctcatattcattccatccatgttaaagaggagccggttatcgcagaggacgaggactgccccatgtcactcgtgaccaccgcaaaccactcacccgagttggaagacgatagagagatcgaagaggagcccctgtccgaagatctggaatag

SEQ ID NO: 68515 - DNA, 2199 bp, Artificial Sequence
  derived and/or modified sequence
atgatgcaggagagcgccaccgagaccatcagcaacagcagcatgaaccagaacgggatgagcaccctgtcttctcaacttgatgccggcagccgcgacgggagatctagtggagacacttcctccgaggtctctactgtggaactcctgcacttgcagcagcagcaagccctccaggccgccaggcaacttctattacaacagcagacctctggactgaaaagtcctaagagctcggacaagcagcgcccgcttcaggtgccggtgtcagtcgccatgatgacaccccaggtgattacaccccagcagatgcagcaaattctccagcaacaggtgctcagcccacagcaactgcaagcactgctacagcagcagcaggctgttatgctgcaacaggactttcttgacagcggcctagaaaacttccgcgcagctttggaaaaaaaccagcagttacaggagttctacaagaaacagcaggaacagctgcatctgcagcttctgcagcagcaacaacagcaacaacagcagcagcagcaacagcagcaacagcagcaacagcagcaacagcagcagcagcagcagcagcaacagcagcagcaacagcaacagcaacagcagcagcacccaggtaagcaggccaaggaacagcagcagcagcaacagcagcagcagcagctcgctgctcagcagcttgtcttccagcagcagttacttcagatgcaacagctgcaacagcagcaacacctgctgagcctgcagaggcagggattaattagcattcctccaggccaagcagctttaccagtgcagtccttgcctcaggccggtctcagtcccgcggagattcaacaactgtggaaagaggtgaccggcgtgcactctatggaggataacggcataaaacatggcgggctggacctgaccactaacaattctagctcaaccacaagcagtaacacatcaaaagcaagtccaccgataacacatcacagtatcgttaacggacagagttctgttctgtccgcccgccgggatagctcttcccacgaggaaaccggcgcaagtcatactctttatgggcacggcgtgtgtaagtggccaggatgtgaatccatttgtgaagatttcggccagtttctgaagcacctcaacaacgaacatgctcttgacgaccgctcaaccgcacagtgtcgcgttcaaatgcaggtggtgcaacagttagaaatccaattaagcaaagagcgcgagaggctgcaggcaatgatgacacacctgcacatgagacccagtgaacctaaaccatcgcccaagcctctgaacttggtgagctccgttactatgtcaaagaatatgctggagacctccccacaatcactgccccagaccccaactaccccaaccgcacccgtaactcccattacgcaagggccgagtgttatcacacctgcaagcgtacccaatgtcggagctatccgtcggcgacacagcgacaagtataacatccccatgagctctgaaatcgccccaaactatgagttttacaaaaacgccgacgtgagaccgcccttcacctacgctactctgatcagacaggccatcatggagtcctcagatagacagctgaccttgaatgagatctactcctggttcacccggaccttcgcatatttccgcagaaatgccgctacatggaagaacgccgttcgccataacctgtcccttcacaaatgctttgtgcgcgtggaaaatgtgaagggcgcagtctggactgtcgacgaggtggagtaccagaagcgccgttcccaaaagatcacagggagccccactttggtgaaaaacatcccaacctccctggggtacggcgctgctctcaatgcctctctccaggccgcacttgccgaatctagcctgccattgctgtctaacccgggtttgatcaacaacgccagtagcggacttcttcaagccgtgcacgaggacctgaacggcagtttggatcacatcgattccaacggaaattctagcccagggtgcagccctcagccccacatccatagtatccacgttaaagaggagcccgttattgcggaggacgaagactgccctatgagtctagtcacaaccgcaaaccattcacccgagctcgaggatgatcgtgagatcgaggaggagcctctgtccgaggacttagagtag

SEQ ID NO: 68516 - DNA, 2223 bp, Artificial Sequence
  derived and/or modified sequence
atgatgcaggagagcgccaccgagaccatcagcaacagcagcatgaatcagaacgggatgagtaccctctctagccaactcgacgctggctcaagggatggacgctcctccggcgacacatcaagtgaggtgtccacagttgagttactccaccttcagcaacaacaggcactgcaggccgccagacagctcctcctgcagcagcagacaagcggactgaagtcacctaagagtagcgacaaacagcgaccactgcaggagctgctacctgagaccaagctgtgtatctgtgggcattccagtggggacggacatcctcataatacctttgccgtccctgtcagcgtggcaatgatgacaccccaagtcatcacgccacagcagatgcaacagattttgcagcagcaggtgctgagtcctcagcaactccaggcccttctgcagcagcaacaagctgtgatgctgcagcagcaacaactgcaggagttttataaaaagcagcaagagcagctgcacttgcagttgctacagcagcagcaacagcagcagcagcaacaacagcagcagcagcaacagcaacagcaacagcaacaacaacagcagcaacaacagcagcagcaacaacagcagcagcaacaacagcaacagcacccaggtaagcaagcgaaggaacaacagcagcagcaacaacaacagcagcagctggccgcccaacaactcgtgtttcagcaacagctcctacagatgcagcagttacaacagcagcagcatctgctgagcttgcagcgacagggcctaattagcatcccaccaggtcaagcagcccttcccgttcagtcactccctcaagccggattgtcccctgccgagatccaacagctttggaaggaggttactggcgtgcacagcatggaagataatggaatcaagcatggtggacttgatctcaccactaacaactcctcttctaccacatcttctaacacctccaaagcgtccccaccaataacccaccattcaatcgtgaacggtcagtcgagtgtgctgtccgctagacgcgattcatcaagccatgaagaaacaggtgctagccataccctttacggacatggcgtgtgcaagtggcctggatgcgaaagtatctgcgaggacttcggccagttccttaagcatctcaacaatgaacatgccttggacgaccgatcaactgcacagtgcagggtccaaatgcaggtggtgcaacagctggaaatccagctgtcaaaggaaagagagaggctgcaggcaatgatgacacatctccatatgaggccctctgagcctaagccaagccctaaacctctgaaccttgtttctagcgtcacaatgagtaaaaatatgttggagaccagcccacagtccttaccccagacccccactactccaacggcccctgttactcctatcacccaagggccgtcagttatcacccctgccagcgtccccaatgtgggcgccatccggaggaggcattctgacaaatacaacatccctatgagttccgagatcgcacccaattatgagttttacaagaacgcggatgtacgccctccttttacatacgcgaccctgatcagacaggcgattatggaaagctctgacaggcagcttaccctcaatgaaatctatagctggttcacaagaaccttcgcttacttcaggcgcaatgcggccacttggaaaaatgctgttcgccataatctgagcctgcataagtgctttgtccgggttgagaacgtgaagggagctgtctggaccgttgatgaggtggagtaccaaaaaaggagatctcaaaagataacaggctctcctaccctggtaaagaatatccctacatcgctcgggtatggcgccgcgctgaacgcatccttgcaagcagccctcgcggaatcttccctgccactcctgtcaaaccccggactaattaataatgcgagcagcggtctgctgcaagcagttcatgaagatctgaacggctctctagaccacatcgattccaatgggaatagttcacccggttgtagcccacagccacacattcactccattcatgtgaaagaagaacctgtcatcgccgaggacgaagactgcccaatgagtctggtcacaactgcaaaccatagtccggagttggaagacgaccgggagatagaagaagagcctctttccgaggatcttgagtag

SEQ ID NO: 68517 - DNA, 2148 bp, Artificial Sequence
  derived and/or modified sequence
atgatgcaggaatcagctaccgagactatcagtaactcctctatgaatcagaatggaatgagtacgctgtcgagtcaactagacgcaggctccagggacggacggtcttcaggagatacaagctctgaagttagcaccgtggagctgctgcatctgcaacagcagcaggcactgcaagctgctaggcagctgctattacagcagcagacgtcaggcttgaagagtcccaaatcctctgataagcagcggcctctgcaggtgcccgtatcagttgcaatgatgacaccccaggttattactccacagcagatgcagcagatactccagcagcaagttctgtctcctcagcagcttcaggccctgctccaacagcagcaggctgtaatgttgcagcagcagcagttgcaagaattctataagaaacagcaagagcagctgcacctgcagcttcttcaacagcagcaacagcagcagcaacagcagcaacagcagcagcagcagcagcagcagcagcaacaacaacagcagcagcagcaacagcaacagcagcagcagcagcagcaacaacagcaacatcctgggaagcaggctaaggagcagcagcagcaacagcagcagcagcaacagctggccgctcagcagcttgtgtttcaacagcagctgctgcagatgcaacagctgcagcagcagcagcaccttctgtccctgcagaggcagggcctgatcagcatccccccagggcaagcggctctgccagtgcaatccctaccacaggccggactcagccctgccgagatccagcaattgtggaaggaggtcactggagtgcacagtatggaggacaacgggataaagcacggcggactcgatctcaccactaacaacagcagttccactacttcttcaaatacctcaaaggctagcccaccaattacccatcactctatagtcaatggccagagctcagttctcagcgccaggcgcgactcaagcagccatgaagaaaccggagccagccatactctgtacggccatggggtttgtaaatggcccggttgcgagagcatctgcgaagactttgggcagttccttaaacacctgaacaacgagcacgctttggatgacaggagcaccgcacagtgcagagtccagatgcaggtggtccagcagctggaaatacagttgtccaaagagagagaacgcctgcaggccatgatgacgcatcttcatatgcggcctagcgagccaaaacccagccccaaaccactcaacctggttagttccgttaccatgagcaagaacatgttagaaacctcaccccagagtctcccgcaaacgcccaccactccgacggccccagtaactccgattactcaagggccttccgtaatcacgcctgccagtgtgcctaatgtgggcgcaattcggcgtcgtcactccgacaagtacaatatcccaatgagctccgaaatagcacctaactacgagttttataagaacgcagacgtgaggccgccattcacctatgctactttgattaggcaagcaattatggagtcttcagaccgccagcttaccctgaacgaaatctattcctggtttaccagaacatttgcatacttccggagaaacgctgccacctggaaaaacgccgtgaggcacaacctctctctacataaatgtttcgtccgggtggagaacgtcaagggcgctgtatggactgtagatgaagtggaataccagaaaagacggtcacagaaaatcactggatctcccacactcgtgaagaatattccaaccagcctcggatacggcgcagctctcaatgcctccctccaggctgcgctggcagagtccagccttccgctgctttctaacccagggctgataaataacgcgagctctggccttctgcaggcagtgcatgaagacctaaacggctctttggatcacatcgattcaaacggcaattcttctcccggttgctctccccagcctcatatccactcaatacacgttaaagaggaacccgtgatcgcggaagacgaagactgccccatgagcttggtgaccacggccaatcatagtcccgaattggaggacgaccgggaaatcgaggaagaaccattgtctgaggatctggaatag

SEQ ID NO: 68518 - DNA, 1872 bp, Artificial Sequence
  derived and/or modified sequence
atgatgacccctcaggtgattacacctcagcagatgcaacagatactgcagcagcaggtcctgtccccccagcagctccaggcactattacagcagcagcaggccgttatgctgcaacaacagcagctgcaggaattctacaagaagcagcaggagcaactgcatctccagctgctccagcagcagcagcagcagcagcaacagcagcagcaacaacaacagcaacagcagcaacaacagcaacaacagcagcagcaacagcagcaacagcagcagcagcagcagcagcaacagcagcatcctggaaagcaagctaaagagcagcaacagcagcagcaacagcagcagcaactcgcagcccagcaactcgttttccaacagcagctcttacaaatgcagcaattgcagcagcaacagcaccttctaagcttacagcgacaagggttgatctccatcccgccaggtcaggcggctctgccggtgcaaagcctgccacaggcgggtctttccccagccgaaatccaacaactgtggaaagaggttaccggagtccattcaatggaagataatgggatcaaacatggcggtctggatctgaccactaataacagcagttcgactacatcttcaaacacatctaaggcatctcctcctattacacatcatagtattgtgaacggacagtcttcggtcctttctgctcgacgagacagcagctctcacgaggagacgggggcaagccatacgctgtatggacacggggtttgtaagtggcccggatgtgagtcaatttgcgaagacttcggtcagtttttgaagcacctgaataacgaacacgccttggatgacagaagcactgcacagtgtcgcgtgcagatgcaggtggtacagcagctcgaaatccagctgtcaaaagagagggaacgcctccaggccatgatgactcacctgcatatgagaccaagtgaacctaagccttctcccaaaccactgaatctagtgtcctctgtgacaatgagtaaaaacatgctggagacctctccacaatctctcccacagacccctaccactccaaccgcacccgtgacccccatcacccagggcccaagtgtcatcacacccgcttctgtaccaaatgtcggcgcaattaggcgaaggcatagtgacaaatataatattcccatgagtagcgagattgcccctaactacgagttttacaaaaacgcggacgtccgcccaccttttacatatgcaacattgatacggcaagccattatggaatcctctgaccgccagttaactctgaatgagatatattcctggtttacaaggacattcgcttatttccgccgaaacgctgcaacctggaaaaacgcggttcgccacaatctatctttgcacaaatgttttgtgagggtggagaatgtaaagggggctgtgtggaccgtggacgaggtagaataccagaagaggcggagtcagaagatcaccggtagcccaactcttgtgaagaacatccctacaagcttaggctacggcgctgcacttaacgcgtccttacaagccgcactagcggagagcagcctgccactgctttccaatcctggtctgattaataacgcctctagcggcctgctccaagcagtacacgaggacctgaatggttctctggatcatatagactcgaatgggaattcctcaccgggatgctctccacagccacacatacattccattcatgtaaaagaagagccggtgatcgccgaagacgaggattgccccatgagtctggtgactactgcaaatcactcccccgagttagaagatgatagggaaattgaggaagaacccctcagcgaagacctcgagtag

SEQ ID NO: 68519 - DNA, 1593 bp, Artificial Sequence
  derived and/or modified sequence
atgatgacaccgcaggtgatcactccccagcagatgcagcagatcctccagcaacaagtgctgtctccccagcagctgcaggcgttgctgcaacagcaacaggccgtcatgcttcagcagcagcagctgcaggaattttataaaaagcagcaggagcaactgcacttgcagctgctgcagcaacaacagcagcagcagcagcaacagcagcagcagcagcagcagcaacagcaacagcaacagcaacagcagcaacaacagcagcagcagcagcagcagcagcagcagcagcagcagcaccccggaaagcaagcgaaggagcagcagcagcaacaacagcagcagcaacaactggctgcccagcagctggtgtttcagcaacagctactgcaaatgcagcaactgcagcagcagcagcatctcttgtctctgcagaggcagggcctgattagtatacctcccggacaggccgctctgcctgtgcagtcactgccacaggccggactgtcaccagcagagatccagcaactgtggaaggaggtgacgggcgtccactctatggaagataacggcattaaacatggaggcctggacttgaccactaacaatagtagctcgaccactagctcaaacacgagcaaagcgtctccacccattactcatcattctattgtgaacggacagagctccgtcctctctgctaggagggattcttccagtcacgaggaaaccggcgcatcacatactttgtatggacatggggtgtgcaagtggcccggatgcgaatccatttgcgaggactttggacaattcctaaaacatctgaacaacgagcatgcacttgatgacaggtcaaccgctcagtgtagggtacagatgcaagtggtccagcagttggagatccaactcagcaaggagagagagaggttgcaggcaatgatgacccatttacacatgcgtccatcagaacccaaaccaagccccaagccagctatcatggagtcaagtgaccgccaactgacactgaatgaaatttattcatggttcactagaactttcgcctacttccggaggaacgccgctacatggaaaaatgccgttcgccataatctttcactgcataagtgtttcgtgcgagttgaaaacgtgaagggcgcagtctggacggtagatgaggtggagtaccagaagaggagaagccagaaaatcaccggctcgcctactctggtcaaaaacataccgacctccctggggtatggagcagcgctaaatgcatccctacaggccgctctggccgaatcttcccttcccctcctgtccaaccctggattaataaacaatgcttcatccggactgttacaggcggtccacgaagacctgaacggcagtcttgatcacatcgattcgaatgggaactcgtcaccaggctgctcacctcagcctcacattcactctatccatgtcaaggaagaacccgtaattgctgaggatgaagattgtcctatgtcattggttaccaccgctaaccactctcctgagctagaagatgatcgcgaaatagaagaagagcccctgagtgaagatcttgagtag

SEQ ID NO: 68520 - DNA, 2148 bp, Artificial Sequence
  derived and/or modified sequence
atgatgcaggagagcgccaccgagacaatcagtaatagtagtatgaaccagaatgggatgtcaacgctgtcatcacagcttgacgccggaagccgcgacggacggagtagcggtgatacttccagcgaagtgagtaccgtagaactgctgcatttacaacagcagcaggccctgcaggccgctcgacagctgctcttgcaacagcagacaagcggtctgaagtcacccaagagttcggacaaacagaggccgcttcaggttcccgtgagcgtagccatgatgactccacaagtgatcactccgcagcagatgcagcagatcctgcagcagcaagtcctgtcccctcagcagctgcaggctttgctgcaacagcagcaggcagtgatgctacagcaacagcagttgcaggaattttacaaaaaacagcaggaacagctccatttgcagctgctgcagcaacagcagcaacagcaacagcaacagcagcagcagcagcagcagcagcaacagcagcagcagcaacagcagcagcaacagcaacagcagcagcagcaacagcagcagcaacaacagcaccctggaaaacaagcgaaggagcagcagcagcagcagcagcagcaacagcagctggcagctcagcagcttgtattccagcagcagttactgcagatgcagcaattgcagcagcagcagcacctactctcactccagaggcaggggctgatctcaattcctccaggccaggcagcgctgcctgtacaatcacttcctcaggccggactttcacccgctgagatccagcagttatggaaggaggtgacaggagtacacagtatggaagataacggaatcaaacacgggggactggacctgacaacaaataactcaagtagtacaaccagttccaatacatcaaaggcatcccctcccattacccaccactccattgtcaacggccaaagttccgtcctgtcagcccgtcgggacagctcctctcacgaggagaccggcgcttcacacacgttgtatggtcacggtgtttgtaagtggccagggtgtgagtctatttgtgaggacttcgggcaattcctgaagcaccttaataacgagcatgctctagatgatcgctccacggcgcagtgccgggtccaaatgcaggtggtgcagcagcttgagattcagctgtccaaggagagagagaggctgcaggcaatgatgacacacttacacatgaggcccagtgagccgaaaccatccccaaagccattgaatttggtatcaagtgtaacaatgagcaagaacatgctggaaacctctccccagtccctgccccaaacacctacaactcctacagccccagtcacccctataactcaggggccatccgtgattacaccagcctccgtccccaacgtcggggctatcagacgcaggcacagtgataagtacaacatcccaatgagcagcgagattgcccctaactatgaattttataagaatgccgatgtgcgccctcctttcacttacgctactctgatacgccaggcgatcatggagtcatctgacagacaactgacccttaacgaaatttacagctggtttacacggacttttgcgtacttcagaaggaatgctgccacttggaaaaacgcagtacgtcacaacttgagcttacacaaatgctttgtgagggtcgaaaatgtcaagggtgccgtttggactgtggacgaggtggagtatcagaagcgacgcagtcagaagatcacaggcagtccaaccctggtcaaaaatatccccacatcgctaggttacggggctgcactgaacgcttccctgcaagccgcattagctgaatccagtctgccgctgctgtcaaatcctgggctgatcaataacgcgtctagtgggctgttacaggctgtccacgaagatctgaacggaagcctggatcatatcgacagtaatggcaattcctcccccggttgttctccacagcctcacatccacagtatccacgtaaaagaggaacccgtgattgcagaagacgaggattgccccatgtcgctggtgacaactgctaaccattccccagagctggaagacgatcgggagattgaggaggagcctctgtccgaggatctagagtag

SEQ ID NO: 68521 - DNA, 2199 bp, Artificial Sequence
  derived and/or modified sequence
atgatgcaagaatctgccaccgagacaatttcaaatagctctatgaaccagaatggcatgtcaacactgagttctcaactggacgctggcagtagagacggcaggtcatccggcgacacatcttcagaggtgagtactgtcgagctgcttcacttacaacagcagcaagccctccaggctgcccgacaacttttgctgcagcagcaaacgtccggactgaagtctccaaagtcctctgacaaacagcggccactgcaggtgcctgtatccgtggccatgatgactccccaggtgattacaccacagcagatgcaacaaattcttcaacagcaggtgctctctccccaacagctacaagctttactgcagcagcagcaagccgtgatgctgcagcaggactttctcgatagcggcttagagaattttcgggcagccctagaaaagaaccaacagcttcaggaattctacaagaagcaacaagagcagctccacctccagctgctgcaacagcaacaacagcagcagcagcaacagcagcagcaacagcagcagcagcagcagcagcagcagcagcagcagcagcaacagcaacagcagcagcagcagcaacagcagcagcagcaacaccccggaaaacaggcaaaggagcagcagcaacagcagcaacaacagcaacagttagctgcccaacagttggtatttcaacaacaacttctccagatgcagcagctccagcaacagcagcatctactgtcactgcagagacaggggctgatatcaatcccgccaggccaggctgccttgccggtgcaaagcttgcctcaggccggactgtccccggctgaaatacagcagttgtggaaagaggtgactggcgtgcacagtatggaagacaatggaattaagcacggcggtctagacctcactacaaacaatagcagttcaactacctccagtaatacaagcaaagcgtcccccccaatcactcatcatagcattgtcaacggacagtcctccgtgcttagcgccaggcgggactcctcatctcatgaggagaccggcgcatctcatactctgtacggccatggcgtttgcaaatggccgggttgcgaaagcatttgtgaggactttggccagtttctaaagcacctcaacaacgaacatgctttggacgatcggagcacagcccagtgccgagtgcagatgcaggtggtccaacagttagaaatacagttatctaaagaacgcgagaggctgcaggcaatgatgacccatctgcatatgaggccaagtgaaccgaaaccatcgccaaagccattgaatctggtttcaagtgtgacaatgagcaagaacatgctcgagacttccccacagtctctcccacagactcctaccaccccaaccgccccagtgactccaatcactcaaggcccaagtgtgatcacaccagcgtccgtgcccaacgtgggggcaattaggaggcggcattcagataaatacaatatacccatgagcagcgagattgcccctaattacgaattttataagaacgccgacgtaagacctcccttcacttatgctaccctcatccgacaggccattatggagagtagcgatcgacagctgacactgaacgagatctattcatggttcaccagaacctttgcatactttagaaggaacgcagccacctggaagaatgccgtacgccacaacctgagcctccacaaatgtttcgtcagggttgagaacgttaaaggagctgtttggacagtggacgaagtggagtaccagaaacgtcggtcccagaaaataaccgggtctcccactctggtcaagaacatcccaaccagtcttggatatggagctgcgctgaatgcgtctcttcaggccgcattagccgagagcagtcttcccctgctcagcaaccccggtctgattaataacgcttcctccggcctgctgcaagcagtccatgaggacctgaacgggagcctcgatcatatagattccaatggcaattcctctcctggctgtagccctcagccacacatccattccattcatgtaaaagaagagccagtcatcgccgaggacgaggattgtcctatgtccctggtgactacagcgaatcactctcccgaattggaggatgacagagagatcgaggaggaaccactgtctgaagacctcgagtag

SEQ ID NO: 68522 - DNA, 2223 bp, Artificial Sequence
  derived and/or modified sequence
atgatgcaagagagcgctactgaaacaatctcaaactctagtatgaatcaaaatgggatgtctacactgtcatctcagctggacgcaggctctcgagatggtagatcatctggcgatacaagtagtgaggtgtcgacagtggagctgctgcatctgcagcagcagcaggcactgcaagccgcaaggcagctgctcctccagcaacaaacaagcggactcaagtccccaaaaagttcagacaagcagaggccgctccaagagctcttgccggaaaccaagctttgcatatgtggtcactcttctggagacggacacccacacaacactttcgccgtgcccgttagtgtggccatgatgaccccacaggttatcaccccccaacagatgcagcagatccttcagcagcaagtactgtccccacagcaactgcaagcattattacaacagcaacaggcagtgatgttgcagcagcaacagcttcaggagttctataaaaagcagcaggaacagcttcacctccagctactgcagcagcagcagcagcagcagcagcaacaacaacagcagcaacaacagcaacagcagcagcagcagcagcaacagcaacagcaacagcagcaacagcagcagcaacagcagcagcaacagcaccccggaaaacaggctaaggaacagcagcaacagcagcagcagcagcagcagctcgctgcgcagcaactggtatttcagcagcaattactccagatgcagcagctgcagcaacagcaacacctgctctctctgcagaggcagggcttgattagcattcctccgggtcaggctgcccttcccgttcaaagtctcccacaggcaggcctgtcacctgccgagatccagcagctctggaaagaggtcacaggcgtacacagtatggaagacaatgggataaaacatggtggtttagatttgacgacgaacaacagctcaagcacaacatcaagcaataccagcaaggcatctccccctataacgcaccactctatagttaacggccagtcaagtgttctgtccgcaaggagagactcgtcaagccacgaggagactggtgccagtcatacattgtacggacatggtgtctgtaagtggcctggatgcgagagtatctgtgaggatttcgggcagttcctgaaacatctgaacaatgagcatgccctggacgacaggtcaaccgcccagtgcagggtgcaaatgcaggttgtgcaacagctcgagatacaactgagtaaggagcgcgaacggctccaggccatgatgacacatctgcatatgaggcccagcgagcctaagccttcacctaagcccctaaaccttgtgtctagcgtgactatgtcgaaaaatatgctggagacctcccctcagtcactccctcagacacctacaactcccactgcacccgtgaccccaatcactcagggcccttccgtgataacgccggcaagcgtcccaaatgtgggggctattagaagaaggcactctgacaagtacaatatccccatgagttcggaaatagctcctaactacgaattttacaagaacgctgatgttaggcctccttttacatatgccactctaattcgtcaggctattatggaaagctccgacaggcaactgaccctgaatgaaatctacagctggttcacacgcacattcgcctactttcgcagaaacgccgcaacctggaagaatgctgtgcgccacaatctgtctttgcacaaatgtttcgtacgcgttgaaaatgtgaaaggagctgtgtggacggtggatgaagtggaataccagaagcggagatcgcagaagatcacggggtcaccaaccctcgtaaaaaacatccctacttccttaggttatggagcagcactaaacgcgtcgttgcaggctgcgctggcagagagctctctgcctttattgtctaatcctggactgataaataacgccagttccggcctcctgcaggctgtccacgaggatctgaacggttcgctagatcacatagatagcaacggcaactcaagtccgggttgttccccccagccccacatccactccattcatgtgaaggaggaacctgtgatagccgaagacgaagactgcccaatgagcctcgtcacgacagccaatcattccccagagctcgaagacgatcgagagatagaagaggaaccactaagtgaagatctggaatag

SEQ ID NO: 68523 - DNA, 2148 bp, Artificial Sequence
  derived and/or modified sequence
atgatgcaggagagcgccaccgagaccatcagcaacagcagcatgaaccagaacggcatgagcaccctgagcagccagctggacgccggcagcagagacggcagaagcagcggcgacaccagcagcgaggtgagcaccgtggagctgctgcacctgcagcagcagcaggccctgcaggccgccagacagctgctgctgcagcagcagaccagcggcctgaagagccccaagagcagcgacaagcagagacccctgcaggtgcccgtgagcgtggccatgatgaccccccaggtgatcaccccccagcagatgcagcagatcctgcagcagcaggtgctgagcccccagcagctgcaggccctgctgcagcagcagcaggccgtgatgctgcagcagcagcagctgcaggagttctacaagaagcagcaggagcagctgcacctgcagctgctgcagcagcagcagcagcagcagcagcagcagcagcagcagcagcagcagcagcagcagcagcagcagcagcagcagcagcagcagcagcagcagcagcagcagcagcagcagcagcagcagcaccccggcaagcaggccaaggagcagcagcagcagcagcagcagcagcagcagctggccgcccagcagctggtgttccagcagcagctgctgcagatgcagcagctgcagcagcagcagcacctgctgagcctgcagagacagggcctgatcagcatcccccccggccaggccgccctgcccgtgcagagcctgccccaggccggcctgagccccgccgagatccagcagctgtggaaggaggtgaccggcgtgcacagcatggaggacaacggcatcaagcacggcggcctggacctgaccaccaacaacagcagcagcaccaccagcagcaacaccagcaaggccagcccccccatcacccaccacagcatcgtgaacggccagagcagcgtgctgagcgccagaagagacagcagcagccacgaggagaccggcgccagccacaccctgtacggccacggcgtgtgcaagtggcccggctgcgagagcatctgcgaggacttcggccagttcctgaagcacctgaacaacgagcacgccctggacgacagaagcaccgcccagtgcagagtgcagatgcaggtggtgcagcagctggagatccagctgagcaaggagagagagagactgcaggccatgatgacccacctgcacatgagacccagcgagcccaagcccagccccaagcccctgaacctggtgagcagcgtgaccatgagcaagaacatgctggagaccagcccccagagcctgccccagacccccaccacccccaccgcccccgtgacccccatcacccagggccccagcgtgatcacccccgccagcgtgcccaacgtgggcgccatcagaagaagacacagcgacaagtacaacatccccatgagcagcgagatcgcccccaactacgagttctacaagaacgccgacgtgagaccccccttcacctacgccaccctgatcagacaggccatcatggagagcagcgacagacagctgaccctgaacgagatctacagctggttcaccagaaccttcgcctacttcagaagaaacgccgccacctggaagaacgccgtgagacacaacctgagcctgcacaagtgcttcgtgagagtggagaacgtgaagggcgccgtgtggaccgtggacgaggtggagtaccagaagagaagaagccagaagatcaccggcagccccaccctggtgaagaacatccccaccagcctgggctacggcgccgccctgaacgccagcctgcaggccgccctggccgagagcagcctgcccctgctgagcaaccccggcctgatcaacaacgccagcagcggcctgctgcaggccgtgcacgaggacctgaacggcagcctggaccacatcgacagcaacggcaacagcagccccggctgcagcccccagccccacatccacagcatccacgtgaaggaggagcccgtgatcgccgaggacgaggactgccccatgagcctggtgaccaccgccaaccacagccccgagctggaggacgacagagagatcgaggaggagcccctgagcgaggacctggagtag

SEQ ID NO: 68524 - DNA, 1872 bp, Artificial Sequence
  derived and/or modified sequence
atgatgaccccccaggtgatcaccccccagcagatgcagcagatcctgcagcagcaggtgctgagcccccagcagctgcaggccctgctgcagcagcagcaggccgtgatgctgcagcagcagcagctgcaggagttctacaagaagcagcaggagcagctgcacctgcagctgctgcagcagcagcagcagcagcagcagcagcagcagcagcagcagcagcagcagcagcagcagcagcagcagcagcagcagcagcagcagcagcagcagcagcagcagcagcagcagcagcagcaccccggcaagcaggccaaggagcagcagcagcagcagcagcagcagcagcagctggccgcccagcagctggtgttccagcagcagctgctgcagatgcagcagctgcagcagcagcagcacctgctgagcctgcagagacagggcctgatcagcatcccccccggccaggccgccctgcccgtgcagagcctgccccaggccggcctgagccccgccgagatccagcagctgtggaaggaggtgaccggcgtgcacagcatggaggacaacggcatcaagcacggcggcctggacctgaccaccaacaacagcagcagcaccaccagcagcaacaccagcaaggccagcccccccatcacccaccacagcatcgtgaacggccagagcagcgtgctgagcgccagaagagacagcagcagccacgaggagaccggcgccagccacaccctgtacggccacggcgtgtgcaagtggcccggctgcgagagcatctgcgaggacttcggccagttcctgaagcacctgaacaacgagcacgccctggacgacagaagcaccgcccagtgcagagtgcagatgcaggtggtgcagcagctggagatccagctgagcaaggagagagagagactgcaggccatgatgacccacctgcacatgagacccagcgagcccaagcccagccccaagcccctgaacctggtgagcagcgtgaccatgagcaagaacatgctggagaccagcccccagagcctgccccagacccccaccacccccaccgcccccgtgacccccatcacccagggccccagcgtgatcacccccgccagcgtgcccaacgtgggcgccatcagaagaagacacagcgacaagtacaacatccccatgagcagcgagatcgcccccaactacgagttctacaagaacgccgacgtgagaccccccttcacctacgccaccctgatcagacaggccatcatggagagcagcgacagacagctgaccctgaacgagatctacagctggttcaccagaaccttcgcctacttcagaagaaacgccgccacctggaagaacgccgtgagacacaacctgagcctgcacaagtgcttcgtgagagtggagaacgtgaagggcgccgtgtggaccgtggacgaggtggagtaccagaagagaagaagccagaagatcaccggcagccccaccctggtgaagaacatccccaccagcctgggctacggcgccgccctgaacgccagcctgcaggccgccctggccgagagcagcctgcccctgctgagcaaccccggcctgatcaacaacgccagcagcggcctgctgcaggccgtgcacgaggacctgaacggcagcctggaccacatcgacagcaacggcaacagcagccccggctgcagcccccagccccacatccacagcatccacgtgaaggaggagcccgtgatcgccgaggacgaggactgccccatgagcctggtgaccaccgccaaccacagccccgagctggaggacgacagagagatcgaggaggagcccctgagcgaggacctggagtag

SEQ ID NO: 68525 - DNA, 1593 bp, Artificial Sequence
  derived and/or modified sequence
atgatgaccccccaggtgatcaccccccagcagatgcagcagatcctgcagcagcaggtgctgagcccccagcagctgcaggccctgctgcagcagcagcaggccgtgatgctgcagcagcagcagctgcaggagttctacaagaagcagcaggagcagctgcacctgcagctgctgcagcagcagcagcagcagcagcagcagcagcagcagcagcagcagcagcagcagcagcagcagcagcagcagcagcagcagcagcagcagcagcagcagcagcagcagcagcagcagcagcaccccggcaagcaggccaaggagcagcagcagcagcagcagcagcagcagcagctggccgcccagcagctggtgttccagcagcagctgctgcagatgcagcagctgcagcagcagcagcacctgctgagcctgcagagacagggcctgatcagcatcccccccggccaggccgccctgcccgtgcagagcctgccccaggccggcctgagccccgccgagatccagcagctgtggaaggaggtgaccggcgtgcacagcatggaggacaacggcatcaagcacggcggcctggacctgaccaccaacaacagcagcagcaccaccagcagcaacaccagcaaggccagcccccccatcacccaccacagcatcgtgaacggccagagcagcgtgctgagcgccagaagagacagcagcagccacgaggagaccggcgccagccacaccctgtacggccacggcgtgtgcaagtggcccggctgcgagagcatctgcgaggacttcggccagttcctgaagcacctgaacaacgagcacgccctggacgacagaagcaccgcccagtgcagagtgcagatgcaggtggtgcagcagctggagatccagctgagcaaggagagagagagactgcaggccatgatgacccacctgcacatgagacccagcgagcccaagcccagccccaagcccgccatcatggagagcagcgacagacagctgaccctgaacgagatctacagctggttcaccagaaccttcgcctacttcagaagaaacgccgccacctggaagaacgccgtgagacacaacctgagcctgcacaagtgcttcgtgagagtggagaacgtgaagggcgccgtgtggaccgtggacgaggtggagtaccagaagagaagaagccagaagatcaccggcagccccaccctggtgaagaacatccccaccagcctgggctacggcgccgccctgaacgccagcctgcaggccgccctggccgagagcagcctgcccctgctgagcaaccccggcctgatcaacaacgccagcagcggcctgctgcaggccgtgcacgaggacctgaacggcagcctggaccacatcgacagcaacggcaacagcagccccggctgcagcccccagccccacatccacagcatccacgtgaaggaggagcccgtgatcgccgaggacgaggactgccccatgagcctggtgaccaccgccaaccacagccccgagctggaggacgacagagagatcgaggaggagcccctgagcgaggacctggagtag

SEQ ID NO: 68526 - DNA, 2199 bp, Artificial Sequence
  derived and/or modified sequence
atgatgcaggagagcgccaccgagaccatcagcaacagcagcatgaaccagaacggcatgagcaccctgagcagccagctggacgccggcagcagagacggcagaagcagcggcgacaccagcagcgaggtgagcaccgtggagctgctgcacctgcagcagcagcaggccctgcaggccgccagacagctgctgctgcagcagcagaccagcggcctgaagagccccaagagcagcgacaagcagagacccctgcaggtgcccgtgagcgtggccatgatgaccccccaggtgatcaccccccagcagatgcagcagatcctgcagcagcaggtgctgagcccccagcagctgcaggccctgctgcagcagcagcaggccgtgatgctgcagcaggacttcctggacagcggcctggagaacttcagagccgccctggagaagaaccagcagctgcaggagttctacaagaagcagcaggagcagctgcacctgcagctgctgcagcagcagcagcagcagcagcagcagcagcagcagcagcagcagcagcagcagcagcagcagcagcagcagcagcagcagcagcagcagcagcagcagcagcagcagcagcagcagcagcaccccggcaagcaggccaaggagcagcagcagcagcagcagcagcagcagcagctggccgcccagcagctggtgttccagcagcagctgctgcagatgcagcagctgcagcagcagcagcacctgctgagcctgcagagacagggcctgatcagcatcccccccggccaggccgccctgcccgtgcagagcctgccccaggccggcctgagccccgccgagatccagcagctgtggaaggaggtgaccggcgtgcacagcatggaggacaacggcatcaagcacggcggcctggacctgaccaccaacaacagcagcagcaccaccagcagcaacaccagcaaggccagcccccccatcacccaccacagcatcgtgaacggccagagcagcgtgctgagcgccagaagagacagcagcagccacgaggagaccggcgccagccacaccctgtacggccacggcgtgtgcaagtggcccggctgcgagagcatctgcgaggacttcggccagttcctgaagcacctgaacaacgagcacgccctggacgacagaagcaccgcccagtgcagagtgcagatgcaggtggtgcagcagctggagatccagctgagcaaggagagagagagactgcaggccatgatgacccacctgcacatgagacccagcgagcccaagcccagccccaagcccctgaacctggtgagcagcgtgaccatgagcaagaacatgctggagaccagcccccagagcctgccccagacccccaccacccccaccgcccccgtgacccccatcacccagggccccagcgtgatcacccccgccagcgtgcccaacgtgggcgccatcagaagaagacacagcgacaagtacaacatccccatgagcagcgagatcgcccccaactacgagttctacaagaacgccgacgtgagaccccccttcacctacgccaccctgatcagacaggccatcatggagagcagcgacagacagctgaccctgaacgagatctacagctggttcaccagaaccttcgcctacttcagaagaaacgccgccacctggaagaacgccgtgagacacaacctgagcctgcacaagtgcttcgtgagagtggagaacgtgaagggcgccgtgtggaccgtggacgaggtggagtaccagaagagaagaagccagaagatcaccggcagccccaccctggtgaagaacatccccaccagcctgggctacggcgccgccctgaacgccagcctgcaggccgccctggccgagagcagcctgcccctgctgagcaaccccggcctgatcaacaacgccagcagcggcctgctgcaggccgtgcacgaggacctgaacggcagcctggaccacatcgacagcaacggcaacagcagccccggctgcagcccccagccccacatccacagcatccacgtgaaggaggagcccgtgatcgccgaggacgaggactgccccatgagcctggtgaccaccgccaaccacagccccgagctggaggacgacagagagatcgaggaggagcccctgagcgaggacctggagtag

SEQ ID NO: 68527 - DNA, 2223 bp, Artificial Sequence
  derived and/or modified sequence
atgatgcaggagagcgccaccgagaccatcagcaacagcagcatgaaccagaacggcatgagcaccctgagcagccagctggacgccggcagcagagacggcagaagcagcggcgacaccagcagcgaggtgagcaccgtggagctgctgcacctgcagcagcagcaggccctgcaggccgccagacagctgctgctgcagcagcagaccagcggcctgaagagccccaagagcagcgacaagcagagacccctgcaggagctgctgcccgagaccaagctgtgcatctgcggccacagcagcggcgacggccacccccacaacaccttcgccgtgcccgtgagcgtggccatgatgaccccccaggtgatcaccccccagcagatgcagcagatcctgcagcagcaggtgctgagcccccagcagctgcaggccctgctgcagcagcagcaggccgtgatgctgcagcagcagcagctgcaggagttctacaagaagcagcaggagcagctgcacctgcagctgctgcagcagcagcagcagcagcagcagcagcagcagcagcagcagcagcagcagcagcagcagcagcagcagcagcagcagcagcagcagcagcagcagcagcagcagcagcagcagcagcagcaccccggcaagcaggccaaggagcagcagcagcagcagcagcagcagcagcagctggccgcccagcagctggtgttccagcagcagctgctgcagatgcagcagctgcagcagcagcagcacctgctgagcctgcagagacagggcctgatcagcatcccccccggccaggccgccctgcccgtgcagagcctgccccaggccggcctgagccccgccgagatccagcagctgtggaaggaggtgaccggcgtgcacagcatggaggacaacggcatcaagcacggcggcctggacctgaccaccaacaacagcagcagcaccaccagcagcaacaccagcaaggccagcccccccatcacccaccacagcatcgtgaacggccagagcagcgtgctgagcgccagaagagacagcagcagccacgaggagaccggcgccagccacaccctgtacggccacggcgtgtgcaagtggcccggctgcgagagcatctgcgaggacttcggccagttcctgaagcacctgaacaacgagcacgccctggacgacagaagcaccgcccagtgcagagtgcagatgcaggtggtgcagcagctggagatccagctgagcaaggagagagagagactgcaggccatgatgacccacctgcacatgagacccagcgagcccaagcccagccccaagcccctgaacctggtgagcagcgtgaccatgagcaagaacatgctggagaccagcccccagagcctgccccagacccccaccacccccaccgcccccgtgacccccatcacccagggccccagcgtgatcacccccgccagcgtgcccaacgtgggcgccatcagaagaagacacagcgacaagtacaacatccccatgagcagcgagatcgcccccaactacgagttctacaagaacgccgacgtgagaccccccttcacctacgccaccctgatcagacaggccatcatggagagcagcgacagacagctgaccctgaacgagatctacagctggttcaccagaaccttcgcctacttcagaagaaacgccgccacctggaagaacgccgtgagacacaacctgagcctgcacaagtgcttcgtgagagtggagaacgtgaagggcgccgtgtggaccgtggacgaggtggagtaccagaagagaagaagccagaagatcaccggcagccccaccctggtgaagaacatccccaccagcctgggctacggcgccgccctgaacgccagcctgcaggccgccctggccgagagcagcctgcccctgctgagcaaccccggcctgatcaacaacgccagcagcggcctgctgcaggccgtgcacgaggacctgaacggcagcctggaccacatcgacagcaacggcaacagcagccccggctgcagcccccagccccacatccacagcatccacgtgaaggaggagcccgtgatcgccgaggacgaggactgccccatgagcctggtgaccaccgccaaccacagccccgagctggaggacgacagagagatcgaggaggagcccctgagcgaggacctggagtag

SEQ ID NO: 68528 - protein, 456 aa, Artificial Sequence
  derived and/or modified sequence
MQESATETISNSSMNQNGMSTLSSQLDAGSRDGRSSGDTSSEVSTVELLHLQQQQALQAARQLLLQQQTSGLKSPKSSDKQRPLQELLPETKLCICGHSSGDGHPHNTFAVPVSVAMMTPQVITPQQMQQILQQQVLSPQQLQALLQQQQAVMLQQQQLQEFYKKQQEQLHLQLLQQQQQQQQQQQQQQQQQQQQQQQQQQQQQQQQQQQQQQQQHPGKQAKEQQQQQQQQQQLAAQQLVFQQQLLQMQQLQQQQHLLSLQRQGLISIPPGQAALPVQSLPQAGLSPAEIQQLWKEVTGVHSMEDNGIKHGGLDLTTNNSSSTTSSNTSKASPPITHHSIVNGQSSVLSARRDSSSHEETGASHTLYGHGVCKWPGCESICEDFGQFLKHLNNEHALDDRSTAQCRVQMQVVQQLEIQLSKERERLQAMMTHLHMRPSEPKPSPKPVSAYCFINSK

SEQ ID NO: 68529 - protein, 543 aa, Artificial Sequence
  derived and/or modified sequence
MDSVVFEDVAVDFTLEEWALLDSAQRDLYRDVMLETFQNLASVDDETQFKASGSVSQQDIYGEKIPKESKIATFTRNVSWASVLGKIWDSLSIEDQTTNQGRNLRNHGLERLCESNDQCGEALSQIPHLNLYKKIPPGVKQYEYNTYGKVFMHRRTSLKSPITVHTGHKPYQCQECGQAYSCRSHLRMHVRTHNGERPYVCKLCGKTFPRTSSLNRHVRIHTAEKTYECKQCGKAFIDFSSLTSHLRSHTGEKPYKCKECGKAFSYSSTFRRHTITHTGEKPYKCKECAEAFSYSSTFRRHMISHTGEKPHKCKECGEAFSYSSAFRRHMITHTGEKPYECKQCGKTFIYLQSFRRHERIHTGEKPYECKQCGKTFIYPQSFRRHERTHGGEKPYECNQCGKAFSHPSSFRGHMRVHTGEKPYECKQCGKTFNWPISLRKHMRTHTREKPYECKECGKVFKWPSSLPIHMRLHTGEKPYQCKHCGKAFNCSSSLRRHVRIHTTEKQYKCNVGHPPANEFMCSASEKSHQERDLIKVVNMVLPL

SEQ ID NO: 68530 - DNA, 1632 bp, Artificial Sequence
  derived and/or modified sequence
atggacagcgtggtgttcgaggacgtggccgtggacttcaccctggaggagtgggccctgctggacagcgcccagagagacctgtacagagacgtgatgctggagaccttccagaacctggccagcgtggacgacgagacccagttcaaggccagcggcagcgtgagccagcaggacatctacggcgagaagatccccaaggagagcaagatcgccaccttcaccagaaacgtgagctgggccagcgtgctgggcaagatctgggacagcctgagcatcgaggaccagaccaccaaccagggcagaaacctgagaaaccacggcctggagagactgtgcgagagcaacgaccagtgcggcgaggccctgagccagatcccccacctgaacctgtacaagaagatcccccccggcgtgaagcagtacgagtacaacacctacggcaaggtgttcatgcacagaagaaccagcctgaagagccccatcaccgtgcacaccggccacaagccctaccagtgccaggagtgcggccaggcctacagctgcagaagccacctgagaatgcacgtgagaacccacaacggcgagagaccctacgtgtgcaagctgtgcggcaagaccttccccagaaccagcagcctgaacagacacgtgagaatccacaccgccgagaagacctacgagtgcaagcagtgcggcaaggccttcatcgacttcagcagcctgaccagccacctgagaagccacaccggcgagaagccctacaagtgcaaggagtgcggcaaggccttcagctacagcagcaccttcagaagacacaccatcacccacaccggcgagaagccctacaagtgcaaggagtgcgccgaggccttcagctacagcagcaccttcagaagacacatgatcagccacaccggcgagaagccccacaagtgcaaggagtgcggcgaggccttcagctacagcagcgccttcagaagacacatgatcacccacaccggcgagaagccctacgagtgcaagcagtgcggcaagaccttcatctacctgcagagcttcagaagacacgagagaatccacaccggcgagaagccctacgagtgcaagcagtgcggcaagaccttcatctacccccagagcttcagaagacacgagagaacccacggcggcgagaagccctacgagtgcaaccagtgcggcaaggccttcagccaccccagcagcttcagaggccacatgagagtgcacaccggcgagaagccctacgagtgcaagcagtgcggcaagaccttcaactggcccatcagcctgagaaagcacatgagaacccacaccagagagaagccctacgagtgcaaggagtgcggcaaggtgttcaagtggcccagcagcctgcccatccacatgagactgcacaccggcgagaagccctaccagtgcaagcactgcggcaaggccttcaactgcagcagcagcctgagaagacacgtgagaatccacaccaccgagaagcagtacaagtgcaacgtgggccacccccccgccaacgagttcatgtgcagcgccagcgagaagagccaccaggagagagacctgatcaaggtggtgaacatggtgctgcccctgtag

SEQ ID NO: 68531 - DNA, 1632 bp, Artificial Sequence
  derived and/or modified sequence
atggacagtgtagtcttcgaagatgtggccgtcgatttcacacttgaagagtgggccctcctggatagtgcccagcgggatctataccgagacgtgatgctcgaaacattccagaacctcgcttccgtagatgatgaaacacagtttaaggcgtctggtagcgtctcacagcaggacatttatggcgagaagatacctaaggagtccaaaattgcaactttcactaggaatgtctcgtgggcttccgtactcgggaaaatatgggacagcctatctattgaggaccaaactaccaaccagggtcgcaacctgaggaaccacgggcttgagcggttatgtgagtcgaacgatcagtgtggagaagccctctcacagatacctcatttgaacctgtataaaaaaatcccacccggtgtgaagcagtatgagtataacacatacggcaaagtgtttatgcataggaggacaagcttgaaatcgcccatcactgtacacaccggccacaagccttaccaatgccaggagtgtggccaagcctatagttgccgttcgcacctgagaatgcatgttcgcacgcacaacggcgaaaggccctatgtgtgcaagctgtgcggtaagacctttccaaggactagctcacttaacagacacgtccgaatacacactgccgagaagacctacgagtgcaaacaatgtggcaaggcctttatcgacttttctagccttacctcccacctgcgaagccatactggcgagaagccatacaaatgtaaagaatgtggtaaagctttctcatattcatctacatttcggaggcataccatcacacacaccggcgagaagccatataagtgtaaagaatgtgccgaggcatttagctactcctccaccttccggaggcacatgatctcccacacaggggagaagcctcacaaatgcaaggagtgcggggaggcctttagctattcatctgcctttagacggcacatgattacgcacactggcgaaaaaccatatgagtgcaagcaatgcggaaagacattcatctatcttcagagtttcagacggcacgaacgaatacatacaggcgagaagccatacgaatgtaaacagtgtggaaagacgttcatctatccccagagcttcagacggcatgagcgtacacatggcggagaaaagccttacgagtgtaaccagtgcggaaaggcgttctcacacccctcttcattccgtggccacatgagggtgcataccggcgagaagccttacgaatgtaaacaatgtggtaaaacgttcaattggccgatatctctccgtaaacacatgaggacacacacccgcgaaaagccttatgaatgcaaagagtgcggcaaggtttttaaatggccttcaagtctccccatccatatgaggctgcatacgggcgagaaaccctaccagtgcaaacactgcgggaaggccttcaattgtagttcttcactgcggcggcatgtgcgcatacacaccaccgagaagcagtacaaatgcaatgtgggccacccccccgcgaatgaattcatgtgcagcgcctctgaaaagagtcaccaggagagagacctgataaaggtcgtcaacatggtcctgcctctttag

SEQ ID NO: 68532 - DNA, 1632 bp, Artificial Sequence
  derived and/or modified sequence
atggattctgtggtgtttgaagatgtggccgtggacttcaccctggaggagtgggccctgctggacagcgcccagagggacctgtacagagatgtgatgctggagaccttccagaacctggcctctgtggatgatgagacccagttcaaggccagcggctctgtgtcccagcaggacatctatggagagaagatccccaaggagagcaagatcgccaccttcaccagaaatgtgtcctgggcctctgtgctgggcaagatctgggacagcctgagcattgaggaccagaccaccaaccagggcaggaacctgagaaatcatggcctggagcggctgtgtgagagcaatgaccagtgtggggaggccctgagccagatcccccacctgaacctgtacaagaagatccccccaggagtgaagcagtatgagtacaacacctacggcaaggtgttcatgcacaggaggaccagcctgaagagccccatcaccgtgcacacaggccacaagccctaccagtgccaggagtgtggccaggcctacagctgccgcagccacctgaggatgcacgtgaggacccacaacggggagcggccctacgtgtgcaagctgtgtgggaagaccttccccaggaccagcagcctgaacagacatgtgcgcatccacacagctgagaagacctatgagtgcaagcagtgtgggaaggccttcatcgacttcagcagcctgaccagccacctgcggagccacactggagagaagccctacaagtgcaaggaatgtgggaaggccttctcctacagcagcaccttcagaagacacaccatcacccacactggagagaagccctacaagtgcaaggaatgtgccgaggccttctcctacagcagcaccttcagaagacacatgatcagccacactggagagaagccccacaagtgcaaggaatgtggggaggccttctcctacagcagcgccttcagaagacacatgatcacccacactggagagaagccctatgagtgcaagcagtgtgggaagaccttcatctacctgcagagcttcagaagacatgagcgcatccacactggagagaagccctatgagtgcaagcagtgtgggaagaccttcatctacccccagagcttcagaagacatgagaggacccatggaggagagaagccctatgagtgcaaccagtgtgggaaggccttcagccaccccagcagcttccggggccacatgagggtgcacactggagagaagccctatgagtgcaagcagtgtgggaagaccttcaactggcccatcagcctgaggaagcacatgaggacccacacccgggagaagccctatgagtgcaaggaatgtgggaaggtgttcaagtggcccagcagcctgcccatccacatgaggctgcacactggagagaagccctaccagtgcaagcactgtgggaaggccttcaactgcagcagcagcctgcggagacatgtgcgcatccacaccacagagaagcagtacaagtgcaatgtgggccaccccccagccaatgagttcatgtgcagcgccagcgagaagagccaccaggagcgggacctgatcaaggtggtgaacatggtgctgcccctgtag

SEQ ID NO: 68533 - DNA, 1632 bp, Artificial Sequence
  derived and/or modified sequence
atggacagcgtggtgttcgaggacgtggccgtggacttcaccctggaagagtgggctcttctggattctgcacaacgcgacctgtaccgcgacgttatgctggagacattccaaaacctagcctctgttgatgacgagacacaatttaaggcgtctggttctgtctcacagcaggatatctatggagaaaaaatacctaaagagtccaagattgctacctttacccggaacgtgtcctgggcatccgtgctgggaaagatctgggattctctcagtatcgaagatcaaacgacgaatcaaggacgtaatttgcggaaccatgggttagaacggctctgcgaaagtaatgatcagtgtggcgaagcgctgagccaaattcctcatctcaacctgtataaaaaaatacctccgggagtcaagcagtatgagtataacacatatggaaaagtgttcatgcaccgcagaacctccctgaaatcccctattaccgtgcacactggtcataagccttatcagtgtcaggaatgcggccaagcctacagctgtagatcacacctccggatgcatgtgcgtacacataatggcgagcgcccctatgtgtgtaagctgtgtggcaaaaccttccctaggaccagcagcctgaaccgtcacgtccggatccatacggcagaaaagacctacgagtgcaagcagtgtggtaaagcatttattgacttttccagcttgaccagtcatttgaggtcgcataccggtgaaaaaccatacaaatgcaaggagtgtgggaaggctttttcatattcgtctacatttaggaggcataccatcacacacacaggggagaagccctacaagtgcaaggaatgtgccgaagcgttcagctacagttcaacttttagaaggcacatgatcagtcacaccggcgaaaaacctcataagtgtaaggaatgtggtgaggcattttcttactcatccgcattccgtcgtcatatgatcacccacacaggggagaagccttatgaatgcaaacaatgcggtaagaccttcatttacctgcaatcattcaggaggcacgagagaatccataccggagagaagccatacgagtgcaaacagtgtggaaagacctttatttatccgcagagttttaggcgccatgagcgcacacatggcggcgagaagccatacgagtgtaaccagtgtggaaaggccttttctcacccttcaagctttaggggtcacatgcgggtccatacgggcgagaaaccatatgaatgtaagcagtgtgggaagactttcaattggccgatatcgctccgaaaacacatgcgcactcacacacgcgagaagccctacgagtgcaaggaatgtggcaaagtcttcaagtggccatcatccctccccatacacatgcgactgcacaccggtgagaaaccatatcagtgtaaacattgtggaaaggcttttaactgtagctccagtctgcgcagacatgtccggattcacacgactgagaaacaatataaatgtaacgtcggtcacccaccagccaacgagtttatgtgttccgcatcagagaaatcccatcaagaaagagacctgattaaagtcgttaacatggtgctgccactgtag

SEQ ID NO: 68534 - DNA, 1632 bp, Artificial Sequence
  derived and/or modified sequence
atggacagtgtggtctttgaggatgtcgcagtcgattttactctggaagagtgggcccttctggactccgcgcagcgggatctgtatcgagacgtgatgttagagacatttcagaacctggccagcgtggatgatgagacccagttcaaggcctctgggtccgtgagccagcaggatatctatggcgaaaagattcccaaggagagtaaaatcgccaccttcactcgcaatgtgtcgtgggcctcagttctgggaaagatttgggactctcttagcattgaggatcagaccactaatcagggaagaaatttgcggaatcacggcctggagcgcctttgtgaaagcaacgaccagtgcggggaggccctctcccaaattcctcaccttaatctgtacaagaaaattcccccaggcgttaaacagtatgaatataatacctacggcaaagtcttcatgcacaggaggactagccttaaatcccccatcaccgtgcatactggacataaaccctaccaatgccaagagtgcggccaggcatatagctgccgctctcacctgagaatgcatgtcagaacacacaacggcgaacggccatatgtctgcaaactctgcggcaaaacctttccaagaaccagctcgctcaatagacatgtcagaattcatactgctgaaaaaacttacgagtgtaaacagtgtggtaaggctttcatcgacttctcctcattgacttctcatctgcgtagccatacgggagagaagccttacaaatgcaaagagtgtggtaaggccttctcttacagcagtacgtttcgacgccataccataacccacaccggcgagaagccctacaaatgcaaagagtgcgcggaggctttttcttactcaagtaccttcaggcgtcacatgatatctcataccggcgagaaacctcacaagtgtaaagagtgtggggaggcattttcgtatagttcggccttccgaaggcacatgattactcacactggcgagaagccttatgagtgtaaacagtgtggaaagacattcatttacttgcagtctttcaggagacacgagcgtatacatactggagaaaaaccctacgaatgtaagcagtgtggtaagacatttatctatcctcagtcctttcgtagacacgagcggactcacgggggagaaaaaccatacgagtgtaaccagtgtggcaaagccttcagtcacccctccagcttccggggacacatgcgggtgcacacaggcgaaaagccctatgagtgcaaacagtgtggcaaaacatttaactggccaatctccctgagaaagcacatgaggacacacacgcgcgagaaaccttacgaatgcaaggagtgtggcaaggtgttcaagtggcctagcagcctcccgatccatatgcgccttcacacaggtgaaaagccatatcagtgcaagcattgtggaaaggcgtttaattgcagctcttccttaagaaggcacgtcaggatccataccacagaaaaacagtacaagtgtaatgtcggccatcctcctgccaacgagtttatgtgtagcgcttccgagaagtcacatcaagagagagatctcatcaaggtggtaaacatggtgctgccactgtag

SEQ ID NO: 68535 - DNA, 1770 bp, Artificial Sequence
  derived and/or modified sequence
cgagctctgtctaatcaggcccctgggacgggacgcctctgtcctagccgtgagtgccccgcctgcccctagcggtccctggcgtcccggttcctgtcgcgctcacctgcgccggtagcgaagaaatcgccccgggacatggactcagtggtctttgaggatgtggctgtggacttcaccctggaggagtgggctttgctggattctgctcagagggacctctacagagatgtgatgctggagacctttcagaacctggcctcagtagatgatgaaactcaatttaaggccagtgggtcagtttctcagcaggatatttatggagagaaaatacccaaggaatctaaaatagccacgttcaccagaaatgtttcctgggcctctgttttaggaaaaatttgggacagtcttagcatcgaagatcaaaccacaaaccaggggagaaatctcagaaatcatgggttggagagactctgtgaaagtaatgatcaatgtggagaagccctcagccagattccacatcttaatctgtacaagaaaattccacctggagtaaaacagtatgaatacaacacgtacggaaaagtcttcatgcatcgccgcacatccctcaagagtcccatcacagttcacactggacacaaaccatatcagtgccaggaatgtgggcaggcctacagttgtcgttcacacctaagaatgcatgtgagaacccacaatggagagagaccctatgtgtgtaaattatgtgggaaaacctttcctcgtacttcctccctcaatcggcatgtaaggattcacactgctgagaaaacctacgaatgtaagcaatgtgggaaagcctttattgacttctcaagtcttactagtcatctcagaagtcacaccggagagaagccatataagtgtaaggaatgtgggaaagctttcagttattcctcaacgtttcgaagacacacaataacacacactggcgagaagccatataaatgtaaggaatgtgcggaagcctttagttattcctcaacttttcgaagacatatgatttcacacactggagagaagccacataaatgtaaagaatgtggggaggccttcagttattcttcggcttttcgaagacacatgataacacacactggagagaaaccctacgaatgcaaacaatgtgggaaaaccttcatttatctccagtcctttcgaagacatgaaaggattcacactggagagaaaccctacgaatgcaaacagtgtgggaagaccttcatttatccccagtcctttcgaagacatgaaaggactcatggtggagagaaaccctatgaatgcaaccagtgcgggaaagcattcagtcacccctcctcctttcgaggacacatgagggtgcacactggagagaaaccctatgagtgcaagcaatgtgggaaaactttcaattggcccatatctttacgaaaacatatgagaacacatactagagagaaaccctatgaatgtaaggaatgtgggaaggtcttcaaatggccatcatctttaccaatacatatgagactgcacactggagagaaaccttatcaatgtaagcattgtgggaaagcattcaattgttcctcatccttaaggcgacatgtgagaatacacactacagaaaaacagtataagtgtaatgtaggacatcctcctgcaaatgaattcatgtgcagtgcttcagaaaagtcacaccaggagagagatctgatcaaagttgtaaatatggtgttgcctttatga

SEQ ID NO: 68536 - protein, 593 aa, Artificial Sequence
  derived and/or modified sequence
MEIVYVYVKKRSEFGKQCNFSDRQAELNIDIMPNPELAEQFVERNPVDTGIQCSISMSEHEANSERFEMETRGVNHVEGGWPKDVNPLELEQTIRFRKKVEKDENYVNAIMQLGSIMEHCIKQNNAIDIYEEYFNDEEAMEVMEEDPSAKTINVFRDPQEIKRAATHLSWHPDGNRKLAVAYSCLDFQRAPVGMSSDSYIWDLENPNKPELALKPSSPLVTLEFNPKDSHVLLGGCYNGQIACWDTRKGSLVAELSTIESSHRDPVYGTIWLQSKTGTECFSASTDGQVMWWDIRKMSEPTEVVILDITKKEQLENALGAISLEFESTLPTKFMVGTEQGIVISCNRKAKTSAEKIVCTFPGHHGPIYALQRNPFYPKNFLTVGDWTARIWSEDSRESSIMWTKYHMAYLTDAAWSPVRPTVFFTTRMDGTLDIWDFMFEQCDPTLSLKDNGCLIACGSQLGTTTLLEVSPGLSTLQRNEKNVASSMFERETRREKILEARHREMRLKEKGKAEGRDEEQTDEELAVDLEALVSKAEEEFFDIIFAELKKKEADAIKLTPVPQQPSPEEDQVVEEGEEAAGEEGDEEVEEDLA

SEQ ID NO: 68537 - DNA, 1782 bp, Artificial Sequence
  derived and/or modified sequence
atggaaatagtttatgtttacgtcaaaaaaagaagtgagttcgggaagcagtgcaacttttctgacaggcaagcagaacttaacatcgacatcatgccaaatccagagctggccgagcagttcgtcgagaggaacccggtcgatacaggaattcagtgtagcatcagcatgtccgagcatgaagccaactctgaacgtttcgaaatggagacacgaggagtgaatcacgttgagggcgggtggcctaaagacgtcaaccctctggaactcgagcagacaataaggtttcggaagaaagtcgagaaggatgagaattacgtgaatgccatcatgcaacttggcagtatcatggaacattgtattaagcagaacaatgcaatagacatctacgaggagtatttcaatgacgaagaggcaatggaagtaatggaagaggacccctccgctaaaacaatcaacgttttccgggatccccaggagatcaagcgcgctgccactcatctgagctggcatcctgacgggaatcgcaagttggccgttgcttacagttgtctggactttcagagagctcccgtcggtatgtcaagtgattcctatatctgggatttggagaaccccaacaagcccgagttagctctgaagcctagctcccccctggtaaccctggaattcaaccctaaggatagccatgtgttgctcggcggctgctacaacggtcagattgcctgctgggacactcgcaagggcagcctggtagccgagctctccaccattgagtccagccacagagatccagtgtacggcacaatttggctgcaatctaagacaggaacggagtgtttcagcgccagtactgatggccaagtgatgtggtgggatatacgcaaaatgtccgagcctacggaggtggttattctggatatcaccaaaaaggagcaactggaaaacgcactcggtgccatctcactcgagtttgaaagcaccctacccactaagttcatggtgggtacagagcagggcatcgtgatttcttgcaaccggaaggccaagacttcagccgagaaaatcgtgtgtacatttcccgggcaccacgggcctatctacgcccttcaacggaatcccttctaccccaaaaacttccttactgtcggcgattggacggcacggatctggagtgaggattccagagagagtagtataatgtggaccaagtaccatatggcttatctgaccgatgccgcatggtcaccagtaagacctactgtatttttcacaactaggatggacggaaccttagacatttgggactttatgttcgaacaatgcgatcccaccctgtctctgaaagacaacggatgcctgatcgcctgtggatcccagctcgggactactactctacttgaagtttcaccaggcctctcaaccctccaaagaaacgagaaaaacgttgcttccagcatgtttgaacgggagacgcgcagagagaagatcctcgaagcccgccaccgggagatgcgcctcaaagagaagggcaaagccgagggccgagacgaagagcagactgatgaggagctggctgtcgaccttgaggccttggtgtccaaggccgaagaagaattttttgatatcatctttgccgaactgaagaagaaggaggcagacgccatcaaattgaccccagttcctcaacagccgtcccctgaggaagaccaggtggttgaagagggcgaggaggcagccggagaggaaggtgatgaggaggtcgaggaggatttagcatag

SEQ ID NO: 68538 - DNA, 1782 bp, Artificial Sequence
  derived and/or modified sequence
atggagatcgtgtatgtgtatgtgaagaagagaagtgaatttgggaagcagtgcaacttcagtgaccggcaggccgagctgaacatcgacatcatgcccaaccctgagctggccgagcagtttgtggagaggaaccctgtggacaccggcatccagtgcagcatctccatgtctgagcacgaggccaacagcgagagatttgagatggagacccggggcgtgaaccacgtggagggcggctggcccaaggatgtgaaccccctggagctggagcagaccatccgcttcaggaagaaggtggagaaggatgagaactacgtgaatgccatcatgcagctgggcagcatcatggagcactgcatcaagcagaacaatgccatcgacatctatgaggagtacttcaatgatgaggaggccatggaggtgatggaggaggaccccagcgccaagaccatcaacgtgttccgggacccccaggagatcaagagagctgccacccacctgtcctggcacccagatggcaacaggaagctggccgtggcctacagctgcctggacttccagagggcccctgtgggcatgagcagtgacagctacatctgggacctggagaaccccaacaagccagagctggccctgaagcccagcagccccctggtgaccctggagttcaaccccaaggacagccacgtgctgctgggcggctgctacaacggccagatcgcctgctgggacaccaggaagggcagcctggtggccgagctgagcaccatcgagagcagccaccgggaccctgtgtatggcaccatctggctgcagagcaagacaggaacagagtgcttcagcgccagcacagatggccaggtgatgtggtgggacatcaggaagatgtctgagcccacagaggtggtgatcctggacatcaccaagaaggagcagctggagaatgccctgggcgccatcagcctggagtttgagagcaccctgcccaccaagttcatggtgggcacagagcagggcatcgtcatcagctgcaacaggaaggccaagaccagcgctgagaagatcgtgtgcaccttccctggccaccacggccccatctatgccctgcagaggaaccccttctaccccaagaacttcctgactgtgggggactggacagcccgcatctggagcgaggacagccgggagagcagcatcatgtggaccaagtaccacatggcctacctgacagatgctgcctggagccctgtgcggcccaccgtcttcttcaccaccaggatggatggcaccctggacatctgggacttcatgtttgagcagtgtgaccccaccctgagcctgaaggacaatggctgcctgattgcctgtggcagccagctgggcaccaccaccctgctggaggtgtccccaggcctgagcaccctgcagagaaatgagaagaatgtggccagctccatgtttgagcgggagacccggcgggagaagatcctggaggcccggcaccgggagatgaggctgaaggagaagggcaaggccgagggcagagatgaggagcagacagatgaggagctggccgtggacctggaggccctggtgtccaaggccgaggaggagttctttgacatcatctttgctgagctgaagaagaaggaggctgatgccatcaagctgacccctgtgccccagcagcccagccctgaggaggaccaggtggtggaggagggggaggaggccgccggggaggagggagatgaggaggtggaggaggacctggcctag

SEQ ID NO: 68539 - DNA, 1782 bp, Artificial Sequence
  derived and/or modified sequence
atggagatcgtgtacgtgtacgtgaagaagcggagcgagttcggcaagcagtgcaacttcagcgacagacaggccgagctgaatatagatatcatgccaaatcccgaattagcagagcagttcgtagagcgaaaccccgtggacacgggaattcaatgctctatttcaatgtctgagcacgaagctaattccgaacgcttcgaaatggagaccagaggcgtgaatcatgtggagggagggtggccgaaggacgtgaaccctctggagctggagcagacaatccgcttcaggaagaaggtggagaaggatgagaattatgtgaatgccatcatgcagcttggctctattatggagcattgcataaagcaaaacaacgcaatcgacatctatgaagaatattttaacgacgaagaagccatggaagtgatggaggaggacccatccgctaagaccatcaacgtgttccgggaccctcaggagatcaagcgagccgctactcatctgtcatggcacccggatggcaacagaaaactagccgttgcctattcttgcctggactttcaacgtgcccctgtgggcatgagttctgacagctacatctgggacctggaaaaccccaataagccggagcttgctctcaaacctagttctccacttgtaacattggagtttaatcccaaagatagccacgtgctcctgggcggctgctacaacgggcagatcgcatgttgggatactcgcaagggatctctggtggccgaactcagcactatagagtcctcccaccgggaccctgtctatggcacaatatggctgcagtcgaagaccgggacagaatgcttcagcgcttccacagatggtcaagtgatgtggtgggacatccggaagatgtcggagcctacagaggtggtgatcctcgatataacaaagaaagagcagctggaaaatgcactcggagccatctccttggaatttgaaagcacgctacccacgaagttcatggtggggaccgagcaaggcatagtgatttcctgtaaccgtaaggctaaaacttcggcagaaaagatcgtgtgtacttttcccggtcatcacgggccaatctatgcgcttcagagaaatccgttctaccctaaaaattttctcacggtgggcgactggactgcccgaatctggtctgaggactcgcgagagtctagtattatgtggaccaaataccatatggcatatttgacagatgctgcatggagtccagtgcggcccaccgttttctttaccacccgtatggatgggactctcgatatttgggattttatgtttgagcagtgtgatcccactctaagcctgaaggacaatggatgcctcattgcgtgtggttcgcagttagggacaacaacactgttggaggtcagccccgggctgtcaactctgcaaaggaacgagaagaatgtagctagctccatgtttgagagagaaactagaagggagaagatcctcgaggcccgacaccgtgaaatgaggctgaaagagaaggggaaggccgaaggtcgggatgaggagcaaactgatgaagagctcgccgtagatctggaagccttagtgagcaaggccgaggaggaattcttcgacataatctttgccgaacttaaaaagaaagaagcagatgccattaagctgactcccgtgccccagcagccttcacccgaggaggatcaggttgtggaggagggtgaggaggccgcaggggaggagggtgatgaggaggtggaggaggaccttgcctag

SEQ ID NO: 68540 - DNA, 1782 bp, Artificial Sequence
  derived and/or modified sequence
atggaaattgtctacgtatacgtgaagaagcgctccgagttcggaaagcaatgtaacttctctgaccgccaggcagagctgaacattgacataatgcccaatcccgagctggctgaacaatttgtggaacggaatcctgtggacactggaattcagtgtagtatctcgatgtcagagcacgaagcgaatagcgagcgtttcgagatggaaactaggggagtgaatcacgtcgaaggcggatggccgaaagacgtcaatcccctggagctcgaacagactatccgctttcggaaaaaagtggaaaaagatgaaaactatgtaaacgctatcatgcagcttggctctatcatggaacattgtatcaagcagaataacgccattgacatttacgaagaatacttcaatgacgaagaggcgatggaggtgatggaagaagaccccagcgccaagaccattaatgtgttccgcgatcctcaggagatcaagcgggcagctacacacctgtcttggcacccagacgggaacaggaagcttgccgttgcctattcatgcttggactttcaaagagctccagttggcatgtcctctgattcttacatatgggacctggagaacccgaacaagcccgaactggcgttgaagcctagttctcccctggtcactctggagttcaaccccaaagactcccatgtactacttggtggatgctacaacggacagattgcgtgttgggatacacggaagggctcactggttgccgaactgtcaaccatagagtcatcacaccgcgatccggtttatgggactatttggctgcagagcaagaccggcaccgaatgcttttccgcttccactgatgggcaagttatgtggtgggatatacgcaagatgtctgagccaaccgaggtggttattctggatataacgaaaaaggagcagctcgaaaacgccttgggcgcaattagcttggaattcgaatccaccctgcctacgaagtttatggtggggacggagcagggaatcgttatcagctgcaatcgcaaggcaaagacctccgccgagaagatcgtatgtacatttccaggccaccatggtcccatctatgcgttgcagagaaaccctttctaccctaagaacttcttgaccgttggcgattggaccgccaggatttggagcgaagattctagggaaagttctataatgtggactaagtaccatatggcttacctgaccgatgccgcatggtctccggttcggccaaccgtgttcttcactaccagaatggatgggacgctggacatttgggattttatgttcgagcagtgcgaccctaccttgagcctgaaagataacggttgccttattgcttgcgggagccagctggggactacgaccctgttggaggttagcccaggccttagcacattgcagagaaacgagaaaaacgtagcttcttctatgtttgaaagagagacccgtcgagagaagatactcgaagccagacatagggagatgcggcttaaggaaaaaggaaaggcggagggaagggacgaggaacagacagacgaggaactcgcggtcgatctcgaagctctggtatctaaggcagaagaagagttctttgatatcattttcgcggagctgaaaaagaaggaggctgacgccatcaagttaaccccagtccctcagcagccttctcctgaagaagaccaggtggtggaggagggcgaggaagcggcaggggaggagggagacgaagaagtggaagaggacctggcctag

SEQ ID NO: 68541 - DNA, 1782 bp, Artificial Sequence
  derived and/or modified sequence
atggagatcgtgtacgtgtacgtgaagaagagaagcgagttcggcaagcagtgcaacttcagcgacagacaggccgagctgaacatcgacatcatgcccaaccccgagctggccgagcagttcgtggagagaaaccccgtggacaccggcatccagtgcagcatcagcatgagcgagcacgaggccaacagcgagagattcgagatggagaccagaggcgtgaaccacgtggagggcggctggcccaaggacgtgaaccccctggagctggagcagaccatcagattcagaaagaaggtggagaaggacgagaactacgtgaacgccatcatgcagctgggcagcatcatggagcactgcatcaagcagaacaacgccatcgacatctacgaggagtacttcaacgacgaggaggccatggaggtgatggaggaggaccccagcgccaagaccatcaacgtgttcagagacccccaggagatcaagagagccgccacccacctgagctggcaccccgacggcaacagaaagctggccgtggcctacagctgcctggacttccagagagcccccgtgggcatgagcagcgacagctacatctgggacctggagaaccccaacaagcccgagctggccctgaagcccagcagccccctggtgaccctggagttcaaccccaaggacagccacgtgctgctgggcggctgctacaacggccagatcgcctgctgggacaccagaaagggcagcctggtggccgagctgagcaccatcgagagcagccacagagaccccgtgtacggcaccatctggctgcagagcaagaccggcaccgagtgcttcagcgccagcaccgacggccaggtgatgtggtgggacatcagaaagatgagcgagcccaccgaggtggtgatcctggacatcaccaagaaggagcagctggagaacgccctgggcgccatcagcctggagttcgagagcaccctgcccaccaagttcatggtgggcaccgagcagggcatcgtgatcagctgcaacagaaaggccaagaccagcgccgagaagatcgtgtgcaccttccccggccaccacggccccatctacgccctgcagagaaaccccttctaccccaagaacttcctgaccgtgggcgactggaccgccagaatctggagcgaggacagcagagagagcagcatcatgtggaccaagtaccacatggcctacctgaccgacgccgcctggagccccgtgagacccaccgtgttcttcaccaccagaatggacggcaccctggacatctgggacttcatgttcgagcagtgcgaccccaccctgagcctgaaggacaacggctgcctgatcgcctgcggcagccagctgggcaccaccaccctgctggaggtgagccccggcctgagcaccctgcagagaaacgagaagaacgtggccagcagcatgttcgagagagagaccagaagagagaagatcctggaggccagacacagagagatgagactgaaggagaagggcaaggccgagggcagagacgaggagcagaccgacgaggagctggccgtggacctggaggccctggtgagcaaggccgaggaggagttcttcgacatcatcttcgccgagctgaagaagaaggaggccgacgccatcaagctgacccccgtgccccagcagcccagccccgaggaggaccaggtggtggaggagggcgaggaggccgccggcgaggagggcgacgaggaggtggaggaggacctggcctag

SEQ ID NO: 68542 - DNA, 2240 bp, Artificial Sequence
  derived and/or modified sequence
caagcaaccggtaaacgccgccgtttgaggagcaccggagccgcgaccgtggattgaacgcttccccagagacccagaagcagaaggagcggacccaggccggcaccatggagattgtgtacgtgtacgtcaagaagcgcagcgagttcgggaagcagtgcaatttctcggaccgccaggccgagctgaacatcgacatcatgcccaaccctgagctggccgagcagttcgtggagcggaacccagtggacacgggcatccagtgctcgatcagcatgtcggaacacgaggccaactcagagcggtttgagatggagacccggggagttaaccatgtcgaggggggctggcccaaggacgtgaaccccctggagctggagcagaccatccgtttccggaagaaagtggagaaagatgagaactacgttaacgccatcatgcagctcggctctatcatggagcactgcatcaagcagaacaatgccattgacatctatgaagagtatttcaatgacgaggaggccatggaagtgatggaggaggacccttcagctaaaaccatcaatgtgttcagggacccccaggaaatcaagagggctgccacacacctctcctggcaccccgatggcaacaggaagttggcagtggcatactcctgcttggattttcagcgggcacctgtgggcatgagcagcgattcatacatctgggacctggaaaaccccaacaagcctgaacttgctctgaagccatcgtctccactcgtgacgttggagttcaaccccaaagattcccacgtactcctgggtggctgctacaatggacagatagcctgctgggacacccgaaagggcagcctggtggcggagctatccaccattgagtccagccaccgagaccctgtgtatggcaccatctggctgcagtcgaagacgggcaccgagtgcttctcagcttccacggatgggcaggtcatgtggtgggacatccgaaagatgagcgagcccactgaagttgtgatcttggacatcaccaagaaggaacagttggaaaatgccttgggggccatctccctggagttcgaatctactttgcccaccaagttcatggtggggaccgagcagggcatcgtcatctcctgcaaccgcaaggccaagacgtcagctgaaaagattgtgtgcaccttcccgggccatcatggccccatctacgccctccagagaaaccccttctacccgaagaacttcctgacggttggcgactggacagcccgcatttggtctgaagacagccgggaatcgtccatcatgtggaccaagtaccacatggcttacctcactgatgctgcctggagccccgtgaggccgaccgttttctttaccaccaggatggacggaaccctggatatctgggacttcatgttcgagcagtgcgatcccaccctcagcttgaaggacaatgggtgtctcatcgcctgcggctcccagctggggacaaccaccctgctggaggtctcgcctgggctctctaccctccagaggaatgagaagaacgtagcctcttccatgtttgagcgtgagacccggcgagagaagatcctggaggccaggcaccgggagatgcggctgaaggagaagggtaaggcggagggcagggatgaggagcagaccgatgaggagctggccgtagacctggaggcgctggtcagcaaggccgaggaggagttcttcgacatcatcttcgcagagctgaagaagaaggaggcagacgccataaagctgacgccagtgcctcagcaaccaagtccagaagaagaccaggtggtggaggagggagaggaagcagcgggggaagaaggggatgaagaagtggaagaagacttagcctagaagtcagccttcgactgcggcgctatccctgtgtgccttcctttcccacctcttgaccctcaaccagacttgcatggccatggcagggcctcgggaagaccttcaggagtggggaagggtttctcctccatgatcgaccctcctcgtccacctacaaatcaggaacagaaagtctgtccactttgaaaatacctttccaggcagctccctgaccatttggacacattgccacgacaggagcctccaagtatgtgggaggggacgggcgggacgagcttggctgttctgctgcacctgaatgctttctgttatcctaattcttgtaaaattaaatgaatcgtaacaatgcca

SEQ ID NO: 68543 - DNA, 963 bp, Artificial Sequence
  derived and/or modified sequence
atgtaccattgccatagcggcagtaagcctactgagaagggtgcaaacgagtacgcctacgccaaatggaagctgtgcagcgcctcagccatctgtttcatttttatgatcgcagaagtggtaggagggcacattgcaggcagcttagcggtggtgactgacgctgctcacttgctgatagatctgaccagcttcctcctatccttgttctcactgtggcttagcagcaagccgccatccaaaagactgacattcggttggcatcgagcagaaatcctgggcgctcttctttctattctgtgcatatgggtggtaacaggtgttctggtgtacttggcatgcgagagactgctatatcctgattatcagattcaagccactgtgatgattatcgtgagcagctgcgccgtggctgcgaatatcgttctgactgtggtactccaccagagatgtcttggccacaatcataaggaagtccaggccaatgccagcgttcgggccgcctttgtccacgctctcggtgatctcttccaatctatctcagtactaatcagcgcgctcataatctactttaagccggaatataagattgctgatcccatctgcactttcatcttctctattctggtgctcgcctctaccatcaccatacttaaagatttttccattttgctcatggagggcgtccctaagtcactgaactatagtggtgtgaaagagctgattttagcggttgatggcgttctgtcagtgcacagccttcacatttggtccctgacaatgaaccaggtgatcctctccgcccacgtcgctacagcagctagccgcgactctcaggtcgtgcgcagagagattgccaaggccctgagcaaaagcttcacgatgcactcgttgacgattcagatggagagcccggtagaccaggacccagattgcctgttctgcgaggacccgtgcgactag

SEQ ID NO: 68544 - DNA, 963 bp, Artificial Sequence
  derived and/or modified sequence
atgtaccactgccacagcggcagcaagcccacagagaagggggccaatgaatatgcctatgccaagtggaagctgtgcagcgccagcgccatctgcttcatcttcatgattgctgaggtggtgggcggccacatcgccggcagcctggccgtggtgacagatgctgcccacctgctgattgacctgaccagcttcctgctgagcctcttcagcctgtggctgagcagcaagccacccagcaagaggctgaccttcggctggcacagagctgagatcctgggcgccctgctgagcatcctgtgcatctgggtggtgactggagtgctggtgtacctggcctgtgagcggctgctgtacccagactaccagatccaggccaccgtgatgatcatcgtgagcagctgtgctgtggccgccaacatcgtgctgactgtggtgctgcaccagcgctgcctgggccacaaccacaaggaggtgcaggccaatgcctctgtgcgggccgcctttgtgcacgccctgggggacctcttccagagcatctctgtgctgatcagcgccctgatcatctacttcaagccagagtacaagattgctgaccccatctgcaccttcatcttcagcatcctggtgctggccagcaccatcaccatcctgaaggacttcagcatcctgctgatggagggcgtgcccaagagcctgaactacagcggcgtgaaggagctgatcctggccgtggatggagtgctgtctgtgcacagcctgcacatctggagcctgaccatgaaccaggtgatcctgagcgcccacgtggccacagctgccagccgggacagccaggtggtgcggcgggagatcgccaaggccctgagcaagagcttcaccatgcacagcctgaccatccagatggagagccctgtggaccaggaccctgactgcctcttctgtgaggacccctgtgactag

SEQ ID NO: 68545 - DNA, 963 bp, Artificial Sequence
  derived and/or modified sequence
atgtaccactgccacagcggcagcaagcccaccgagaagggcgccaatgaatatgcctacgcaaagtggaagctgtgcagcgctagtgccatctgtttcatctttatgatcgcagaagttgttgggggccacatagcaggcagcctagcagttgttacagacgccgctcaccttctgattgatcttacgagctttctcctatcattgttctcactctggttgagttctaagcctccttccaaaaggctcaccttcgggtggcacagagctgagatactgggagctctgctctcaatcctatgcatctgggtggtgacaggcgttttagtctaccttgcctgtgaacggctgctgtaccccgactaccagattcaggccacagttatgatcatcgtgtcctcgtgtgccgtggccgcaaacatagtcttaactgtggtgttgcaccagcggtgcctgggccataaccacaaagaggttcaggctaatgctagcgtcagggctgctttcgttcacgctctgggggacctctttcagagcatctccgtgttgattagtgcacttatcatatattttaaacccgaatataaaattgcggaccctatttgcacgttcatcttttctattctagttcttgcttccacaattactatcctgaaagactttagtatactgctcatggagggcgttcccaagagtttgaactactccggcgtgaaagaactgatcttagctgttgatggcgtcctgtccgtgcatagcctgcacatttggtcactaacaatgaatcaggtgattctgagtgcacacgtagctactgctgcatcaagggatagccaggttgtccggcgcgaaattgccaaagccctgtcgaaatcttttacaatgcattctctgaccatccagatggagtcccctgtagaccaggaccccgactgtctcttttgcgaagatccgtgcgattag

SEQ ID NO: 68546 - DNA, 963 bp, Artificial Sequence
  derived and/or modified sequence
atgtaccattgtcactctggctccaagcctacagagaagggagcgaatgagtatgcttatgcgaaatggaagttatgctctgcatcggctatttgtttcatttttatgatcgcagaggtagtgggcggtcatattgcgggaagccttgctgtagtgacagacgccgctcacctgttgatagatcttacatctttccttttatctctatttagtctgtggttgagtagtaagccgccatcaaagcggctcacgtttggctggcatagagcagaaatactgggggctctcctgtcaatcctctgcatttgggtcgtgaccggagtactggtgtatttagcctgcgaaagactgttatatccggattatcagatacaggccaccgtgatgatcattgtttcttcctgtgccgtggcggctaatattgtgctcactgtggtattgcaccagcgttgccttggacacaatcataaagaggtacaggctaacgcatcggtccgcgcagctttcgtacacgccctaggcgatctctttcaaagtatatccgtgttgataagcgccctgattatctatttcaagccagagtacaagattgcagatccaatttgcaccttcatattctccatcctggtgctggccagcacaatcactatcttgaaggatttttctatactgcttatggagggggttcccaagtctctgaactacagcggcgtcaaagagctaattttagccgtggacggtgttctgtccgtgcatagcctacacatctggtctttaactatgaatcaggtgattctttcagcccacgtggccactgcggcttctagggatagccaggtcgtgaggagggaaattgccaaggccttgtctaagagcttcaccatgcacagcctaacaatccaaatggaatcaccagtcgatcaggaccccgactgtcttttctgtgaagacccttgtgattag

SEQ ID NO: 68547 - DNA, 963 bp, Artificial Sequence
  derived and/or modified sequence
atgtaccactgccacagcggcagcaagcccaccgagaagggcgccaacgagtacgcctacgccaagtggaagctgtgcagcgccagcgccatctgcttcatcttcatgatcgccgaggtggtgggcggccacatcgccggcagcctggccgtggtgaccgacgccgcccacctgctgatcgacctgaccagcttcctgctgagcctgttcagcctgtggctgagcagcaagccccccagcaagagactgaccttcggctggcacagagccgagatcctgggcgccctgctgagcatcctgtgcatctgggtggtgaccggcgtgctggtgtacctggcctgcgagagactgctgtaccccgactaccagatccaggccaccgtgatgatcatcgtgagcagctgcgccgtggccgccaacatcgtgctgaccgtggtgctgcaccagagatgcctgggccacaaccacaaggaggtgcaggccaacgccagcgtgagagccgccttcgtgcacgccctgggcgacctgttccagagcatcagcgtgctgatcagcgccctgatcatctacttcaagcccgagtacaagatcgccgaccccatctgcaccttcatcttcagcatcctggtgctggccagcaccatcaccatcctgaaggacttcagcatcctgctgatggagggcgtgcccaagagcctgaactacagcggcgtgaaggagctgatcctggccgtggacggcgtgctgagcgtgcacagcctgcacatctggagcctgaccatgaaccaggtgatcctgagcgcccacgtggccaccgccgccagcagagacagccaggtggtgagaagagagatcgccaaggccctgagcaagagcttcaccatgcacagcctgaccatccagatggagagccccgtggaccaggaccccgactgcctgttctgcgaggacccctgcgactag

SEQ ID NO: 68548 - protein, 604 aa, Artificial Sequence
  derived and/or modified sequence
MMKSQGLVSFKDVAVDFTQEEWQQLDPSQRTLYRDVMLENYSHLVSMGYPVSKPDVISKLEQGEEPWIIKGDISNWIYPDEYQADGRQDRKSNLHNSQSCILGTVSFHHKILKGVTRDGSLCSILKVCQGDGQLQRFLENQDKLFRQVTFVNSKTVTEASGHKYNPLGKIFQECIETDISIQRFHKYDAFKKNLKPNIDLPSCYKSNSRKKPDQSFGGGKSSSQSEPNSNLEKIHNGVIPFDDNQCGNVFRNTQSLIQYQNVETKEKSCVCVTCGKAFAKKSQLIVHQRIHTGKKPYDCGACGKAFSEKFHLVVHQRTHTGEKPYDCSECGKAFSQKSSLIIHQRVHTGEKPYECSECGKAFSQKSPLIIHQRIHTGEKPYECRECGKAFSQKSQLIIHHRAHTGEKPYECTECGKAFCEKSHLIIHKRIHTGEKPYKCAQCEEAFSRKTELITHQLVHTGEKPYECTECGKTFSRKSQLIIHQRTHTGEKPYKCSECGKAFCQKSHLIGHQRIHTGEKPYICTECGKAFSQKSHLPGHQRIHTGEKPYICAECGKAFSQKSDLVLHQRIHTGERPYQCAICGKAFIQKSQLTVHQRIHTVVKS

SEQ ID NO: 68549 - protein, 604 aa, Artificial Sequence [sequence omitted]

SEQ ID NO: 68550 - protein, 568 aa, Artificial Sequence
  derived and/or modified sequence
MLENYSHLVSMGYPVSKPDVISKLEQGEEPWIIKGDISNWIYPDEYQADGRQDRKSNLHNSQSCILGTVSFHHKILKGVTRDGSLCSILKVCQGDGQLQRFLENQDKLFRQVTFVNSKTVTEASGHKYNPLGKIFQECIETDISIQRFHKYDAFKKNLKPNIDLPSCYKSNSRKKPDQSFGGGKSSSQSEPNSNLEKIHNGVIPFDDNQCGNVFRNTQSLIQYQNVETKEKSCVCVTCGKAFAKKSQLIVHQRIHTGKKPYDCGACGKAFSEKFHLVVHQRTHTGEKPYDCSECGKAFSQKSSLIIHQRVHTGEKPYECSECGKAFSQKSPLIIHQRIHTGEKPYECRECGKAFSQKSQLIIHHRAHTGEKPYECTECGKAFCEKSHLIIHKRIHTGEKPYKCAQCEEAFSRKTELITHQLVHTGEKPYECTECGKTFSRKSQLIIHQRTHTGEKPYKCSECGKAFCQKSHLIGHQRIHTGEKPYICTECGKAFSQKSHLPGHQRIHTGEKPYICAECGKAFSQKSDLVLHQRIHTGERPYQCAICGKAFIQKSQLTVHQRIHTVVKS

SEQ ID NO: 68551 - protein, 620 aa, Artificial Sequence
  derived and/or modified sequence
MVPAETSSSGLLEEQKMMKSQGLVSFKDVAVDFTQEEWQQLDPSQRTLYRDVMLENYSHLVSMGYPVSKPDVISKLEQGEEPWIIKGDISNWIYPDEYQADGRQDRKSNLHNSQSCILGTVSFHHKILKGVTRDGSLCSILKVCQGDGQLQRFLENQDKLFRQVTFVNSKTVTEASGHKYNPLGKIFQECIETDISIQRFHKYDAFKKNLKPNIDLPSCYKSNSRKKPDQSFGGGKSSSQSEPNSNLEKIHNGVIPFDDNQCGNVFRNTQSLIQYQNVETKEKSCVCVTCGKAFAKKSQLIVHQRIHTGKKPYDCGACGKAFSEKFHLVVHQRTHTGEKPYDCSECGKAFSQKSSLIIHQRVHTGEKPYECSECGKAFSQKSPLIIHQRIHTGEKPYECRECGKAFSQKSQLIIHHRAHTGEKPYECTECGKAFCEKSHLIIHKRIHTGEKPYKCAQCEEAFSRKTELITHQLVHTGEKPYECTECGKTFSRKSQLIIHQRTHTGEKPYKCSECGKAFCQKSHLIGHQRIHTGEKPYICTECGKAFSQKSHLPGHQRIHTGEKPYICAECGKAFSQKSDLVLHQRIHTGERPYQCAICGKAFIQKSQLTVHQRIHTVVKS

SEQ ID NO: 68552 - DNA, 3282 bp, Artificial Sequence
  derived and/or modified sequence
agtacgaagacgaccgggctctcaagatggcggccccatgcggaaacagctccagggagcagccatgttgcttcctgaacaaagcctctgaagatgcggaacgggcaaaaccgcccagtacggaacggcgcagcctcgggagcccggtgtggtgctcgcggacaggaagcaggagagtttgccaatagggatgtgacagcggttcccattaagcggtgatggtggttttgggacctgataatcgagctgggagtcagaggcgggatgtgtgcggtgaaggatgttttgatacccccatataaaataatctgtctgtcatgggagcccccacgtcctctgaaatagttcagctctgtctgcatgacttgtcctgggactgaggaaaatttaccagtcatctggccttttggaagagcaaaaaatgatgaagtcccaggggttagtatcattcaaggatgtggctgtggatttcacccaggaggagtggcagcaacttgacccttctcagaggaccctgtacagggatgtgatgctggagaactacagccacctggtctcaatggggtatccagtttccaaaccagatgtcatctccaagttggaacaaggagaagagccatggatcataaagggagacatatcaaattggatctatccagatgaatatcaggcagatgggagacaagacaggaagagtaaccttcacaactcccagtcatgtattttggggacagtttccttccatcataagatactgaaaggagtcacaagggatggttcattgtgctccattttaaaagtctgtcaaggtgatggtcagctgcagagatttctagagaatcaagacaaactcttcaggcaggtcacatttgttaacagcaaaacagtgactgaggcatcagggcataaatataatccactggggaaaatatttcaagagtgcatagaaacagatatatcaatacagagattccataaatatgatgcttttaaaaagaacttaaaaccaaatattgacctaccgagttgttataagagcaattcaagaaaaaaacctgatcagagttttggaggtggaaaatcatctagccagagtgagcccaattctaatcttgagaagattcacaatggagtaataccttttgatgataatcagtgtggaaacgtttttagaaatacacaatcccttattcaatatcagaatgtggaaactaaagagaaaagctgtgtatgtgttacatgtggaaaagcctttgctaagaagtcacaactcattgtacatcaaagaattcatactggaaagaaaccatatgattgtggtgcatgcggaaaagccttcagtgagaagtttcatcttgttgtacatcagagaactcatactggggagaaaccttatgattgttctgaatgtggaaaagccttctctcagaaatcgtcccttattatacatcagagagttcacactggggaaaaaccctatgaatgtagtgaatgcgggaaagccttctcccagaaatcacccctcattatacatcagagaatacatactggggaaaaaccctatgaatgtagagagtgtgggaaggccttttcccagaagtcacagctgattatacaccacagagctcatactggagagaagccgtatgagtgtaccgaatgtgggaaagccttctgtgagaagtcccacctcattatacataaaagaattcacactggtgagaaaccctacaaatgtgctcaatgtgaggaagccttcagcaggaagacagaactcattacacatcagttagttcatactggggaaaaaccttatgaatgtactgaatgtggaaagacattctcccgcaagtcacagctcatcatacatcagagaacacatactggagaaaaaccctataaatgtagtgaatgtggcaaagccttctgccagaagtcacatctcattggacatcagagaattcacacaggagaaaaaccttatatatgtactgaatgtgggaaagccttctctcagaagtcccaccttccgggacaccagcgaattcatacaggagagaaaccttacatatgtgctgaatgtggaaaggccttttctcagaagtcagaccttgttttacatcagaggattcatactggggaaagaccctatcaatgtgctatatgtgggaaggccttcatccagaagtcacaactaactgtacaccagagaattcacacagtggtaaaatcataatgaactggccacagaaaagccttagtattagctcaagccttaataattactagaaacccaattaatttgataagcttggggacaacatcccaatagataaaaatttttaagggaatttgtttctagtttggtgatgcctaacttttccagcaaagatgatggaaaatagttatataaatgaagaacatttttaatatggcatgtaaagcttttaaagttatgaactcagtgatcagcacagcaagttaagcatacagaatattgtcaagttgcatattccttatactacaaaatgataatcagccattgtgaaactgctaatattagcttgtcataattatggccataaactaatttttctataaaagacgtggaagaaagcttaagtaaacaataaaataaaacctatacactattttaagaaggggcttgagcatgacccctaaagctacatgtaaagttcttgtacaaaaaatggaatgataggttgatcagattcagtaaagttgatctgtatgcattttcccatctcaagcatataagttgacctgcatctctggaaggaccttgagattgatgcattttgagcaggtctcccttttactcttcccaactgggaacttggagctgaaaaacattggcactgaggccagatggccttgggtttaatcctggctcagtgcctcacagattgtgtgactttaggcaaacatacttctcctagctgagtattttttatcagtaagtacaaatacaatgcagagctcattttcagttaatattagtactttttaaatctttactctctatcttgaagcattagatgttaagactaatgtgtaaaaaccacgtctgagcttgcttttccctctggacactctgcttttgattgcctatccctataagtggctcattttactgtcttctgatcctggtggccttatttttgctatgttaaggttgtgttttttaatacttggatttattttcatatacttacataaaccgtggtgattgcacataaagaccctgaaaaaaaaaaaaaa

SEQ ID NO: 68553 - DNA, 1863 bp, Artificial Sequence
  derived and/or modified sequence
atggtgcccgccgagaccagcagcagcggcctgctggaggagcagaagatgatgaagagccagggcctggtgagcttcaaggacgtggccgtggacttcacccaggaggagtggcagcagctggaccccagccagagaaccctgtacagagacgtgatgctggagaactacagccacctggtgagcatgggctaccccgtgagcaagcccgacgtgatcagcaagctggagcagggcgaggagccctggatcatcaagggcgacatcagcaactggatctaccccgacgagtaccaggccgacggcagacaggacagaaagagcaacctgcacaacagccagagctgcatcctgggcaccgtgagcttccaccacaagatcctgaagggcgtgaccagagacggcagcctgtgcagcatcctgaaggtgtgccagggcgacggccagctgcagagattcctggagaaccaggacaagctgttcagacaggtgaccttcgtgaacagcaagaccgtgaccgaggccagcggccacaagtacaaccccctgggcaagatcttccaggagtgcatcgagaccgacatcagcatccagagattccacaagtacgacgccttcaagaagaacctgaagcccaacatcgacctgcccagctgctacaagagcaacagcagaaagaagcccgaccagagcttcggcggcggcaagagcagcagccagagcgagcccaacagcaacctggagaagatccacaacggcgtgatccccttcgacgacaaccagtgcggcaacgtgttcagaaacacccagagcctgatccagtaccagaacgtggagaccaaggagaagagctgcgtgtgcgtgacctgcggcaaggccttcgccaagaagagccagctgatcgtgcaccagagaatccacaccggcaagaagccctacgactgcggcgcctgcggcaaggccttcagcgagaagttccacctggtggtgcaccagagaacccacaccggcgagaagccctacgactgcagcgagtgcggcaaggccttcagccagaagagcagcctgatcatccaccagagagtgcacaccggcgagaagccctacgagtgcagcgagtgcggcaaggccttcagccagaagagccccctgatcatccaccagagaatccacaccggcgagaagccctacgagtgcagagagtgcggcaaggccttcagccagaagagccagctgatcatccaccacagagcccacaccggcgagaagccctacgagtgcaccgagtgcggcaaggccttctgcgagaagagccacctgatcatccacaagagaatccacaccggcgagaagccctacaagtgcgcccagtgcgaggaggccttcagcagaaagaccgagctgatcacccaccagctggtgcacaccggcgagaagccctacgagtgcaccgagtgcggcaagaccttcagcagaaagagccagctgatcatccaccagagaacccacaccggcgagaagccctacaagtgcagcgagtgcggcaaggccttctgccagaagagccacctgatcggccaccagagaatccacaccggcgagaagccctacatctgcaccgagtgcggcaaggccttcagccagaagagccacctgcccggccaccagagaatccacaccggcgagaagccctacatctgcgccgagtgcggcaaggccttcagccagaagagcgacctggtgctgcaccagagaatccacaccggcgagagaccctaccagtgcgccatctgcggcaaggccttcatccagaagagccagctgaccgtgcaccagagaatccacaccgtggtgaagagctag

SEQ ID NO: 68554 - DNA, 1863 bp, Artificial Sequence
  derived and/or modified sequence
atggtgccagcagagacctcttcatctgggcttctcgaagagcagaagatgatgaaatcacaaggattagtttcatttaaggacgtggcagtcgatttcacccaggaggaatggcaacagctggacccctcacagcgcaccctctaccgggatgtgatgctcgagaactactcacacctcgtctcaatgggatatccagttagcaaaccagacgtaattagcaagctcgagcagggagaagagccatggataattaaaggagacatttctaactggatctatccagacgagtatcaggcggatggaaggcaggataggaaatctaacctgcataactctcaatcatgcatccttggaactgtgagcttccatcataaaatattgaaaggcgtgacacgtgacggttccctctgcagcattcttaaggtctgtcagggcgatgggcagctccagcgtttcctggaaaaccaagacaaactgttcagacaagtgacctttgtgaatagcaagactgttacagaggcttctggccataaatacaatcctttggggaagatttttcaggagtgcatagaaaccgacatctccattcagaggtttcataaatacgatgccttcaaaaagaatctgaagcccaatattgacctaccaagttgctacaagtcgaattctaggaagaaacccgatcagtcctttggaggcgggaaaagctcctctcagtctgagccaaactcaaatttggagaaaattcacaatggggtgattccatttgatgataaccagtgcgggaacgtatttaggaacacacagtccctgatacaatatcaaaatgttgaaacaaaagagaagagctgcgtctgtgtgacgtgtggaaaggcatttgccaagaaatcacagcttatcgtccaccagagaatccataccggcaaaaaaccctacgactgtggcgcttgtggtaaagcattcagcgaaaagttccatctagtcgtccaccagcgtactcacaccggcgagaagccatatgactgtagcgagtgcggcaaggcatttagtcagaaaagttctctgattatccaccagcgagtgcatacaggcgagaagccttacgagtgcagcgaatgcggcaaggcttttagtcagaaatcacccttgatcatccaccagagaatccacactggtgagaagccatacgagtgccgcgaatgcgggaaggccttttcccaaaaaagccagcttatcatccaccaccgagcccacactggagaaaagccatacgagtgcacagaatgcgggaaagctttctgtgaaaagtcacacctgatcatccacaagcggattcacactggggagaaaccctacaaatgcgcccagtgcgaggaggcgttcagcaggaagacagaattgattactcaccagttggttcacacaggcgaaaaaccttacgagtgcacagagtgtggaaagacgttcagtaggaaaagccagctaattatccaccagcggacacatacgggggagaagccttacaagtgttccgaatgtggtaaggcattctgccagaaatctcatctgatcgggcaccagaggattcacaccggtgagaaaccatacatctgcaccgaatgtggaaaagcattctcccagaaatcacatctacccgggcaccagcggatccatactggcgagaagccgtacatctgcgcggagtgcggcaaagccttttcccagaaatctgacctcgtactgcaccaacgcattcacacaggcgaaaggccctatcaatgtgccatctgtggtaaagcattcatccagaagagtcagctgacagtgcaccagcggatacacaccgtcgtgaagtcttag

SEQ ID NO: 68555 - DNA, 1863 bp, Artificial Sequence
  derived and/or modified sequence
atggtgcctgctgagaccagcagcagcggcctgctggaggagcagaagatgatgaagagccagggcctggtgtccttcaaggatgtggccgtggacttcacccaggaggagtggcagcagctggaccccagccagaggaccctgtacagagatgtgatgctggagaactacagccacctggtgtccatgggctaccctgtgtccaagccagatgtgatcagcaagctggagcagggcgaggagccctggatcatcaagggggacatcagcaactggatctacccagatgagtaccaggctgatggccggcaggacaggaagagcaacctgcacaacagccagagctgcatcctgggcaccgtgtccttccaccacaagatcctgaagggcgtgaccagagatggcagcctgtgcagcatcctgaaggtgtgccagggagatggccagctgcagcgcttcctggagaaccaggacaagctgttccggcaggtgacctttgtgaacagcaagacagtgacagaggccagcggccacaagtacaaccccctgggcaagatcttccaggagtgcattgaaacagacatcagcatccagcgcttccacaagtatgatgccttcaagaagaacctgaagcccaacatcgacctgcccagctgctacaagagcaacagcaggaagaagccagaccagagctttggaggcggcaagagcagcagccagagcgagcccaacagcaacctggagaagatccacaacggggtcatcccctttgatgacaaccagtgtggaaatgtgttcaggaacacccagagcctcatccagtaccagaatgtggagaccaaggagaagagctgtgtgtgtgtgacctgtgggaaggcctttgccaagaagagccagctgattgtgcaccagaggatccacacaggcaagaagccctatgactgtggggcctgtgggaaggccttcagcgagaagttccacctggtggtgcaccagaggacccacactggagagaagccctatgactgcagtgaatgtgggaaggccttcagccagaagagcagcctcatcatccaccagagggtgcacactggagagaagccctatgagtgcagtgaatgtgggaaggccttcagccagaagagccccctcatcatccaccagaggatccacactggagagaagccctatgagtgcagagaatgtgggaaggccttcagccagaagagccagctgatcatccaccaccgggcccacactggagagaagccctatgagtgcacagaatgtgggaaggccttctgtgagaagagccacctgatcatccacaagaggatccacactggagagaagccctacaagtgtgcccagtgtgaggaggccttcagcaggaagacagagctgatcacccaccagctggtgcacactggagagaagccctatgagtgcacagaatgtgggaagaccttcagcaggaagagccagctgatcatccaccagaggacccacactggagagaagccctacaagtgcagtgaatgtgggaaggccttctgccagaagagccacctgattggccaccagaggatccacactggagagaagccctacatctgcacagaatgtgggaaggccttcagccagaagagccacctgcccggccaccagaggatccacactggagagaagccctacatctgtgctgaatgtgggaaggccttcagccagaagagtgacctggtgctgcaccagaggatccacactggagagcggccctaccagtgtgccatctgtgggaaggccttcatccagaagagccagctgactgtgcaccagaggatccacacagtggtgaagagctag

SEQ ID NO: 68556 - DNA, 1863 bp, Artificial Sequence
  derived and/or modified sequence
atggtgcccgccgagaccagcagcagcggcctgctggaggagcagaaaatgatgaagtcacagggtctcgtgagcttcaaggacgtggccgtagattttacccaggaggagtggcagcagctggacccgagtcagagaacactgtatcgagacgtgatgctcgagaactactctcatctggtgtccatgggatatcccgtctccaaaccagatgtcatctcaaaactcgagcagggggaagagccatggattattaagggtgatatttccaattggatatacccggacgagtaccaggcagatgggaggcaggacagaaagagtaacctgcataatagccaatcctgcattctaggaaccgtctcatttcaccacaagattctgaagggcgtcaccagggacggcagcctgtgcagtattttgaaggtctgccagggtgacgggcaacttcaacgtttcctcgaaaaccaggacaagctgttcagacaggtgacgtttgttaactcaaagacagtcactgaggcctcaggtcacaagtacaatcctctcggtaagatttttcaagaatgcattgagaccgacatctctatacagcggttccacaagtatgacgcctttaaaaaaaaccttaaaccaaacatcgacctgcccagctgctacaaatccaacagccgtaagaagcccgatcagtcttttgggggcgggaagtctagcagtcaaagtgagccgaatagtaacctcgaaaaaatacataacggcgtcataccgttcgacgacaatcagtgtggcaacgtgtttaggaacacacaaagtttgatccaatatcagaacgtcgaaacgaaggagaaatcatgcgtgtgcgtgacatgtggtaaggcctttgcaaaaaaatcacagcttatcgtacatcagcggatccataccgggaaaaaaccgtacgattgtggagcttgcggtaaggctttttcagagaaattccatctcgtggtgcatcagaggactcatacgggcgagaaaccgtacgactgcagtgagtgcggaaaggccttcagtcagaagagtagtcttattatccatcagagagttcataccggagaaaagccatacgagtgtagcgagtgcgggaaagccttctcccagaaaagccccctgatcatacaccagaggattcacacaggggagaaaccatacgagtgccgcgagtgcggtaaagctttttcccagaagtcccaattgattatacaccatcgcgcccatacaggtgaaaagccgtacgagtgcaccgagtgcggcaaggctttttgtgagaagagtcaccttattattcacaaaaggattcacacaggggaaaagccatacaagtgtgcacaatgcgaagaggccttttccagaaagacagagttgattacccaccagctcgtgcacacaggtgaaaaaccctacgagtgcacagagtgcgggaaaacgttcagtaggaagtcacagcttattatccatcaacgcacacacactggagaaaagccgtacaagtgctctgagtgcgggaaggctttctgccagaaaagtcacttgattggccaccagcgaatccacaccggtgaaaagccttacatttgcacagaatgcggcaaagctttcagtcagaagagtcacctgccaggacaccagaggattcacacaggggagaagccttacatatgtgcagagtgcggcaaagcctttagccagaagtctgatttggttctccaccagaggatacataccggggaaagaccatatcagtgcgccatttgcggcaaagctttcattcagaagagtcagctgaccgtgcaccagcgaattcacaccgttgtaaagtcctag

SEQ ID NO: 68557 - DNA, 1863 bp, Artificial Sequence
  derived and/or modified sequence
atggttcccgcagaaacctcatcatccggcttgctggaggaacagaaaatgatgaagtcccagggattagtcagcttcaaagacgttgccgtcgactttacccaggaggaatggcagcagctggatccctcccaaagaaccctatatagagacgtaatgctggagaattactctcacttggtatctatgggatatcccgtgtcgaagcccgatgttatctcaaaattagagcagggagaagaaccctggattattaagggggacatttccaattggatttaccccgacgagtaccaggctgatggccgacaggaccggaaatctaacctgcacaattcccaaagctgtattctggggaccgtttctttccatcacaagattctgaagggcgtgaccagggatggcagtctctgctcaatcctgaaggtctgtcagggggatggccaactacagcggttcctggaaaaccaggacaagctcttccgacaggtaacgttcgtcaactccaagacagtgacagaagcaagtggacacaagtacaatcccctaggaaagatattccaggagtgtatcgagacagacatcagcatacaaaggttccacaagtatgatgctttcaaaaaaaacctaaagccaaatattgaccttccctcctgttataagtccaacagtcgcaagaagccggaccagtccttcggaggcggaaagagctcaagtcagtcagagccgaatagcaacctggagaagatccataatggcgtcattccgttcgatgataatcaatgcgggaacgtgtttcgtaatacccagagcttgattcagtaccagaatgtcgaaacgaaggaaaaatcctgtgtgtgtgtaacctgcggtaaggccttcgctaagaaatctcagctgatcgtgcatcaaaggatacacacaggaaagaaaccatatgattgcggagcatgcggcaaggccttttccgaaaaatttcacctcgttgtgcatcagcggacacacactggtgagaagccctatgactgctctgaatgtgggaaagccttctctcagaaaagctcgcttatcatacatcagagggtccataccggggagaaaccctatgaatgtagcgagtgtggaaaggccttcagtcagaaaagtcctctgattattcatcagcgcattcatacaggggaaaagccctatgaatgccgcgagtgcgggaaagctttttctcagaaatctcagctgatcattcaccaccgagcccatacgggggaaaaaccatacgagtgcactgagtgcggaaaagctttctgtgaaaagtctcacttgattatccacaaacgcatccacacaggcgagaagccatacaaatgtgcacaatgtgaggaggcattctcgagaaaaaccgagctaataacgcatcagttagtgcacacgggtgagaaaccttatgagtgcacagaatgtggcaagaccttcagccgcaagtctcagttaatcattcaccaacgaacacatacaggtgaaaaaccttacaagtgctctgagtgcggtaaagccttttgccagaaatctcacctgattggtcaccaacgaattcacaccggcgagaaaccctatatctgcaccgaatgtggaaaggccttttcacaaaagagtcatctgccaggccaccagcgaattcacactggcgaaaaaccctacatctgcgctgagtgtggaaaagcgttctctcagaagtctgacctagtgctccaccagaggatccataccggtgaaaggccataccaatgcgccatatgcggtaaagcctttatccagaaatcacaactcacagtgcaccagaggattcatacggtggtcaaatcgtag

SEQ ID NO: 68558 - DNA, 3268 bp, Artificial Sequence
  derived and/or modified sequence
agtacgaagacgaccgggctctcaagatggcggccccatgcggaaacagctccagggagcagccatgttgcttcctgaacaaagcctctgaagatgcggaacgggcaaaaccgcccagtacggaacggcgcagcctcgggagcccggtgtggtgctcgcggacaggaagcaggagagtttgccaatagggatgtgacagcggttcccattaagcggtgatggtggttttgggacctgataatcgagctgggagtcagaggcgggatgtgtgcggtgaaggatgttttgatacccccatataaaataatctgtctgtcatgggagcccccacgtcctctgaaatagttcagctctgtctgcatgacttgtcctgggactgaggaaaatttaccagtcatctggccttttggaagagcaaaaaatgatgaagtcccaggggttagtatcattcaaggatgtggctgtggatttcacccaggaggagtggcagcaacttgacccttctcagaggaccctgtacagggatgtgatgctggagaactacagccacctggtctcaatggggtatccagtttccaaaccagatgtcatctccaagttggaacaaggagaagagccatggatcataaagggagacatatcaaattggatctatccagatgaatatcaggcagatgggagacaagacaggaagagtaaccttcacaactcccagtcatgtattttggggacagtttccttccatcataagatactgaaaggagtcacaagggatggttcattgtgctccattttaaaagtctgtcaaggtgatggtcagctgcagagatttctagagaatcaagacaaactcttcaggcaggtcacatttgttaacagcaaaacagtgactgaggcatcagggcataaatataatccactggggaaaatatttcaagagtgcatagaaacagatatatcaatacagagattccataaatatgatgcttttaaaaagaacttaaaaccaaatattgacctaccgagttgttataagagcaattcaagaaaaaaacctgatcagagttttggaggtggaaaatcatctagccagagtgagcccaattctaatcttgagaagattcacaatggagtaataccttttgatgataatcagtgtggaaacgtttttagaaatacacaatcccttattcaatatcagaatgtggaaactaaagagaaaagctgtgtatgtgttacatgtggaaaagcctttgctaagaagtcacaactcattgtacatcaaagaattcatactggaaagaaaccatatgattgtggtgcatgcggaaaagccttcagtgagaagtttcatcttgttgtacatcagagaactcatactggggagaaaccttatgattgttctgaatgtggaaaagccttctctcagaaatcgtcccttattatacatcagagagttcacactggggaaaaaccctatgaatgtagtgaatgcgggaaagccttctcccagaaatcacccctcattatacatcagagaatacatactggggaaaaaccctatgaatgtagagagtgtgggaaggccttttcccagaagtcacagctgattatacaccacagagctcatactggagagaagccgtatgagtgtaccgaatgtgggaaagccttctgtgagaagtcccacctcattatacataaaagaattcacactggtgagaaaccctacaaatgtgctcaatgtgaggaagccttcagcaggaagacagaactcattacacatcagttagttcatactggggaaaaaccttatgaatgtactgaatgtggaaagacattctcccgcaagtcacagctcatcatacatcagagaacacatactggagaaaaaccctataaatgtagtgaatgtggcaaagccttctgccagaagtcacatctcattggacatcagagaattcacacaggagaaaaaccttatatatgtactgaatgtgggaaagccttctctcagaagtcccaccttccgggacaccagcgaattcatacaggagagaaaccttacatatgtgctgaatgtggaaaggccttttctcagaagtcagaccttgttttacatcagaggattcatactggggaaagaccctatcaatgtgctatatgtgggaaggccttcatccagaagtcacaactaactgtacaccagagaattcacacagtggtaaaatcataatgaactggccacagaaaagccttagtattagctcaagccttaataattactagaaacccaattaatttgataagcttggggacaacatcccaatagataaaaatttttaagggaatttgtttctagtttggtgatgcctaacttttccagcaaagatgatggaaaatagttatataaatgaagaacatttttaatatggcatgtaaagcttttaaagttatgaactcagtgatcagcacagcaagttaagcatacagaatattgtcaagttgcatattccttatactacaaaatgataatcagccattgtgaaactgctaatattagcttgtcataattatggccataaactaatttttctataaaagacgtggaagaaagcttaagtaaacaataaaataaaacctatacactattttaagaaggggcttgagcatgacccctaaagctacatgtaaagttcttgtacaaaaaatggaatgataggttgatcagattcagtaaagttgatctgtatgcattttcccatctcaagcatataagttgacctgcatctctggaaggaccttgagattgatgcattttgagcaggtctcccttttactcttcccaactgggaacttggagctgaaaaacattggcactgaggccagatggccttgggtttaatcctggctcagtgcctcacagattgtgtgactttaggcaaacatacttctcctagctgagtattttttatcagtaagtacaaatacaatgcagagctcattttcagttaatattagtactttttaaatctttactctctatcttgaagcattagatgttaagactaatgtgtaaaaaccacgtctgagcttgcttttccctctggacactctgcttttgattgcctatccctataagtggctcattttactgtcttctgatcctggtggccttatttttgctatgttaaggttgtgttttttaatacttggatttattttcatatacttacataaaccgtggtgattgcacataaagaccctg

SEQ ID NO: 68559 - DNA, 3256 bp, Artificial Sequence
  derived and/or modified sequence
gaagacgaccgggctctcaagatggcggccccatgcggaaacagctccagggagcagccatgttgcttcctgaacaaagcctctgaagatgcggaacgggcaaaaccgcccagtacggaacggcgcagcctcgggagcccggtgtggtgctcgcggacaggaagcaggagagtttgccaatagggatgtgacagcggttcccattaagcggtgatggtggttttgggacctgataatcgagctgggagtcagaggcgggatgtgtgcggtgaaggatgttttgatacccccatataaaataatctgtctgtcatgggagcccccacgtcctctgaaatagttcagctctgtctgcatgacttgtcctgggactgaggaaaatttaccagtcatctggccttttggaagagcaaaaaatgatgaagtcccaggggttagtatcattcaaggatgtggctgtggatttcacccaggaggagtggcagcaacttgacccttctcagaggaccctgtacagggatgtgatgctggagaactacagccacctggtctcaatggggtatccagtttccaaaccagatgtcatctccaagttggaacaaggagaagagccatggatcataaagggagacatatcaaattggatctatccagatgaatatcaggcagatgggagacaagggaagaagagtaaccttcacaactcccagtcatgtattttggggacagtttccttccatcataagatactgaaaggagtcacaagggatggttcattgtgctccattttaaaagtctgtcaaggtgatggtcagctgcagagatttctagagaatcaagacaaactcttcaggcaggtcacatttgttaacagcaaaacagtgactgaggcatcagggcataaatataatccactggggaaaatatttcaagagtgcatagaaacagatatatcaatacagagattccataaatatgatgcttttaaaaagaacttaaaaccaaatattgacctaccgagttgttataagagcaattcaagaaaaaaacctgatcagagttttggaggtggaaaatcatctagccagagtgagcccaattctaatcttgagaagattcacaatggagtaataccttttgatgataatcagtgtggaaacgtttttagaaatacacaatcccttattcaatatcagaatgtggaaactaaagagaaaagctgtgtatgtgttacatgtggaaaagcctttgctaagaagtcacaactcattgtacatcaaagaattcatactggaaagaaaccatatgattgtggtgcatgcggaaaagccttcagtgagaagtttcatcttgttgtacatcagagaactcatactggggagaaaccttatgattgttctgaatgtggaaaagccttctctcagaaatcgtcccttattatacatcagagagttcacactggggaaaaaccctatgaatgtagtgaatgcgggaaagccttctcccagaaatcacccctcattatacatcagagaatacatactggggaaaaaccctatgaatgtagagagtgtgggaaggccttttcccagaagtcacagctgattatacaccacagagctcatactggagagaagccgtatgagtgtaccgaatgtgggaaagccttctgtgagaagtcccacctcattatacataaaagaattcacactggtgagaaaccctacaaatgtgctcaatgtgaggaagccttcagcaggaagacagaactcattacacatcagttagttcatactggggaaaaaccttatgaatgtactgaatgtggaaagacattctcccgcaagtcacagctcatcatacatcagagaacacatactggagaaaaaccctataaatgtagtgaatgtggcaaagccttctgccagaagtcacatctcattggacatcagagaattcacacaggagaaaaaccttatatatgtactgaatgtgggaaagccttctctcagaagtcccaccttccgggacaccagcgaattcatacaggagagaaaccttacatatgtgctgaatgtggaaaggccttttctcagaagtcagaccttgttttacatcagaggattcatactggggaaagaccctatcaatgtgctatatgtgggaaggccttcatccagaagtcacaactaactgtacaccagagaattcacacagtggtaaaatcataatgaactggccacagaaaagccttagtattagctcaagccttaataattactagaaacccaattaatttgataagcttggggacaacatcccaatagataaaaatttttaagggaatttgtttctagtttggtgatgcctaacttttccagcaaagatgatggaaaatagttatataaatgaagaacatttttaatatggcatgtaaagcttttaaagttatgaactcagtgatcagcacagcaagttaagcatacagaatattgtcaagttgcatattccttatactacaaaatgataatcagccattgtgaaactgctaatattagcttgtcataattatggccataaactaatttttctataaaagacgtggaagaaagcttaagtaaacaataaaataaaacctatacactattttaagaaggggcttgagcatgacccctaaagctacatgtaaagttcttgtacaaaaaatggaatgataggttgatcagattcagtaaagttgatctgtatgcattttcccatctcaagcatataagttgacctgcatctctggaaggaccttgagattgatgcattttgagcaggtctcccttttactcttcccaactgggaacttggagctgaaaaacattggcactgaggccagatggccttgggtttaatcctggctcagtgcctcacagattgtgtgactttaggcaaacatacttctcctagctgagtattttttatcagtaagtacaaatacaatgcagagctcattttcagttaatattagtactttttaaatctttactctctatcttgaagcattagatgttaagactaatgtgtaaaaaccacgtctgagcttgcttttccctctggacactctgcttttgattgcctatccctataagtggctcattttactgtcttctgatcctggtggccttatttttgctatgttaaggttgtgttttttaatacttggatttattttcatatacttacataaaccgtggtgattgcacataaa

SEQ ID NO: 68560 - DNA, 3323 bp, Artificial Sequence
  derived and/or modified sequence
agtacgaagacgaccgggctctcaagatggcggccccatgcggaaacagctccagggagcagccatgttgcttcctgaacaaagcctctgaagatgcggaacgggcaaaaccgcccagtacggaacggcgcagcctcgggagcccggtgtggtgctcgcggacaggaagcaggagagtttgccaatagggatgtgacagcggttcccattaagcggtgatggtggttttgggacctgataatcgagctgggagtcagaggcgggatgtgtgcggtgaaggatgttttgatacccccatataaaataatctgtctgtcatgggagcccccacgtcctctgaaatagttcagctctgtctgcatgacttgtcctgggactgaggaaaatttaccaggtacaagaggagtaaagaatgatccctcctccacatggtgcctgctgagacttcttcatctggccttttggaagagcaaaaaatgatgaagtcccaggggttagtatcattcaaggatgtggctgtggatttcacccaggaggagtggcagcaacttgacccttctcagaggaccctgtacagggatgtgatgctggagaactacagccacctggtctcaatggggtatccagtttccaaaccagatgtcatctccaagttggaacaaggagaagagccatggatcataaagggagacatatcaaattggatctatccagatgaatatcaggcagatgggagacaagacaggaagagtaaccttcacaactcccagtcatgtattttggggacagtttccttccatcataagatactgaaaggagtcacaagggatggttcattgtgctccattttaaaagtctgtcaaggtgatggtcagctgcagagatttctagagaatcaagacaaactcttcaggcaggtcacatttgttaacagcaaaacagtgactgaggcatcagggcataaatataatccactggggaaaatatttcaagagtgcatagaaacagatatatcaatacagagattccataaatatgatgcttttaaaaagaacttaaaaccaaatattgacctaccgagttgttataagagcaattcaagaaaaaaacctgatcagagttttggaggtggaaaatcatctagccagagtgagcccaattctaatcttgagaagattcacaatggagtaataccttttgatgataatcagtgtggaaacgtttttagaaatacacaatcccttattcaatatcagaatgtggaaactaaagagaaaagctgtgtatgtgttacatgtggaaaagcctttgctaagaagtcacaactcattgtacatcaaagaattcatactggaaagaaaccatatgattgtggtgcatgcggaaaagccttcagtgagaagtttcatcttgttgtacatcagagaactcatactggggagaaaccttatgattgttctgaatgtggaaaagccttctctcagaaatcgtcccttattatacatcagagagttcacactggggaaaaaccctatgaatgtagtgaatgcgggaaagccttctcccagaaatcacccctcattatacatcagagaatacatactggggaaaaaccctatgaatgtagagagtgtgggaaggccttttcccagaagtcacagctgattatacaccacagagctcatactggagagaagccgtatgagtgtaccgaatgtgggaaagccttctgtgagaagtcccacctcattatacataaaagaattcacactggtgagaaaccctacaaatgtgctcaatgtgaggaagccttcagcaggaagacagaactcattacacatcagttagttcatactggggaaaaaccttatgaatgtactgaatgtggaaagacattctcccgcaagtcacagctcatcatacatcagagaacacatactggagaaaaaccctataaatgtagtgaatgtggcaaagccttctgccagaagtcacatctcattggacatcagagaattcacacaggagaaaaaccttatatatgtactgaatgtgggaaagccttctctcagaagtcccaccttccgggacaccagcgaattcatacaggagagaaaccttacatatgtgctgaatgtggaaaggccttttctcagaagtcagaccttgttttacatcagaggattcatactggggaaagaccctatcaatgtgctatatgtgggaaggccttcatccagaagtcacaactaactgtacaccagagaattcacacagtggtaaaatcataatgaactggccacagaaaagccttagtattagctcaagccttaataattactagaaacccaattaatttgataagcttggggacaacatcccaatagataaaaatttttaagggaatttgtttctagtttggtgatgcctaacttttccagcaaagatgatggaaaatagttatataaatgaagaacatttttaatatggcatgtaaagcttttaaagttatgaactcagtgatcagcacagcaagttaagcatacagaatattgtcaagttgcatattccttatactacaaaatgataatcagccattgtgaaactgctaatattagcttgtcataattatggccataaactaatttttctataaaagacgtggaagaaagcttaagtaaacaataaaataaaacctatacactattttaagaaggggcttgagcatgacccctaaagctacatgtaaagttcttgtacaaaaaatggaatgataggttgatcagattcagtaaagttgatctgtatgcattttcccatctcaagcatataagttgacctgcatctctggaaggaccttgagattgatgcattttgagcaggtctcccttttactcttcccaactgggaacttggagctgaaaaacattggcactgaggccagatggccttgggtttaatcctggctcagtgcctcacagattgtgtgactttaggcaaacatacttctcctagctgagtattttttatcagtaagtacaaatacaatgcagagctcattttcagttaatattagtactttttaaatctttactctctatcttgaagcattagatgttaagactaatgtgtaaaaaccacgtctgagcttgcttttccctctggacactctgcttttgattgcctatccctataagtggctcattttactgtcttctgatcctggtggccttatttttgctatgttaaggttgtgttttttaatacttggatttattttcatatacttacataaaccgtggtgattgcacataaagaccctg

SEQ ID NO: 68561 - DNA, 444 bp, Artificial Sequence
  derived and/or modified sequence
atggctgatgaactttctgagaagcaggtttatgacgctcacaccaaggaaattgatctcgtgaatcgcgaccccaagcacctcaatgacgacgttgttaaaatcgactttgaggatgtgatagccgaaccagagggcacccacagtttcgatggcatatggaaagcttcgtttaccacatttaccgtaaccaaatactggttctatcgattactgtccgcactgtttggaattccgatggcattaatctgggggatatattttgccattctcagctttcttcacatatgggctgtcgtcccttgcatcaagagtttccttatagagatccagtgcatttcccgtgtgtactcaatttacgtccatactgtgtgtgaccccctgttcgaggccgtggggaaaatcttctccaacgtcagaatcaatctgcagaaggaaatttag

SEQ ID NO: 68562 - DNA, 444 bp, Artificial Sequence
  derived and/or modified sequence
atggcggacgaactctccgaaaagcaggtttacgatgcccacaccaaggagattgacctagtcaatcgcgatcctaaacatcttaacgatgacgtcgtcaaaatcgacttcgaggatgttattgccgagccagagggaacacacagcttcgacggcatatggaaggcaagtttcacaactttcacagtcactaagtactggttctatagactgctgtcagccctgtttggcatcccaatggcccttatttggggcatttatttcgcaatcctgagctttcttcacatctgggccgtcgtgccatgtatcaagtctttcttaatcgagatacagtgtatctcccgcgtgtattctatctacgttcatacggtgtgcgatcccctcttcgaggcagtcggcaaaattttttcaaacgtaaggattaatctgcagaaagagatctag

SEQ ID NO: 68563 - DNA, 444 bp, Artificial Sequence
  derived and/or modified sequence
atggctgatgagctgtctgagaagcaggtgtatgatgcccacaccaaggagattgacctggtgaacagagaccccaagcacctgaatgatgatgtggtgaagattgactttgaagatgtgattgctgagcctgagggcacccacagctttgatggcatctggaaggccagcttcaccaccttcaccgtgaccaagtactggttctaccgcctgctgagcgccctgtttggcatccccatggccctgatctggggcatctactttgccatcctgtccttcctgcacatctgggccgtggtgccctgcatcaagagcttcctgattgagatccagtgcatcagccgggtgtacagcatctacgtgcacacagtgtgtgaccccctgtttgaagctgtgggcaagatcttcagcaatgtgcgcatcaacctgcagaaggagatctag

SEQ ID NO: 68564 - DNA, 444 bp, Artificial Sequence
  derived and/or modified sequence
atggccgacgagctgagcgagaagcaggtgtacgacgcccacaccaaggagattgacctggtgaatcgagacccaaagcacctgaacgatgacgtcgtaaaaatcgactttgaggatgtgattgcagagccagaaggcacgcatagttttgatgggatttggaaagccagctttacaacatttaccgtgacaaagtattggttctataggctactttccgcgttgtttggcatcccaatggcactgatctggggcatttactttgcaattcttagcttcctgcatatctgggctgtggtaccctgcattaagagcttcctcattgaaatccagtgcatttctagggtgtatagcatatatgtgcacacggtgtgtgaccccttatttgaagccgtgggcaaaattttctccaatgtgcgaattaatctccagaaggaaatttag

SEQ ID NO: 68565 - DNA, 444 bp, Artificial Sequence
  derived and/or modified sequence
atggccgacgagctgagcgagaagcaggtgtacgacgcccacaccaaggagatcgatctggtcaacagggatcctaagcacctgaatgatgacgtggtgaagatcgatttcgaggacgttatcgccgagccagaaggaacacattcattcgatggaatatggaaagcctcttttacaactttcactgtcaccaagtattggttttacagactactgtctgccctgttcggcatccctatggctcttatatgggggatatactttgccatcctttccttcctacacatctgggctgtggttccatgtatcaagagtttcctgatcgaaatccagtgcatctctcgcgtgtacagcatctatgttcacactgtgtgtgatcctctttttgaagctgtgggcaagattttctccaacgtaagaatcaatctgcagaaagagatatag

SEQ ID NO: 68566 - DNA, 444 bp, Artificial Sequence
  derived and/or modified sequence
atggccgacgaactttctgagaaacaggtctacgacgcccacacaaaggagatcgatctcgtcaaccgggatccaaaacatctgaatgacgatgtggtgaagatagattttgaagacgtaatcgccgagccagagggaacccacagtttcgacgggatatggaaggcctctttcacgactttcacggtgaccaagtactggttctatcgccttctgtctgctctgttcggcatccctatggctctgatctggggtatttactttgccatccttagtttcctgcacatctgggccgtggtaccttgtatcaagtctttcctgattgaaatccagtgcatctcgcgggtgtatagcatctatgtgcacaccgtgtgcgaccctctgtttgaggcggttggaaagatcttctcaaatgtgaggatcaacctgcagaaagaaatatag

SEQ ID NO: 68567 - DNA, 444 bp, Artificial Sequence
  derived and/or modified sequence
atggcagatgagctgagcgaaaaacaggtttacgacgcacatactaaggagattgatctggttaacagggatcctaagcacctcaatgacgacgttgtcaaaattgatttcgaggacgtgatcgcggagccggagggaacacactctttcgacggcatttggaaagcgagttttaccactttcacagtcactaaatactggttttacagactcctgtcggcactgtttgggataccaatggcgcttatttggggaatttatttcgcaattctgtcatttcttcacatctgggccgttgtgccatgcattaaatcatttttgatcgagatccagtgtattagcagagtgtactccatttatgtccataccgtgtgtgaccctcttttcgaggccgtgggaaagatcttctccaacgtgcgcatcaacttacagaaggagatttag

SEQ ID NO: 68568 - DNA, 444 bp, Artificial Sequence
  derived and/or modified sequence
atggccgacgagctgagcgagaagcaggtgtacgacgcccacaccaaggagatcgacctggtgaacagagaccccaagcacctgaacgacgacgtggtgaagatcgacttcgaggacgtgatcgccgagcccgagggcacccacagcttcgacggcatctggaaggccagcttcaccaccttcaccgtgaccaagtactggttctacagactgctgagcgccctgttcggcatccccatggccctgatctggggcatctacttcgccatcctgagcttcctgcacatctgggccgtggtgccctgcatcaagagcttcctgatcgagatccagtgcatcagcagagtgtacagcatctacgtgcacaccgtgtgcgaccccctgttcgaggccgtgggcaagatcttcagcaacgtgagaatcaacctgcagaaggagatctag

SEQ ID NO: 68569 - DNA, 1374 bp, Artificial Sequence
  derived and/or modified sequence
atgacagtgtggacaggagacgtggtgggaggcggcaccgactccaatatcttcatgacattgtatgggatcaatggatccacagaagaaatgcaactcgataaaaaaaaagccaggttcgaaagagaacagaacgatacttttattatggagattctcgatatagccccattcaccaaaatgcggatcagaattgacggccttggcagtaggccagagtggttcctcgagagaatcttgttgaagaacatgaacacaggggacctgactatgttctactacggcgactggctcagtcaaaggaaggggaagaaaacgcttgtctgcgaaatgtgcgctgttattgacgaggaagaaatgatggaatggacaagttacaccgtggccgtgaaaacttccgatatactaggagcagggactgacgccaatgttttcattatcatttttggagagaatggcgattcgggtacgctggccttgaaacagagcgctaattggaataagttcgaacggaacaataccgacaccttcaacttccctgacatgctgtctctaggccacctttgcaagctacgtgtttggcatgataacaagggcatttttccaggatggcacctcagctatgtcgatgtgaaggacaactccagggatgagaccttccacttccagtgtgactgctggttgtccaagagcgagggggatggccagaccgtccgtgattttgcctgtgccaataacaaaatctgcgacgagcttgaagaaacaacctatgagatcgtcatcgagaccgggaacggaggagagacccgggaaaatgtgtggctgatcctggaaggcaggaagaataggtccaaggagttcctgatggaaaactctagcagacaacgagctttcagaaagggtacaaccgatacctttgagttcgactccatctacctcggcgacatcgcgtctctttgcgtcgggcacctagcccgggaggatcgcttcatccccaagagggagttggcttggcatgtgaagaccatcacaattacagagatggagtatgggaacgtttatttcttcaactgcgactgtttgattcccctgaaaagaaaaaggaagtacttcaaggtcttcgaggtgactaagactaccgaaagttttgccagcaaagtacagtcccttgttccagtcaaatatgaagtaattgtgactaccggctacgaaccaggcgctgggacagatgcaaacgtatttgtgacgatcttcggggccaacggggacacaggcaagagagagctcaagcaaaaaatgcggaacctcttcgaacgcggcagcaccgatcggttcttcctggaaaccttagaactgggcgagctgagaaaatag

SEQ ID NO: 68570 - DNA, 1374 bp, Artificial Sequence
  derived and/or modified sequence
atgacagtgtggacaggagatgtggtgggcggcggcacagacagcaacatcttcatgaccctgtatggcatcaatggcagcacagaggagatgcagctggacaagaagaaggccaggtttgagcgggagcagaatgacaccttcatcatggagatcctggacatcgcccccttcaccaagatgaggatcagaattgatggcctgggcagcaggcctgagtggttcctggagcgcatcctgctgaagaacatgaacacaggagacctgaccatgttctactacggggactggctgagccagaggaagggcaagaagaccctggtgtgtgagatgtgtgctgtgattgatgaggaggagatgatggagtggaccagctacacagtggccgtgaagaccagtgacatcctgggcgccggcacagatgccaacgtgttcatcatcatctttggagaaaatggagacagcggcaccctggccctgaagcagagcgccaactggaacaagtttgaaagaaacaacacagacaccttcaacttcccagacatgctgagcctgggccacctgtgcaagctgcgggtgtggcatgacaacaagggcatcttccctggctggcacctgtcctatgtggatgtgaaggacaacagcagagatgagaccttccacttccagtgtgactgctggctgagcaagtcagaaggagatggccagacagtgcgggactttgcctgtgccaacaacaagatctgtgatgagctggaggagaccacctatgaaattgtgattgaaacaggaaatggaggagagaccagagaaaatgtgtggctgatcctggagggcaggaagaacagaagcaaggagttcctgatggagaacagcagccggcagagggccttcaggaagggcaccacagacacctttgaatttgacagcatctacctgggggacatcgccagcctgtgtgtgggccacctggccagagaagatcgcttcatccccaagcgggagctggcctggcacgtgaagaccatcaccatcacagagatggagtatggaaatgtgtacttcttcaactgtgactgcctgatccccctgaagaggaagaggaagtacttcaaggtgtttgaggtgaccaagaccacagagagctttgccagcaaggtgcagagcctggtgcctgtgaagtatgaagtcatcgtgaccaccggctatgagcctggagctggaacagatgccaacgtgtttgtgaccatctttggagccaatggagacaccgggaagcgggagctgaagcagaagatgaggaacctgtttgagcggggcagcacagaccgcttcttcctggagaccctggagctgggggagctgaggaagtag

SEQ ID NO: 68571 - DNA, 1374 bp, Artificial Sequence
  derived and/or modified sequence
atgaccgtgtggaccggcgacgtggtgggcggcggcaccgacagcaatatttttatgaccctatatgggataaacgggtctaccgaggaaatgcagctggataagaaaaaagctaggtttgagcgcgaacagaacgacactttcatcatggagatactagatatcgcgcctttcactaaaatgcggatccggattgatggcctgggaagcagacctgagtggttccttgaaagaatcctgctaaagaacatgaacaccggcgaccttacaatgttttattacggtgactggctgtcacagcgcaaaggcaaaaagaccctggtgtgtgaaatgtgtgccgtgattgacgaggaggagatgatggagtggacatcatatacagtcgccgtgaagacttcagatatcctgggtgctgggactgacgctaacgtctttataatcatttttggcgaaaatggcgatagtggcactctggcgcttaagcagtctgcaaactggaataaattcgaaaggaataacaccgacacctttaattttcctgatatgctgtctctcggccacctgtgcaagttgagagtttggcacgacaacaaaggcatttttcccgggtggcacttgagctacgtggatgtaaaggacaatagcagagatgagacattccattttcagtgtgattgctggctgtcgaagagtgagggagatggccagacagtacgcgactttgcctgcgccaacaataaaatctgtgacgaactggaagagaccacgtacgaaatcgtaattgagaccggcaatgggggggaaaccagagaaaatgtctggttaatcctcgaaggcagaaagaacagaagcaaggagttcctgatggagaacagcagtcgccagagagcattcaggaaagggacgacagacacattcgagtttgactctatatacctgggggatattgcgtcactgtgcgtgggtcacctcgcaagggaggaccgttttattcctaaacgggagctcgcctggcacgtaaaaaccatcaccatcaccgagatggagtacggtaacgtctacttctttaactgtgattgtcttattcctctaaaacggaagaggaagtacttcaaggtgtttgaggtaactaaaactactgaaagtttcgcctccaaggtgcagtcgctggtacccgtaaagtacgaggtgatcgttaccacgggatacgagcctggcgccggcaccgacgcaaacgtgttcgtgacaatcttcggcgccaacggtgacaccggaaaacgcgaactgaaacagaagatgagaaacctattcgagcgggggagcacagacaggttcttccttgagacactggagttaggagaactcaggaaatag

SEQ ID NO: 68572 - DNA, 1374 bp, Artificial Sequence
  derived and/or modified sequence
atgaccgtgtggacaggcgacgttgtgggcggtggaaccgattctaatatcttcatgacattgtatggcataaatggaagcacagaagaaatgcagttagataagaaaaaggcgagattcgaacgcgagcagaatgataccttcatcatggagattttggatatcgcacctttcaccaaaatgaggattcggattgatggactcggctcccggccagaatggtttctggagagaatcctgctgaagaacatgaacactggtgacctcaccatgttctattatggcgattggctctctcagcgaaaaggcaaaaagaccctcgtgtgtgaaatgtgtgctgttattgatgaggaagaaatgatggagtggaccagttacaccgtcgccgtcaagacgagtgacattctcggagccggaacagacgctaatgtctttattataatctttggcgagaatggggattcaggcaccttggccttgaaacagtctgccaactggaataagtttgaacgaaataacactgatacgttcaattttccagacatgctgagcctcggccacctgtgcaaactgcgagtctggcacgataacaagggaatctttccaggctggcacctatcctacgttgacgtgaaagataactcacgcgatgaaacatttcatttccagtgcgattgctggctgagcaaaagcgagggggacggacaaactgtgcgcgatttcgcatgtgcaaacaacaagatttgtgatgagctggaagagacaacttacgagatcgtaattgagaccgggaatggtggcgagactcgcgagaatgtttggctgattctggaagggcgaaagaacagaagtaaagagttcctcatggagaactcctcacgccagagggccttcagaaaagggaccaccgatactttcgagttcgacagcatctatctgggggacatcgcgtcattgtgtgtcggccacctggcccgagaagaccgatttataccaaagagagaactggcatggcacgtgaaaacaattaccattactgagatggaatatggcaatgtctatttctttaattgtgattgcctgatacctctcaagaggaagcgcaagtatttcaaggtgtttgaggttaccaagactactgaaagctttgcctctaaggtccagtccctcgtcccagtaaagtatgaagtcatagtcacaactggttacgagccaggggctggcacggatgcgaatgtgtttgtgaccatttttggcgctaacggggacacagggaagcgcgaactgaagcagaagatgcggaatttgtttgagaggggcagcactgatcgcttttttctggagactctcgagctcggggagttacgcaagtag

SEQ ID NO: 68573 - DNA, 1374 bp, Artificial Sequence
  derived and/or modified sequence
atgaccgtgtggaccggcgacgtggtgggcggcggcaccgacagcaacatcttcatgaccctgtacggcatcaacggcagcaccgaggagatgcagctggacaagaagaaggccagattcgagagagagcagaacgacaccttcatcatggagatcctggacatcgcccccttcaccaagatgagaatcagaatcgacggcctgggcagcagacccgagtggttcctggagagaatcctgctgaagaacatgaacaccggcgacctgaccatgttctactacggcgactggctgagccagagaaagggcaagaagaccctggtgtgcgagatgtgcgccgtgatcgacgaggaggagatgatggagtggaccagctacaccgtggccgtgaagaccagcgacatcctgggcgccggcaccgacgccaacgtgttcatcatcatcttcggcgagaacggcgacagcggcaccctggccctgaagcagagcgccaactggaacaagttcgagagaaacaacaccgacaccttcaacttccccgacatgctgagcctgggccacctgtgcaagctgagagtgtggcacgacaacaagggcatcttccccggctggcacctgagctacgtggacgtgaaggacaacagcagagacgagaccttccacttccagtgcgactgctggctgagcaagagcgagggcgacggccagaccgtgagagacttcgcctgcgccaacaacaagatctgcgacgagctggaggagaccacctacgagatcgtgatcgagaccggcaacggcggcgagaccagagagaacgtgtggctgatcctggagggcagaaagaacagaagcaaggagttcctgatggagaacagcagcagacagagagccttcagaaagggcaccaccgacaccttcgagttcgacagcatctacctgggcgacatcgccagcctgtgcgtgggccacctggccagagaggacagattcatccccaagagagagctggcctggcacgtgaagaccatcaccatcaccgagatggagtacggcaacgtgtacttcttcaactgcgactgcctgatccccctgaagagaaagagaaagtacttcaaggtgttcgaggtgaccaagaccaccgagagcttcgccagcaaggtgcagagcctggtgcccgtgaagtacgaggtgatcgtgaccaccggctacgagcccggcgccggcaccgacgccaacgtgttcgtgaccatcttcggcgccaacggcgacaccggcaagagagagctgaagcagaagatgagaaacctgttcgagagaggcagcaccgacagattcttcctggagaccctggagctgggcgagctgagaaagtag

SEQ ID NO: 68574 - protein, 364 aa, Artificial Sequence
  derived and/or modified sequence
MHPQVVILSLILHLADSVAGSVKVGGEAGPSVTLPCHYSGAVTSMCWNRGSCSLFTCQNGIVWTNGTHVTYRKDTRYKLLGDLSRRDVSLTIENTAVSDSGVYCCRVEHRGWFNDMKITVSLEIVPPKVTTTPIVTTVPTVTTVRTSTTVPTTTTVPMTTVPTTTVPTTMSIPTTTTVLTTMTVSTTTSVPTTTSIPTTTSVPVTTTVSTFVPPMPLPRQNHEPVATSPSSPQPAETHPTTLQGAIRREPTSSPLYSYTTDGNDTVTESSDGLWNNNQTQLFLEHSLLTANTTKGIYAGVCISVLVLLALLGVIIAKKYFFKKEVQQLSVSFSSLQIKALQNAVEKEVQAEDNIYIENSLYATD

SEQ ID NO: 68575 - protein, 223 aa, Artificial Sequence
  derived and/or modified sequence
MHPQVVILSLILHLADSVAGSVKVGGEAGPSVTLPCHYSGAVTSMCWNRGSCSLFTCQNGIVWTNGTHVTYRKDTRYKLLGDLSRRDVSLTIENTAVSDSGVYCCRVEHRGWFNDMKITVSLEIVPPKVTTTPIVTTVPTVTTVRTSTTVPTTTTVPMTTVPTTTVPTTMSIPTTTTVLTTMTVSTTTSVPTTTSIPTTTSVPVTTTVSTFVPPMPLPRQNHE

SEQ ID NO: 68576 - protein, 1025 aa, Artificial Sequence
  derived and/or modified sequence
MKASSGDQGSPPCFLRFPRPVRVVSGAEAELKCVVLGEPPPVVVWEKGGQQLAASERLSFPADGAEHGLLLTAALPTDAGVYVCRARNAAGEAYAAAAVTVLEPPASDPELQPAERPLPSPGSGEGAPVFLTGPRSQWVLRGAEVVLTCRAGGLPEPTLYWEKDGMALDEVWDSSHFALQPGRAEDGPGASLALRILAARLPDSGVYVCHARNAHGHAQAGALLQVHQPPESPPADPDEAPAPVVEPLKCAPKTFWVNEGKHAKFRCYVMGKPEPEIEWHWEGRPLLPDRRRLMYRDRDGGFVLKVLYCQAKDRGLYVCAARNSAGQTLSAVQLHVKEPRLRFTRPLQDVEGREHGIAVLECKVPNSRIPTAWFREDQRLLPCRKYEQIEEGTVRRLIIHRLKADDDGIYLCEMRGRVRTVANVTVKGPILKRLPRKLDVLEGENAVLLVETLEAGVEGRWSRDGEELPVICQSSSGHMHALVLPGVTREDAGEVTFSLGNSRTTTLLRVKCVKHSPPGPPILAEMFKGHKNTVLLTWKPPEPAPETPFIYRLERQEVGSEDWIQCFSIEKAGAVEVPGDCVPSEGDYRFRICTVSGHGRSPHVVFHGSAHLVPTARLVAGLEDVQVYDGEDAVFSLDLSTIIQGTWFLNGEELKSNEPEGQVEPGALRYRIEQKGLQHRLILHAVKHQDSGALVGFSCPGVQDSAALTIQESPVHILSPQDRVSLTFTTSERVVLTCELSRVDFPATWYKDGQKVEESELLVVKMDGRKHRLILPEAKVQDSGEFECRTEGVSAFFGVTVQDPPVHIVDPREHVFVHAITSECVMLACEVDREDAPVRWYKDGQEVEESDFVVLENEGPHRRLVLPATQPSDGGEFQCVAGDECAYFTVTITDVSSWIVYPSGKVYVAAVRLERVVLTCELCRPWAEVRWTKDGEEVVESPALLLQKEDTVRRLVLPAVQLEDSGEYLCEIDDESASFTVTVTESYQSQDSSNNNPELCVLLKKPKTRRLWSRFPPWRRTAGTE

SEQ ID NO: 68577 - DNA, 3078 bp, Artificial Sequence
  derived and/or modified sequence
atgaaggcttccagtggtgatcagggcagcccaccctgcttcctccgatttccgagaccagtcagagtggtctcaggagccgaagctgagttaaagtgcgtcgtcctgggtgaacccccccctgtggtggtatgggagaagggagggcagcagctggccgcatctgaacggctcagcttccccgcagacggcgctgagcacggtctgctactgacagctgccctgcccacagatgctggagtgtacgtgtgccgtgcacgcaacgctgccggcgaagcgtacgccgcggcagcagtaacagtcctggaaccgcccgcttccgaccctgagctccagcctgccgaacggccattaccgagcccagggtcaggtgaaggagcccccgtgttcctgacaggccctcgtagccagtgggtgctgcgcggcgccgaggtcgtccttacgtgtcgggctgggggcctacctgagccaacgctgtactgggagaaagatgggatggcacttgacgaggtatgggattccagccatttcgctttacagcccgggagggccgaggacggacccggtgcttcattagcgctgcggatcctggcagcaagactccccgattccggcgtgtacgtatgccacgcgcggaacgctcacggccacgctcaggccggggcgctgctacaggtacatcaacccccggagtctccgcccgctgatccagacgaggccccagcccctgttgtcgaaccattgaagtgcgcccctaagaccttctgggtgaacgaaggtaagcatgccaagttcaggtgctacgtgatggggaagccagagccagagattgaatggcattgggaggggcgccccctgctgccagatagacgccgcttgatgtacagggatagggatggcggcttcgtgctgaaggttctctactgtcaagccaaggaccgggggctctacgtgtgtgctgcaaggaactctgccggccagaccctgagtgctgtgcaacttcatgtgaaggagcctcgccttaggtttacacgtccccttcaggatgtcgagggccgcgagcatggaattgccgttctagagtgcaaggtaccgaactcccggattccaaccgcctggtttagggaggatcagagactgctcccctgccgcaaatacgaacagatcgaggagggtaccgtcaggagattgatcatccaccggctcaaagccgatgatgacggcatttatctttgcgaaatgagaggccgtgtccgcaccgtggccaacgtgactgtgaagggaccaattctgaaaagacttcccagaaaattggatgttctggagggagaaaacgccgtgctgctggtagaaaccctcgaggccggcgtcgaggggcggtggagtagggatggcgaggagttaccagtgatctgtcaatcatccagcggccatatgcacgctcttgtactgccaggagttaccagagaggatgcgggagaagtcacgtttagtctgggcaactcgcgaactacaacactgctccgcgtcaagtgtgtgaaacattctccacccggccctccaattcttgcagagatgttcaagggccacaagaatacagtgctcctcacctggaagccacctgagcctgcccctgaaaccccattcatttatagactggagcgacaagaagtgggaagtgaagactggatacaatgcttttccattgagaaggccggggccgtggaagtccccggggactgtgttcccagtgaaggcgactacaggtttcgtatttgtacagtgagcggtcacggacgcagcccgcacgtggttttccacggcagcgcccatttggttcctacagcacggctggtggctggcctagaggacgtgcaagtgtatgatggtgaggatgcggtttttagcctcgatctgtcaactattattcagggtacctggtttttgaatggcgaggaactgaaatcgaatgagccagaagggcaggtcgaacccggggcactgagatataggatcgagcagaagggcctccaacaccggctgatccttcacgccgttaagcaccaggattctggggctctcgtggggttttcatgtccgggcgttcaggacagcgccgccctgaccattcaagaatcccccgtccacatcctctcccctcaagatcgggtgagcctgactttcactacaagcgaacgagtagtactcacttgtgagctttccagagtggactttcctgccacatggtacaaggacgggcagaaggtagaagagtcagagctgctggtggtgaaaatggacggcagaaaacaccggctaatactgccagaagcaaaagtgcaggactccggtgaattcgagtgcagaacagaaggtgtgagcgccttcttcggtgtgaccgtccaggacccccccgtccatattgtagatccccgcgagcatgtgtttgtgcatgcgataacctctgagtgcgtgatgctggcttgcgaagtggacagggaagacgcgcccgttcgttggtacaaggacggccaggaggtcgaggaatcagactttgttgtactcgagaacgaagggcctcatcgacgattggttcttcctgccactcagccctctgacgggggcgaatttcagtgcgtcgcgggagacgaatgcgcctacttcacggtgacaataaccgacgtgtccagttggattgtgtacccttccgggaaagtgtatgtagccgcagtgcgcctcgagcgcgttgtcctcacttgcgagctgtgcagaccttgggcagaggttagatggacgaaagatggcgaggaggttgtagagagcccagccctgttactgcagaaagaagacactgtgcggcgattggttttgcctgccgtgcagcttgaggattccggtgagtatctatgtgagatcgacgatgaatctgctagtttcacagtcaccgtcaccgaaagctaccaaagccaggactctagtaacaacaatccagaactatgtgtcctacttaaaaagccaaagacccggcggctctggtcaagattcccgccttggagaaggaccgctggcacagaatag

SEQ ID NO: 68578 - DNA, 3078 bp, Artificial Sequence
  derived and/or modified sequence
atgaaggccagcagcggggaccagggcagccccccctgcttcctgcgcttccccaggcctgtgcgggtggtgtctggagctgaggccgagctgaagtgtgtggtgctgggggagcccccacctgtggtggtgtgggagaagggcggccagcagctggccgccagcgagcggctgtccttcccagcagatggagctgagcacggcctgctgctgacagctgccctgcccacagatgctggggtgtatgtgtgccgggccagaaatgctgctggggaggcctatgctgctgctgctgtgacagtgctggagcccccagccagtgaccctgagctgcagcctgctgagcggcccctgcccagccctggcagcggggagggcgcccctgtgttcctgaccggccccaggagccagtgggtgctgcggggagctgaggtggtgctgacctgcagagctgggggcctgcctgagcccaccctgtactgggagaaggatggcatggccctggatgaggtgtgggacagcagccactttgccctgcagcccggccgggcagaagatggccctggggccagcctggccctgcgcatcctggccgcccggctgcctgacagcggcgtgtatgtgtgccacgccagaaatgcccacggccacgcccaggccggggccctgctgcaggtgcaccagcccccagagagccccccagctgaccctgatgaggccccagcccctgtggtggagcccctgaagtgtgcccccaagaccttctgggtgaatgaaggcaagcacgccaagttccgctgctacgtgatgggcaagccagagcctgagattgagtggcactgggagggccggcccctgctgcctgacagaagaaggctgatgtacagagacagagatggcggctttgtgctgaaggtgctgtactgccaggccaaggaccggggcctgtatgtgtgtgccgccaggaacagcgctggccagaccctgtctgctgtgcagctgcacgtgaaggagccccggctgcgcttcacccggcccctgcaggatgtggagggccgggagcacggcattgctgtgctggagtgcaaggtgcccaacagccgcatccccacagcctggttccgggaggaccagaggctgctgccctgcaggaaatatgagcagatcgaggagggcaccgtgagaagactcatcatccaccggctgaaggcagatgatgatggcatctacctgtgtgagatgaggggccgggtgaggacagtggccaacgtgacagtgaagggccccatcctgaagaggctgcccaggaagctggatgtgctggagggggagaatgctgtgctgctggtggagaccctggaggccggcgtggagggccgctggagcagagatggagaggagctgcctgtgatctgccagagcagcagcggccacatgcacgccctggtgctgcccggggtgacccgggaggatgctggggaggtgaccttcagcctgggcaacagcaggaccaccaccctgctgcgggtgaagtgtgtgaagcacagccccccaggcccccccatcctggccgagatgttcaagggccacaagaacacagtgctgctgacctggaagcccccagagcccgcccctgagacccccttcatctaccgcctggagcggcaggaggtgggcagcgaggactggatccagtgcttcagcattgagaaggccggggctgtggaggtgcctggggactgtgtgcccagcgagggggactaccgcttccgcatctgcaccgtgtctggccacggccgcagcccccacgtggtgttccacggcagcgcccacctggtgcccacagcccggctggtggccggcctggaggatgtgcaggtgtatgatggagaagatgctgtgttcagcctggacctgagcaccatcatccagggcacctggttcctgaatggagaggagctgaagagcaatgaacctgagggccaggtggagcccggggccctgcgctaccgcatcgagcagaagggcctgcagcacaggctcatcctgcatgctgtgaagcaccaggacagcggggccctggtgggcttcagctgccctggggtgcaggacagcgctgccctgaccatccaggagagccctgtgcacatcctgagcccccaggacagagtgtccctgaccttcaccaccagcgagcgggtggtgctgacctgtgagctgagccgggtggacttccctgccacctggtacaaggatggccagaaggtggaggagagcgagctgctggtggtgaagatggatggcaggaagcacaggctcatcctgcctgaggccaaggtgcaggacagcggggagtttgaatgtagaacagagggcgtgtctgccttctttggagtgacagtgcaggacccccctgtgcacatcgtggacccccgggagcacgtgtttgtgcacgccatcaccagtgaatgtgtgatgctggcctgtgaggtggaccgggaggatgcccctgtgcgctggtacaaggatggccaggaggtggaggagagtgactttgtggtgctggagaatgaaggcccccaccggcggctggtgctgcctgccacccagcccagtgatggaggagagttccagtgtgtggccggagatgaatgtgcctacttcaccgtgaccatcacagatgtgtcctcctggatcgtgtaccccagcggcaaggtgtatgtggccgctgtgcggctggagcgggtggtgctgacctgtgagctgtgccggccctgggccgaggtgcgctggaccaaggatggagaggaggtggtggagagccctgccctgctgctgcagaaggaggacacagtgcggcggctggtgctgcctgctgtgcagctggaggacagcggggagtacctgtgtgaaattgatgatgagagcgccagcttcaccgtgacagtgacagagagctaccagagccaggacagcagcaacaacaaccctgagctgtgtgtgctgctgaagaagcccaagacccggcggctgtggagccgcttccccccctggaggagaacagctggaacagaatag

SEQ ID NO: 68579 - DNA, 3078 bp, Artificial Sequence
  derived and/or modified sequence
atgaaggccagcagcggcgaccagggcagccccccctgcttcctgaggtttcctagacctgttcgggtggtcagcggagcagaggccgagctgaaatgcgttgtgctgggggaaccccccccagtcgtggtttgggagaaggggggtcagcagctcgctgcttcagaaaggctgtcttttcctgcagatggggccgagcacggtctgctcctgacagccgctctacctactgacgccggcgtctacgtgtgcagggcccgtaatgctgcgggcgaggcctacgctgccgcggctgtcactgttctcgagccacccgcttcggaccccgagctgcaaccagcggaaaggcccttgccctcacctggatctggagagggcgctccagtttttctgacagggccaagaagccagtgggtcctgaggggcgccgaagtggtcctcacctgtcgcgccggagggcttcccgaacctaccttatactgggagaaagatggaatggccttggacgaagtttgggactccagtcacttcgctctgcaaccgggaagagctgaggacgggcccggcgcctccctggctctcaggatcctcgccgcccgcttgcctgattccggggtctacgtgtgccacgccaggaatgcacacggtcatgcccaagctggcgccttgctgcaggtgcatcagccaccagaatcacctcctgctgatccagacgaggcccctgctcccgtcgtcgagcccttgaagtgcgcccctaaaacattttgggtcaacgagggtaaacacgccaaatttcggtgctacgtgatgggaaagcccgagccagagattgaatggcattgggagggacgcccactgctgcccgaccgtaggagactgatgtaccgtgacagggacggtgggttcgtgctgaaagtcctctactgtcaggctaaagaccggggcctctatgtgtgcgccgccaggaacagtgctggacagactttatcagccgtccagctacacgtgaaggaacctcgtctcagattcaccaggcctctccaggacgtagagggccgtgaacacggaattgcagtgcttgaatgtaaggtaccaaatagccggatcccgaccgcctggtttcgggaggaccagcgcttgctcccatgccgaaagtatgagcagatcgaggaggggacagtacggcgattgataatccacaggctgaaagccgacgacgatggaatctatctctgcgagatgcgaggacgcgtaaggaccgtggctaatgtgactgtcaaaggacctattctcaagaggcttccaaggaagctcgacgtgctagagggggagaacgcagtgctgctggtagaaaccctcgaggctggcgttgaggggaggtggagtagagacggtgaggaactgcctgttatttgtcagtcttcttcggggcacatgcatgctctggtcctgcctggagtaacaagggaagacgccggcgaagtgactttctcactgggaaactcccgcacaaccacccttttacgtgtgaaatgcgtgaagcatagcccccccggacctcctatccttgcagagatgttcaaagggcacaagaacaccgttctgctgacctggaagccacccgagcctgcgcctgaaacaccattcatttataggctcgagcgacaggaagtggggagcgaggactggattcagtgtttctcaatcgaaaaagccggagcagtcgaggtccctggggattgcgtcccctcagagggagactatagattcaggatctgtacagtctccggacatgggagatctccccatgtcgtttttcacggcagcgcccatctggttcctactgcccggttggtggcgggactcgaagatgtgcaggtgtatgatggggaggatgcggtgttttccctagatctgtccacaattattcagggaacatggttcttgaatggcgaggagctgaagagtaatgaacccgaaggacaggtggagccaggggccctgcgttaccgaatagagcagaaaggcttgcaacacagactgatactacatgcggtcaaacaccaggactcaggggctctggtcggattttcatgccctggtgtgcaggactctgctgcccttacaatccaggaatctccagtccacattctctccccccaagatagagtgagtctcacttttaccacctccgagcgggtcgtattgacctgcgagctatccagagtggatttccctgctacctggtataaggacggccagaaagtcgaagagagtgagctcctcgtggtgaaaatggatgggaggaaacaccggcttatcctgcccgaggctaaagttcaggattccggcgaatttgaatgtcgcaccgagggtgtgagcgctttctttggggtgacggtccaggaccctcccgtgcacatcgtggatccaagagaacacgtgtttgtgcatgcaatcactagcgaatgtgttatgctagcctgtgaagttgatcgggaagacgcacccgtgcgctggtacaaggatggccaagaggtggaggaaagcgacttcgtcgtcttggaaaacgaagggccccaccgaaggctagtccttccagctactcagccttctgacgggggtgaattccagtgtgtggcaggggacgagtgcgcctacttcactgtgactattacggatgtgtcctcctggatcgtgtatccatccggcaaggtgtatgttgccgctgtgaggcttgaacgcgtcgtgctgacctgcgaactgtgcagaccatgggccgaagtcagatggactaaggacggcgaagaggtcgtggagagcccagctctgctgctccagaaagaggacactgtcaggaggctggtgctgcctgccgtgcagctggaagattcaggcgagtacttgtgtgagattgacgacgaatccgcctcctttacagtaacagtgacagagtcataccagtcacaggactctagtaataacaatccagagctctgcgtgctgctgaaaaagcccaagacaagacggctctggagcagatttcctccatggaggagaactgccggtactgagtag

SEQ ID NO: 68580 - DNA, 3297 bp, Artificial Sequence
  derived and/or modified sequence
ctccgcacccccccctgcccccccaccgttcgccgctgcaggcggtcggccgccgcgatgaaggcgagctcgggggatcaggggagccccccgtgcttcctgcgcttcccgcggcctgtgcgggtggtaagtggcgccgaggccgagctcaagtgcgtggtcctgggggagccgccgcctgtagtggtgtgggagaagggcgggcagcagctggcggcctcggaacgcctgagcttcccggcggacggcgcggagcacggcctgctgctgaccgccgcactgcccaccgacgcgggggtctacgtgtgccgcgcccgcaacgcggccggcgaggcctacgcggcggccgccgtcaccgtgctggagccgccggcctccgaccccgagctgcagcccgccgagcgcccgctgccatcgccggggtccggggagggcgccccggtcttcctcacggggcctcgatcccagtgggtgctgcggggggcggaggtggtgctgacgtgccgggcggggggcctccccgagcccacactgtactgggagaaggacgggatggccctggacgaagtgtgggacagcagccacttcgcgctccagccgggccgcgccgaggacggccccggcgcgagcctggcactgcgcatcctggcggctcggctgccggattccggcgtctacgtgtgccacgcccgcaacgcgcacggccacgcgcaggcgggggcgctgctccaggtgcaccagccccccgagagcccgcccgcggaccccgacgaggcccccgcgccggtggtggagccgctcaagtgcgcgcctaagaccttctgggtgaacgagggcaagcacgccaagttccgctgctacgtgatgggcaagcccgagcccgagatcgaatggcactgggagggccgcccgctgctcccggaccgccgccgcctcatgtaccgcgaccgcgacggcggcttcgtgctcaaggtgctttactgccaggccaaggatcgtgggctctacgtctgcgccgcgcgcaactcggcgggccagacgctcagtgccgtgcagctgcacgtgaaagagccccgcctccggttcacacggcccctgcaggacgtggagggccgtgagcacgggattgccgtgctggaatgtaaagtacccaactcccgcatccccacggcctggttccgtgaggaccagcggctgctgccctgccgcaagtacgagcagatcgaagagggcactgtccggcgcctcatcatccacaggctgaaggcagacgatgatggtatctacctgtgcgagatgcggggccgggtgcgcaccgtggccaacgtcacagtcaaagggcccatcctgaagcgcctgccccggaagctcgacgtcctggaaggagagaatgctgtgctgctagtggaaactctagaggccggggtcgagggacgctggagccgtgatggggaggagctgccggtcatctgccagagcagctcaggccacatgcatgccctggtccttccaggggtcacccgagaggatgctggcgaggtcacctttagcctgggcaactcccgtaccactacgcttctcagagtaaaatgtgtcaagcacagtcccccaggaccccccatattggcagagatgttcaagggccacaagaacacggtcctgttgacctggaagcctcccgagccagctcccgagaccccattcatctaccggctggagcggcaggaagtgggctctgaagactggattcagtgcttcagcatcgagaaagccggagccgtggaggtgccgggcgactgtgtgccctccgagggtgactaccgcttccgcatctgcacagtcagcggacatggccgtagtccccacgtggtgttccacggttctgctcaccttgtgcccacagctcgcctggtggcaggtctggaggatgtgcaggtatacgacggggaagatgccgtcttctccctcgatctctccaccatcatccagggtacctggttccttaatggggaagagctcaagagtaacgagccggagggccaggtggaacctggggccctgcggtaccgtatagagcagaagggtctgcagcacagactcatcctgcatgccgtcaagcaccaggacagcggtgccctggtcggcttcagctgccccggcgtgcaggactcagctgccctcacaatccaagagagcccggtgcacatcctgagcccccaggacagggtgtcgttgaccttcacaacctcagagcgggtggtgctgacttgtgagctctcaagggtggacttcccggcaacctggtacaaggatgggcagaaggtggaggagagcgagttgctggtggtgaagatggatgggcgcaaacaccgtctgatcctgcctgaggccaaagtccaggacagtggcgagtttgagtgcaggacagaaggggtctcggccttcttcggcgtcactgtccaagatcctcccgtgcacatcgtggacccccgagaacatgtgttcgtgcatgccataacttccgagtgtgtcatgctggcctgtgaggtggaccgagaggacgcccctgtgcgttggtacaaggacgggcaggaggtggaggagagtgacttcgtggtgctggagaatgaggggccccatcgccgcctggtgctgcccgccacccagccctcagacgggggcgagtttcagtgcgtcgctggagatgagtgtgcctacttcactgtcaccatcacagacgtctcctcgtggatcgtgtatcccagcggcaaggtgtatgtggcagccgtgcgcctggagcgtgtggtgctgacctgtgagctatgccggccctgggcagaggtgcgctggaccaaggatggagaggaggtggtggagagccccgcgctgctcctgcagaaggaagacactgtccgccgcctggtgctgcccgctgtccagctcgaggactccggcgagtacttgtgtgaaattgacgatgagtcggcctccttcactgtcaccgtcacagagtcttaccaaagtcaggacagttcaaataacaatccggagttatgcgtcctcttgaaaaagccgaagacccggcggctctggtcccgcttccccccatggcgacgaacagctggcactgagtagcagctgcccccatagtttggggcccacattcctctgtcccacctccctgccattgctttttgcctctccccagactgcttcagccgctaacctaacctggcccctgtgggcatttgagtttgcgacccctgtgttaaaccaataaacatgcaaataaatgta

SEQ ID NO: 68581 - DNA, 3078 bp, Artificial Sequence
  derived and/or modified sequence
atgaaagcctcgtccggagatcaaggctctcccccatgtttcctccgatttccccgaccagtgagagttgtgagcggggcagaagccgaactgaaatgcgtggtgctcggtgagcccccacccgtcgtcgtgtgggaaaaaggcggtcaacaactcgccgcttcagaacgcctcagtttcccagccgacggtgccgagcatgggctcctgctaaccgcagccttacctaccgacgctggcgtatacgtgtgccgggctcgaaacgccgctggagaggcgtatgctgcggcagccgtgaccgtccttgagccaccagcctctgatcctgagctgcagcccgcagagcggcctttgccttctccaggcagcggagagggcgctcccgtgtttcttacaggtcccaggtcccagtgggtccttcggggtgccgaagtggtgctgacttgtagagcaggcggtctgccagagcctactctctactgggagaaagacgggatggccctagatgaagtctgggactcctcccactttgcactccagccaggacgcgctgaggacggtcccggagccagcctcgccttaagaatattggccgcaaggttgcccgattccggagtatatgtttgtcacgccaggaatgcccatggccatgctcaggccggagccctccttcaggtccatcagcctcctgagtcccctccagccgaccccgacgaagcccctgccccagttgtggaacctctgaagtgcgccccaaaaaccttctgggtcaacgagggcaaacacgctaagttcagatgttacgtgatgggcaagccagaaccggagattgaatggcactgggaaggcaggcctctgttaccagaccgacgccgtctgatgtaccgtgatagagacggaggtttcgtgctcaaggtactgtattgtcaggccaaggatagaggcctctacgtctgcgctgcccgtaattccgctgggcaaactctgtccgctgtacagctccacgttaaggaacctcggcttcgctttacccggcctttacaggatgtagaaggacgtgaacatggcattgccgtacttgaatgtaaggtcccaaattcccgaatccccacggcctggtttcgcgaggaccagcgtctgcttccctgtaggaagtacgagcaaatcgaagaggggacagttaggcgcctcattattcacaggctcaaggcagatgatgacggaatatacctttgcgagatgagaggaagggtacgcacagtggctaacgttactgtgaaaggtcctatactgaagcgattgccacgaaagctcgacgtgctagagggcgagaatgctgtactgctcgttgaaacgctggaggcaggtgtagaaggccgatggagcagagatggcgaggagctccccgtcatatgccaatcatcatcaggacacatgcatgccctggtgttacccggtgtgacaagggaggacgcgggagaagtaacttttagtctagggaactccaggactactaccttgctgcgcgtcaagtgtgtcaagcactcacccccaggaccaccaatactggccgaaatgttcaagggccacaagaacaccgtccttctgacctggaagccgccagagcccgctccagagacaccctttatctaccgcctggaacggcaggaggtgggatccgaggattggatacagtgtttctcaattgagaaggctggcgctgttgaagtcccaggagactgtgtcccttctgagggtgattatagatttcggatctgcacagtgagcgggcacgggagatctcctcatgtggtctttcacggttctgcccacctcgttcctacggccaggctagtggcaggcctggaagacgttcaggtgtatgatggggaagacgccgtgttctcacttgacctttcaacaattattcagggtacctggtttctcaacggagaggagttaaaatccaatgaacccgagggacaagtggagcccggtgccctacgctaccgcattgaacaaaagggactgcaacataggctgatacttcacgccgtgaagcaccaggactctggcgctctggtaggattctcctgccctggagttcaggactctgcggcacttaccatccaggaaagccccgtgcacattctgtccccacaggacagggtatccctcacttttaccacctctgaaagggtggtactaacctgcgaactatcaagagtggactttcctgcaacatggtacaaagatggccagaaagtggaagagagcgaactgctagtggttaagatggatggtcggaagcatagactcattctccccgaagctaaggtgcaggacagcggggagtttgagtgtcgcaccgaaggggtgagtgcatttttcggagtgaccgttcaggacccccctgtccacatagtggaccccagggagcacgtgttcgtgcatgccatcacatcagaatgcgttatgctcgcgtgtgaagtagatagagaagacgcccctgtgcgatggtacaaggacggacaggaagtagaagaaagcgacttcgtcgttcttgaaaacgaaggccctcaccgcagactcgtcctgcctgccacacagcctagtgatggaggggagttccagtgtgtggccggagatgagtgcgcatattttacagtgacaatcaccgatgtgagctcttggattgtgtacccctctggaaaggtctatgttgccgcagttcggttagagagggtggtattgacatgtgaactatgccggccatgggctgaggtgcgttggactaaggacggagaggaggttgtggagtcccccgcactgctactgcagaaggaggatactgtgcgtcgacttgtgctgcctgctgtgcagttggaggattccggagaatatctgtgcgagatcgatgacgaatccgctagcttcaccgtcacggtcacagaatcttaccagtcccaggacagtagcaacaacaatccagaactatgtgttctgttgaagaagccaaagactcgcagactgtggagtcggttcccaccctggcgaagaacggcaggtaccgagtag

SEQ ID NO: 68582 - DNA, 3078 bp, Artificial Sequence
  derived and/or modified sequence
atgaaggccagcagcggcgaccagggcagccccccctgcttcctgagattccccagacccgtgagagtggtgagcggcgccgaggccgagctgaagtgcgtggtgctgggcgagcccccccccgtggtggtgtgggagaagggcggccagcagctggccgccagcgagagactgagcttccccgccgacggcgccgagcacggcctgctgctgaccgccgccctgcccaccgacgccggcgtgtacgtgtgcagagccagaaacgccgccggcgaggcctacgccgccgccgccgtgaccgtgctggagccccccgccagcgaccccgagctgcagcccgccgagagacccctgcccagccccggcagcggcgagggcgcccccgtgttcctgaccggccccagaagccagtgggtgctgagaggcgccgaggtggtgctgacctgcagagccggcggcctgcccgagcccaccctgtactgggagaaggacggcatggccctggacgaggtgtgggacagcagccacttcgccctgcagcccggcagagccgaggacggccccggcgccagcctggccctgagaatcctggccgccagactgcccgacagcggcgtgtacgtgtgccacgccagaaacgcccacggccacgcccaggccggcgccctgctgcaggtgcaccagccccccgagagcccccccgccgaccccgacgaggcccccgcccccgtggtggagcccctgaagtgcgcccccaagaccttctgggtgaacgagggcaagcacgccaagttcagatgctacgtgatgggcaagcccgagcccgagatcgagtggcactgggagggcagacccctgctgcccgacagaagaagactgatgtacagagacagagacggcggcttcgtgctgaaggtgctgtactgccaggccaaggacagaggcctgtacgtgtgcgccgccagaaacagcgccggccagaccctgagcgccgtgcagctgcacgtgaaggagcccagactgagattcaccagacccctgcaggacgtggagggcagagagcacggcatcgccgtgctggagtgcaaggtgcccaacagcagaatccccaccgcctggttcagagaggaccagagactgctgccctgcagaaagtacgagcagatcgaggagggcaccgtgagaagactgatcatccacagactgaaggccgacgacgacggcatctacctgtgcgagatgagaggcagagtgagaaccgtggccaacgtgaccgtgaagggccccatcctgaagagactgcccagaaagctggacgtgctggagggcgagaacgccgtgctgctggtggagaccctggaggccggcgtggagggcagatggagcagagacggcgaggagctgcccgtgatctgccagagcagcagcggccacatgcacgccctggtgctgcccggcgtgaccagagaggacgccggcgaggtgaccttcagcctgggcaacagcagaaccaccaccctgctgagagtgaagtgcgtgaagcacagcccccccggcccccccatcctggccgagatgttcaagggccacaagaacaccgtgctgctgacctggaagccccccgagcccgcccccgagacccccttcatctacagactggagagacaggaggtgggcagcgaggactggatccagtgcttcagcatcgagaaggccggcgccgtggaggtgcccggcgactgcgtgcccagcgagggcgactacagattcagaatctgcaccgtgagcggccacggcagaagcccccacgtggtgttccacggcagcgcccacctggtgcccaccgccagactggtggccggcctggaggacgtgcaggtgtacgacggcgaggacgccgtgttcagcctggacctgagcaccatcatccagggcacctggttcctgaacggcgaggagctgaagagcaacgagcccgagggccaggtggagcccggcgccctgagatacagaatcgagcagaagggcctgcagcacagactgatcctgcacgccgtgaagcaccaggacagcggcgccctggtgggcttcagctgccccggcgtgcaggacagcgccgccctgaccatccaggagagccccgtgcacatcctgagcccccaggacagagtgagcctgaccttcaccaccagcgagagagtggtgctgacctgcgagctgagcagagtggacttccccgccacctggtacaaggacggccagaaggtggaggagagcgagctgctggtggtgaagatggacggcagaaagcacagactgatcctgcccgaggccaaggtgcaggacagcggcgagttcgagtgcagaaccgagggcgtgagcgccttcttcggcgtgaccgtgcaggacccccccgtgcacatcgtggaccccagagagcacgtgttcgtgcacgccatcaccagcgagtgcgtgatgctggcctgcgaggtggacagagaggacgcccccgtgagatggtacaaggacggccaggaggtggaggagagcgacttcgtggtgctggagaacgagggcccccacagaagactggtgctgcccgccacccagcccagcgacggcggcgagttccagtgcgtggccggcgacgagtgcgcctacttcaccgtgaccatcaccgacgtgagcagctggatcgtgtaccccagcggcaaggtgtacgtggccgccgtgagactggagagagtggtgctgacctgcgagctgtgcagaccctgggccgaggtgagatggaccaaggacggcgaggaggtggtggagagccccgccctgctgctgcagaaggaggacaccgtgagaagactggtgctgcccgccgtgcagctggaggacagcggcgagtacctgtgcgagatcgacgacgagagcgccagcttcaccgtgaccgtgaccgagagctaccagagccaggacagcagcaacaacaaccccgagctgtgcgtgctgctgaagaagcccaagaccagaagactgtggagcagattccccccctggagaagaaccgccggcaccgagtag

SEQ ID NO: 68583 - protein, 451 aa, Artificial Sequence
  derived and/or modified sequence
MAWALKLPLADEVIESGLVQDFDASLSGIGQELGAGAYSMSDVLALPIFKQEESSLPPDNENKILPFQYVLCAATSPAVKLHDETLTYLNQGQSYEIRMLDNRKLGELPEINGKLVKSIFRVVFHDRRLQYTEHQQLEGWRWNRPGDRILDIDIPMSVGIIDPRANPTQLNTVEFLWDPAKRTSVFIQPKGADRKQKTDREKMEKRTPHEKEKYQPSYETTILTECSPWPEITYVNNSPSPGFNSSHSSFSLGEGNGSPNHQPEPPPPVTDNLLPTTTPQEAQQWLHRNRFSTFTRLFTNFSGADLLKLTRDDVIQICGPADGIRLFNALKGRMVRPRLTIYVCQESLQLREQQQQQQQQQQKHEDGDSNGTFFVYHAIYLEELTAVELTEKIAQLFSISPCQISQIYKQGPTGIHVLISDEMIQNFQEEACFILDTMKAETNDSYHIILK

SEQ ID NO: 68584 - protein, 450 aa, Artificial Sequence
  derived and/or modified sequence
MAWALKLPLADEVIESGLVQDFDASLSGIGQELGAGAYSMSDVLALPIFKQEESSLPPDNENKILPFQYVLCAATSPAVKLHDETLTYLNQGQSYEIRMLDNRKLGELPEINGKLVKSIFRVVFHDRRLQYTEHQQLEGWRWNRPGDRILDIDIPMSVGIIDPRANPTQLNTVEFLWDPAKRTSVFIQPKGADRKQKTDREKMEKRTPHEKEKYQPSYETTILTECSPWPEITYVNNSPSPGFNSSHSSFSLGEGNGSPNHQPEPPPPVTDNLLPTTTPQEAQQWLHRNRFSTFTRLFTNFSGADLLKLTRDDVIQICGPADGIRLFNALKGRMVRPRLTIYVCQESLQLREQQQQQQQQQQKHEDGDSNGTFFVYHAIYLEELTAVELTEKIAQLFSISPCQISQIYKQGPTGIHVLISDEMIQNFQEEACFILDTMKETNDSYHIILK

SEQ ID NO: 68585 - DNA, 1356 bp, Artificial Sequence
  derived and/or modified sequence
atggcctgggccctgaagctgcccctggccgacgaggtgatcgagagcggcctggtgcaggacttcgacgccagcctgagcggcatcggccaggagctgggcgccggcgcctacagcatgagcgacgtgctggccctgcccatcttcaagcaggaggagagcagcctgccccccgacaacgagaacaagatcctgcccttccagtacgtgctgtgcgccgccaccagccccgccgtgaagctgcacgacgagaccctgacctacctgaaccagggccagagctacgagatcagaatgctggacaacagaaagctgggcgagctgcccgagatcaacggcaagctggtgaagagcatcttcagagtggtgttccacgacagaagactgcagtacaccgagcaccagcagctggagggctggagatggaacagacccggcgacagaatcctggacatcgacatccccatgagcgtgggcatcatcgaccccagagccaaccccacccagctgaacaccgtggagttcctgtgggaccccgccaagagaaccagcgtgttcatccagcccaagggcgccgacagaaagcagaagaccgacagagagaagatggagaagagaaccccccacgagaaggagaagtaccagcccagctacgagaccaccatcctgaccgagtgcagcccctggcccgagatcacctacgtgaacaacagccccagccccggcttcaacagcagccacagcagcttcagcctgggcgagggcaacggcagccccaaccaccagcccgagccccccccccccgtgaccgacaacctgctgcccaccaccaccccccaggaggcccagcagtggctgcacagaaacagattcagcaccttcaccagactgttcaccaacttcagcggcgccgacctgctgaagctgaccagagacgacgtgatccagatctgcggccccgccgacggcatcagactgttcaacgccctgaagggcagaatggtgagacccagactgaccatctacgtgtgccaggagagcctgcagctgagagagcagcagcagcagcagcagcagcagcagcagaagcacgaggacggcgacagcaacggcaccttcttcgtgtaccacgccatctacctggaggagctgaccgccgtggagctgaccgagaagatcgcccagctgttcagcatcagcccctgccagatcagccagatctacaagcagggccccaccggcatccacgtgctgatcagcgacgagatgatccagaacttccaggaggaggcctgcttcatcctggacaccatgaaggccgagaccaacgacagctaccacatcatcctgaagtag

SEQ ID NO: 68586 - DNA, 1353 bp, Artificial Sequence
  derived and/or modified sequence
atggcctgggccctgaagctgcccctggccgacgaggtgatcgagagcggcctggtgcaggacttcgacgccagcctgagcggcatcggccaggagctgggcgccggcgcctacagcatgagcgacgtgctggccctgcccatcttcaagcaggaggagagcagcctgccccccgacaacgagaacaagatcctgcccttccagtacgtgctgtgcgccgccaccagccccgccgtgaagctgcacgacgagaccctgacctacctgaaccagggccagagctacgagatcagaatgctggacaacagaaagctgggcgagctgcccgagatcaacggcaagctggtgaagagcatcttcagagtggtgttccacgacagaagactgcagtacaccgagcaccagcagctggagggctggagatggaacagacccggcgacagaatcctggacatcgacatccccatgagcgtgggcatcatcgaccccagagccaaccccacccagctgaacaccgtggagttcctgtgggaccccgccaagagaaccagcgtgttcatccagcccaagggcgccgacagaaagcagaagaccgacagagagaagatggagaagagaaccccccacgagaaggagaagtaccagcccagctacgagaccaccatcctgaccgagtgcagcccctggcccgagatcacctacgtgaacaacagccccagccccggcttcaacagcagccacagcagcttcagcctgggcgagggcaacggcagccccaaccaccagcccgagccccccccccccgtgaccgacaacctgctgcccaccaccaccccccaggaggcccagcagtggctgcacagaaacagattcagcaccttcaccagactgttcaccaacttcagcggcgccgacctgctgaagctgaccagagacgacgtgatccagatctgcggccccgccgacggcatcagactgttcaacgccctgaagggcagaatggtgagacccagactgaccatctacgtgtgccaggagagcctgcagctgagagagcagcagcagcagcagcagcagcagcagcagaagcacgaggacggcgacagcaacggcaccttcttcgtgtaccacgccatctacctggaggagctgaccgccgtggagctgaccgagaagatcgcccagctgttcagcatcagcccctgccagatcagccagatctacaagcagggccccaccggcatccacgtgctgatcagcgacgagatgatccagaacttccaggaggaggcctgcttcatcctggacaccatgaaggagaccaacgacagctaccacatcatcctgaagtag

SEQ ID NO: 68587 - DNA, 1356 bp, Artificial Sequence
  derived and/or modified sequence
atggcatgggccctaaagctccctctcgccgacgaagttattgaaagcgggctcgtacaggacttcgatgcctcgctcagcggaatcggacaggagttgggcgccggcgcctactctatgagtgacgttcttgcgctgcctatttttaaacaagaggaatcctccttgcctcctgacaacgagaataaaatccttccatttcagtacgtgctgtgcgcagccacctcccccgccgttaagctccacgatgaaaccctcacatacctgaatcaggggcagagttatgagattcgtatgctcgataaccggaagctgggcgaacttccggaaattaacgggaagctggttaagtccatattccgcgtcgtttttcacgatcgccggttgcaatacaccgagcaccagcagctggaagggtggagatggaaccggcccggcgatcggatcttagatatagacattccaatgtcagtgggcataatcgacccccgtgcgaacccgacacagctcaacaccgtggaatttctatgggatccagcgaagcgtacaagcgtattcatacagcccaagggagcggacagaaagcagaagacagatcgagagaaaatggagaagaggactccgcacgagaaggagaaataccaacccagctacgaaaccaccatcctgaccgagtgcagtccatggcccgaaatcacctacgttaacaattccccatcccccggctttaacagctcccacagcagcttctcattgggagagggcaatggatcccccaaccatcaacccgagccccctcctcctgtgacagacaaccttctgccgaccactacgccgcaggaagctcaacagtggttacaccgaaaccgcttcagtacgttcactcgcctattcactaatttttccggcgcagacctcctgaagctgacgcgcgatgacgtcatccagatttgcggacctgctgatgggatccgcctgtttaacgccctcaaggggcgaatggtacggccaaggctcaccatctatgtctgtcaagagtccctgcagttacgcgagcaacagcaacagcagcagcagcaacaacagaagcatgaagatggggacagcaatgggaccttctttgtctatcatgctatatacctggaggaactgactgccgtggagctgaccgagaaaattgctcaactcttctcaatctctccttgccagatctctcagatttataagcagggccccaccggcatccacgttctgatctctgacgagatgatacagaattttcaggaagaggcttgctttattctggacacgatgaaggcagagactaacgatagctaccacatcattttgaagtag

SEQ ID NO: 68588 - DNA, 1353 bp, Artificial Sequence
  derived and/or modified sequence
atggcatgggctctcaagcttcctctggccgatgaagtgatcgaaagcggtttggttcaggattttgatgcttccctatccggaatcggccaagagctgggcgccggcgcttactcaatgtcagacgtgcttgccctccctatcttcaagcaggaggagagttcactgccaccagataatgaaaataagatccttccctttcaatatgtcctttgtgctgcgacaagccccgccgtcaagcttcacgacgaaactttaacctacctcaatcagggccagtcttatgaaatccgaatgttggataatcgcaaactcggcgagctgcccgagatcaacggtaaattagtgaagagcatttttcgggttgtattccatgaccgacgcctccagtacacagagcatcagcaattggagggatggcgatggaataggcccggagaccggatcctggatatcgatatcccgatgagcgtgggtatcattgaccccagggctaaccccacccagcttaacacagttgagttcctgtgggaccccgcaaagcgcacctctgtgtttatccagcctaagggagccgatagaaagcagaaaaccgatcgagaaaagatggagaagaggacacctcatgagaaggagaagtaccaaccctcttacgagactaccatcctgaccgagtgttcaccatggccagagattacgtatgtgaacaactcaccttcccccggctttaatagttctcactcttcgttctctttaggcgaaggtaacggcagcccaaaccatcagccggagcctcctccccccgtgaccgataacttgctgcctacaactaccccccaagaagcccagcaatggctgcatcggaaccgatttagcacatttaccagattgtttaccaacttctccggcgccgacctgctgaagctgacacgggacgacgtgatacagatttgcggtcctgccgatggcatcaggttgtttaacgctttgaaaggccgaatggtgcgcccgcggttgactatttacgtgtgccaggagagcctgcagttgagagagcagcaacagcagcagcagcagcagcagcaaaaacacgaggacggagattcaaacggcaccttttttgtctaccacgccatttatctggaagaactcacagccgtggagctcactgagaaaatcgcccagctgtttagcatttcaccctgtcaaatctcccagatttataagcagggaccaactgggatccacgtgttaatttctgacgaaatgattcagaattttcaggaagaagcctgctttatcctggacacaatgaaggaaaccaacgacagttaccacatcatacttaaatag

SEQ ID NO: 68589 - DNA, 1356 bp, Artificial Sequence
  derived and/or modified sequence
atggcctgggccctgaagctgcccctggctgatgaagtcatcgagagcggcctggtgcaggactttgatgccagcctgtctggaattggccaggagctgggcgctggggcctacagcatgtctgatgtgctggccctgcccatcttcaagcaggaggagagcagcctgcccccagacaatgaaaacaagatcctgcccttccagtatgtgctgtgtgccgccaccagccctgctgtgaagctgcatgatgagaccctgacctacctgaaccagggccagagctatgagatccgcatgctggacaacaggaagctgggggagctgcctgagatcaacgggaagctggtgaagagcatcttccgggtggtgttccatgaccggcggctgcagtacacagagcaccagcagctggagggctggcgctggaacagacctggggaccgcatcctggacatcgacatccccatgtctgtgggcatcatcgacccccgggccaaccccacccagctgaacacagtggagttcctgtgggaccctgccaagaggaccagcgtcttcatccagcccaagggagctgacaggaagcagaagacagaccgggagaagatggagaagaggacccctcatgagaaggagaagtaccagcccagctatgagaccaccatcctgacagaatgtagcccctggccagagatcacctacgtgaacaacagccccagccctggcttcaacagcagccacagcagcttcagcctgggggagggcaatggcagccccaaccaccagcctgagcccccacctcctgtgacagacaacctgctgcccaccaccaccccccaggaggcccagcagtggctgcacaggaaccgcttcagcaccttcaccaggctcttcaccaacttcagcggggctgacctgctgaagctgaccagagatgatgtgatccagatctgtggccctgcagatggcatccgcctcttcaatgccctgaagggccgcatggtgcggccccggctgaccatctacgtgtgccaggagagcctgcagctgcgggagcagcagcagcagcagcagcagcagcagcagaagcatgaagatggagacagcaatggcaccttctttgtgtaccacgccatctacctggaggagctgacagctgtggagctgacagagaagatcgcccagctgttcagcatcagcccctgccagatcagccagatctacaagcagggccccaccggcatccacgtgctgatcagtgatgagatgatccagaacttccaggaggaggcctgcttcatcctggacaccatgaaggccgagaccaatgacagctaccacatcatcctgaagtag

SEQ ID NO: 68590 - DNA, 1353 bp, Artificial Sequence
  derived and/or modified sequence
atggcctgggccctgaagctgcccctggctgatgaagtcatcgagagcggcctggtgcaggactttgatgccagcctgtctggaattggccaggagctgggcgctggggcctacagcatgtctgatgtgctggccctgcccatcttcaagcaggaggagagcagcctgcccccagacaatgaaaacaagatcctgcccttccagtatgtgctgtgtgccgccaccagccctgctgtgaagctgcatgatgagaccctgacctacctgaaccagggccagagctatgagatccgcatgctggacaacaggaagctgggggagctgcctgagatcaacgggaagctggtgaagagcatcttccgggtggtgttccatgaccggcggctgcagtacacagagcaccagcagctggagggctggcgctggaacagacctggggaccgcatcctggacatcgacatccccatgtctgtgggcatcatcgacccccgggccaaccccacccagctgaacacagtggagttcctgtgggaccctgccaagaggaccagcgtcttcatccagcccaagggagctgacaggaagcagaagacagaccgggagaagatggagaagaggacccctcatgagaaggagaagtaccagcccagctatgagaccaccatcctgacagaatgtagcccctggccagagatcacctacgtgaacaacagccccagccctggcttcaacagcagccacagcagcttcagcctgggggagggcaatggcagccccaaccaccagcctgagcccccacctcctgtgacagacaacctgctgcccaccaccaccccccaggaggcccagcagtggctgcacaggaaccgcttcagcaccttcaccaggctcttcaccaacttcagcggggctgacctgctgaagctgaccagagatgatgtgatccagatctgtggccctgcagatggcatccgcctcttcaatgccctgaagggccgcatggtgcggccccggctgaccatctacgtgtgccaggagagcctgcagctgcgggagcagcagcagcagcagcagcagcagcagcagaagcatgaagatggagacagcaatggcaccttctttgtgtaccacgccatctacctggaggagctgacagctgtggagctgacagagaagatcgcccagctgttcagcatcagcccctgccagatcagccagatctacaagcagggccccaccggcatccacgtgctgatcagtgatgagatgatccagaacttccaggaggaggcctgcttcatcctggacaccatgaaggagaccaatgacagctaccacatcatcctgaagtag

SEQ ID NO: 68591 - DNA, 1356 bp, Artificial Sequence
  derived and/or modified sequence
atggcctgggccctgaagctgcccctggccgacgaggtgatcgagtcaggccttgtgcaggattttgatgcttccttaagtggcataggccaggaacttggtgccggtgcctactccatgtccgacgttttagctctgccaattttcaagcaagaagaatcttccctcccaccggacaatgagaataaaatcttgccctttcaatatgtcttgtgcgccgctaccagccccgctgtaaagctccacgacgagacactaacctatctgaaccaagggcaatcctacgagatccggatgctcgataatagaaaattgggcgaattgccagaaataaatggaaaattggtgaaatccatctttcgcgtagtcttccacgaccgccggctgcaatacacggaacatcagcagctggagggatggcgatggaaccgaccaggtgatcgaattcttgatatagacattcccatgagcgttggtatcatcgaccctcgagccaatcccactcagcttaacactgtcgagttcctctgggatcccgcgaagcgaacatctgttttcattcagccaaagggagctgacagaaaacagaagactgatagagagaaaatggagaagagaacaccacatgagaaggaaaagtaccagccgtcctacgagactacaatactgaccgagtgtagcccatggcccgagataacgtacgtgaataattctccaagtcctggctttaacagctctcactcttcattttcattgggagagggaaacggatcaccaaatcaccagcccgagccgccaccacctgtgacggacaatctactacctactactactccgcaggaagcacagcaatggctccatcgcaatcgcttctcaacatttacacgattgttcaccaatttttccggcgcggacttgttgaaactgactcgggatgacgtgatccagatctgtgggcccgccgatggaatcaggctgttcaatgcactgaaggggcgaatggtaaggccaagactgacaatctacgtgtgccaggaatctttgcagctccgagagcagcagcagcagcagcaacagcagcagcagaaacatgaagatggtgactcgaacggcacattctttgtgtatcacgcgatctatctcgaggagcttacagccgtcgagctgactgaaaaaattgctcagttatttagcatcagtccctgtcaaattagccagatatacaaacagggaccgactggcatccacgttcttatatccgacgaaatgatacagaatttccaggaagaggcctgcttcatactggataccatgaaggctgagacaaacgatagctaccacataatcctaaaatag

SEQ ID NO: 68592 - DNA, 1353 bp, Artificial Sequence
  derived and/or modified sequence
atggcctgggccctgaagctgcccctggccgacgaggtgatcgagtcaggactcgtccaggacttcgacgcctctctgtccggcattggccaggagcttggcgcgggcgcttacagtatgtcagacgtacttgctctcccgatcttcaagcaggaggagagcagtctccctcctgataatgagaataagattctgcccttccagtacgtgctatgcgcagctacatcccctgccgtgaaactccatgatgagaccctgacgtatttgaatcagggtcagagttatgaaattagaatgctcgacaaccgcaagcttggggaattaccagagattaatggtaagctcgttaaaagcattttcagggtggtgtttcacgacagaagattgcagtacacggaacaccagcagttagagggatggcgatggaatcggcctggagaccggattttggacattgatattcctatgtctgtaggaattattgatccgcgcgcaaacccaactcagctaaatactgttgagttcctgtgggatcctgctaaacgaacttctgtgttcatacagcctaagggtgcggacagaaaacagaaaacggaccgcgagaagatggaaaaacgcactccacacgaaaaagaaaagtaccagccttcgtatgagacaaccattcttactgagtgctcgccttggcccgaaattacttatgtgaataactccccaagccctggcttcaatagctcacattcaagcttttctttaggggaggggaacggaagccctaatcatcagcctgagcctcctccaccagtgaccgataacctgctgcctaccaccacgcctcaggaagcacagcagtggctgcacaggaaccgcttcagtacattcaccaggttatttaccaacttctctggtgctgatctccttaagctgacacgggatgatgttattcagatttgcggccccgcagacggcattaggctgttcaacgcattaaaaggccggatggtgcggccacggttgaccatttatgtgtgtcaggaatcactgcaactgcgcgaacagcagcagcagcagcagcaacagcagcagaaacacgaagatggtgattccaacggcactttctttgtgtaccacgctatctacctggaagagttgacagcggtcgagctaacagagaaaatcgctcagctgttttccatctcgccatgccagataagccagatttacaaacagggtcccactggaattcatgtcttgatcagcgatgagatgatccagaactttcaagaggaagcatgttttattcttgacaccatgaaagagaccaatgattcttaccatataatacttaaatag

SEQ ID NO: 68593 - DNA, 1356 bp, Artificial Sequence
  derived and/or modified sequence
atggcttgggcactgaagctgcccctcgcagacgaagtgatcgagagcggactggtgcaagatttcgacgcatccctgtctggcatcggacaggagttaggagctggggcttatagcatgagcgatgttttggccctgcccattttcaaacaagaagaatcttcactgccaccagataatgagaataaaatactcccctttcagtatgtcctctgcgccgcaacgagtccggctgtaaagctgcacgatgagaccttaacatacttaaaccagggtcagtcatacgaaataaggatgttagataacaggaaactgggcgaactgcccgaaatcaacggcaaactcgtgaagagcattttccgtgtagttttccatgaccgacggctgcagtatacggagcatcagcagttggaagggtggcggtggaatcgccctggggaccggatcctcgatatcgacattcccatgagtgtgggaatcatcgatccaagggcgaaccccacgcagttgaacactgtcgaattcttgtgggaccctgccaagcggaccagcgtctttattcagcctaagggcgcagaccgtaaacagaagactgaccgggagaaaatggaaaaaagaactccccatgagaaggaaaaatatcagccttcttatgaaactaccatcctaactgagtgctccccgtggcctgaaatcacctacgtcaacaacagcccaagtcccggatttaattcttcccatagctccttcagtctgggcgaagggaatggttcacctaatcaccagcccgaaccacctccacccgtgacagataatcttcttcctactactaccccccaggaggcacagcagtggttacatagaaatcgcttctcgacattcacacggttattcacaaacttttctggggcagacctgcttaagctgacacgtgatgacgttatacagatttgcggccctgccgacggcataaggctgttcaacgctctgaaaggtcggatggtgcggcctaggcttacaatatatgtgtgccaggagtcgcttcagttgagagaacaacagcagcagcagcagcagcagcagcagaagcacgaggatggcgattctaatgggacattcttcgtgtatcatgccatttatttggaagaattgacggccgtcgaactcactgaaaaaatcgcccagttgttctccatctctccgtgccaaattagtcagatttataagcagggccctactggtatccacgtgttgattagcgacgagatgatccagaattttcaagaggaggcttgttttattctggacactatgaaggcggagacaaatgacagttaccacattattctgaagtag

SEQ ID NO: 68594 - DNA, 1353 bp, Artificial Sequence
  derived and/or modified sequence
atggcttgggctctgaaacttcctctggccgacgaggtgattgagtcaggtttggtgcaggatttcgacgcatccctgagcggcatcgggcaggaactcggggctggcgcatatagtatgtcagacgtgttggccctgccaatcttcaagcaggaagaaagttctctgccaccagacaacgaaaacaagatcctaccgttccaatatgtactgtgcgctgcgacatcccccgcagtaaagttgcacgacgaaaccttaacctacctgaaccagggacagtcttacgaaattcggatgcttgacaatcgtaaactgggagagctgcccgaaattaacggcaagctagttaagagtatatttcgagtcgtcttccacgacagacgtctccaatacacagaacatcagcagctggaggggtggcgctggaatcgccctggggatcggattctcgatatcgacattcctatgtcggttgggatcatcgatcccagagctaatccaacccagttgaacacggtggagtttctgtgggatcctgcaaagagaactagtgtatttatccaacccaagggggcagacaggaagcagaaaacagaccgcgaaaagatggaaaaacgcactcctcacgagaaagagaagtatcaacctagctatgaaacaactattctcaccgaatgtagtccttggcccgagatcacctatgtcaataattcgccatctcccggtttcaatagttcgcattcttctttctcactgggggaaggcaatggtagccccaatcaccaacccgaacccccacctccggtgactgacaatctattaccaacaacaacaccacaggaggcgcagcagtggctccatcggaaccggttcagtaccttcacgcggctgttcaccaatttcagcggagcagatcttctgaaactgactagggacgacgtcatccagatttgtgggccagccgatggcatacgcctgtttaacgctctgaagggaagaatggtcaggcccaggcttactatttatgtctgtcaggaaagtctccagctccgagagcagcagcaacaacagcagcagcagcagcaaaagcacgaggatggcgattctaacggaaccttttttgtctaccacgcgatttatctggaggaactcacggctgtggagctgaccgagaagatagctcagttattttccattagcccatgtcagatctcccagatctataaacagggacccaccggcattcatgttttgattagtgacgaaatgatccagaacttccaagaggaggcatgtttcattcttgacacaatgaaggaaaccaatgatagctatcatatcatcctgaagtag

SEQ ID NO: 68595 - DNA, 3562 bp, Artificial Sequence
  derived and/or modified sequence
gacgtcatgttcgccgggcaggcgaggaaagaggacgccatgattggttggcgctggggcggcggacggtggaagggcctggcgagtctaggttttacgcctgtgctggactttctccttccatgtttccaggccgtggggggctacagagggcgagaagtcggctcagcggaaacctggatttggttctaagccgtggggttgagaaggggtgaccggaagtgatcgtgggactgaccggaagcgaggcctggaggggaaagagagagcgagacctgggagggagggggcctccagcagaaaggggcgggggaaaaggtgcaaaagcagcgtgggagcgccgggctggcttcctgcggctgctgctggtctgactgggaagcagcaagccaccactacgaactctcaagaggagtgggagtgcgggagtccagagctgcctctgggaagtctgcagtagttgagcaaaggggtcctcacgttcctgagagctgggcaggggggattttggaacctggggcagccaagaacgagcagccaagggtacgggagattagttgtgcacagagcagtgctggtcgggcttgggggtggctggtgggcactgcgtgggaaaccttggtttgtagttttcttggtttgcgttactcctgttgggtagaattaccctccgcgcctttgtacaagacacggtgtctcctggggcaaggaaggagccaggatggcctgggctctgaagctgcctctggccgacgaagtgattgaatccgggttggtgcaggactttgatgctagcctgtccgggatcggccaggaactgggtgctggtgcctatagcatgagtgatgtccttgcattgcccatttttaagcaagaagagtcgagtttgcctcctgataatgagaataaaatcctgccttttcaatatgtgctttgtgctgctacctctccagcagtgaaactccatgatgaaaccctaacgtatctcaatcaaggacagtcttatgaaattcgaatgctagacaataggaaacttggagaacttccagaaattaatggcaaattggtgaagagtatattccgtgtggtgttccatgacagaaggcttcagtacactgagcatcagcagctagagggctggaggtggaaccgacctggagacagaattcttgacatagatatcccgatgtctgtgggtataatcgatcctagggctaatccaactcaactaaatacagtggagttcctgtgggaccctgcaaagaggacatctgtgtttattcagcccaaaggtgcagacagaaagcaaaaaacggatagggaaaaaatggagaaacgaacacctcatgaaaaggagaaatatcagccttcctatgagacaaccatactcacagagtgttctccatggcccgagatcacgtatgtcaataactccccatcacctggcttcaacagttcccatagcagtttttctcttggggaaggaaatggttcaccaaaccaccagccagagccaccccctccagtcacagataacctcttaccaacaaccacacctcaggaagctcagcagtggttgcatcgaaatcgtttttctacattcacaaggcttttcacaaacttctcaggggcagatttattgaaattaactagagatgatgtgatccaaatctgtggccctgcagatggaatcagactttttaatgcattaaaaggccggatggtgcgtccaaggttaaccatttatgtttgtcaggaatcactgcagttgagggagcagcaacaacagcagcagcaacagcagcagaagcatgaggatggagactcaaatggtactttcttcgtttaccatgctatctatctagaagaactaacagctgttgaattgacagaaaaaattgctcagcttttcagcatttccccttgccagatcagccagatttacaagcaggggccaacaggaattcatgtgctcatcagtgatgagatgatacagaactttcaggaagaagcatgttttattctggacacaatgaaagcagaaaccaatgatagctatcatatcatactgaagtaggagtgcggcgtttcgtgcccagtggctgctccttccttcacctctgaaaacggccctcttgaagggggatatgaatggagatttgaaggtctgcaagaacctgactcgtctgactgtgtgtggaggagtccaggccatggaggcagaatcctggccctctgtgttggcccaagctcttgtggtacacacagattactgcccaatatgcagttctgcagctgttttagttaaatttctggaccttgttgttgttaaatatcagtagaaactctacataatttagagtgtatgtagggcataatgatgatgggaattgtgtgatgtttaacaggaagatcttaaattttgtgatatggagccctgtaatttttttcttatataaaaatgggtatctatattcataagactaggtcttcaatctctttgtactggtctcaaatgtactggtatctctgctttttgccacagtttgtccctgaaaactttatcagtgaggagaaatacagaattttccttttggttcccctgtaataccacaactaatagtattttcagctaacatttattgaccaggcagtgtgataaattttttgaatgaccatcttgtttaaccccctaatcacactatctgaagtaggtgctatagtgacccccaaccgaagatgaggaaatggagacacacagtggctaagtagcttgctaggtgccaggagctggcaggcagtgatgctgaaatccaaaccaggcaatctggccctccttattcaccctctcataccaccagtgctacccattataacctgtgttcacttcgcttattactgtggcccttctggtgactacaacataacactgagtatgaactgaggaattaaccactgaaagagacaaagcacacctaaataatgatgaacaaatcaagacctacaagaaatgaacacatagatgctttttaagtgtcattagttatcggaatcaaagaatttgaggtggtgacaactggggattatctgtaactccccaaatttactgttcttgaatgacattctcaaactatttattaatgagttagtctcatccctgctttctgtttcctctctctgcatcttctcttggcataggaagttattttactcatgctatgttttttaatagaagctttacaaaaaaagatgcattcccttcctgttcacactcttaccatgtttttgttcttccttaagaatgattgtgtgtgtgtgtgtgtgtgtgtgtaagtgtgtaagtgtaacatcatgggttttctttcttcacttgtaaagttttatctagaaatacttttacaggttatgttgaggtacacaaagataatgttctaagattgtgtattggatttggatttgtgtgtgtgtgtgtgtgtgtgtgtgtttaaagcatttgataaggtttaaatgttttttatacagagatttttgttcattaaactcaatctgcatcatggtctaa

SEQ ID NO: 68596 - DNA, 1862 bp, Artificial Sequence
  derived and/or modified sequence
gactgaccggaagcgaggcctggaggggaaagagagagcgagacctgggagggagggggcctccagcagaaaggggcgggggaaaaggtgcaaaagcagcgtgggagcgccgggctggcttcctgcggctgctgctggtctgactgggaagcagcaagccaccactacgaactctcaagaggagtgggagtgcgggagtccagagctgcctctgggaagtctgcagtagttgagcaaaggggtcctcacgttcctgagagctgggcaggggggattttggaacctggggcagccaagaacgagcagccaagggtacgggagattagttgtgcacagagcagtgctggtcgggcttgggggtggctggtgggcactgcgtgggaaaccttggtttgtagttttcttggtttgcgttactcctgttgggtagaattaccctccgcgcctttgtacaagacacggtgtctcctggggcaaggaaggagccaggatggcctgggctctgaagctgcctctggccgacgaagtgattgaatccgggttggtgcaggactttgatgctagcctgtccgggatcggccaggaactgggtgctggtgcctatagcatgagtgatgtccttgcattgcccatttttaagcaagaagagtcgagtttgcctcctgataatgagaataaaatcctgccttttcaatatgtgctttgtgctgctacctctccagcagtgaaactccatgatgaaaccctaacgtatctcaatcaaggacagtcttatgaaattcgaatgctagacaataggaaacttggagaacttccagaaattaatggcaaattggtgaagagtatattccgtgtggtgttccatgacagaaggcttcagtacactgagcatcagcagctagagggctggaggtggaaccgacctggagacagaattcttgacatagatatcccgatgtctgtgggtataatcgatcctagggctaatccaactcaactaaatacagtggagttcctgtgggaccctgcaaagaggacatctgtgtttattcagcccaaaggtgcagacagaaagcaaaaaacggatagggaaaaaatggagaaacgaacacctcatgaaaaggagaaatatcagccttcctatgagacaaccatactcacagagtgttctccatggcccgagatcacgtatgtcaataactccccatcacctggcttcaacagttcccatagcagtttttctcttggggaaggaaatggttcaccaaaccaccagccagagccaccccctccagtcacagataacctcttaccaacaaccacacctcaggaagctcagcagtggttgcatcgaaatcgtttttctacattcacaaggcttttcacaaacttctcaggggcagatttattgaaattaactagagatgatgtgatccaaatctgtggccctgcagatggaatcagactttttaatgcattaaaaggccggatggtgcgtccaaggttaaccatttatgtttgtcaggaatcactgcagttgagggagcagcaacaacagcagcagcaacagcagcagaagcatgaggatggagactcaaatggtactttcttcgtttaccatgctatctatctagaagaactaacagctgttgaattgacagaaaaaattgctcagcttttcagcatttccccttgccagatcagccagatttacaagcaggggccaacaggaattcatgtgctcatcagtgatgagatgatacagaactttcaggaagaagcatgttttattctggacacaatgaaagaaaccaatgatagctatcatatcatactgaagtaggagtgcggcgtttcgtgcc

SEQ ID NO: 68597 - protein, 428 aa, Artificial Sequence
  derived and/or modified sequence
MRKMLAAVSRVLSGASQKPRHGLATLPSLVSISRLKQSSHLGLPKCWDYSHSLKTRQASRVLVASRNFANDATFEIKKCDLHRLEEGPPVTTVLTREDGLKYYRMMQTVRRMELKADQLYKQKIIRGFCHLCDGQEACCVGLEAGINPTDHLITAYRAHGFTFTRGLSVREILAELTGRKGGCAKGKGGSMHMYAKNFYGGNGIVGAQVPLGAGIALACKYNGKDEVCLTLYGDGAANQGQIFEAYNMAALWKLPCIFICENNRYGMGTSVERAAASTDYYKRGDFIPGLRVDGMDILCVREATRFAAAYCRSGKGPILMELQTYRYHGHSMSDPGVSYRTREEIQEVRSKSDPIMLLKDRMVNSNLASVEELKEIDVEVRKEIEDAAQFATADPEPPLEELGYHIYSSDPPFEVRGANQWIKFKSVS

SEQ ID NO: 68598 - protein, 205 aa, Artificial Sequence
  derived and/or modified sequence
MRKMLAAVSRVLSGASQKPRHGLATLPSLVSISRLKQSSHLGLPKCWDYSHSLKTRQASRVLVASRNFANDATFEIKKCDLHRLEEGPPVTTVLTREDGLKYYRMMQTVRRMELKADQLYKQKIIRGFCHLCDGQEACCVGLEAGINPTDHLITAYRAHGFTFTRGLSVREILAELTGRKGGCAKGKGGSMHMYAKNFYGGNGIV

SEQ ID NO: 68599 - DNA, 1287 bp, Artificial Sequence
  derived and/or modified sequence
atgaggaagatgctcgccgcagtttcccgggtgttgtccggcgcaagtcagaaaccaaggcatggtctggctacactaccttccctcgtgagcatctccaggttgaaacagtcttctcacctcggtctaccaaaatgctgggattactcccattcattgaaaacacgccaggcatctagagttctggttgccagccgcaacttcgccaatgatgcaaccttcgagatcaaaaagtgtgacctacatcgattagaggaaggccctcccgtcacaactgtgctcactagagaagatggcctgaaatactatcgaatgatgcagaccgtgagacggatggaactgaaagcggaccagctatacaagcagaagattattcgcgggttctgccacctgtgtgatggacaggaagcctgctgcgttgggctggaggccgggattaaccccacagatcatctcatcacagcctatcgcgctcatggcttcacattcactaggggactatcagtgcgggaaattctcgccgagctgactgggaggaagggcggttgcgccaaaggcaagggtggatctatgcatatgtacgctaaaaacttttacggtggcaacggtatagtgggcgctcaagtcccactcggtgctggaatcgctctggcttgtaagtacaacggaaaggatgaggtgtgcctgacattatatggggacggcgccgcaaatcaaggccaaattttcgaagcctacaatatggccgcattgtggaagctgccttgcatcttcatttgcgagaataataggtacggaatgggcacctcagttgaaagggccgcggcaagcacagattactacaagcggggagattttattcctggcctgagggtcgacggaatggatattttgtgcgtgagagaggccacccgattcgcggcggcgtattgtcggagcggcaaggggccaattctgatggagctgcagacctatcgttatcacggacacagcatgtccgaccctggcgtcagttatagaactcgtgaggaaatccaggaagtaaggagcaagagtgacccaataatgcttcttaaggatcgcatggtgaacagtaaccttgccagtgtggaagagctcaaggaaattgacgtggaagttagaaaggagatcgaggacgcagcacagtttgccacggccgacccagagccccccctcgaggagttaggatatcacatatacagctctgacccccccttcgaggtgcggggagcaaaccagtggattaaattcaagagcgtctcttag

SEQ ID NO: 68600 - DNA, 618 bp, Artificial Sequence
  derived and/or modified sequence
atgaggaagatgctggccgctgtatctagggtgctatcaggtgcaagtcaaaagccaagacacggcctcgccaccttgccctccctggtatcaattagtcgtctcaaacaaagttctcacttgggtcttccaaagtgctgggattatagtcacagcctgaaaacacgccaggcatcccgggtgttggttgcctcacggaacttcgccaacgacgcaaccttcgagatcaagaaatgcgacctccaccgcttggaagagggacctcccgtcacgaccgtcctcactcgagaggatgggctaaagtactatcgaatgatgcaaacagtgcggcgcatggagctgaaggctgatcagctctacaagcagaaaatcatccgaggattctgccatttatgtgacggacaagaggcttgctgtgtgggtctggaggcagggatcaaccccactgatcatctgattactgcctatcgagctcacggctttaccttcacccgcgggttgagcgtccgtgagatactggctgagctgacagggcgcaagggtggttgtgccaagggaaaagggggcagtatgcatatgtacgcgaaaaacttctatggcggcaacgggatcgtttag

SEQ ID NO: 68601 - DNA, 1287 bp, Artificial Sequence
  derived and/or modified sequence
atgaggaagatgctggccgctgtgtcccgggtgctgagcggggccagccagaagcccaggcatggcctggccaccctgcccagcctggtgtccatcagccggctgaagcagagcagccacctgggcctgcccaagtgctgggactacagccacagcctgaagacccggcaggccagccgggtgctggtggccagcaggaactttgccaatgatgccacctttgagatcaagaagtgtgacctgcaccggctggaggagggcccccctgtgaccaccgtgctgaccagagaagatggcctgaagtactacaggatgatgcagacagtgcggaggatggagctgaaggctgaccagctgtacaagcagaagatcatccggggcttctgccacctgtgtgatggccaggaggcctgctgcgtgggcctggaggccggcatcaaccccacagaccacctgatcacagcctaccgggcccacggcttcaccttcacccggggcctgtctgtgcgggagatcctggccgagctgactggaaggaagggcggctgtgccaagggcaaaggaggctccatgcacatgtatgccaagaacttctatggaggaaatggcatcgtgggcgcccaggtgcccctgggcgccggcatcgccctggcctgcaagtacaacgggaaggatgaggtgtgcctgaccctgtatggagatggagctgccaaccagggccagatctttgaggcctacaacatggccgccctgtggaagctgccctgcatcttcatctgtgagaacaacagatatggcatgggcacctctgtggagagagctgctgccagcacagactactacaagagaggagacttcatccctggcctgcgggtggatggcatggacatcctgtgtgtgcgggaggccaccaggtttgctgctgcctactgccgcagcggcaagggccccatcctgatggagctgcagacctaccgctaccacggccacagcatgtctgaccccggggtgtcctaccgcacccgggaggagatccaggaggtgcgcagcaagagtgaccccatcatgctgctgaaggacaggatggtgaacagcaacctggcctctgtggaggagctgaaggagattgatgtggaggtgaggaaggagattgaagatgctgcccagtttgccacagctgaccctgagccccccctggaggagctgggctaccacatctacagcagtgaccccccatttgaggtgcggggggccaaccagtggatcaagttcaagtctgtgtcctag

SEQ ID NO: 68602 - DNA, 618 bp, Artificial Sequence
  derived and/or modified sequence
atgaggaagatgctggccgctgtgtcccgggtgctgagcggggccagccagaagcccaggcatggcctggccaccctgcccagcctggtgtccatcagccggctgaagcagagcagccacctgggcctgcccaagtgctgggactacagccacagcctgaagacccggcaggccagccgggtgctggtggccagcaggaactttgccaatgatgccacctttgagatcaagaagtgtgacctgcaccggctggaggagggcccccctgtgaccaccgtgctgaccagagaagatggcctgaagtactacaggatgatgcagacagtgcggaggatggagctgaaggctgaccagctgtacaagcagaagatcatccggggcttctgccacctgtgtgatggccaggaggcctgctgcgtgggcctggaggccggcatcaaccccacagaccacctgatcacagcctaccgggcccacggcttcaccttcacccggggcctgtctgtgcgggagatcctggccgagctgactggaaggaagggcggctgtgccaagggcaaaggaggctccatgcacatgtatgccaagaacttctatggaggaaatggcatcgtgtag

SEQ ID NO: 68603 - DNA, 1287 bp, Artificial Sequence
  derived and/or modified sequence
atgcggaagatgctggccgccgtgagccgggtgctgagcggcgccagccaaaagcccagacatggacttgcaactctgccttccctagtgagcatctccagattgaagcagagtagtcacctgggactaccgaaatgctgggactacagccacagtctgaagacacggcaggcatcgagagttcttgtggccagtaggaattttgcaaatgacgctactttcgagatcaagaagtgcgacttgcatcgccttgaggaaggtcctccagtgaccacggtgctgaccagagaggatgggctgaagtattaccgaatgatgcagacagtgcgacggatggaactgaaagctgatcagctatacaagcaaaaaatcatccggggcttctgccatctatgcgacggacaagaggcatgctgcgtgggactggaagccggtattaaccccacagaccacctcatcactgcctatcgggcgcacggatttacctttacacgaggcttgtccgtgcgcgagatcttggcagagcttaccggtaggaaaggtgggtgcgcgaagggtaaaggcgggagcatgcacatgtacgccaagaatttttacggcggtaacggcatcgtgggcgctcaggtccccctgggcgcgggaatcgctctggcatgtaaatacaatgggaaagacgaggtgtgtcttacgctctacggcgacggtgctgccaatcaggggcagatctttgaagcatataatatggccgccctgtggaagctgccgtgcatatttatatgcgagaataaccgatacggaatgggtacgagtgtagagcgagccgctgcatcaactgattattacaaaaggggggacttcattcctggactccgcgttgatggaatggacatcctctgtgttagggaggccaccagattcgcggctgcttattgtaggtcgggcaagggccctatactgatggagctccagacataccggtaccacgggcattcgatgtcagatccgggggtgtcatacaggacgagggaggaaatacaggaagtgcgctccaagtctgatcctattatgctcttgaaagacaggatggtcaatagcaacctggcctccgtcgaagaactgaaagagatcgacgtcgaggtgagaaaagagattgaggatgctgcacagtttgcaaccgccgacccagagcctccgctagaggagttaggctaccacatctatagctccgacccccccttcgaggtgcgaggagccaaccaatggatcaaattcaagtccgtaagctag

SEQ ID NO: 68604 - DNA, 618 bp, Artificial Sequence
  derived and/or modified sequence
atgcggaagatgctggccgccgtgagccgggtgctgagcggcgcctctcagaagccaaggcacgggctggccacactgccttctctcgtgagtattagtcggctgaagcaatcttcccatctgggcctgccaaagtgctgggattactctcacagcttgaaaacgaggcaggccagccgcgtgcttgtggcttcaagaaacttcgcgaacgacgccacatttgaaataaagaaatgtgacttgcatagactggaggaaggcccgcctgtgaccaccgttttaacccgggaagacggtctgaagtactaccgtatgatgcagaccgttagacggatggaactgaaagcagatcagctgtacaagcagaaaataattcgaggtttttgccatctctgcgatggccaggaggcctgctgcgtcggactggaggcagggatcaacccgacagatcatctcatcacagcttatcgcgcccacggatttactttcactcggggcctcagcgtgagggaaatcctggccgagttgacaggtcgcaaaggtggatgcgcgaaagggaaaggcggatcaatgcacatgtacgcaaagaacttctatggggggaacgggatagtctag

SEQ ID NO: 68605 - DNA, 1287 bp, Artificial Sequence
  derived and/or modified sequence
atgagaaagatgctggctgccgtctccagagtactgagcggggcttcccaaaaacctcgtcacgggctggcaactctgccaagtcttgtaagcatctccaggctgaaacagagtagccatctcgggctgcctaaatgttgggactattcccactccctgaaaacacggcaggccagcagggtccttgtcgcctctaggaatttcgccaatgacgccactttcgagatcaagaagtgcgacctgcataggttagaagagggccctcctgtgacaactgtgctgacacgcgaagacggactaaaatattataggatgatgcagaccgtgcgacggatggaactaaaagccgaccaactgtacaaacagaagatcattcggggtttctgccacctctgcgacgggcaggaagcgtgttgtgtcgggttggaggcaggcataaacccaaccgatcatctcataaccgcctacagagcacatgggttcacattcacccggggactctcagtccgggagattctggccgagctgaccggcaggaagggtggatgcgctaagggtaaaggaggctcaatgcacatgtatgcaaagaacttttatggaggcaacggcatcgtgggcgcacaggtgcccctgggggctggcatcgctctggcctgtaagtacaatgggaaagatgaggtgtgccttaccctctacggcgacggagctgccaaccaagggcagatcttcgaagcatacaacatggctgccttgtggaagcttccttgtatttttatttgcgaaaacaaccgatacggaatgggtacaagcgtcgaacgcgcagctgccagcactgactactacaaacgtggggacttcatacccggactccgggtggatggaatggacattctctgcgtcagggaagctacccgtttcgccgcagcctactgcagatcaggtaaggggcctattttgatggaactgcagacttatcggtaccatgggcactccatgtctgacccaggcgtgtcttaccgtactagggaagagattcaggaggtgcgtagcaaatctgacccaatcatgctcttaaaagatagaatggttaattccaatctcgctagtgtggaagagctgaaagagatcgacgtagaggttaggaaggaaattgaggatgctgcgcagttcgcaactgctgaccctgagccgcctctggaggagctcgggtaccatatctacagctcagaccctccgttcgaggtcagaggagctaatcagtggatcaaattcaagtctgtttcctag

SEQ ID NO: 68606 - DNA, 618 bp, Artificial Sequence
  derived and/or modified sequence
atgagaaagatgctggccgctgtatctcgggtcctgtcgggcgcaagtcagaagcccaggcatggccttgccacactgccctctctggtttccatctctcgcttaaagcagtcttcccacttgggcttgcctaagtgctgggactattctcacagtttaaagacccgccaggcctcccgagtgctcgtggccagccggaatttcgccaatgatgccaccttcgagattaagaaatgcgacctccatcgactggaggagggcccaccagtgaccacagtccttactcgggaagacggcctcaagtattaccggatgatgcagactgttcggaggatggaactcaaagctgaccagctgtataaacagaagattattcgcggattttgccacctctgtgatgggcaagaggcgtgttgtgtcggacttgaagccggaatcaacccaacggatcatttgatcaccgcctatagggcacatggtttcacttttaccaggggcctctcagtgcgggagattttagcagagttaacggggcgaaaggggggttgtgctaagggtaaaggcggatctatgcacatgtatgcgaagaatttttatggcggtaatggcatcgtatag

SEQ ID NO: 68607 - DNA, 3484 bp, Artificial Sequence
  derived and/or modified sequence
agcgcatgacgttattacgactctgtcacgccgcggtgcgactgaggcgtggcgtctgctggggcacctgaaggagacttgggggcacccgcgtcgtgcctcctgggttgtgaggagtcgccgctgccgccactgcctgtgcttcatgaggaagatgctcgccgccgtctcccgcgtgctgtctggcgcttctcagaagccgagacatggtcttgctacgttgcccagtctggtctccatctccaggctcaagcagtcctcccacctcggcctcccaaagtgctgggattactctcactctcttaaaaccaggcaggcaagcagagtgctggtagcatcccgtaattttgcaaatgatgctacatttgaaattaagaaatgtgaccttcaccggctggaagaaggccctcctgtcacaacagtgctcaccagggaggatgggctcaaatactacaggatgatgcagactgtacgccgaatggagttgaaagcagatcagctgtataaacagaaaattattcgtggtttctgtcacttgtgtgatggtcaggaagcttgctgtgtgggcctggaggccggcatcaaccccacagaccatctcatcacagcctaccgggctcacggctttactttcacccggggcctttccgtccgagaaattctcgcagagcttacaggacgaaaaggaggttgtgctaaagggaaaggaggatcgatgcacatgtatgccaagaacttctacgggggcaatggcatcgtgggagcgcaggtgcccctgggcgctgggattgctctagcctgtaagtataatggaaaagatgaggtctgcctgactttatatggcgatggtgctgctaaccagggccagatattcgaagcttacaacatggcagctttgtggaaattaccttgtattttcatctgtgagaataatcgctatggaatgggaacgtctgttgagagagcggcagccagcactgattactacaagagaggcgatttcattcctgggctgagagtggatggaatggatatcctgtgcgtccgagaggcaacaaggtttgctgctgcctattgtagatctgggaaggggcccatcctgatggagctgcagacttaccgttaccacggacacagtatgagtgaccctggagtcagttaccgtacacgagaagaaattcaggaagtaagaagtaagagtgaccctattatgcttctcaaggacaggatggtgaacagcaatcttgccagtgtggaagaactaaaggaaattgatgtggaagtgaggaaggagattgaggatgctgcccagtttgccacggccgatcctgagccacctttggaagagctgggctaccacatctactccagcgacccaccttttgaagttcgtggtgccaatcagtggatcaagtttaagtcagtcagttaaggggaggagaaggagaggttataccttcagggggctaccagacagtgttctcaacttggttaaggaggaagaaaacccagtcaatgaaattcaatgaaattcttggaaacttccattaagtgtgtagattgagcaggtagtaattgcatgcagtttgtacattagtgcattaaaagatgaattattgagtgcttaaagattatttttgacttaaaatagtatactttgaacaaatactctaattatgaaaaggaagaacaattccttgtatgcctgtttcccctgcccccagccacctttttgggaggagaccattatggcggggcccctcacagcattctaccaaccatagcacccaccccgagcagcgctggtgctgcagcctgttcgcgctgaccatttctctacaagatacaatatttattatcaggcaagaggacagttccattttaaaataagacttttgtaatcattccaattttgtaatcatttcaaaggccacataacttagttttctctacttacacattcagtataaatatgaagctattttctgttcatatcaaacattaactacaaggcacattcgtatcagttttgtgtttctcaaattgaagtaccataccagttctgaggcagtgtcccagcttccatgtttgttaaataccccttgtttgtttcaccattccagcaagtgctgaagggtgtactttttttgagacagggtcgggctctgttgcccaggctggagtgcagtggtgtgatcatggctcactgcagcctccacacctcctgggctcaagcaatcctcccacctcagcctcctgcatagctgggactacaagtgaatttcctaatattccgggaggtcaaaaccaaggctcactgttttcacaatacacacagttctatgtttataaataacaggtttcaaaagaaactcaggacagtatttaaaacaagttcttaaactattaattgaacaatggcatttttaaatatgtaaacacagcggaattcgtgtatacactaacagaagctttaacaaaacatgtagcgtggtgggacactctgccacagcttagctgattggtatcaagccttgtctttggtttctgaggcctcctgagcccttctgtactgggagaccgcactccagagtctgcagaggagaccacccctgggaaacaaacacagctgtcttcagagtcagtgcttcaagccaacagagcttaaaactgcagtccctaatttaaaaacctaatgaaaataaaaacattctcctcacatatggaggtgacgctcgtgtcccagcagtagtaggacatggccttagaggtacgtacctgcagagagctggctatttcaaatgactcgggaacaagaaggcaggctgcagtttaaagaagggggtgggtccagcgtgcaggcacgcttgccatgtgcctccacccactcccagccaggcattaatggcaggagattggccagctcttctctgtcacattcctatttctgacttctgcctggctttcagtttctgccccaccttggctttttcccagcttgaacctaatagaactccagagtttggggggaggcccagccctttgttttctgctcttgaagcatattcacacataaaaagttgtattctcttatacaaactgttttgaggctcttaccgtagtcgaaggtatcttagatcttccttagtgatctcattaagaatatccgaaagtgtataaccctcttcaacaatctgaaacaaagatcagatccttaagagctgagcagctgtgtaacaacagcataagaatttctttgttgtaaatttaccttttcaattgtctttgcatcagctccttgcagccgcaaccagtctataagctctttatctgttctctgcccgtaggggcctgctgggttctctgtaatacctgtaacgattggcaatttgttatatattagtctaaccataaaactcttcaaaagtaaccagttggattaataaatgattccagaatgtaaatgtgatgtgaaaaagagatg

SEQ ID NO: 68608 - DNA, 1527 bp, Artificial Sequence
  derived and/or modified sequence
gaaggagacttgggggcacccgcgtcgtgcctcctgggttgtgaggagtcgccgctgccgccactgcctgtgcttcatgaggaagatgctcgccgccgtctcccgcgtgctgtctggcgcttctcagaagccgtttgcagggtccccccccccccgccaccttacagtaggaagaaaattgagttccagatatgaagtcacctttgaaagtgcccaggcaagcagagtgctggtagcatcccgtaattttgcaaatgatgctacatttgaaattaagaaatgtgaccttcaccggctggaagaaggccctcctgtcacaacagtgctcaccagggaggatgggctcaaatactacaggatgatgcagactgtacgccgaatggagttgaaagcagatcagctgtataaacagaaaattattcgtggtttctgtcacttgtgtgatggtcaggaagcttgctgtgtgggcctggaggccggcatcaaccccacagaccatctcatcacagcctaccgggctcacggctttactttcacccggggcctttccgtccgagaaattctcgcagagcttacaggacgaaaaggaggttgtgctaaagggaaaggaggatcgatgcacatgtatgccaagaacttctacgggggcaatggcatcgtgggagcgcaggtgcccctgggcgctgggattgctctagcctgtaagtataatggaaaagatgaggtctgcctgactttatatggcgatggtgctgctaaccagggccagatattcgaagcttacaacatggcagctttgtggaaattaccttgtattttcatctgtgagaataatcgctatggaatgggaacgtctgttgagagagcggcagccagcactgattactacaagagaggcgatttcattcctgggctgagagtggatggaatggatatcctgtgcgtccgagaggcaacaaggtttgctgctgcctattgtagatctgggaaggggcccatcctgatggagctgcagacttaccgttaccacggacacagtatgagtgaccctggagtcagttaccgtacacgagaagaaattcaggaagtaagaagtaagagtgaccctattatgcttctcaaggacaggatggtgaacagcaatcttgccagtgtggaagaactaaaggaaattgatgtggaagtgaggaaggagattgaggatgctgcccagtttgccacggccgatcctgagccacctttggaagagctgggctaccacatctactccagcgacccaccttttgaagttcgtggtgccaatcagtggatcaagtttaagtcagtcagttaaggggaggagaaggagaggttataccttcagggggctaccagacagtgttctcaacttggttaaggaggaagaaaacccagtcaatgaaattcaatgaaattcttggaaacttccattaagtgtgtagattgagcaggtagtaattgcatgcagtttgtacattagtgcattaaaagatgaattattgagtgctt

SEQ ID NO: 68609 - DNA, 731 bp, Artificial Sequence
  derived and/or modified sequence
gccgcggtgcgactgaggcgtggcgtctgctggggcacctgaaggagacttgggggcacccgcgtcgtgcctcctgggttgtgaggagtcgccgctgccgccactgcctgtgcttcatgaggaagatgctcgccgccgtctcccgcgtgctgtctggcgcttctcagaagccgagacatggtcttgctacgttgcccagtctggtctccatctccaggctcaagcagtcctcccacctcggcctcccaaagtgctgggattactctcactctcttaaaaccaggcaggcaagcagagtgctggtagcatcccgtaattttgcaaatgatgctacatttgaaattaagaaatgtgaccttcaccggctggaagaaggccctcctgtcacaacagtgctcaccagggaggatgggctcaaatactacaggatgatgcagactgtacgccgaatggagttgaaagcagatcagctgtataaacagaaaattattcgtggtttctgtcacttgtgtgatggtcaggaagcttgctgtgtgggcctggaggccggcatcaaccccacagaccatctcatcacagcctaccgggctcacggctttactttcacccggggcctttccgtccgagaaattctcgcagagcttacaggacgaaaaggaggttgtgctaaagggaaaggaggatcgatgcacatgtatgccaagaacttctacgggggcaatggcatcgtg

SEQ ID NO: 68610 - DNA, 1287 bp, Artificial Sequence
  derived and/or modified sequence
atgagaaagatgctggccgccgtgagcagagtgctgagcggcgccagccagaagcccagacacggcctggccaccctgcccagcctggtgagcatcagcagactgaagcagagcagccacctgggcctgcccaagtgctgggactacagccacagcctgaagaccagacaggccagcagagtgctggtggccagcagaaacttcgccaacgacgccaccttcgagatcaagaagtgcgacctgcacagactggaggagggcccccccgtgaccaccgtgctgaccagagaggacggcctgaagtactacagaatgatgcagaccgtgagaagaatggagctgaaggccgaccagctgtacaagcagaagatcatcagaggcttctgccacctgtgcgacggccaggaggcctgctgcgtgggcctggaggccggcatcaaccccaccgaccacctgatcaccgcctacagagcccacggcttcaccttcaccagaggcctgagcgtgagagagatcctggccgagctgaccggcagaaagggcggctgcgccaagggcaagggcggcagcatgcacatgtacgccaagaacttctacggcggcaacggcatcgtgggcgcccaggtgcccctgggcgccggcatcgccctggcctgcaagtacaacggcaaggacgaggtgtgcctgaccctgtacggcgacggcgccgccaaccagggccagatcttcgaggcctacaacatggccgccctgtggaagctgccctgcatcttcatctgcgagaacaacagatacggcatgggcaccagcgtggagagagccgccgccagcaccgactactacaagagaggcgacttcatccccggcctgagagtggacggcatggacatcctgtgcgtgagagaggccaccagattcgccgccgcctactgcagaagcggcaagggccccatcctgatggagctgcagacctacagataccacggccacagcatgagcgaccccggcgtgagctacagaaccagagaggagatccaggaggtgagaagcaagagcgaccccatcatgctgctgaaggacagaatggtgaacagcaacctggccagcgtggaggagctgaaggagatcgacgtggaggtgagaaaggagatcgaggacgccgcccagttcgccaccgccgaccccgagccccccctggaggagctgggctaccacatctacagcagcgacccccccttcgaggtgagaggcgccaaccagtggatcaagttcaagagcgtgagctag

SEQ ID NO: 68611 - DNA, 618 bp, Artificial Sequence
  derived and/or modified sequence
atgagaaagatgctggccgccgtgagcagagtgctgagcggcgccagccagaagcccagacacggcctggccaccctgcccagcctggtgagcatcagcagactgaagcagagcagccacctgggcctgcccaagtgctgggactacagccacagcctgaagaccagacaggccagcagagtgctggtggccagcagaaacttcgccaacgacgccaccttcgagatcaagaagtgcgacctgcacagactggaggagggcccccccgtgaccaccgtgctgaccagagaggacggcctgaagtactacagaatgatgcagaccgtgagaagaatggagctgaaggccgaccagctgtacaagcagaagatcatcagaggcttctgccacctgtgcgacggccaggaggcctgctgcgtgggcctggaggccggcatcaaccccaccgaccacctgatcaccgcctacagagcccacggcttcaccttcaccagaggcctgagcgtgagagagatcctggccgagctgaccggcagaaagggcggctgcgccaagggcaagggcggcagcatgcacatgtacgccaagaacttctacggcggcaacggcatcgtgtag

SEQ ID NO: 68612 - protein, 204 aa, Artificial Sequence
  derived and/or modified sequence
MRKMLAAVSRVLSGASQKPASRVLVASRNFANDATFEIKKCDLHRLEEGPPVTTVLTREDGLKYYRMMQTVRRMELKADQLYKQKIIRGFCHLCDGQFLLPLTQEACCVGLEAGINPTDHLITAYRAHGFTFTRGLSVREILAELTGRKGGCAKGKGGSMHMYAKNFYGGNGIVGAQVPLGAGIALACKYNGKDEVCLTLYGDG

SEQ ID NO: 68613 - protein, 109 aa, Artificial Sequence
  derived and/or modified sequence
MELQTYRYHGHSMSDPGVSYRTREEIQEVRSKSDPIMLLKDRMVNSNLASVEELKEIDVEVRKEIEDAAQFATADPEPPLEELGYHIYSSDPPFEVRGANQWIKFKSVS

SEQ ID NO: 68614 - protein, 397 aa, Artificial Sequence
  derived and/or modified sequence
MRKMLAAVSRVLSGASQKPASRVLVASRNFANDATFEIKKCDLHRLEEGPPVTTVLTREDGLKYYRMMQTVRRMELKADQLYKQKIIRGFCHLCDGQFLLPLTQEACCVGLEAGINPTDHLITAYRAHGFTFTRGLSVREILAELTGRKGGCAKGKGGSMHMYAKNFYGGNGIVGAQVPLGAGIALACKYNGKDEVCLTLYGDGAANQGQIFEAYNMAALWKLPCIFICENNRYGMGTSVERAAASTDYYKRGDFIPGLRVDGMDILCVREATRFAAAYCRSGKGPILMELQTYRYHGHSMSDPGVSYRTREEIQEVRSKSDPIMLLKDRMVNSNLASVEELKEIDVEVRKEIEDAAQFATADPEPPLEELGYHIYSSDPPFEVRGANQWIKFKSVS

SEQ ID NO: 68615 - DNA, 615 bp, Artificial Sequence
  derived and/or modified sequence
atgaggaaaatgctggctgcggtgagccgcgtactcagcggagcttctcagaaaccagccagccgggtgctagtcgcatcgagaaattttgcgaacgatgctaccttcgagatcaaaaaatgtgatcttcaccgactcgaagaagggccacccgtgacaacagttctgactagagaggacggtctgaagtattaccggatgatgcagacagtgagacggatggaactgaaggccgaccagctgtacaaacaaaagattatccgaggattctgccatctgtgtgacggccaattcctgctcccactgacccaggaggcttgctgcgtgggcctggaagcagggattaaccccactgaccatctcattaccgcatacagagcccacggttttactttcactcgggggttgtctgtgcgggagatcctcgcggagctgacagggcgcaagggtggatgtgccaagggaaaagggggttccatgcatatgtatgctaaaaatttttatggtggcaatgggatcgtgggtgcacaggttccgctcggcgctgggattgcgctcgcatgtaaatataacgggaaagatgaagtctgcctgaccctgtatggcgatggatag

SEQ ID NO: 68616 - DNA, 1194 bp, Artificial Sequence
  derived and/or modified sequence
atgcgcaagatgctcgccgctgtgtcccgagttctaagcggcgcctctcaaaaacctgctagccgggtgctggtggctagtcggaacttcgcgaacgatgcaaccttcgagattaaaaagtgcgatctacatcgcctggaagagggaccccccgtgacaaccgtcctgacacgcgaggatggcctgaagtactatcgtatgatgcagacagtgaggcgcatggagcttaaagcggatcaactatacaagcagaagattatccgggggttctgtcacctgtgcgatggacagtttctgctccccctcacacaggaagcttgttgcgtagggttggaggccgggattaacccgaccgatcatttgattaccgcctatagagctcatggctttacattcacacgcggactgagcgtgagagaaatacttgctgagctgaccggaaggaaaggggggtgcgccaaaggaaagggggggagcatgcatatgtatgccaagaatttctacggaggcaacggtatcgtgggagcccaagtgcccctgggtgctggaattgctctggcttgcaagtataacgggaaagacgaagtttgccttaccctgtacggcgatggtgccgctaatcaaggccagattttcgaagcctacaatatggcagccctatggaaactgccttgcatcttcatatgcgaaaataaccggtacggcatgggaacctctgtcgagagggctgccgcgtccaccgactattacaagaggggcgactttatccccgggctgcgagtggacgggatggacatcctttgcgtacgggaggccactaggtttgctgctgcctactgtaggagtggcaaaggacccattcttatggaactgcaaacctacagataccatggccattctatgagtgaccctggagtgtcctaccgaacccgcgaggaaatccaggaggtaagaagcaagagcgatccaatcatgcttctgaaggaccgcatggttaattctaacctcgcttctgtggaagagctgaaagaaattgacgtggaggtgcgaaaggagatcgaagatgccgcacagttcgccacagcagaccctgagccacctctggaggaattagggtaccatatttactcctctgatccacccttcgaggtgcgcggagccaaccagtggatcaaattcaagtctgtatcatag

SEQ ID NO: 68617 - DNA, 615 bp, Artificial Sequence
  derived and/or modified sequence
atgaggaagatgctggccgctgtgtcccgggtgctgagcggggccagccagaagccagccagccgggtgctggtggccagcaggaactttgccaatgatgccacctttgagatcaagaagtgtgacctgcaccggctggaggagggcccccctgtgaccaccgtgctgaccagagaagatggcctgaagtactacaggatgatgcagacagtgcggaggatggagctgaaggctgaccagctgtacaagcagaagatcatccggggcttctgccacctgtgtgatggccagttcctgctgcccctgacccaggaggcctgctgcgtgggcctggaggccggcatcaaccccacagaccacctgatcacagcctaccgggcccacggcttcaccttcacccggggcctgtctgtgcgggagatcctggccgagctgaccggcaggaaaggaggctgtgccaagggcaagggcggctccatgcacatgtatgccaagaacttctacggcggcaatggaattgtgggcgcccaggtgcccctgggcgccggcatcgccctggcctgcaagtacaacgggaaggatgaggtgtgcctgaccctgtatggagatggatag

SEQ ID NO: 68618 - DNA, 1194 bp, Artificial Sequence
  derived and/or modified sequence
atgaggaagatgctggccgctgtgtcccgggtgctgagcggggccagccagaagccagccagccgggtgctggtggccagcaggaactttgccaatgatgccacctttgagatcaagaagtgtgacctgcaccggctggaggagggcccccctgtgaccaccgtgctgaccagagaagatggcctgaagtactacaggatgatgcagacagtgcggaggatggagctgaaggctgaccagctgtacaagcagaagatcatccggggcttctgccacctgtgtgatggccagttcctgctgcccctgacccaggaggcctgctgcgtgggcctggaggccggcatcaaccccacagaccacctgatcacagcctaccgggcccacggcttcaccttcacccggggcctgtctgtgcgggagatcctggccgagctgaccggcaggaaaggaggctgtgccaagggcaagggcggctccatgcacatgtatgccaagaacttctacggcggcaatggaattgtgggcgcccaggtgcccctgggcgccggcatcgccctggcctgcaagtacaacgggaaggatgaggtgtgcctgaccctgtatggagatggagctgccaaccagggccagatctttgaggcctacaacatggccgccctgtggaagctgccctgcatcttcatctgtgagaacaacagatatggcatgggcacctctgtggagagagctgctgccagcacagactactacaagagaggagacttcatccctggcctgcgggtggatggcatggacatcctgtgtgtgcgggaggccaccaggtttgctgctgcctactgccgcagcggcaagggccccatcctgatggagctgcagacctaccgctaccacggccacagcatgtctgaccccggggtgtcctaccgcacccgggaggagatccaggaggtgcgcagcaagagtgaccccatcatgctgctgaaggacaggatggtgaacagcaacctggcctctgtggaggagctgaaggagattgatgtggaggtgaggaaggagattgaagatgctgcccagtttgccacagctgaccctgagccccccctggaggagctgggctaccacatctacagcagtgaccccccatttgaggtgcggggggccaaccagtggatcaagttcaagtctgtgtcctag

SEQ ID NO: 68619 - DNA, 615 bp, Artificial Sequence
  derived and/or modified sequence
atgcggaagatgctggccgccgtgagccgggtgctgagcggcgcctcgcagaaacccgcatctcgggttctcgtcgcttccaggaacttcgcaaacgacgccaccttcgagatcaagaagtgtgacctccaccgtttggaggagggccctcctgtgacaaccgtcttaacaagagaagacggactgaagtattacaggatgatgcagactgtgcgcagaatggaactcaaggcagatcagctgtacaaacaaaagatcattcgcggattttgtcacctgtgcgatggccagtttctcctgcccctgactcaggaagcctgttgcgtgggcctggaagctgggatcaaccccacagaccacttgataaccgcctaccgcgcccacgggtttacgttcactagaggtctgagtgtgcgggaaatactggccgagctgacgggcaggaagggaggatgtgcgaaaggcaagggcgggtccatgcatatgtatgcaaaaaatttttacggtggcaacggaatagtgggcgcacaggtgccactgggcgccgggatcgccctggcttgcaagtacaacggtaaggacgaagtgtgcctcaccttatacggcgatggttag

SEQ ID NO: 68620 - DNA, 1194 bp, Artificial Sequence
  derived and/or modified sequence
atgcggaagatgctggccgccgtgagccgggtgctgagcggcgcctcccagaagccggcttccagagtgttggtggccagtaggaatttcgccaacgatgctacatttgaaattaaaaaatgcgatttacatagactagaagaaggaccgcctgtgaccaccgtgctaaccagagaggacggcctcaagtactatcgcatgatgcagacagtgagaaggatggagctcaaggctgatcagctgtataagcagaagataattaggggattctgtcatctctgcgacggtcagttcctccttcccctgactcaggaggcttgttgcgtgggccttgaagcgggcatcaatccaacagatcatctaatcacagcttatcgagcacacggcttcacgttcacaaggggcctatctgttagagaaatattagcggagctgacaggtaggaagggaggctgtgccaagggaaaaggtggctcgatgcatatgtatgcaaaaaacttttacggcggtaacggaatcgttggagcccaggtccctctgggggctgggatagctctggcctgcaaatacaacggcaaagatgaagtgtgcctgacactgtatggcgacggcgccgctaaccagggccagatatttgaggcctacaatatggccgctctgtggaagcttccctgcatcttcatttgtgagaacaacagatacggaatgggaacctcagttgagagggcagccgcttccaccgattattacaagcgtggagacttcatcccaggccttagagtcgacggaatggacatactgtgcgtgagggaagcaactaggttcgccgccgcgtactgtcgatcaggaaaaggacctattctgatggagctccagacctataggtatcacggccatagtatgtccgaccccggcgtgtcttatcggactcgtgaggaaatccaagaagttcgttcaaagtccgaccctattatgcttcttaaggatagaatggtgaatagtaatctggcaagcgtcgaagagctcaaagagattgatgttgaggtgcgcaaagagattgaggatgcggcacagtttgccacagcggatccagaaccgccgttagaggaattgggctatcacatctacagtagtgatcctcctttcgaggtccgtggtgcaaatcagtggatcaagttcaaaagcgtcagctag

SEQ ID NO: 68621 - DNA, 615 bp, Artificial Sequence
  derived and/or modified sequence
atgcggaagatgcttgctgccgtctcacgcgtgctgtcgggcgctagccagaagcctgcttccagggtgctggtagcttcgaggaattttgccaacgatgcgacgtttgaaattaagaagtgcgacctgcacaggctggaagaaggaccccctgtgacaacggtgctcacccgggaggatgggctaaagtattacaggatgatgcagactgtgaggcgcatggaattgaaggccgaccagctgtataagcagaagatcatccgcggtttttgccacctgtgtgacggccagttcctactgcccctgacacaagaggcatgctgtgtaggtctggaggcagggataaacccgacagatcatctgataacagcttaccgggctcatggcttcacatttaccagggggctgtcggtgagggagatcctagccgagctgaccggcagaaaagggggttgtgctaaaggcaagggcggatccatgcacatgtatgccaagaacttctacggagggaacggcattgtcggtgcccaagtccctctgggggctggtattgcactggcatgtaaatataacggtaaggatgaagtctgcctaacactctatggagatggttag

SEQ ID NO: 68622 - DNA, 1194 bp, Artificial Sequence
  derived and/or modified sequence
atgcgcaaaatgcttgcagccgttagccgcgtgctgtctggggcttcacaaaaacctgctagcagagttttagttgcctcacgaaattttgctaacgacgcgacttttgaaatcaagaagtgcgatctgcaccggctggaggaggggcctccggtaactactgtgctcactagagaagatgggctgaagtactaccggatgatgcagaccgtgcgtcgaatggaactcaaagccgaccagctctataaacagaagataattcggggtttctgtcacctctgcgatggtcaatttttgctgcccctcacacaggaagcctgttgtgtgggactggaagcaggaattaatcctaccgaccacctgattactgcctatagggctcatgggttcacttttaccagggggctgagcgtgagggagatcttggctgaactgactgggaggaagggtggctgtgctaaagggaagggcggatccatgcacatgtacgcaaaaaacttttacggcggtaatggcattgtgggtgctcaggtgcccctcggcgcagggatcgctttggcttgtaagtataacggaaaggacgaggtttgtttgactctgtacggagacggggcagccaaccagggacagatatttgaggcgtacaacatggccgctctttggaagctgccttgcatcttcatttgtgaaaacaataggtatgggatggggacgtcggttgagagagctgctgccagtaccgattactataagcgaggagattttatccctggtttgcgagtcgacgggatggatatcttgtgcgtgagggaggctacacgctttgctgccgcttattgtcggtccggaaagggaccaatcttgatggaattacagacttaccggtaccatggacatagcatgagtgacccaggagtgtcctataggacaagggaagaaatccaagaagtcaggtccaagtcagaccctatcatgctcctgaaggaccgaatggtgaatagcaacctggctagtgtcgaggagctgaaagaaattgatgtcgaagtgaggaaggagattgaagacgccgctcagtttgcaactgcagaccctgagcctcctctagaggaattagggtaccacatctacagcagtgatcctcctttcgaggtcagaggcgctaatcaatggatcaagtttaagtcagtctcctag

SEQ ID NO: 68623 - DNA, 699 bp, Artificial Sequence
  derived and/or modified sequence
gctggggcacctgaaggagacttgggggcacccgcgtcgtgcctcctgggttgtgaggagtcgccgctgccgccactgcctgtgcttcatgaggaagatgctcgccgccgtctcccgcgtgctgtctggcgcttctcagaagccggcaagcagagtgctggtagcatcccgtaattttgcaaatgatgctacatttgaaattaagaaatgtgaccttcaccggctggaagaaggccctcctgtcacaacagtgctcaccagggaggatgggctcaaatactacaggatgatgcagactgtacgccgaatggagttgaaagcagatcagctgtataaacagaaaattattcgtggtttctgtcacttgtgtgatggtcagtttctccttcctctaacacaggaagcttgctgtgtgggcctggaggccggcatcaaccccacagaccatctcatcacagcctaccgggctcacggctttactttcacccggggcctttccgtccgagaaattctcgcagagcttacaggacgaaaaggaggttgtgctaaagggaaaggaggatcgatgcacatgtatgccaagaacttctacgggggcaatggcatcgtgggagcgcaggtgcccctgggcgctgggattgctctagcctgtaagtataatggaaaagatgaggtctgcctgactttatatggcgatgg

SEQ ID NO: 68624 - DNA, 3391 bp, Artificial Sequence
  derived and/or modified sequence
agcgcatgacgttattacgactctgtcacgccgcggtgcgactgaggcgtggcgtctgctggggcacctgaaggagacttgggggcacccgcgtcgtgcctcctgggttgtgaggagtcgccgctgccgccactgcctgtgcttcatgaggaagatgctcgccgccgtctcccgcgtgctgtctggcgcttctcagaagccggcaagcagagtgctggtagcatcccgtaattttgcaaatgatgctacatttgaaattaagaaatgtgaccttcaccggctggaagaaggccctcctgtcacaacagtgctcaccagggaggatgggctcaaatactacaggatgatgcagactgtacgccgaatggagttgaaagcagatcagctgtataaacagaaaattattcgtggtttctgtcacttgtgtgatggtcagtttctccttcctctaacacaggaagcttgctgtgtgggcctggaggccggcatcaaccccacagaccatctcatcacagcctaccgggctcacggctttactttcacccggggcctttccgtccgagaaattctcgcagagcttacaggacgaaaaggaggttgtgctaaagggaaaggaggatcgatgcacatgtatgccaagaacttctacgggggcaatggcatcgtgggagcgcaggtgcccctgggcgctgggattgctctagcctgtaagtataatggaaaagatgaggtctgcctgactttatatggcgatggtgctgctaaccagggccagatattcgaagcttacaacatggcagctttgtggaaattaccttgtattttcatctgtgagaataatcgctatggaatgggaacgtctgttgagagagcggcagccagcactgattactacaagagaggcgatttcattcctgggctgagagtggatggaatggatatcctgtgcgtccgagaggcaacaaggtttgctgctgcctattgtagatctgggaaggggcccatcctgatggagctgcagacttaccgttaccacggacacagtatgagtgaccctggagtcagttaccgtacacgagaagaaattcaggaagtaagaagtaagagtgaccctattatgcttctcaaggacaggatggtgaacagcaatcttgccagtgtggaagaactaaaggaaattgatgtggaagtgaggaaggagattgaggatgctgcccagtttgccacggccgatcctgagccacctttggaagagctgggctaccacatctactccagcgacccaccttttgaagttcgtggtgccaatcagtggatcaagtttaagtcagtcagttaaggggaggagaaggagaggttataccttcagggggctaccagacagtgttctcaacttggttaaggaggaagaaaacccagtcaatgaaattcaatgaaattcttggaaacttccattaagtgtgtagattgagcaggtagtaattgcatgcagtttgtacattagtgcattaaaagatgaattattgagtgcttaaagattatttttgacttaaaatagtatactttgaacaaatactctaattatgaaaaggaagaacaattccttgtatgcctgtttcccctgcccccagccacctttttgggaggagaccattatggcggggcccctcacagcattctaccaaccatagcacccaccccgagcagcgctggtgctgcagcctgttcgcgctgaccatttctctacaagatacaatatttattatcaggcaagaggacagttccattttaaaataagacttttgtaatcattccaattttgtaatcatttcaaaggccacataacttagttttctctacttacacattcagtataaatatgaagctattttctgttcatatcaaacattaactacaaggcacattcgtatcagttttgtgtttctcaaattgaagtaccataccagttctgaggcagtgtcccagcttccatgtttgttaaataccccttgtttgtttcaccattccagcaagtgctgaagggtgtactttttttgagacagggtcgggctctgttgcccaggctggagtgcagtggtgtgatcatggctcactgcagcctccacacctcctgggctcaagcaatcctcccacctcagcctcctgcatagctgggactacaagtgaatttcctaatattccgggaggtcaaaaccaaggctcactgttttcacaatacacacagttctatgtttataaataacaggtttcaaaagaaactcaggacagtatttaaaacaagttcttaaactattaattgaacaatggcatttttaaatatgtaaacacagcggaattcgtgtatacactaacagaagctttaacaaaacatgtagcgtggtgggacactctgccacagcttagctgattggtatcaagccttgtctttggtttctgaggcctcctgagcccttctgtactgggagaccgcactccagagtctgcagaggagaccacccctgggaaacaaacacagctgtcttcagagtcagtgcttcaagccaacagagcttaaaactgcagtccctaatttaaaaacctaatgaaaataaaaacattctcctcacatatggaggtgacgctcgtgtcccagcagtagtaggacatggccttagaggtacgtacctgcagagagctggctatttcaaatgactcgggaacaagaaggcaggctgcagtttaaagaagggggtgggtccagcgtgcaggcacgcttgccatgtgcctccacccactcccagccaggcattaatggcaggagattggccagctcttctctgtcacattcctatttctgacttctgcctggctttcagtttctgccccaccttggctttttcccagcttgaacctaatagaactccagagtttggggggaggcccagccctttgttttctgctcttgaagcatattcacacataaaaagttgtattctcttatacaaactgttttgaggctcttaccgtagtcgaaggtatcttagatcttccttagtgatctcattaagaatatccgaaagtgtataaccctcttcaacaatctgaaacaaagatcagatccttaagagctgagcagctgtgtaacaacagcataagaatttctttgttgtaaatttaccttttcaattgtctttgcatcagctccttgcagccgcaaccagtctataagctctttatctgttctctgcccgtaggggcctgctgggttctctgtaatacctgtaacgattggcaatttgttatatattagtctaaccataaaactcttcaaaagtaaccagttggattaataaatgattccagaatgtaaatgtgatgtgaaaaagagatg

SEQ ID NO: 68625 - DNA, 615 bp, Artificial Sequence
  derived and/or modified sequence
atgagaaagatgctggccgccgtgagcagagtgctgagcggcgccagccagaagcccgccagcagagtgctggtggccagcagaaacttcgccaacgacgccaccttcgagatcaagaagtgcgacctgcacagactggaggagggcccccccgtgaccaccgtgctgaccagagaggacggcctgaagtactacagaatgatgcagaccgtgagaagaatggagctgaaggccgaccagctgtacaagcagaagatcatcagaggcttctgccacctgtgcgacggccagttcctgctgcccctgacccaggaggcctgctgcgtgggcctggaggccggcatcaaccccaccgaccacctgatcaccgcctacagagcccacggcttcaccttcaccagaggcctgagcgtgagagagatcctggccgagctgaccggcagaaagggcggctgcgccaagggcaagggcggcagcatgcacatgtacgccaagaacttctacggcggcaacggcatcgtgggcgcccaggtgcccctgggcgccggcatcgccctggcctgcaagtacaacggcaaggacgaggtgtgcctgaccctgtacggcgacggctag

SEQ ID NO: 68626 - DNA, 1194 bp, Artificial Sequence
  derived and/or modified sequence
atgagaaagatgctggccgccgtgagcagagtgctgagcggcgccagccagaagcccgccagcagagtgctggtggccagcagaaacttcgccaacgacgccaccttcgagatcaagaagtgcgacctgcacagactggaggagggcccccccgtgaccaccgtgctgaccagagaggacggcctgaagtactacagaatgatgcagaccgtgagaagaatggagctgaaggccgaccagctgtacaagcagaagatcatcagaggcttctgccacctgtgcgacggccagttcctgctgcccctgacccaggaggcctgctgcgtgggcctggaggccggcatcaaccccaccgaccacctgatcaccgcctacagagcccacggcttcaccttcaccagaggcctgagcgtgagagagatcctggccgagctgaccggcagaaagggcggctgcgccaagggcaagggcggcagcatgcacatgtacgccaagaacttctacggcggcaacggcatcgtgggcgcccaggtgcccctgggcgccggcatcgccctggcctgcaagtacaacggcaaggacgaggtgtgcctgaccctgtacggcgacggcgccgccaaccagggccagatcttcgaggcctacaacatggccgccctgtggaagctgccctgcatcttcatctgcgagaacaacagatacggcatgggcaccagcgtggagagagccgccgccagcaccgactactacaagagaggcgacttcatccccggcctgagagtggacggcatggacatcctgtgcgtgagagaggccaccagattcgccgccgcctactgcagaagcggcaagggccccatcctgatggagctgcagacctacagataccacggccacagcatgagcgaccccggcgtgagctacagaaccagagaggagatccaggaggtgagaagcaagagcgaccccatcatgctgctgaaggacagaatggtgaacagcaacctggccagcgtggaggagctgaaggagatcgacgtggaggtgagaaaggagatcgaggacgccgcccagttcgccaccgccgaccccgagccccccctggaggagctgggctaccacatctacagcagcgacccccccttcgaggtgagaggcgccaaccagtggatcaagttcaagagcgtgagctag

SEQ ID NO: 68627 - protein, 359 aa, Artificial Sequence
  derived and/or modified sequence
MRKMLAAVSRVLSGASQKPASRVLVASRNFANDATFEIKKCDLHRLEEGPPVTTVLTREDGLKYYRMMQTVRRMELKADQLYKQKIIRGFCHLCDGQEACCVGLEAGINPTDHLITAYRAHGFTFTRGLSVREILAELTGRKGGCAKGKGGSMHMYAKNFYGGNGIVGAQGQIFEAYNMAALWKLPCIFICENNRYGMGTSVERAAASTDYYKRGDFIPGLRVDGMDILCVREATRFAAAYCRSGKGPILMELQTYRYHGHSMSDPGVSYRTREEIQEVRSKSDPIMLLKDRMVNSNLASVEELKEIDVEVRKEIEDAAQFATADPEPPLEELGYHIYSSDPPFEVRGANQWIKFKSVS

SEQ ID NO: 68628 - DNA, 330 bp, Artificial Sequence
  derived and/or modified sequence
atggagttgcagacttatcgctatcacggacattcgatgtctgacccaggtgtgagctatagaactagggaagaaatacaggaagttcggagcaaatccgatccaatcatgttactcaaggatcgaatggttaattctaacctggcatctgtggaggagctcaaagagatcgatgtcgaagtgcgaaaggagatcgaagatgctgctcagttcgcgaccgcagatcccgagcctccccttgaggagctggggtatcacatctattcttcagatccgccttttgaggtgcgaggggccaaccagtggataaagttcaagagcgtgtcctag

SEQ ID NO: 68629 - DNA, 1080 bp, Artificial Sequence
  derived and/or modified sequence
atgcgcaaaatgctggccgccgtttcaagggtcttgtcaggcgccagccagaagccagcatccagggttctggtggcaagccgtaactttgcgaacgatgctaccttcgaaattaagaagtgcgacctccatcgactcgaggaagggcctcctgtcaccaccgtattgacccgcgaagacggcttgaagtattatcggatgatgcaaactgtgcgccgcatggagctgaaggccgatcagttgtacaagcaaaagattatcaggggcttctgccacctctgcgacgggcaggaagcctgctgcgttgggctcgaagcaggcattaatcccaccgatcacctgataactgcatacagggcacacggttttaccttcaccagaggtctgagcgtgagagaaattctcgccgagttaaccggtaggaagggagggtgcgccaaaggcaaaggaggctctatgcacatgtacgccaaaaatttttacggcgggaacgggatagttggggctcaggggcagatcttcgaggcgtataatatggccgctctgtggaaactgccctgcatctttatatgcgagaataaccgctacggtatgggaacgtccgttgagagagccgccgcctcaacggactattacaaacgcggagactttatccctggtctgcgggtcgacggaatggatattttgtgtgtgagagaggcaacacgcttcgccgcagcttactgtagaagtggaaagggaccaattttgatggaactgcagacctatcggtaccatggccattcaatgagcgaccctggagttagctaccgcacacgggaggaaatccaagaggtccggagcaagtcagatcccataatgctgctgaaagaccgtatggtgaactccaatctggcgagcgtagaagagttaaaagagatcgatgtagaggtgagaaaagagatcgaggatgcggctcaattcgccaccgcagaccccgagccacccttggaagagctcggataccatatttacagtagtgatcctcctttcgaagtgcgaggggcaaatcaatggattaagttcaagtccgtttcgtag

SEQ ID NO: 68630 - DNA, 330 bp, Artificial Sequence
  derived and/or modified sequence
atggagctgcagacctaccgctaccacggccacagcatgtctgaccccggggtgtcctaccgcacccgggaggagatccaggaggtgcgcagcaagagtgaccccatcatgctgctgaaggacaggatggtgaacagcaacctggcctctgtggaggagctgaaggagattgatgtggaggtgaggaaggagattgaagatgctgcccagtttgccacagctgaccctgagccccccctggaggagctgggctaccacatctacagcagtgaccccccatttgaggtgcggggggccaaccagtggatcaagttcaagtctgtgtcctag

SEQ ID NO: 68631 - DNA, 1080 bp, Artificial Sequence
  derived and/or modified sequence
atgaggaagatgctggccgctgtgtcccgggtgctgagcggggccagccagaagccagccagccgggtgctggtggccagcaggaactttgccaatgatgccacctttgagatcaagaagtgtgacctgcaccggctggaggagggcccccctgtgaccaccgtgctgaccagagaagatggcctgaagtactacaggatgatgcagacagtgcggaggatggagctgaaggctgaccagctgtacaagcagaagatcatccggggcttctgccacctgtgtgatggccaggaggcctgctgcgtgggcctggaggccggcatcaaccccacagaccacctgatcacagcctaccgggcccacggcttcaccttcacccggggcctgtctgtgcgggagatcctggccgagctgactggaaggaagggcggctgtgccaagggcaaaggaggctccatgcacatgtatgccaagaacttctatggaggaaatggcatcgtgggcgcccagggccagatctttgaggcctacaacatggccgccctgtggaagctgccctgcatcttcatctgtgagaacaacagatatggcatgggcacctctgtggagagagctgctgccagcacagactactacaagagaggagacttcatccctggcctgcgggtggatggcatggacatcctgtgtgtgcgggaggccaccaggtttgctgctgcctactgccgcagcggcaagggccccatcctgatggagctgcagacctaccgctaccacggccacagcatgtctgaccccggggtgtcctaccgcacccgggaggagatccaggaggtgcgcagcaagagtgaccccatcatgctgctgaaggacaggatggtgaacagcaacctggcctctgtggaggagctgaaggagattgatgtggaggtgaggaaggagattgaagatgctgcccagtttgccacagctgaccctgagccccccctggaggagctgggctaccacatctacagcagtgaccccccatttgaggtgcggggggccaaccagtggatcaagttcaagtctgtgtcctag

SEQ ID NO: 68632 - DNA, 129 bp, Artificial Sequence
  derived and/or modified sequence
gccaaccagtggatcaagttcaagtctgtgaagggcagaagaagaagaggctacaccttccggggcctgcctgacagcgtgctgaacctggtgaaggaggaggagaaccctgtgaatgagatccagtag

SEQ ID NO: 68633 - DNA, 330 bp, Artificial Sequence
  derived and/or modified sequence
atggagctgcagacctaccggtaccacggccacagcatgagcgaccctggggtgagttaccgcacccgcgaagaaatccaggaagtccgctcgaagtcggacccgattatgcttttaaaggatcggatggtgaactccaatctcgcttctgttgaggagctgaaggagatcgacgttgaggttcggaaggaaattgaggatgctgcacagtttgcaacagcagatccggagcctcccttagaagagcttggctaccatatatactcttctgaccctccatttgaggtacgaggtgccaatcagtggatcaagttcaagtctgtctcttag

SEQ ID NO: 68634 - DNA, 1080 bp, Artificial Sequence
  derived and/or modified sequence
atgcggaagatgctggccgccgtgagccgggtgctgagcggcgcctcacaaaagccagcaagccgcgtactggtggcaagcagaaacttcgccaacgacgccactttcgaaatcaaaaagtgtgacctccatcgcctcgaggaagggccccccgtgactaccgtccttactcgcgaagatggtctgaaatattatcggatgatgcagaccgttcggcgaatggagctcaaggcagaccaattatacaaacagaagattatccgaggcttctgccacttgtgcgacgggcaggaagcctgttgtgtgggcctggaagctgggatcaatcctacagaccacctgataacagcctatagggcgcacggctttacctttacaagaggcctgagcgtgagagaaattttagctgagctgaccggtcgcaaagggggttgtgctaagggaaaggggggttccatgcatatgtatgcaaaaaatttttacggcgggaatggaattgtgggagctcaagggcagatcttcgaggcatacaacatggcagcactgtggaagttgccgtgcattttcatttgtgagaacaacaggtatggcatgggcacctctgtggagcgcgctgctgccagcactgactattacaaacgcggagactttatcccaggattgcgtgttgacggaatggatatcctgtgcgtgcgggaggcaacacggttcgcggctgcatactgcagatcaggtaaagggccgatcctgatggaattgcagacttatcgttaccatggtcatagcatgagcgaccctggggtcagctataggaccagggaagagatccaagaagtgcgatctaagagcgatccaatcatgctgttgaaggataggatggtaaatagcaacctagcctccgtcgaagaactgaaggagatcgatgttgaggtccggaaagaaatcgaagacgccgcacagttcgctactgccgaccctgagcccccgttggaggaattggggtaccacatctattcatctgaccccccattcgaggtgcgtggtgccaaccaatggatcaaatttaagtctgtctcttag

SEQ ID NO: 68635 - DNA, 330 bp, Artificial Sequence
  derived and/or modified sequence
atggaactccagacatacaggtaccacggccacagtatgagcgaccctggggtctcttatagaaccagggaggagattcaggaagtaaggtccaagtcagaccctattatgctcttaaaggatcgcatggtcaacagcaatctcgcttctgtcgaagagctgaaggagattgatgtggaggtacgcaaagaaatcgaggacgccgctcagttcgctaccgctgatccagaacctccgcttgaggaactaggatatcatatttactctagtgatcccccattcgaggtgaggggcgctaatcagtggatcaaattcaagtcagtctcttag

SEQ ID NO: 68636 - DNA, 1080 bp, Artificial Sequence
  derived and/or modified sequence
atgcgcaagatgctggcagccgtgagccgggtcttgtccggagcgtctcagaagccggctagtagagtactcgtcgcgagccggaactttgcaaacgacgccacgtttgagattaaaaaatgtgatctgcacagacttgaggaaggtcctcccgtcaccaccgtgcttacccgagaagacggcctaaaatactatagaatgatgcagacagtccggaggatggaactgaaagccgaccagctctataagcaaaagattattcggggtttctgtcatctatgtgacggtcaagaggcttgctgtgtggggcttgaggcgggaatcaatcccacggaccacttgatcactgcctatcgtgcccacgggttcaccttcacgcgcggactgtccgtcagggaaatcctggctgagctgacaggccgtaagggcggatgcgccaaagggaaggggggttccatgcacatgtatgccaagaatttttacggaggcaatggaatcgttggtgctcagggtcagatttttgaggcttacaacatggccgctctgtggaaacttccctgtatttttatctgcgaaaacaaccgatatggcatgggaacttccgtggaacgggctgccgcaagcactgattattataagagaggggatttcattccgggattgagagtcgatggaatggatattctgtgtgtgcgggaggccacaaggttcgcagcagcttactgtcgatctggcaaaggtcctatcctgatggagctgcagacatacagatatcacggccactcaatgagcgaccccggagtttcataccgtacacgggaggaaattcaggaggtgcggagcaaatcggaccctatcatgctgcttaaagacagaatggtgaatagcaacctggcctccgtcgaggaactgaaggagattgacgttgaggtgaggaaggagatcgaggatgcagcccagttcgccaccgcagacccggaacctcctttggaagaactggggtatcatatttattcctcggatcccccatttgaggtgaggggcgcaaatcagtggattaagttcaagagcgtttcatag

SEQ ID NO: 68637 - DNA, 129 bp, Artificial Sequence
  derived and/or modified sequence
gcaaatcaatggatcaagttcaagtctgtgaagggcaggagacgcaggggctacacattccgcggactgcctgattctgtgctcaatctcgtcaaggaggaggaaaacccggtgaacgagatccagtag

SEQ ID NO: 68638 - DNA, 709 bp, Artificial Sequence
  derived and/or modified sequence
gaaacattggagagtttcattctcatacaggagcaggtcatgtgaaagtaaaatggtttggggcagttggattcatgcttcgcccctcccctgtttattaccaggtggatggaatggatatcctgtgcgtccgagaggcaacaaggtttgctgctgcctattgtagatctgggaaggggcccatcctgatggagctgcagacttaccgttaccacggacacagtatgagtgaccctggagtcagttaccgtacacgagaagaaattcaggaagtaagaagtaagagtgaccctattatgcttctcaaggacaggatggtgaacagcaatcttgccagtgtggaagaactaaaggaaattgatgtggaagtgaggaaggagattgaggatgctgcccagtttgccacggccgatcctgagccacctttggaagagctgggctaccacatctactccagcgacccaccttttgaagttcgtggtgccaatcagtggatcaagtttaagtcagtcagttaaggggaggagaaggagaggttataccttcagggggctaccagacagtgttctcaacttggttaaggaggaagaaaacccagtcaatgaaattcaatgaaattcttggaaacttccattaagtgtgtagattgagcaggtagtaattgcatgcagtttgtacattagtgcattaaaagatgaattattgagtg

SEQ ID NO: 68639 - DNA, 3277 bp, Artificial Sequence
  derived and/or modified sequence
agcgcatgacgttattacgactctgtcacgccgcggtgcgactgaggcgtggcgtctgctggggcacctgaaggagacttgggggcacccgcgtcgtgcctcctgggttgtgaggagtcgccgctgccgccactgcctgtgcttcatgaggaagatgctcgccgccgtctcccgcgtgctgtctggcgcttctcagaagccggcaagcagagtgctggtagcatcccgtaattttgcaaatgatgctacatttgaaattaagaaatgtgaccttcaccggctggaagaaggccctcctgtcacaacagtgctcaccagggaggatgggctcaaatactacaggatgatgcagactgtacgccgaatggagttgaaagcagatcagctgtataaacagaaaattattcgtggtttctgtcacttgtgtgatggtcaggaagcttgctgtgtgggcctggaggccggcatcaaccccacagaccatctcatcacagcctaccgggctcacggctttactttcacccggggcctttccgtccgagaaattctcgcagagcttacaggacgaaaaggaggttgtgctaaagggaaaggaggatcgatgcacatgtatgccaagaacttctacgggggcaatggcatcgtgggagcgcagggccagatattcgaagcttacaacatggcagctttgtggaaattaccttgtattttcatctgtgagaataatcgctatggaatgggaacgtctgttgagagagcggcagccagcactgattactacaagagaggcgatttcattcctgggctgagagtggatggaatggatatcctgtgcgtccgagaggcaacaaggtttgctgctgcctattgtagatctgggaaggggcccatcctgatggagctgcagacttaccgttaccacggacacagtatgagtgaccctggagtcagttaccgtacacgagaagaaattcaggaagtaagaagtaagagtgaccctattatgcttctcaaggacaggatggtgaacagcaatcttgccagtgtggaagaactaaaggaaattgatgtggaagtgaggaaggagattgaggatgctgcccagtttgccacggccgatcctgagccacctttggaagagctgggctaccacatctactccagcgacccaccttttgaagttcgtggtgccaatcagtggatcaagtttaagtcagtcagttaaggggaggagaaggagaggttataccttcagggggctaccagacagtgttctcaacttggttaaggaggaagaaaacccagtcaatgaaattcaatgaaattcttggaaacttccattaagtgtgtagattgagcaggtagtaattgcatgcagtttgtacattagtgcattaaaagatgaattattgagtgcttaaagattatttttgacttaaaatagtatactttgaacaaatactctaattatgaaaaggaagaacaattccttgtatgcctgtttcccctgcccccagccacctttttgggaggagaccattatggcggggcccctcacagcattctaccaaccatagcacccaccccgagcagcgctggtgctgcagcctgttcgcgctgaccatttctctacaagatacaatatttattatcaggcaagaggacagttccattttaaaataagacttttgtaatcattccaattttgtaatcatttcaaaggccacataacttagttttctctacttacacattcagtataaatatgaagctattttctgttcatatcaaacattaactacaaggcacattcgtatcagttttgtgtttctcaaattgaagtaccataccagttctgaggcagtgtcccagcttccatgtttgttaaataccccttgtttgtttcaccattccagcaagtgctgaagggtgtactttttttgagacagggtcgggctctgttgcccaggctggagtgcagtggtgtgatcatggctcactgcagcctccacacctcctgggctcaagcaatcctcccacctcagcctcctgcatagctgggactacaagtgaatttcctaatattccgggaggtcaaaaccaaggctcactgttttcacaatacacacagttctatgtttataaataacaggtttcaaaagaaactcaggacagtatttaaaacaagttcttaaactattaattgaacaatggcatttttaaatatgtaaacacagcggaattcgtgtatacactaacagaagctttaacaaaacatgtagcgtggtgggacactctgccacagcttagctgattggtatcaagccttgtctttggtttctgaggcctcctgagcccttctgtactgggagaccgcactccagagtctgcagaggagaccacccctgggaaacaaacacagctgtcttcagagtcagtgcttcaagccaacagagcttaaaactgcagtccctaatttaaaaacctaatgaaaataaaaacattctcctcacatatggaggtgacgctcgtgtcccagcagtagtaggacatggccttagaggtacgtacctgcagagagctggctatttcaaatgactcgggaacaagaaggcaggctgcagtttaaagaagggggtgggtccagcgtgcaggcacgcttgccatgtgcctccacccactcccagccaggcattaatggcaggagattggccagctcttctctgtcacattcctatttctgacttctgcctggctttcagtttctgccccaccttggctttttcccagcttgaacctaatagaactccagagtttggggggaggcccagccctttgttttctgctcttgaagcatattcacacataaaaagttgtattctcttatacaaactgttttgaggctcttaccgtagtcgaaggtatcttagatcttccttagtgatctcattaagaatatccgaaagtgtataaccctcttcaacaatctgaaacaaagatcagatccttaagagctgagcagctgtgtaacaacagcataagaatttctttgttgtaaatttaccttttcaattgtctttgcatcagctccttgcagccgcaaccagtctataagctctttatctgttctctgcccgtaggggcctgctgggttctctgtaatacctgtaacgattggcaatttgttatatattagtctaaccataaaactcttcaaaagtaaccagttggattaataaatgattccagaatgtaaatgtgatgtgaaaaagagatg

SEQ ID NO: 68640 - DNA, 330 bp, Artificial Sequence
  derived and/or modified sequence
atggagctgcagacctacagataccacggccacagcatgagcgaccccggcgtgagctacagaaccagagaggagatccaggaggtgagaagcaagagcgaccccatcatgctgctgaaggacagaatggtgaacagcaacctggccagcgtggaggagctgaaggagatcgacgtggaggtgagaaaggagatcgaggacgccgcccagttcgccaccgccgaccccgagccccccctggaggagctgggctaccacatctacagcagcgacccccccttcgaggtgagaggcgccaaccagtggatcaagttcaagagcgtgagctag

SEQ ID NO: 68641 - DNA, 1080 bp, Artificial Sequence
  derived and/or modified sequence
atgagaaagatgctggccgccgtgagcagagtgctgagcggcgccagccagaagcccgccagcagagtgctggtggccagcagaaacttcgccaacgacgccaccttcgagatcaagaagtgcgacctgcacagactggaggagggcccccccgtgaccaccgtgctgaccagagaggacggcctgaagtactacagaatgatgcagaccgtgagaagaatggagctgaaggccgaccagctgtacaagcagaagatcatcagaggcttctgccacctgtgcgacggccaggaggcctgctgcgtgggcctggaggccggcatcaaccccaccgaccacctgatcaccgcctacagagcccacggcttcaccttcaccagaggcctgagcgtgagagagatcctggccgagctgaccggcagaaagggcggctgcgccaagggcaagggcggcagcatgcacatgtacgccaagaacttctacggcggcaacggcatcgtgggcgcccagggccagatcttcgaggcctacaacatggccgccctgtggaagctgccctgcatcttcatctgcgagaacaacagatacggcatgggcaccagcgtggagagagccgccgccagcaccgactactacaagagaggcgacttcatccccggcctgagagtggacggcatggacatcctgtgcgtgagagaggccaccagattcgccgccgcctactgcagaagcggcaagggccccatcctgatggagctgcagacctacagataccacggccacagcatgagcgaccccggcgtgagctacagaaccagagaggagatccaggaggtgagaagcaagagcgaccccatcatgctgctgaaggacagaatggtgaacagcaacctggccagcgtggaggagctgaaggagatcgacgtggaggtgagaaaggagatcgaggacgccgcccagttcgccaccgccgaccccgagccccccctggaggagctgggctaccacatctacagcagcgacccccccttcgaggtgagaggcgccaaccagtggatcaagttcaagagcgtgagctag

SEQ ID NO: 68642 - DNA, 129 bp, Artificial Sequence
  derived and/or modified sequence
gccaaccagtggatcaagttcaagagcgtgaagggcagaagaagaagaggctacaccttcagaggcctgcccgacagcgtgctgaacctggtgaaggaggaggagaaccccgtgaacgagatccagtag

SEQ ID NO: 68643 - protein, 500 aa, Artificial Sequence
  derived and/or modified sequence
MALRRLLLLLLLSLESLDLLPSVHGARGRAANRTLSAGGAAVGGRRAGGALARGGRELNGTARAPGIPEAGSRRGQPAAAVAAAASAAVTYETCWGYYDVSGQYDKEFECNNSESGYLYCCGTCYYRFCCKKRHEKLDQRQCTNYQSPVWVQTPSTKVVSPGPENKYDPEKDKTNFTVYITCGVIAFVIVAGVFAKVSYDKAHRPPREMNIHRALADILRQQGPIPIAHCERETISAIDTSPKENTPVRSSSKNHYTPVRTAKQTPEKPRMNNILTSATEPYDLSFSRSFQNLAHLPPSYESAVKTNPSKYSSLKRLTDKEADEYYMRRRHLPDLAARGTLPLNVIQMSQQKPLPRERPRRPIRAMSQDRVLSPDRGLPDEFSMPYDRILSDEQLLSTERLHSQDPLLSPERTAFPEQSLSRAISHTDVFVSTPVLDRYRMSKMHSHPSASNNSYATLGQSQTAAKRHAFASRRHNTVEQLHYIPGHHTCYTASKTEVTV

SEQ ID NO: 68644 - DNA, 1503 bp, Artificial Sequence
  derived and/or modified sequence
atggccctgagaagactgctgctgctgctgctgctgagcctggagagcctggacctgctgcccagcgtgcacggcgccagaggcagagccgccaacagaaccctgagcgccggcggcgccgccgtgggcggcagaagagccggcggcgccctggccagaggcggcagagagctgaacggcaccgccagagcccccggcatccccgaggccggcagcagaagaggccagcccgccgccgccgtggccgccgccgccagcgccgccgtgacctacgagacctgctggggctactacgacgtgagcggccagtacgacaaggagttcgagtgcaacaacagcgagagcggctacctgtactgctgcggcacctgctactacagattctgctgcaagaagagacacgagaagctggaccagagacagtgcaccaactaccagagccccgtgtgggtgcagacccccagcaccaaggtggtgagccccggccccgagaacaagtacgaccccgagaaggacaagaccaacttcaccgtgtacatcacctgcggcgtgatcgccttcgtgatcgtggccggcgtgttcgccaaggtgagctacgacaaggcccacagaccccccagagagatgaacatccacagagccctggccgacatcctgagacagcagggccccatccccatcgcccactgcgagagagagaccatcagcgccatcgacaccagccccaaggagaacacccccgtgagaagcagcagcaagaaccactacacccccgtgagaaccgccaagcagacccccgagaagcccagaatgaacaacatcctgaccagcgccaccgagccctacgacctgagcttcagcagaagcttccagaacctggcccacctgccccccagctacgagagcgccgtgaagaccaaccccagcaagtacagcagcctgaagagactgaccgacaaggaggccgacgagtactacatgagaagaagacacctgcccgacctggccgccagaggcaccctgcccctgaacgtgatccagatgagccagcagaagcccctgcccagagagagacccagaagacccatcagagccatgagccaggacagagtgctgagccccgacagaggcctgcccgacgagttcagcatgccctacgacagaatcctgagcgacgagcagctgctgagcaccgagagactgcacagccaggaccccctgctgagccccgagagaaccgccttccccgagcagagcctgagcagagccatcagccacaccgacgtgttcgtgagcacccccgtgctggacagatacagaatgagcaagatgcacagccaccccagcgccagcaacaacagctacgccaccctgggccagagccagaccgccgccaagagacacgccttcgccagcagaagacacaacaccgtggagcagctgcactacatccccggccaccacacctgctacaccgccagcaagaccgaggtgaccgtgtag

SEQ ID NO: 68645 - DNA, 1503 bp, Artificial Sequence
  derived and/or modified sequence
atggcactgcgccgacttttgctcctgctgcttctgagtctagagtctttagacttgctgccaagcgtccatggcgcaaggggcagggccgccaatcgcacgttgagcgccggcggagcagcagtgggcgggcgtagggccggaggtgccctagctagagggggacgcgaactgaacgggaccgcacgcgctccagggatccccgaggccggcagtcggcgtggccagcctgccgcagccgtcgcagccgcagccagcgcagccgtcacttatgagacatgctggggctattacgatgtgtccggtcaatacgacaaggaatttgagtgtaacaatagtgaatccggttatctttactgttgcggaacctgttattatcgcttctgctgcaagaaaaggcacgagaaactggaccaacgccagtgtactaactatcagagcccggtgtgggtccagaccccgtcgaccaaggttgtcagccctggaccagagaacaaatacgatcctgaaaaggacaaaaccaatttcacggtttatattacatgtggggtgatagcattcgtgatcgtggcaggagtattcgctaaggtgtcttatgacaaggcccaccggccaccccgcgagatgaacatccacagggcactggccgatatacttagacagcaggggccaatacccattgcccactgcgagagggagaccatctctgctattgacacaagcccaaaggagaacaccccagtcagatcctcaagcaagaaccactacaccccagtgcgaactgctaagcagacccctgagaagcccaggatgaataacattctgacatccgctaccgaaccttatgacctcagtttcagcaggagttttcaaaatctggctcatctgccaccctcatacgagtctgccgtgaagactaatccatcaaagtacagtagtctgaaacgtctcacagacaaggaagccgatgagtactatatgcggcggaggcaccttccggatctagcagcgcgcggcacacttcctctcaacgttatccagatgtctcagcagaagcctctccctcgagagaggcctcggcgccctatcagagcaatgtcacaggaccgcgtcctgagccctgatcggggtctgcccgatgagttcagcatgccatacgacaggatcctgagcgacgaacagctcctcagcacagaacggctccactcccaggaccccctcctctcccccgagcgtacggccttccctgagcagtccttaagcagggctatttctcataccgacgtgttcgtctccacccccgtgcttgaccgttaccggatgagcaaaatgcacagccacccatctgcttccaataattcttatgccaccctgggccagtcccaaacagccgccaagcgacacgcatttgccagccggcgccacaacacagttgagcagctgcactacattcccggacatcatacctgctacaccgccagtaagacagaagtaacagtctag

SEQ ID NO: 68646 - DNA, 1503 bp, Artificial Sequence
  derived and/or modified sequence
atggccctgcggcggctgctgctgctgctgctgctgagcctggagagcctggacctgctgcccagcgtgcacggggcccggggccgggccgccaacagaaccctgtctgctggaggagctgctgtgggcggcagaagagctggaggagccctggcccggggcggccgggagctgaatggaacagcccgggcccctggcatccctgaggccggcagcagaagaggccagcctgctgctgctgtggccgccgccgccagcgctgctgtgacctatgagacctgctggggctactatgatgtgtctggccagtatgacaaggagtttgagtgcaacaacagcgagagcggctacctgtactgctgcggcacctgctactaccgcttctgctgcaagaagagacatgagaagctggaccagaggcagtgcaccaactaccagagccctgtgtgggtgcagacccccagcaccaaggtggtgtccccaggccctgagaacaagtatgaccctgagaaggacaagaccaacttcaccgtgtacatcacctgtggggtgattgcctttgtgattgtggccggcgtgtttgccaaggtgtcctatgacaaggcccacaggcctccccgggagatgaacatccaccgggccctggccgacatcctgcggcagcagggccccatccccatcgcccactgtgagcgggagaccatcagcgccatcgacaccagccccaaggagaacacccctgtgcgcagcagcagcaagaaccactacacccctgtgaggacagccaagcagaccccagagaagcccaggatgaacaacatcctgaccagcgccacagagccctatgacctgtccttcagccgctccttccagaacctggcccacctgcccccatcctatgagagcgctgtgaagaccaaccccagcaagtacagcagcctgaagaggctgacagacaaggaggctgatgagtactacatgagaagaagacacctgcctgacctggccgcccggggcaccctgcccctgaatgtcatccagatgagccagcagaagcccctgccccgggagcggccccggcggcccatccgggccatgagccaggacagagtgctgagcccagaccggggcctgcctgatgagttctccatgccctatgaccgcatcctgagtgatgagcagctgctgagcacagagcggctgcacagccaggaccccctgctgagccctgagaggacagccttccctgagcagagcctgagccgggccatcagccacacagatgtgtttgtgtccacccctgtgctggaccgctacaggatgagcaagatgcacagccaccccagcgccagcaacaacagctatgccaccctgggccagagccagacagctgccaagagacatgcctttgccagcagaagacacaacacagtggagcagctgcactacatccctggccaccacacctgctacacagccagcaagacagaggtgacagtgtag

SEQ ID NO: 68647 - DNA, 1503 bp, Artificial Sequence
  derived and/or modified sequence
atggccctgcggcggctgctgctgctgctgctgctgagcctggagtccctcgacttgctgccaagtgttcacggcgcaaggggccgggcggccaacagaaccctgtcagccggaggagccgccgtgggcgggagacgcgctggcggggcactggcccgcggcgggagggaactgaatggaacggccagggcccccgggattccagaggctggctctcggcgagggcaacccgctgccgcagtagcagcggctgcttccgccgcagtcacttacgaaacgtgttggggttactacgatgtgtctggccaatatgacaaagaattcgaatgcaataactcagagagcggttatctgtactgttgtggaacatgctattatcgattctgctgcaagaagcgccatgaaaaactcgaccagcgccaatgcaccaattatcagtccccagtgtgggttcagacaccttccacgaaggttgttagcccgggccctgaaaataaatacgacccagaaaaggacaagaccaacttcacggtatatattacttgcggcgttattgccttcgtcatcgttgctggagtgtttgcaaaagtgtcctacgataaagcccaccggcccccgcgggaaatgaatatccatcgcgccttagcagatattctccggcagcaggggcctattcctattgcccattgtgagcgcgaaaccatctccgctatagatacctctcctaaagaaaatactccagtgagaagttcaagcaagaatcactacactccagttcgaacagccaaacaaactccagagaagccccggatgaacaatatccttacctctgctacagagccatacgatctgagtttctcacgttccttccagaaccttgcccatctgcccccctcctacgaatccgctgtaaaaacgaatccaagcaagtatagttccttaaaacgtctcactgataaggaagctgatgagtactatatgaggcgccgccatctgccggacctggctgcaaggggcaccttgcccctgaatgtcattcagatgtcgcagcagaaacctttgccgcgggagaggcctcgcaggcctatccgagccatgtctcaagatagagtgctgagccccgaccgcggtttgcccgatgagttctctatgccctacgatcgcattctctcagacgaacagctgctgtccaccgaaagattgcactctcaagaccccctgctctcccctgagcggacggctttccccgagcagtctctgtcccgggcaatctctcacacggatgtctttgtgagcacccccgtcctcgacagatatcggatgtccaagatgcactcgcatccttcggccagcaataactcctacgctacactcggccaaagtcagactgccgcaaaaaggcacgccttcgccagccggaggcataatactgtcgaacagttgcactatatccctgggcatcacacctgctacacggcctctaagactgaggtgactgtttag

SEQ ID NO: 68648 - DNA, 1503 bp, Artificial Sequence
  derived and/or modified sequence
atggccctgcggaggcttctcctcctgctgctcctgtcactggaatcgctggatttactaccttccgtacacggcgcacggggaagggccgcaaatagaactttgtccgccggaggtgcagccgtgggcggtcggagagctgggggagccttggcccgaggcggtcgagaacttaacggcactgctcgcgctcctggtatccccgaagcaggtagcagaaggggccagcctgctgccgcagtcgcagccgctgccagcgcagcggttacgtatgagacctgctggggctactatgacgtatctggccagtatgataaggaattcgagtgcaacaattccgaatcaggctacctttattgctgcggcacctgctactaccgtttctgttgcaagaaacggcatgagaagttagaccaacgccagtgtaccaattaccaaagcccagtgtgggtgcagacaccaagcaccaaggtggttagtcccggtccagaaaataaatatgacccggaaaaagataagaccaacttcaccgtctatatcacctgtggcgtgatcgctttcgtcatcgtggcgggagtgttcgccaaagttagctatgacaaggcacacaggcctcctcgggagatgaacatccaccgagcattagccgatattctcagacagcagggaccaatccctattgcccattgcgaaagggaaacgatttccgctatagacacatcaccgaaggagaataccccagtcagaagttcctccaagaaccattacacccctgtgaggacagccaagcagacacccgagaaacctcgaatgaacaatattctgacatccgctaccgaaccttatgacctgagcttctcccggagctttcagaatttggcccatctgcctccaagttacgagtccgctgtaaagaccaacccctcaaagtattcttccctgaaaagactgacggacaaggaggcagacgaatactatatgcgccgacgacatctgcccgatctcgcagcgagggggacgttaccactcaacgtcatccaaatgagccagcaaaagcccctacctcgggagaggccacggaggcccatccgcgcaatgtctcaggaccgcgtgctgagtcccgatagagggctcccagatgagttcagcatgccctatgatcggatcctttctgacgaacaacttctgtccaccgagcggctgcacagtcaggatcctctgctgtcaccagagagaactgcgtttccggagcagagtctaagccgggctatctctcatacagacgtgttcgtgtcgacacccgtactcgaccggtacaggatgagcaaaatgcacagccatccgtccgcctccaataactcttacgccacgctcgggcaaagtcagacggctgctaagcgacatgcatttgcctctcgtcgtcataacaccgtggagcagttgcattacattcccggacatcacacttgctacactgcttcgaagacagaagtaacagtctag

SEQ ID NO: 68649 - DNA, 1503 bp, Artificial Sequence
  derived and/or modified sequence
atggcgctgcggcgcctcctgctgctgctgctgctctcgctggagtccctggacctgctgcccagcgtccacggagcccgcggccgcgccgccaaccggaccctgagtgcaggcggcgctgccgtcgggggccggagggccgggggcgccctggcacggggcggccgcgagctgaacggcaccgcccgggcgcccggaatcccggaggcgggaagccggcgggggcagcccgcggcggctgtggcggcggcggccagcgcggccgtcacctacgagacgtgctggggctactacgacgtgagcggccagtacgacaaggagttcgagtgtaacaacagcgagagcggctacctgtactgctgcggtacctgctactaccgcttctgctgcaagaagcgccacgagaagctggaccagcgccagtgcaccaactaccagagcccggtgtgggtacagacgcccagcaccaaggtggtgtcgccggggcccgagaacaagtacgacccggagaaggacaagaccaacttcaccgtctacatcacctgcggggtgatcgccttcgtcatcgtggccggcgtcttcgccaaggtctcctacgacaaggcccaccgccctccacgggagatgaacatccacagggctctggctgacatcttaagacaacagggaccaatccccatagcacactgtgaaagagaaactatctcggctatcgatacctctcccaaagagaacacgccggtcagatcgtcctccaaaaaccactacactcctgtgcgtacggccaagcagactccagagaagccacggatgaacaacatcctgacatcagccaccgagccctatgacctctccttctcccgctcgttccagaacttggcccacctgcccccatcctacgagtctgcagtaaagaccaaccccagcaagtattcatctctgaagaggctaaccgacaaggaggctgacgagtattacatgagacggcggcacctgcccgacctggctgcccgcggcaccctccccctcaatgtcatccagatgtcccaacagaagccgttgccaagggaacgaccccgccggcccatccgggccatgtcccaggacagggtcctgtccccggatcggggcctgccagatgagttcagcatgccctacgaccgcatcctgtccgacgagcagctgctctccacggagcgcctgcactcccaggacccgctgctgtccccggagcggacggcctttcccgagcagtcgctgtccagggccatctcgcacacggacgtctttgtgtccacacccgtgctggaccgctaccgcatgagcaagatgcactctcatcccagtgcctccaataactcatacgccaccctgggccagagccagacggcagccaagcgtcatgcctttgcctcacgcagacacaacacggtggagcagctgcactacatcccgggccaccacacctgctacacagccagcaagaccgaagtgaccgtgtga

SEQ ID NO: 68650 - protein, 532 aa, Artificial Sequence
  derived and/or modified sequence
MALRRLLLLLLLSLESLDLLPSVHGARGRAANRTLSAGGAAVGGRRAGGALARGGRELNGTARAPGIPEAGSRRGQPAAAVAAAASAAVTYETCWGYYDVSGQYDKEFECNNSESGYLYCCGTCYYRFCCKKRHEKLDQRQCTNYQSPVWVQTPSTKVVSPGPENKYDPEKDKTNFTVYITCGVIAFVIVAGVFAKVSYDKAHRPPREMNIHRALADILRQQGPIPIAHCERETISAIDTSPKENTPVRSSSKNHYTPVRTAKQTPGHYGKDAYRSGGPDLHNFISSGFVTLGRGHTKEKPRMNNILTSATEPYDLSFSRSFQNLAHLPPSYESAVKTNPSKYSSLKRLTDKEADEYYMRRRHLPDLAARGTLPLNVIQMSQQKPLPRERPRRPIRAMSQDRVLSPDRGLPDEFSMPYDRILSDEQLLSTERLHSQDPLLSPERTAFPEQSLSRAISHTDVFVSTPVLDRYRMSKMHSHPSASNNSYATLGQSQTAAKRHAFASRRHNTVEQLHYIPGHHTCYTASKTEVTV

SEQ ID NO: 68651 - DNA, 1599 bp, Artificial Sequence
  derived and/or modified sequence
atggccctgagaagactgctgctgctgctgctgctgagcctggagagcctggacctgctgcccagcgtgcacggcgccagaggcagagccgccaacagaaccctgagcgccggcggcgccgccgtgggcggcagaagagccggcggcgccctggccagaggcggcagagagctgaacggcaccgccagagcccccggcatccccgaggccggcagcagaagaggccagcccgccgccgccgtggccgccgccgccagcgccgccgtgacctacgagacctgctggggctactacgacgtgagcggccagtacgacaaggagttcgagtgcaacaacagcgagagcggctacctgtactgctgcggcacctgctactacagattctgctgcaagaagagacacgagaagctggaccagagacagtgcaccaactaccagagccccgtgtgggtgcagacccccagcaccaaggtggtgagccccggccccgagaacaagtacgaccccgagaaggacaagaccaacttcaccgtgtacatcacctgcggcgtgatcgccttcgtgatcgtggccggcgtgttcgccaaggtgagctacgacaaggcccacagaccccccagagagatgaacatccacagagccctggccgacatcctgagacagcagggccccatccccatcgcccactgcgagagagagaccatcagcgccatcgacaccagccccaaggagaacacccccgtgagaagcagcagcaagaaccactacacccccgtgagaaccgccaagcagacccccggccactacggcaaggacgcctacagaagcggcggccccgacctgcacaacttcatcagcagcggcttcgtgaccctgggcagaggccacaccaaggagaagcccagaatgaacaacatcctgaccagcgccaccgagccctacgacctgagcttcagcagaagcttccagaacctggcccacctgccccccagctacgagagcgccgtgaagaccaaccccagcaagtacagcagcctgaagagactgaccgacaaggaggccgacgagtactacatgagaagaagacacctgcccgacctggccgccagaggcaccctgcccctgaacgtgatccagatgagccagcagaagcccctgcccagagagagacccagaagacccatcagagccatgagccaggacagagtgctgagccccgacagaggcctgcccgacgagttcagcatgccctacgacagaatcctgagcgacgagcagctgctgagcaccgagagactgcacagccaggaccccctgctgagccccgagagaaccgccttccccgagcagagcctgagcagagccatcagccacaccgacgtgttcgtgagcacccccgtgctggacagatacagaatgagcaagatgcacagccaccccagcgccagcaacaacagctacgccaccctgggccagagccagaccgccgccaagagacacgccttcgccagcagaagacacaacaccgtggagcagctgcactacatccccggccaccacacctgctacaccgccagcaagaccgaggtgaccgtgtag

SEQ ID NO: 68652 - DNA, 1599 bp, Artificial Sequence
  derived and/or modified sequence
atggctctccgccgcttactgctgttgctgttgctgtccctcgaatcactggacctcctgccctccgttcacggtgcaagaggcagagcagctaacaggactctgagtgcgggcggagctgccgttggggggaggagggccggcggtgcactggccagagggggccgcgagctgaatggaacagcaagggcccctggcatccctgaagcaggtagccggcgggggcagcctgctgccgccgtggccgcagcggcctccgcggcagtcacatatgaaacttgctggggctactatgatgtatctggtcagtatgacaaggaatttgagtgcaacaactccgaaagtggttatctgtactgctgcggcacttgctactaccggttctgctgcaagaaacgtcacgaaaagctggatcaaagacaatgtacaaattaccaatcccctgtgtgggtccaaacaccttctacaaaggtggtatcacctggtcctgagaataaatatgaccccgagaaggataagaccaatttcaccgtctacataacctgtggagtgatcgccttcgttatcgtggccggagtgtttgccaaagtgagctatgacaaggcccatagacccccccgagaaatgaacatccatcgggctctggctgatatactacgtcagcagggccctattccgatcgcccactgtgaacgggagacaatttcagccatcgatacaagccccaaagagaatacccctgttagatcaagcagcaagaaccattatacccccgtgaggacggctaagcaaacccccgggcactatgggaaagacgcctacagatcgggcgggcccgatctccataacttcatctcatccgggttcgtaaccctgggaaggggacacaccaaggagaaacctaggatgaataatatattgacaagtgcaaccgaaccctatgacctgtcattctccagaagttttcagaacctagcccaccttcccccttcttatgagagtgcggtaaagaccaacccctctaaatactcctctttgaagcggttgacagataaggaggccgacgagtactatatgcggcgccgccatctgcccgatctggctgctagaggaactctgccgttaaatgtgatacagatgtctcagcagaaacctcttcccagggagaggcccaggcgcccgatcagagccatgtctcaggaccgagtgttgtcccccgacaggggtctcccggatgagtttagcatgccttatgacaggatcctcagcgatgaacagttgctcagtacagagcgcctgcattctcaagatcccttgctgagccccgaaaggactgcgtttcctgaacagagtttgtcccgcgccataagtcacacggacgtgttcgtctcaacgcctgtgctggaccgctaccgaatgtcgaagatgcacagtcacccctctgcgagtaataatagctacgccactctcgggcagtcccagaccgccgccaagcggcacgccttcgcatctcgcaggcataataccgtggagcaactgcactacatccccggtcaccacacttgttacaccgcttccaaaacggaggtgaccgtgtag

SEQ ID NO: 68653 - DNA, 1599 bp, Artificial Sequence
  derived and/or modified sequence
atggccctgcggcggctgctgctgctgctgctgctgagcctggagagcctggacctgctgcccagcgtgcacggggcccggggccgggccgccaacagaaccctgtctgctggaggagctgctgtgggcggcagaagagctggaggagccctggcccggggcggccgggagctgaatggaacagcccgggcccctggcatccctgaggccggcagcagaagaggccagcctgctgctgctgtggccgccgccgccagcgctgctgtgacctatgagacctgctggggctactatgatgtgtctggccagtatgacaaggagtttgagtgcaacaacagcgagagcggctacctgtactgctgcggcacctgctactaccgcttctgctgcaagaagagacatgagaagctggaccagaggcagtgcaccaactaccagagccctgtgtgggtgcagacccccagcaccaaggtggtgtccccaggccctgagaacaagtatgaccctgagaaggacaagaccaacttcaccgtgtacatcacctgtggggtgattgcctttgtgattgtggccggcgtgtttgccaaggtgtcctatgacaaggcccacaggcctccccgggagatgaacatccaccgggccctggccgacatcctgcggcagcagggccccatccccatcgcccactgtgagcgggagaccatcagcgccatcgacaccagccccaaggagaacacccctgtgcgcagcagcagcaagaaccactacacccctgtgaggacagccaagcagaccccaggccactacggcaaggatgcctaccgcagcggcggccctgacctgcacaacttcatcagcagcggctttgtgaccctgggccggggccacaccaaggagaagcccaggatgaacaacatcctgaccagcgccacagagccctatgacctgtccttcagccgctccttccagaacctggcccacctgcccccatcctatgagagcgctgtgaagaccaaccccagcaagtacagcagcctgaagaggctgacagacaaggaggctgatgagtactacatgagaagaagacacctgcctgacctggccgcccggggcaccctgcccctgaatgtcatccagatgagccagcagaagcccctgccccgggagcggccccggcggcccatccgggccatgagccaggacagagtgctgagcccagaccggggcctgcctgatgagttctccatgccctatgaccgcatcctgagtgatgagcagctgctgagcacagagcggctgcacagccaggaccccctgctgagccctgagaggacagccttccctgagcagagcctgagccgggccatcagccacacagatgtgtttgtgtccacccctgtgctggaccgctacaggatgagcaagatgcacagccaccccagcgccagcaacaacagctatgccaccctgggccagagccagacagctgccaagagacatgcctttgccagcagaagacacaacacagtggagcagctgcactacatccctggccaccacacctgctacacagccagcaagacagaggtgacagtgtag

SEQ ID NO: 68654 - DNA, 1599 bp, Artificial Sequence
  derived and/or modified sequence
atggccctgcggcggctgctgctgctgctgctgctgagcctggagtcattagatctgttgccatcagtccatggcgcaagggggcgagcagctaataggactctgagcgctggcggggcagccgtcggaggacgtcgtgcggggggggccttagcccgaggtggcagggaacttaacggcaccgctcgtgctcctggaatccccgaggcgggctcaagaaggggccagccagctgctgccgtcgcagccgccgcttctgccgctgttacctacgagacttgctgggggtattatgatgtgagcgggcagtatgacaaagagtttgagtgcaacaactctgaatcggggtatctctactgctgtggaacttgctattatcggttctgctgtaagaaaaggcatgagaagcttgatcaacgtcagtgcacgaattatcagtcccccgtgtgggtgcagacaccaagcaccaaggtcgtgtctcctggccccgaaaataagtatgatccagagaaggataagacgaacttcaccgtttacataacatgcggcgtgattgcattcgtaatagtagccggcgtgtttgctaaggtgtcttacgacaaagcccataggcctccaagggagatgaacatacacagagctttggccgacatcctaagacagcaaggaccaattcccatcgctcactgcgaacgcgagactatttccgctatcgatacctcgcccaaagagaatacaccagtccggagctcttccaagaaccattatacccccgtcagaaccgctaaacagacacccggtcactacggcaaggacgcctacaggagcggtggtcctgatcttcataattttatctcttctggatttgtgaccttgggccggggccacaccaaggaaaaaccaagaatgaacaacattttaacctctgcaaccgagccctacgatctttccttctcacggtcctttcaaaacctggcccacctcccaccaagctacgaaagcgcggtgaaaactaatccttcaaaatattcttccctcaagcggctgacagataaggaagccgacgaatactacatgcgacgacggcacctcccggatcttgccgcaaggggtacactgcctctgaacgttattcagatgtcacagcaaaagccactgccccgtgaacgccctcgtcggcctatccgggcaatgtcccaggaccgggtgctgagccccgacagaggactcccagatgaattctctatgccttatgacagaatactgagtgacgaacaattattgtctacagaaagactccatagccaggaccccctactaagcccagaaagaaccgcattcccagaacaatctttgagcagagcaatttcccacaccgatgtattcgtgagtactccagtcttggaccgatatagaatgagcaaaatgcatagccacccatcagccagcaacaatagttatgctactctgggccaaagccaaactgcggctaagaggcacgccttcgcttcccgccgtcacaacacagttgagcagcttcactacatacctgggcatcacacatgctatacagccagcaagactgaagtcactgtctag

SEQ ID NO: 68655 - DNA, 1599 bp, Artificial Sequence
  derived and/or modified sequence
atggcccttagacgtctgctgttactgctgctgttatcactagagtctctggacctgctgccatctgtgcacggcgctagaggacgggctgctaataggactttgtctgctggtggggctgctgtcgggggacggagggccggaggtgcattggcacggggaggaagggagttgaacggcaccgccagagcacccggtattcctgaggcgggttctcgtagagggcagcccgcagccgcagtggcggctgcagcctccgctgctgtaacgtatgaaacttgttggggatattatgacgtgtctgggcaatacgacaaggaattcgaatgtaacaacagcgagtctggatatctttattgctgcgggacctgctactaccgcttctgctgtaaaaaaagacatgagaagctggaccaacgacagtgtacgaattaccagagccctgtgtgggtccagactccatccactaaagtcgtgagccctggtcctgagaacaagtacgatcccgaaaaggataagacaaactttactgtatacatcacctgcggcgtaatcgcttttgtgatcgtggcgggtgtttttgcaaaagtgtcttacgataaggctcatcgcccaccaagagaaatgaatatacaccgggctctggcggatatattaagacagcagggtccgattccgattgcacactgtgagcgagagacaatttctgcgatcgatacttcgccaaaggagaacactccggtgcgctccagcagcaaaaatcattacacccccgttaggactgcaaaacagacaccaggccattatggaaaggacgcttataggtctggaggtcctgacctccacaattttatatcttccgggttcgtaactctgggcagagggcacacaaaggagaagcctaggatgaataacatactcacgagcgcaaccgagccttatgacctcagtttttcccggtccttccagaatctggcccacctgcctcccagttacgagagcgctgtgaaaacgaatccgtccaaatactcaagtctgaagagacttacagacaaggaagcagatgagtactacatgcgacgccgacatttgccagacttggcagctcgaggcacacttcccttaaatgtgatccaaatgagtcaacaaaagcccctgcccagagaaagacccagaaggccaattcgcgctatgagccaggaccgtgtgctctcccccgaccgagggctgcccgacgaattttcaatgccttatgacaggattttatcagacgaacaactgttgtctactgagcgccttcattcccaggatccgttattaagcccagagagaactgcatttccagaacaatccctgagccgcgcaatcagccatactgacgtgttcgtgagtacaccagttttagacaggtacaggatgagtaagatgcacagccatcctagcgcatccaataacagctacgcgacacttggccaatcccagaccgcagccaaaagacacgcctttgctagtcgcagacacaacaccgtggagcaattgcattatatccccggacatcatacatgctataccgctagtaagacggaagtcaccgtttag

SEQ ID NO: 68656 - DNA, 1759 bp, Artificial Sequence
  derived and/or modified sequence
cgccgccactgccgcccgcgcctcgatggcgccatcgccccggagccgctgaccgctcagcgcctccagcccggcccgcgcggcgggtcctccgagcccggcccgccgggggagcggcctgccgcggaagcctccccgcgccctcccgcccggccccgccatggcgctgcggcgcctcctgctgctgctgctgctctcgctggagtccctggacctgctgcccagcgtccacggagcccgcggccgcgccgccaaccggaccctgagtgcaggcggcgctgccgtcgggggccggagggccgggggcgccctggcacggggcggccgcgagctgaacggcaccgcccgggcgcccggaatcccggaggcgggaagccggcgggggcagcccgcggcggctgtggcggcggcggccagcgcggccgtcacctacgagacgtgctggggctactacgacgtgagcggccagtacgacaaggagttcgagtgtaacaacagcgagagcggctacctgtactgctgcggtacctgctactaccgcttctgctgcaagaagcgccacgagaagctggaccagcgccagtgcaccaactaccagagcccggtgtgggtacagacgcccagcaccaaggtggtgtcgccggggcccgagaacaagtacgacccggagaaggacaagaccaacttcaccgtctacatcacctgcggggtgatcgccttcgtcatcgtggccggcgtcttcgccaaggtctcctacgacaaggcccaccgccctccacgggagatgaacatccacagggctctggctgacatcttaagacaacagggaccaatccccatagcacactgtgaaagagaaactatctcggctatcgatacctctcccaaagagaacacgccggtcagatcgtcctccaaaaaccactacactcctgtgcgtacggccaagcagactccagggcattatgggaaggatgcttaccgaagtggaggacctgatctccataacttcatctcatctggatttgtcacattaggaagaggacacaccaaggagaagccacggatgaacaacatcctgacatcagccaccgagccctatgacctctccttctcccgctcgttccagaacttggcccacctgcccccatcctacgagtctgcagtaaagaccaaccccagcaagtattcatctctgaagaggctaaccgacaaggaggctgacgagtattacatgagacggcggcacctgcccgacctggctgcccgcggcaccctccccctcaatgtcatccagatgtcccaacagaagccgttgccaagggaacgaccccgccggcccatccgggccatgtcccaggacagggtcctgtccccggatcggggcctgccagatgagttcagcatgccctacgaccgcatcctgtccgacgagcagctgctctccacggagcgcctgcactcccaggacccgctgctgtccccggagcggacggcctttcccgagcagtcgctgtccagggccatctcgcacacggacgtctttgtgtccacacccgtgctggaccgctaccgcatgagcaagatgcactctcatcccagtgcctccaataactcatacgccaccctgggccagagccagacggcagccaagcgtcatgcctttgcctcacgcagacacaacacggtggagcagctgcactacatcccgggccaccacacctgctacacagccagcaagaccgaagtgaccgtgtga

SEQ ID NO: 68657 - protein, 1637 aa, Artificial Sequence
  derived and/or modified sequence
MLGAPDESSVRVAVRIRPQLAKEKIEGCHICTSVTPGEPQVFLGKDKAFTFDYVFDIDSQQEQIYIQCIEKLIEGCFEGYNATVFAYGQTGAGKTYTMGTGFDVNIVEEELGIISRAVKHLFKSIEEKKHIAIKNGLPAPDFKVNAQFLELYNEEVLDLFDTTRDIDAKSKKSNIRIHEDSTGGIYTVGVTTRTVNTESEMMQCLKLGALSRTTASTQMNVQSSRSHAIFTIHVCQTRVCPQIDADNATDNKIISESAQMNEFETLTAKFHFVDLAGSERLKRTGATGERAKEGISINCGLLALGNVISALGDKSKRATHVPYRDSKLTRLLQDSLGGNSQTIMIACVSPSDRDFMETLNTLKYANRARNIKNKVMVNQDRASQQINALRSEITRLQMELMEYKTGKRIIDEEGVESINDMFHENAMLQTENNNLRVRIKAMQETVDALRSRITQLVSDQANHVLARAGEGNEEISNMIHSYIKEIEDLRAKLLESEAVNENLRKNLTRATARAPYFSGSSTFSPTILSSDKETIEIIDLAKKDLEKLKRKEKRKKKSVAGKEDNTDTDQEKKEEKGVSERENNELEVEESQEVSDHEDEEEEEEEEEDDIDGGESSDESDSESDEKANYQADLANITCEIAIKQKLIDELENSQKRLQTLKKQYEEKLMMLQHKIRDTQLERDQVLQNLGSVESYSEEKAKKVRSEYEKKLQAMNKELQRLQAAQKEHARLLKNQSQYEKQLKKLQQDVMEMKKTKVRLMKQMKEEQEKARLTESRRNREIAQLKKDQRKRDHQLRLLEAQKRNQEVVLRRKTEEVTALRRQVRPMSDKVAGKVTRKLSSSDAPAQDTGSSAAAVETDASRTGAQQKMRIPVARVQALPTPATNGNRKKYQRKGLTGRVFISKTARMKWQLLERRVTDIIMQKMTISNMEADMNRLLKQREELTKRREKLSKRREKIVKENGEGDKNVANINEEMESLTANIDYINDSISDCQANIMQMEEAKEEGETLDVTAVINACTLTEARYLLDHFLSMGINKGLQAAQKEAQIKVLEGRLKQTEITSATQNQLLFHMLKEKAELNPELDALLGHALQENVEDSTDEDAPLNSPGSEGSTLSSDLMKLCGEVKPKNKARRRTTTQMELLYADSSELASDTSTGDASLPGPLTPVAEGQEIGMNTETSGTSAREKELSPPPGLPSKIGSISRQSSLSEKKIPEPSPVTRRKAYEKAEKSKAKEQKHSDSGTSEASLSPPSSPPSRPRNELNVFNRLTVSQGNTSVQQDKGIINPFPASKGIRAFPLQCIHIAEGHTKAVLCVDSTDDLLFTGSKDRTCKVWNLVTGQEIMSLGGHPNNVVSVKYCNYTSLVFTVSTSYIKVWDIRDSAKCIRTLTSSGQVTLGDACSASTSRTVAIPSGENQINQIALNPTGTFLYAASGNAVRMWDLKRFQSTGKLTGHLGPVMCLTVDQISSGQDLIITGSKDHYIKMFDVTEGALGTVSPTHNFEPPHYDGIEALTIQGDNLFSGSRDNGIKKWDLTQKDLLQQVPNAHKDWVCALGVVPDHPVLLSGCRGGILKVWNMDTFMPVGEMKGHDSPINAICVNSTHIFTAADDRTVRIWKARNLQDGQISDTGDLGEDIASN

SEQ ID NO: 68658 - DNA, 4914 bp, Artificial Sequence
  derived and/or modified sequence
atgcttggggcacccgatgagagctccgtaagggttgctgtgagaatccgcccgcaacttgccaaagagaagattgaaggttgccatatttgcactagtgtgacacctggcgagccccaggtgtttctaggaaaggataaggctttcaccttcgattatgtcttcgatatcgactcacagcaggaacagatttatattcaatgcatcgagaaattgatcgagggctgcttcgagggttacaatgctaccgtgttcgcatacggccagacaggcgcagggaaaacctatacgatgggcaccggatttgacgtaaatatcgtggaagaggagctcggaataatctcccgggccgtgaagcacctgttcaagtcaatcgaggagaagaagcatattgcaattaaaaacggactccctgctccagatttcaaggtcaatgcacagtttctagagttatacaatgaagaggtgcttgaccttttcgacacaaccagggacatcgacgccaaaagtaagaagagtaacattaggatacatgaggacagcacaggagggatctacactgtgggcgtgaccacgaggacggtgaataccgaaagcgaaatgatgcagtgtctgaagctaggcgctttgagccgcaccacagcatctacccagatgaatgtgcaaagttcccgctctcacgctatcttcaccattcacgtgtgtcagacacgtgtgtgcccgcagattgacgccgacaatgcaacagataacaagataatctccgagagtgcacagatgaatgagtttgagactttgacggccaagtttcatttcgtcgatctggccgggagtgagagactgaaacgtacgggtgcgactggagaacgagccaaggagggcatttccataaattgtggcctgctggcattgggcaatgtaatcagtgcactgggcgataagagcaagcgggccacgcatgtaccctatagagactctaagttgactcgactgctgcaagattccttgggcggcaactcacaaacaatcatgatcgcctgtgttagcccgagtgaccgcgattttatggaaacccttaataccctgaagtacgctaacagagccagaaatattaagaacaaggtcatggttaatcaagacagggcttcccagcagatcaatgccctgcgctccgaaataacaagactccagatggaactgatggagtacaagacaggtaagagaataatcgatgaggagggcgtagagagcattaacgacatgtttcacgagaacgcgatgctgcagactgagaacaacaatttgagggtaagaatcaaggcgatgcaggaaactgtggatgcgctgcggtcccgcataacccagctggtttccgaccaggcgaaccatgtgctggcccgtgctggggagggtaatgaggagatctctaatatgattcatagttacatcaaggagatagaggatctgagggcaaagcttctggaaagtgaagcagtgaacgagaatctgcgtaagaacttaacgcgagccactgccagagctccttacttctcaggcagctcaacattctctcccacaattctgagctcagacaaagaaactattgagattattgatcttgccaagaaagatctggagaagctaaagagaaaggagaaacggaaaaagaaatctgttgccggcaaagaggacaacacggatacagatcaggaaaaaaaggaggaaaaaggggtcagcgagcgcgagaacaacgaactggaggtggaagaaagccaggaggtctctgaccatgaagatgaagaagaagaggaggaggaggaggaggatgacatcgatggaggggaatcctcagacgagagcgactccgagagcgacgaaaaggcaaattaccaggccgacctggccaacatcacatgtgagatcgcaattaagcaaaagctgatagatgagttggagaacagccagaaacgcctccagaccttgaagaaacaatatgaggagaagctgatgatgctgcaacacaagatcagagacactcagcttgaacgcgaccaggtgcttcagaacctgggctctgttgagtcctactctgaagagaaggccaaaaaggtgagatccgagtatgagaagaaattgcaagcaatgaataaggaattacagcgcctgcaggccgcccaaaaggagcacgcacgtctcctaaagaatcaaagccaatatgagaagcagcttaaaaaactccaacaggatgtcatggagatgaagaaaacaaaggtgcgccttatgaaacagatgaaggaggagcaagagaaggcccgtctgaccgagagcagaagaaatagggaaatcgcgcagctgaagaaagaccagcggaaaagagatcaccaactgcgcctgctcgaggctcaaaagcggaaccaggaagtggttcttcggcggaaaacagaagaggtcactgcattgcggcgccaggtgcgccctatgtccgataaggtggctggcaaagtaacgaggaagctgtcttcatcagacgcccccgctcaggataccggctcctcggctgctgccgtcgaaacggatgcttcaaggaccggcgctcagcagaagatgcgcattcccgttgcacgcgtgcaggcactgccgactcccgccaccaatgggaaccgcaaaaaatatcagagaaaggggttaacagggcgagtctttatatccaaaaccgcacgtatgaagtggcagctcctggaaaggcgcgtcactgacattataatgcaaaagatgacaatcagtaatatggaggccgatatgaatcggttacttaagcagcgggaggaactgaccaagcgacgcgagaagcttagtaaacggcgggagaaaattgttaaggagaacggcgagggcgacaagaacgtcgccaacattaatgaagaaatggagagcttgacagctaacattgactatatcaatgactctatctcagactgtcaggctaacattatgcagatggaggaagcaaaggaggagggggagacactggacgttactgccgtaatcaatgcctgcactctgaccgaagcgcgatacctactggaccacttcctttccatgggaataaacaaaggactgcaggcagcccagaaggaagcgcagatcaaggtgctcgagggcagactgaagcaaaccgaaatcacctcggccactcaaaaccagttgctgtttcacatgctcaaagagaaggcagagctcaatcccgagctggacgccctgctcgggcacgctctacaagagaacgttgaggactctaccgatgaagatgcccctttgaattctccaggttctgagggctcaaccctgagcagcgaccttatgaagttatgcggagaagtgaagccaaaaaataaggcccgacgccggacaaccacccagatggaactgctgtacgccgattcatctgagctggcctcagatacaagtaccggcgatgcctctttgcccggacctctgaccccagtagccgaagggcaagaaattgggatgaacaccgagacatccggtaccagtgcccgggagaaagagctgagccctccaccggggttgccttctaaaatcggcagtatcagtaggcagagctcgctctctgagaagaaaataccagaaccatctccagtcactcggcgcaaagcgtatgagaaggcagaaaagtctaaagctaaggagcagaaacattcagactctggaacctcagaggccagcttgagccccccttccagccccccctctcgccctcgaaacgagctcaatgtttttaacagacttaccgtttcacagggcaacacctcagtccagcaggacaaaggaataatcaacccctttcccgccagcaaaggtatcagagcttttccccttcagtgcatacatatagcagagggtcacactaaggctgtgttgtgcgtcgacagcaccgacgatttactctttacaggatcgaaagatcgtacgtgtaaagtgtggaatctcgtgactggacaggagataatgtctcttggtggccatcccaataacgtcgtgtccgtgaagtattgcaattacaccagtctggtcttcaccgtaagtaccagctatattaaagtttgggatatccgagatagcgccaaatgtatcagaactttaacttcttctgggcaggtcacattgggtgacgcatgctccgcgtcgacatcacggacagtcgcgattccttctggcgaaaaccagattaaccaaatcgcgctgaacccaaccggcacctttttgtacgccgcaagcggaaacgcagtgcgaatgtgggatctcaaacgcttccagtcaacgggaaagttaactggccacctgggccctgtaatgtgcttaacagtcgaccagatatcatcaggacaagatcttatcattacaggttccaaagaccattacattaagatgtttgatgtgaccgaaggcgccttggggactgtgagtcctacccacaatttcgaacccccccattatgatggtattgaggccctgaccatccagggggacaatctgttttctggcagcagagataatggcatcaagaaatgggatctaacccagaaggatctcctgcagcaggtccctaacgcccataaggactgggtatgcgcccttggggtcgttcccgaccaccccgtgctactttccggctgcagaggaggtatcctgaaagtgtggaatatggacacctttatgcctgtcggggaaatgaagggacatgacagcccaattaacgcaatctgtgtgaacagcacccacattttcacagcagcggatgatagaacagttaggatctggaaggctcgcaacctccaggatggtcagatttccgacacaggggatctgggtgaagacattgcatccaactag

SEQ ID NO: 68659 - DNA, 5040 bp, Artificial Sequence
  derived and/or modified sequence
agcctactgcgcccgagtcccgcggccccagtggcgcctcagctctgcggtgccgaggcccaacggctcgatcgctgcccgccgccagcatgttgggcgccccggacgagagctccgtgcgggtggctgtcagaataagaccacagcttgccaaagagaagattgaaggatgccatatttgtacatctgtcacaccaggagagcctcaggtcttcctagggaaagataaggcttttacttttgactatgtatttgacattgactcccagcaagagcagatctacattcaatgtatagaaaaactaattgaaggttgctttgaaggatacaatgctacagtttttgcttatggacaaactggagctggtaaaacatacacaatgggaacaggatttgatgttaacattgttgaggaagaactgggtattatttctcgagctgttaaacacctttttaagagtattgaagaaaaaaaacacatagcaattaaaaatgggcttcctgctccagattttaaagtgaatgcccaattcttagagctctataatgaagaggtccttgacttatttgataccactcgtgatattgatgcaaaaagtaaaaaatcaaatataagaattcatgaagattcaactggaggaatttatactgtgggcgttacaacacgtactgtgaatacagaatcagagatgatgcagtgtttgaagttgggtgctttatcccggacaactgccagtacccagatgaatgttcagagctctcgttcacatgccatttttaccattcatgtgtgtcaaaccagagtgtgtccccaaatagatgctgacaatgcaactgataataaaattatttctgaatcagcacagatgaatgaatttgaaaccctgactgcaaagttccattttgttgatctcgcaggatctgaaagactgaagcgtactggagctacaggcgagagggcaaaagaaggcatttctatcaactgtggacttttggcacttggcaatgtaataagtgccttgggagacaagagcaagagggccacacatgtcccctatagagattccaagctaacaagactactacaggattccctcgggggtaatagccaaacaatcatgatagcatgtgtcagcccttcagacagagactttatggaaacgttaaacaccctgaaatacgccaatcgagctagaaatatcaagaataaggtgatggtcaatcaggacagagctagtcagcaaatcaatgcacttcgtagtgaaatcacacgacttcagatggagctcatggagtacaaaacaggtaaaagaataattgacgaagagggtgtggaaagcatcaatgacatgtttcatgagaatgctatgctacagactgaaaataataacctgcgtgtaagaattaaagccatgcaagagacggttgatgcattgaggtccagaattacacagcttgttagtgatcaggccaaccatgttcttgccagagcaggtgaaggaaatgaggagattagtaatatgattcatagttatataaaagaaatcgaagatctcagggcaaaattattagaaagtgaagcagtgaatgagaaccttcgaaaaaacttgacaagagccacagcaagagcgccatatttcagcggatcatcaactttttctcctaccatactatcctcagacaaagaaaccattgaaattatagacctagcaaaaaaagatttagagaagttgaaaagaaaagaaaagaggaagaaaaaaagtgtggctggtaaagaggataatacagacactgaccaagagaagaaagaagaaaagggtgtttcggaaagagaaaacaatgaattagaagtggaagaaagtcaagaagtgagtgatcatgaggatgaagaagaggaggaggaggaggaggaagatgacattgatgggggtgaaagttctgatgaatcagattctgaatcagatgaaaaagccaattatcaagcagacttggcaaacattacttgtgaaattgcaattaagcaaaagctgattgatgaactagaaaacagccagaaaagactgcagactctgaaaaagcagtatgaagagaagctaatgatgctgcaacataaaattcgggatactcagcttgaaagagaccaggtgcttcaaaacttaggctcggtagaatcttactcagaagaaaaagcaaaaaaagttaggtctgaatatgaaaagaaactccaagccatgaacaaagaactgcagagacttcaagcagctcaaaaagaacatgcaaggttgcttaaaaatcagtctcagtatgaaaagcaattgaagaaattgcagcaggatgtgatggaaatgaaaaaaacaaaggttcgcctaatgaaacaaatgaaagaagaacaagagaaagccagactgactgagtctagaagaaacagagagattgctcagttgaaaaaggatcaacgtaaaagagatcatcaacttagacttctggaagcccaaaaaagaaaccaagaagtggttctacgtcgcaaaactgaagaggttacggctcttcgtcggcaagtaagacccatgtcagataaagtggctgggaaagttactcggaagctgagttcatctgatgcacctgctcaggacacaggttccagtgcagctgctgtcgaaacagatgcatcaaggacaggagcccagcagaaaatgagaattcctgtggcgagagtccaggccttaccaacgccggcaacaaatggaaacaggaaaaaatatcagaggaaaggattgactggccgagtgtttatttccaagacagctcgcatgaagtggcagctccttgagcgcagggtcacagacatcatcatgcagaagatgaccatttccaacatggaggcagatatgaatagactcctcaagcaacgggaggaactcacaaaaagacgagagaaactttcaaaaagaagggagaagatagtcaaggagaatggagagggagataaaaatgtggctaatatcaatgaagagatggagtcactgactgctaatatcgattacatcaatgacagtatttctgattgtcaggccaacataatgcagatggaagaagcaaaggaagaaggtgagacattggatgttactgcagtcattaatgcctgcacccttacagaagcccgatacctgctagatcacttcctgtcaatgggcatcaataagggtcttcaggctgcccagaaagaggctcaaattaaagtactggaaggtcgactcaaacaaacagaaataaccagtgctacccaaaaccagctcttattccatatgttgaaagagaaggcagaattaaatcctgagctagatgctttactaggccatgctttacaagaaaatgtagaggatagtactgatgaggatgctcctttaaacagcccaggatcagaaggaagcacgctgtcttcagatctcatgaagctttgtggtgaagtgaaacctaagaacaaggcccgaaggagaaccaccactcagatggaattgctgtatgcagatagcagtgaactagcttcagacactagtacaggagatgcctccttgcctggccctctcacacctgttgcagaagggcaagagattggaatgaatacagagacaagtggtacttctgctagggaaaaagagctctctcccccacctggcttaccttctaagataggcagcatttccaggcagtcatctctatcagaaaaaaaaattccagagccttctcctgtaacaaggagaaaggcatatgagaaagcagaaaaatcaaaggccaaggaacaaaagcactcagattctggaacttcagaggctagtctttcacctccttcttccccaccaagccggccccgtaatgaactgaatgtttttaatcgtcttactgtttctcagggaaacacatcagttcagcaggataagggcataatcaacccatttcctgcttcaaaaggaatcagagcttttccacttcagtgtattcacatagctgaagggcatacaaaagctgtgctctgtgtggattctactgatgatctcctcttcactggatcaaaagatcgtacttgtaaagtatggaatctggtgactgggcaggaaataatgtcactggggggtcatcccaacaatgtcgtgtctgtaaaatactgtaattataccagtttggtcttcactgtatcaacatcttatattaaggtgtgggatatcagagattcagcaaagtgcattcgaacactaacgtcttcaggtcaagttactcttggagatgcttgttctgcaagtaccagtcgaacagtagctattccttctggagagaaccagatcaatcaaattgccctaaacccaactggcaccttcctctatgctgcttctggaaatgctgtcaggatgtgggatcttaaaaggtttcagtctacaggaaagttaacaggacacctaggccctgttatgtgccttactgtggatcagatttccagtggacaagatctaatcatcactggctccaaggatcattacatcaaaatgtttgatgttacagaaggagctcttgggactgtgagtcccacccacaattttgaaccccctcattatgatggcatagaagcactaaccattcaaggggataacctatttagtgggtctagagataatggaatcaagaaatgggacttaactcaaaaagaccttcttcagcaagttccaaatgcacataaggattgggtctgtgccctgggagtggtgccagaccacccagttttgctcagtggctgcagagggggcattttgaaagtctggaacatggatacttttatgccagtgggagagatgaagggtcatgatagtcctatcaatgccatatgtgttaattccacccacatttttactgcagctgatgatcgaactgtgagaatttggaaggctcgcaatttgcaagatggtcagatctctgacacaggagatctgggggaagatattgccagtaattaaacatgaatgaagataggttgtaaactgaatgctgtga

SEQ ID NO: 68660 - DNA, 4914 bp, Artificial Sequence
  derived and/or modified sequence
atgctgggcgccccagatgagagctctgtgcgggtggccgtgcgcatccggccccagctggccaaggagaagattgagggctgccacatctgcacctctgtgaccccaggagagccccaggtgttcctgggcaaggacaaggccttcacctttgattatgtgtttgatattgacagccagcaggagcagatctacatccagtgcatcgagaagctgattgagggctgctttgagggctacaatgccaccgtgtttgcctacggccagacaggagctgggaagacctacaccatgggcaccggctttgatgtgaacatcgtggaggaggagctgggcatcatcagcagagctgtgaagcacctgttcaagagcattgaggagaagaagcacatcgccatcaagaatggcctgcctgccccagacttcaaggtgaatgcccagttcctggagctgtacaatgaggaggtgctggacctgtttgacaccacccgggacattgatgccaagagcaagaagagcaacatccgcatccacgaggacagcactggaggcatctacacagtgggcgtgaccaccaggacagtgaacacagaaagtgagatgatgcagtgcctgaagctgggcgccctgagcaggaccacagccagcacccagatgaatgtgcagagcagccgcagccacgccatcttcaccatccacgtgtgccagaccagggtgtgcccccagattgatgctgacaatgccacagacaacaagatcatcagcgagagcgcccagatgaatgaatttgagaccctgacagccaagttccactttgtggacctggccggcagcgagcggctgaagaggactggagccactggagagcgggccaaggagggcatcagcatcaactgtggcctgctggccctgggcaatgtcatcagcgccctgggggacaagagcaagagggccacccacgtgccctacagagacagcaagctgacccggctgctgcaggacagcctgggcggcaacagccagaccatcatgattgcctgtgtgagccccagcgaccgggacttcatggagaccctgaacaccctgaagtatgccaacagagccaggaacatcaagaacaaggtgatggtgaaccaggaccgggccagccagcagatcaatgccctgcggtctgagatcacccggctgcagatggagctgatggagtacaagacaggcaagaggatcattgatgaggagggcgtggagagcatcaatgacatgtttcatgaaaatgccatgctgcagacagagaacaacaacctgcgggtgcgcatcaaggccatgcaggagaccgtggatgccctgcggagccgcatcacccagctggtgtctgaccaggccaaccacgtgctggcccgggccggggagggcaatgaggagatcagcaacatgatccacagctacatcaaggagattgaggacctgcgggccaagctgctggagagcgaggccgtgaatgaaaacctgaggaagaacctgacccgggccacagcccgggccccctacttcagcggcagcagcaccttcagccccaccatcctgagcagtgacaaggagaccatcgagatcatcgacctggccaagaaggacctggagaagctgaagaggaaggagaagaggaagaagaagtctgtggccggcaaggaggacaacacagacacagaccaggagaagaaggaggagaagggcgtgtctgagcgggagaacaatgagctggaggtggaggagagccaggaggtgtctgaccatgaagatgaggaggaggaggaggaggaggaggaggatgacattgatggaggagagagcagtgatgaaagtgacagcgagagtgatgagaaggccaactaccaggccgacctggccaacatcacctgtgaaattgccatcaagcagaagctgattgatgagctggagaacagccagaagaggctgcagaccctgaagaagcagtatgaggagaagctgatgatgctgcagcacaagatccgggacacccagctggagcgggaccaggtgctgcagaacctgggctctgtggagagctacagcgaggagaaggccaagaaggtgcgctcagaatatgagaagaagctgcaggccatgaacaaggagctgcagaggctgcaggccgcccagaaggagcacgcccggctgctgaagaaccagagccagtatgagaagcagctgaagaagctgcagcaggatgtgatggagatgaagaagaccaaggtgcggctgatgaagcagatgaaggaggagcaggagaaggcccggctgacagagagcagaagaaaccgggagatcgcccagctgaagaaggaccagaggaagagggaccaccagctgcggctgctggaggcccagaagaggaaccaggaggtggtgctgcggaggaagacagaggaggtgacagccctgcggcggcaggtgcggcccatgtctgacaaggtggccggcaaggtgaccaggaagctgagcagcagtgatgccccagcccaggacaccggcagcagcgctgctgctgtggagacagatgccagcaggactggagcccagcagaagatgagaattcctgtggcccgggtgcaggccctgcccaccccagccaccaatggaaacaggaagaagtaccagaggaagggcctgaccggccgggtcttcatcagcaagacagccaggatgaagtggcagctgctggagaggagagtgacagacatcatcatgcagaagatgaccatcagcaacatggaggccgacatgaaccggctgctgaagcagcgggaggagctgaccaagagaagagagaagctgagcaagaggcgggagaagatcgtgaaggaaaatggagagggggacaagaatgtggccaacatcaatgaggagatggagagcctgacagccaacatcgactacatcaatgacagcatcagtgactgccaggccaacatcatgcagatggaggaggccaaggaggagggggagaccctggatgtgacagctgtgatcaatgcctgcaccctgacagaggcccgctacctgctggaccacttcctgtccatgggcatcaacaagggcctgcaggccgcccagaaggaggcccagatcaaggtgctggagggccgcctgaagcagacagagatcaccagcgccacccagaaccagctgctcttccacatgctgaaggagaaggccgagctgaaccctgagctggatgccctgctgggccacgccctgcaggagaatgtggaggacagcacagatgaagatgcccccctgaacagccctggcagcgagggcagcaccctgagcagtgacctgatgaagctgtgtggggaggtgaagcccaagaacaaggcccggcggaggaccaccacccagatggagctgctgtatgctgacagcagcgagctggccagtgacaccagcactggagatgccagcctgcccggccccctgacccctgtggccgagggccaggagatcggcatgaacacagagaccagcggcaccagcgcccgggagaaggagctgagccccccacctggcctgcccagcaagattggcagcatcagccggcagagcagcctgtctgagaagaagatccctgagcccagccctgtgaccaggaggaaggcctatgagaaggccgagaagagcaaggccaaggagcagaagcacagcgacagcggcaccagcgaggccagcctgagcccccccagcagcccccccagccggcccagaaatgagctgaatgtgttcaaccggctgactgtgtcccagggcaacacctctgtgcagcaggacaagggcatcatcaaccccttccctgccagcaagggcatccgggccttccccctgcagtgcatccacatcgccgagggccacaccaaggctgtgctgtgtgtggacagcacagatgacctgctcttcaccggcagcaaggacaggacctgcaaggtgtggaacctggtgacaggccaggagatcatgagcctgggcggccaccccaacaacgtggtgtctgtgaagtactgcaactacaccagcctggtgttcaccgtgtccaccagctacatcaaggtgtgggacatccgggacagcgccaagtgcatccgcaccctgaccagcagcggccaggtgaccctgggagatgcctgcagcgccagcaccagcaggacagtggccatccccagcggggagaaccagatcaaccagatcgccctgaaccccaccggcaccttcctgtatgctgccagcggaaatgctgtgaggatgtgggacctgaagcgcttccagagcacaggcaagctgaccggccacctgggccctgtgatgtgcctgactgtggaccagatcagcagcggccaggacctgatcatcaccggcagcaaggaccactacatcaagatgtttgatgtgacagagggcgccctgggcaccgtgagccccacccacaactttgagcccccccactatgatggcatcgaggccctgaccatccagggcgacaacctcttcagcggcagccgggacaatggcatcaagaagtgggacctgacccagaaggacctgctgcagcaggtgcccaatgcccacaaggactgggtgtgtgccctgggcgtggtgcctgaccaccctgtgctgctgagcggctgccggggcggcatcctgaaggtgtggaacatggacaccttcatgcctgtgggggagatgaagggccatgacagccccatcaatgccatctgtgtgaacagcacccacatcttcaccgctgctgatgacagaacagtgcgcatctggaaggccaggaacctgcaggacggccagatcagtgacacaggagacctgggggaggacatcgccagcaactag

SEQ ID NO: 68661 - DNA, 4914 bp, Artificial Sequence
  derived and/or modified sequence
atgctgggcgcccccgacgagagcagcgtgcgggtggccgtgcggattcggccccagctggccaaagagaagattgaggggtgccatatatgtaccagcgtcactcctggagaaccccaggtattcctgggcaaggataaagctttcactttcgactatgtcttcgatatcgatagccagcaagagcagatttacatccagtgtatcgagaagctgatcgaaggatgctttgaaggctacaacgccacggttttcgcttacgggcaaacaggagccggaaagacctacaccatggggaccggctttgacgtgaatattgttgaggaggaactgggcattattagtcgggccgtgaagcatctgtttaaatcaatcgaggagaagaagcacatcgccatcaagaatggcttgcccgcgcctgatttcaaagtaaatgcccagtttcttgagctttataacgaggaggtcctggacctcttcgatacaacccgggacattgacgcaaagtctaaaaagtctaacattcgcatacacgaggattcaacagggggaatctatactgtgggggtgacaacacggactgtgaatactgagtcagagatgatgcagtgtctgaagttgggggctctatcccggacaactgcttctacacaaatgaatgttcagagctcgcgtagtcacgcaatcttcacaattcacgtgtgtcagacacgggtttgcccacaaatagacgcagacaatgccacagataacaaaatcatttcagagagcgcccagatgaacgaattcgaaacgctgacagccaaattccattttgtggacctggccggatcagagaggctcaaaaggacaggtgcgactggagagagagcgaaggaaggaattagcattaactgtggtctgctagccctcgggaatgtgatttctgctctgggggacaaatccaagcgcgctacacacgtgccttatcgagatagcaaactgacgcgactcttacaggactccctgggtggcaacagccaaactatcatgatcgcttgcgtgtctccgtctgatagagatttcatggagaccttgaacacgcttaaatatgccaaccgggctcgtaatattaagaacaaggtgatggtgaatcaggaccgcgccagccagcaaatcaacgccctgcgatccgagataacgagactccagatggaactgatggaatataaaacaggtaagaggatcatcgacgaagaaggcgtggaaagcatcaacgatatgtttcacgaaaacgcgatgctgcagacagaaaacaataatctgcgggtcaggatcaaggcaatgcaggaaaccgtggatgcacttaggtctcgtatcacacagctcgtgtcagaccaggctaatcacgtgttagcgcgcgcgggagagggtaacgaagagattagcaatatgatccactcttatatcaaggagattgaagacctaagagccaaattgctggagagcgaggcagtaaatgagaatcttagaaagaacctcacacgggccactgccagagcgccgtacttctcgggctctagtaccttctcacccaccatactctcatcggacaaggagaccatcgagatcatagatctcgccaagaaggatctcgaaaagctgaagcgcaaggagaagagaaaaaagaaaagtgtagccggtaaagaggacaacactgacactgaccaggagaaaaaagaggagaagggcgtatcagaaagggagaacaacgagctcgaggtcgaggaaagccaggaagtgtcggatcatgaggatgaagaggaagaggaggaggaagaggaggacgacatcgatggcggagaatcctcagacgaaagtgactccgaatctgatgagaaggcaaattatcaggccgaccttgctaatattacttgcgaaatagctatcaaacagaaactcattgacgaattggagaattcccagaagcgcctacagacattgaaaaaacagtacgaggaaaaacttatgatgctgcagcacaagatccgggatacacagctggagagggatcaggtattgcagaacctgggcagtgtggaaagttacagcgaagaaaaggctaaaaaggtgcgttccgaatacgagaaaaaactgcaggcgatgaataaagagctgcaacggcttcaagcagcccaaaaggaacacgcacgcctgctcaagaatcagagccagtatgaaaaacaactgaaaaaactgcagcaggacgttatggaaatgaagaagacaaaggtgaggcttatgaaacagatgaaggaggaacaggaaaaagccaggcttactgagagccgacggaaccgcgagatcgcccagcttaaaaaagaccagagaaaacgcgaccaccaattgagacttttagaggcccagaaacgcaaccaggaggttgtcctgcgaagaaaaactgaggaggtgactgcactgaggcggcaagttcggccaatgagtgataaagtcgctggtaaagtaaccaggaaattgtcctccagtgacgctccggctcaggacacaggctcttcggccgcagccgtggaaaccgatgcatcacggacaggtgctcagcagaagatgcggatacccgttgctcgggtgcaggcgctgccaacccccgccacgaacgggaaccgaaaaaaatatcagagaaaaggccttaccggaagagtcttcattagcaagacagctaggatgaaatggcagcttctggaaagaagggtaactgatatcatcatgcaaaagatgactatttccaatatggaagccgacatgaaccggctgctgaaacagcgagaggagctgacaaagcggcgcgagaaactgagtaaaagaagagaaaagatcgtgaaagaaaatggcgaaggcgataagaacgtggctaacataaacgaagagatggagtccctaacggctaacatcgactacatcaacgactccatcagcgattgccaggctaatatcatgcagatggaggaggctaaagaagaaggtgagacgcttgatgttactgcggttatcaatgcgtgtacactgactgaggcgcggtacctcttagaccatttcctctctatgggaatcaacaaagggttgcaggccgcccagaaggaagcgcagattaaggtgttggaggggcgcctcaaacaaaccgagatcactagtgcaacccagaatcagttactcttccatatgctcaaggaaaaagctgaacttaaccctgagctggacgcgcttcttggccacgcactgcaggagaatgtggaagattctaccgacgaagacgcccccttgaattcacccgggagcgaaggctccaccttgtcttctgatcttatgaaactgtgcggagaggtgaaaccgaaaaataaggctaggcgccgcacaacaacgcagatggaattgctatatgcagactcttcggagctcgcgtctgacacaagtacaggtgatgcttcccttcctggacccctgactcccgttgcagaggggcaggaaatcggcatgaacactgagacatcagggacgagtgcccgtgaaaaggaactgtcaccgccaccaggccttccctccaagatcgggtctatctcgcgccagtctagcctgtccgaaaagaaaatcccggaaccctccccagtgacccgacgcaaagcttacgagaaagctgaaaaaagtaaagctaaggagcagaagcactccgactctgggactagcgaggcttctctgtccccgccatcatccccgccttccagacctaggaacgagttgaacgtctttaacaggctcacagtatcccaggggaacacatctgttcaacaggacaaaggcattattaatcccttccccgccagtaagggcattagagcttttcccttacagtgcatccacattgctgaggggcacactaaggccgtgctgtgtgtggacagcacagacgacctgctctttacgggaagcaaggatagaacctgcaaggtgtggaacctggtaacaggccaagagataatgtccctgggaggccaccccaataatgtggtgtccgtcaagtactgtaattatacaagcctggtgtttacggtgagcacctcctacatcaaagtctgggacatccgggattctgccaaatgcatccgcacccttacatcctctggacaagtgaccttgggcgacgcctgtagcgcaagcactagccgcacggtcgccatcccgagcggcgagaatcagatcaatcagatagccctgaacccaactggcaccttcctatatgctgcaagcgggaatgctgtccgaatgtgggacctgaagcgttttcagagcaccggcaaactcaccggacacctgggacctgtcatgtgtctgacagtagatcagatctcttcaggtcaagacctcataattaccgggtccaaggatcactacattaaaatgttcgacgttaccgagggagccttaggcaccgtcagccctacccataactttgagccccctcattatgacgggattgaggccctcaccattcagggcgataatctcttcagcggtagtagggataacgggatcaaaaagtgggacctgacgcagaaagacctcctccagcaagtaccaaacgcccataaggactgggtgtgtgcattgggggtggtgccagaccatccagttttgctgtctggatgccgcggaggaattctcaaggtgtggaatatggacacttttatgcccgtaggcgagatgaaaggccatgatagtccgatcaatgcaatatgtgtcaatagtacccatattttcaccgctgctgacgacagaacagtgcggatttggaaggcacggaacctgcaggatggacaaatttccgacacgggcgatcttggtgaggatatcgccagtaactag

SEQ ID NO: 68662 - DNA, 4914 bp, Artificial Sequence
  derived and/or modified sequence
atgttgggcgcaccggatgagtctagcgttcgtgtggcagttagaatccgacctcagcttgccaaagaaaaaatcgagggatgccatatttgtacctccgtaacacccggtgagccacaggttttcctgggcaaagacaaggccttcacttttgattatgtgttcgatatcgacagccagcaggagcaaatctatatacagtgcattgagaaacttatcgagggctgctttgagggttataacgcaaccgtcttcgcctacggccaaactggcgcaggcaagacgtacaccatgggaactggtttcgatgtcaacatcgttgaggaggaactcgggatcatttctcgggctgttaaacacttgttcaagtccatagaggagaagaagcacattgctattaagaacggcctgcccgcaccagacttcaaagtaaacgcccagtttctggagttgtacaacgaagaggtgctcgacctgtttgacactactcgggatatcgatgcgaaatccaagaaatctaacattcgaatacacgaggacagcactggcggtatctacactgtaggagtgaccacccgtactgtcaataccgagtctgagatgatgcaatgccttaaacttggtgccctgagccgcacaaccgccagtactcagatgaatgttcagagcagccggtcccacgccatctttaccatccacgtttgtcagacccgggtctgcccccagatcgacgccgacaacgctactgacaataaaataatcagcgaaagcgctcagatgaacgagtttgagacattaacagctaaattccatttcgtagacctggctgggtccgaacggctgaagagaaccggcgctactggcgagcgcgctaaggaaggaatctctataaactgcggactcttggccctggggaatgtcatctctgctctcggcgacaagagcaagcgcgcaacgcacgtgccctatcgcgattctaaactcacaaggctgctccaggacagtctaggcggtaactcacaaacgatcatgatcgcctgcgtttcacccagcgatcgggacttcatggaaacattaaatactctgaagtacgccaatcgagccagaaacattaagaataaggttatggtcaaccaggatcgcgcaagccagcagataaacgccctgagatcagagataaccagactgcagatggagttgatggaatataagacaggaaagagaatcatcgatgaggagggagtggaatccataaacgacatgttccatgaaaatgcaatgttgcagaccgagaataataatttgagggttcgaattaaggcaatgcaagaaaccgtcgatgcactgaggtcaaggatcactcagcttgtgagcgaccaggctaaccacgttctggctagagccggtgaaggaaatgaggagatttccaacatgatacactcctacattaaagagattgaggatctgagagctaagcttttggaatcagaggccgtcaatgagaatctgagaaagaacctgacccgcgctactgccagagccccatacttttcggggtccagtacatttagtccaacgatcctgtccagcgataaggagacaatcgagattatcgatctcgcaaaaaaagatctggagaagctcaagcggaaggagaagcgaaagaaaaagtccgtggccggaaaggaagacaatactgacactgatcaggagaaaaaggaagagaagggggtctctgagcgagagaacaatgaacttgaggtggaagaaagtcaggaggtgtccgaccacgaggacgaagaggaagaagaagaggaggaggaggacgatattgacggcggagagtcatctgatgaaagtgacagtgagtctgatgaaaaagccaactaccaagctgacctggcaaatatcacatgtgaaattgctatcaaacagaagctcatcgatgagctggagaacagccagaaacgccttcagaccttgaagaagcagtacgaagagaaactgatgatgttgcagcacaagataagagacacacaattagaaagggaccaggtgctgcagaatcttgggagcgtggagagctacagcgaagagaaagcgaaaaaagtccgcagtgagtacgagaagaaactccaggcaatgaacaaagagttgcaacgactccaggccgctcagaaagagcatgctagactgcttaaaaatcagtcacaatacgagaaacaactgaaaaaactccagcaggacgtgatggagatgaagaaaacaaaggtgcggctgatgaagcagatgaaagaagaacaagagaaggcaaggctcaccgagtccaggagaaaccgggaaatagcacaattgaaaaaggatcagagaaaacgtgatcaccagctaagactccttgaggcacagaagagaaaccaggaggtggttctgaggagaaagacagaggaagttactgctctccggagacaggttcgtcctatgtccgataaagtggcaggcaaagttacccggaagctgtccagctccgatgcccctgcccaagatacaggttcgtcagcagcagccgtagaaacagacgcctctagaactggagcccaacaaaaaatgcggatccctgtggcgagagtgcaggcccttcctacaccagctactaacggtaaccgaaagaagtaccaacgaaagggcctaactggccgtgtgtttatatctaaaacagccagaatgaaatggcagctgctggaaagacgggttaccgatattataatgcagaaaatgacaatctctaacatggaggccgatatgaataggcttcttaagcagcgagaagagcttaccaagaggagagagaaactatcgaagcgcagggagaaaattgtaaaagaaaacggggaaggcgataagaacgtggccaacattaacgaagaaatggaaagcctcacagccaatattgactacattaatgacagtatttccgattgtcaggccaacattatgcagatggaggaagccaaggaggaaggagagaccctagacgtaactgcagtaatcaatgcatgtacactgaccgaggctcggtatctgctggaccacttcctgtccatgggtattaacaaaggtctacaggctgctcagaaggaggcccagatcaaggtgctggaggggaggctcaaacaaaccgagatcacatctgcaactcagaatcagttgctttttcacatgctgaaggagaaggccgaactcaaccccgagctggacgccttacttggccacgctctccaggaaaatgtggaggactctactgatgaagatgcccctttgaacagtcccggatcagaagggtccactctgtcgtcagacctgatgaagctgtgcggggaggtgaagcctaagaataaggccaggcgacggacgactacacagatggaattgctgtatgccgattcaagcgagttagccagcgatacctctacaggggatgcctctctcccaggtcctctcacgccagttgctgagggtcaggagattgggatgaacaccgagacaagcggcaccagcgccagggagaaagagctttctccgcctccaggcctgccaagcaaaattgggtctatctcccgccagtcaagcctgtcggagaagaaaattcctgagcccagtccggtcacacgcagaaaggcctacgagaaggctgaaaagagtaaggccaaagaacaaaaacacagtgacagcgggacatcagaggcctccctctctcccccatccagtccacctagcaggccgcgaaacgagctgaatgtgttcaacaggctcaccgtgagtcagggaaatacgagtgtgcagcaagacaaaggaataattaacccttttcccgctagcaagggaatccgagcctttcccctgcagtgtattcatatagccgaaggacacactaaggcggtcctctgtgtggacagtactgacgacctattattcacaggctcaaaggacaggacgtgcaaggtgtggaacctggtcactggacaggagatcatgagcctgggcggacaccccaacaacgtggtgagcgtgaaatactgtaactatacctcactcgtgttcactgtctctacaagctatataaaagtgtgggacattcgggactcagccaagtgtatccggaccctgacttcatcaggccaggtgacacttggcgacgcctgctccgcatcaacctctcgcactgtggcaatcccctctggggagaaccaaataaaccaaatagccttgaaccctacgggcacttttctgtacgcggcaagcgggaacgccgtgcgaatgtgggacttgaaaaggtttcagtctacaggtaagcttacgggtcacttaggtcctgtgatgtgcctgactgttgatcagatatctagcggccaggacttgatcattactggtagcaaagatcactatatcaaaatgttcgacgtcacagagggtgcactaggcacagtctccccaacacacaacttcgaaccccctcactacgatggtatcgaagcactgacgattcagggggataacctgttttcaggctcacgagacaacggtatcaagaaatgggatctcacacagaaagacctcctgcagcaggtccctaacgcccacaaagactgggtgtgtgccctgggcgtggtgccggaccatccggttttgctcagcggatgccgtgggggtattctaaaggtttggaatatggataccttcatgcccgttggagaaatgaagggccacgatagccccattaatgccatatgtgtgaattcaacgcacatcttcacagcggctgatgatagaacggttcgcatctggaaagctcgcaatctacaggatggccagatcagcgacacaggcgatctgggagaggatattgcctcgaactag

SEQ ID NO: 68663 - DNA, 4914 bp, Artificial Sequence
  derived and/or modified sequence
atgctgggcgcccccgacgagagcagcgtgagagtggccgtgagaatcagaccccagctggccaaggagaagatcgagggctgccacatctgcaccagcgtgacccccggcgagccccaggtgttcctgggcaaggacaaggccttcaccttcgactacgtgttcgacatcgacagccagcaggagcagatctacatccagtgcatcgagaagctgatcgagggctgcttcgagggctacaacgccaccgtgttcgcctacggccagaccggcgccggcaagacctacaccatgggcaccggcttcgacgtgaacatcgtggaggaggagctgggcatcatcagcagagccgtgaagcacctgttcaagagcatcgaggagaagaagcacatcgccatcaagaacggcctgcccgcccccgacttcaaggtgaacgcccagttcctggagctgtacaacgaggaggtgctggacctgttcgacaccaccagagacatcgacgccaagagcaagaagagcaacatcagaatccacgaggacagcaccggcggcatctacaccgtgggcgtgaccaccagaaccgtgaacaccgagagcgagatgatgcagtgcctgaagctgggcgccctgagcagaaccaccgccagcacccagatgaacgtgcagagcagcagaagccacgccatcttcaccatccacgtgtgccagaccagagtgtgcccccagatcgacgccgacaacgccaccgacaacaagatcatcagcgagagcgcccagatgaacgagttcgagaccctgaccgccaagttccacttcgtggacctggccggcagcgagagactgaagagaaccggcgccaccggcgagagagccaaggagggcatcagcatcaactgcggcctgctggccctgggcaacgtgatcagcgccctgggcgacaagagcaagagagccacccacgtgccctacagagacagcaagctgaccagactgctgcaggacagcctgggcggcaacagccagaccatcatgatcgcctgcgtgagccccagcgacagagacttcatggagaccctgaacaccctgaagtacgccaacagagccagaaacatcaagaacaaggtgatggtgaaccaggacagagccagccagcagatcaacgccctgagaagcgagatcaccagactgcagatggagctgatggagtacaagaccggcaagagaatcatcgacgaggagggcgtggagagcatcaacgacatgttccacgagaacgccatgctgcagaccgagaacaacaacctgagagtgagaatcaaggccatgcaggagaccgtggacgccctgagaagcagaatcacccagctggtgagcgaccaggccaaccacgtgctggccagagccggcgagggcaacgaggagatcagcaacatgatccacagctacatcaaggagatcgaggacctgagagccaagctgctggagagcgaggccgtgaacgagaacctgagaaagaacctgaccagagccaccgccagagccccctacttcagcggcagcagcaccttcagccccaccatcctgagcagcgacaaggagaccatcgagatcatcgacctggccaagaaggacctggagaagctgaagagaaaggagaagagaaagaagaagagcgtggccggcaaggaggacaacaccgacaccgaccaggagaagaaggaggagaagggcgtgagcgagagagagaacaacgagctggaggtggaggagagccaggaggtgagcgaccacgaggacgaggaggaggaggaggaggaggaggaggacgacatcgacggcggcgagagcagcgacgagagcgacagcgagagcgacgagaaggccaactaccaggccgacctggccaacatcacctgcgagatcgccatcaagcagaagctgatcgacgagctggagaacagccagaagagactgcagaccctgaagaagcagtacgaggagaagctgatgatgctgcagcacaagatcagagacacccagctggagagagaccaggtgctgcagaacctgggcagcgtggagagctacagcgaggagaaggccaagaaggtgagaagcgagtacgagaagaagctgcaggccatgaacaaggagctgcagagactgcaggccgcccagaaggagcacgccagactgctgaagaaccagagccagtacgagaagcagctgaagaagctgcagcaggacgtgatggagatgaagaagaccaaggtgagactgatgaagcagatgaaggaggagcaggagaaggccagactgaccgagagcagaagaaacagagagatcgcccagctgaagaaggaccagagaaagagagaccaccagctgagactgctggaggcccagaagagaaaccaggaggtggtgctgagaagaaagaccgaggaggtgaccgccctgagaagacaggtgagacccatgagcgacaaggtggccggcaaggtgaccagaaagctgagcagcagcgacgcccccgcccaggacaccggcagcagcgccgccgccgtggagaccgacgccagcagaaccggcgcccagcagaagatgagaatccccgtggccagagtgcaggccctgcccacccccgccaccaacggcaacagaaagaagtaccagagaaagggcctgaccggcagagtgttcatcagcaagaccgccagaatgaagtggcagctgctggagagaagagtgaccgacatcatcatgcagaagatgaccatcagcaacatggaggccgacatgaacagactgctgaagcagagagaggagctgaccaagagaagagagaagctgagcaagagaagagagaagatcgtgaaggagaacggcgagggcgacaagaacgtggccaacatcaacgaggagatggagagcctgaccgccaacatcgactacatcaacgacagcatcagcgactgccaggccaacatcatgcagatggaggaggccaaggaggagggcgagaccctggacgtgaccgccgtgatcaacgcctgcaccctgaccgaggccagatacctgctggaccacttcctgagcatgggcatcaacaagggcctgcaggccgcccagaaggaggcccagatcaaggtgctggagggcagactgaagcagaccgagatcaccagcgccacccagaaccagctgctgttccacatgctgaaggagaaggccgagctgaaccccgagctggacgccctgctgggccacgccctgcaggagaacgtggaggacagcaccgacgaggacgcccccctgaacagccccggcagcgagggcagcaccctgagcagcgacctgatgaagctgtgcggcgaggtgaagcccaagaacaaggccagaagaagaaccaccacccagatggagctgctgtacgccgacagcagcgagctggccagcgacaccagcaccggcgacgccagcctgcccggccccctgacccccgtggccgagggccaggagatcggcatgaacaccgagaccagcggcaccagcgccagagagaaggagctgagccccccccccggcctgcccagcaagatcggcagcatcagcagacagagcagcctgagcgagaagaagatccccgagcccagccccgtgaccagaagaaaggcctacgagaaggccgagaagagcaaggccaaggagcagaagcacagcgacagcggcaccagcgaggccagcctgagcccccccagcagcccccccagcagacccagaaacgagctgaacgtgttcaacagactgaccgtgagccagggcaacaccagcgtgcagcaggacaagggcatcatcaaccccttccccgccagcaagggcatcagagccttccccctgcagtgcatccacatcgccgagggccacaccaaggccgtgctgtgcgtggacagcaccgacgacctgctgttcaccggcagcaaggacagaacctgcaaggtgtggaacctggtgaccggccaggagatcatgagcctgggcggccaccccaacaacgtggtgagcgtgaagtactgcaactacaccagcctggtgttcaccgtgagcaccagctacatcaaggtgtgggacatcagagacagcgccaagtgcatcagaaccctgaccagcagcggccaggtgaccctgggcgacgcctgcagcgccagcaccagcagaaccgtggccatccccagcggcgagaaccagatcaaccagatcgccctgaaccccaccggcaccttcctgtacgccgccagcggcaacgccgtgagaatgtgggacctgaagagattccagagcaccggcaagctgaccggccacctgggccccgtgatgtgcctgaccgtggaccagatcagcagcggccaggacctgatcatcaccggcagcaaggaccactacatcaagatgttcgacgtgaccgagggcgccctgggcaccgtgagccccacccacaacttcgagcccccccactacgacggcatcgaggccctgaccatccagggcgacaacctgttcagcggcagcagagacaacggcatcaagaagtgggacctgacccagaaggacctgctgcagcaggtgcccaacgcccacaaggactgggtgtgcgccctgggcgtggtgcccgaccaccccgtgctgctgagcggctgcagaggcggcatcctgaaggtgtggaacatggacaccttcatgcccgtgggcgagatgaagggccacgacagccccatcaacgccatctgcgtgaacagcacccacatcttcaccgccgccgacgacagaaccgtgagaatctggaaggccagaaacctgcaggacggccagatcagcgacaccggcgacctgggcgaggacatcgccagcaactag

SEQ ID NO: 68664 - protein, 1674 aa, Artificial Sequence
  derived and/or modified sequence
MLGAPDESSVRVAVRIRPQLAKEKIEGCHICTSVTPGEPQVFLGKDKAFTFDYVFDIDSQQEQIYIQCIEKLIEGCFEGYNATVFAYGQTGAGKTYTMGTGFDVNIVEEELGIISRAVKHLFKSIEEKKHIAIKNGLPAPDFKVNAQFLELYNEEVLDLFDTTRDIDAKSKKSNIRIHEDSTGGIYTVGVTTRTVNTESEMMQCLKLGALSRTTASTQMNVQSSRSHAIFTIHVCQTRVCPQIDADNATDNKIISESAQMNEFETLTAKFHFVDLAGSERLKRTGATGERAKEGISINCGLLALGNVISALGDKSKRATHVPYRDSKLTRLLQDSLGGNSQTIMIACVSPSDRDFMETLNTLKYANRARNIKNKVMVNQDRASQQINALRSEITRLQMELMEYKTGKRIIDEEGVESINDMFHENAMLQTENNNLRVRIKAMQETVDALRSRITQLVSDQANHVLARAGEGNEEISNMIHSYIKEIEDLRAKLLESEAVNENLRKNLTRATARAPYFSGSSTFSPTILSSDKETIEIIDLAKKDLEKLKRKEKRKKKRLQKLEESNREERSVAGKEDNTDTDQEKKEEKGVSERENNELEVEESQEVSDHEDEEEEEEEEEDDIDGGESSDESDSESDEKANYQADLANITCEIAIKQKLIDELENSQKRLQTLKKQYEEKLMMLQHKIRDTQLERDQVLQNLGSVESYSEEKAKKVRSEYEKKLQAMNKELQRLQAAQKEHARLLKNQSQYEKQLKKLQQDVMEMKKTKVRLMKQMKEEQEKARLTESRRNREIAQLKKDQRKRDHQLRLLEAQKRNQEVVLRRKTEEVTALRRQVRPMSDKVAGKVTRKLSSSDAPAQDTGSSAAAVETDASRTGAQQKMRIPVARVQALPTPATNGNRKKYQRKGLTGRVFISKTARMKWQLLERRVTDIIMQKMTISNMEADMNRLLKQREELTKRREKLSKRREKIVKENGEGDKNVANINEEMESLTANIDYINDSISDCQANIMQMEEAKEEGETLDVTAVINACTLTEARYLLDHFLSMGINKGLQAAQKEAQIKVLEGRLKQTEITSATQNQLLFHMLKEKAELNPELDALLGHALQDLDSVPLENVEDSTDEDAPLNSPGSEGSTLSSDLMKLCGEVKPKNKARRRTTTQMELLYADSSELASDTSTGDASLPGPLTPVAEGQEIGMNTETSGTSAREKELSPPPGLPSKIGSISRQSSLSEKKIPEPSPVTRRKAYEKAEKSKAKEQKHSDSGTSEASLSPPSSPPSRPRNELNVFNRLTVSQGNTSVQQDKSDESDSSLSEVHRSSRRGIINPFPASKGIRAFPLQCIHIAEGHTKAVLCVDSTDDLLFTGSKDRTCKVWNLVTGQEIMSLGGHPNNVVSVKYCNYTSLVFTVSTSYIKVWDIRDSAKCIRTLTSSGQVTLGDACSASTSRTVAIPSGENQINQIALNPTGTFLYAASGNAVRMWDLKRFQSTGKLTGHLGPVMCLTVDQISSGQDLIITGSKDHYIKMFDVTEGALGTVSPTHNFEPPHYDGIEALTIQGDNLFSGSRDNGIKKWDLTQKDLLQQVPNAHKDWVCALGVVPDHPVLLSGCRGGILKVWNMDTFMPVGEMKGHDSPINAICVNSTHIFTAADDRTVRIWKARNLQDGQISDTGDLGEDIASN
